United States Patent Application Publication US 2011/0183924 A1 - sequence listing, part 121

SEQ ID NO: 345772 - DNA, 3309 bp, Homo sapiens
ataatgatgaacctctcctgagtggatctggtgatgtatccaaagaatgtgcagaaaaaattcttgaaacatggggagaactgttgtcaaaatggcatctcaacttgaatgtgagaccgaagcagttgtcatccttagtaagaaacggtgtccctgaagctcttcgaggagaagtctggcagctgctagcaggctgtcataacaatgaccacctggtagagaaataccgcattcttatcacaaaggagtctccccaggacagtgctatcacccgggatattaaccgaacattcccagcccatgactactttaaggacacaggaggagatggacaagattccttatataaaatatgcaaggcttattctgtgtatgatgaagagattggttattgccagggccagtcatttcttgctgctgtgctccttctccatatgcctgaagaacaggcattcagtgttctggtcaagatcatgtttgactatgggctcagggaacttttcaagcaaaacttcgaagatttgcattgcaaattttaccagttggagcgcctcatgcaggaatacattcctgacctgtacaaccacttcctggatataagccttgaagcacacatgtatgcctcccagtggtttcttactcttttcactgcaaaattccctctctacatggtcttccatatcatcgacctgcttttatgtgagggaataagtgttatttttaatgtcgcccttggattattaaagacttcgaaagatgacctgctgttgacagactttgaaggtgccttgaagttctttagggttcagcttcctaagagataccgctcagaagaaaatgcaaaaaaactaatggaattagcctgcaacatgaagattagtcagaagaagttgaaaaaatacgagaaagaatatcacaccatgagggaacagcaggcccagcaagaagaccccatcgagcgatttgagcgggagaataggcgtctacaagaagctaacatgaggttggaacaggaaaacgatgacttagcccatgagctggtgaccagcaagattgcactacggaaggacctggataacgctgaggaaaaggcagatgctctgaataaggagctgctgatgaccaaacagaagttgattgatgcagaagaagagaaaagacggctggaagaagagtctgctcagttaaaagaaatgtgccgtcgggaactcgacaaggcagaatctgagattaaaaaaaacagttctatcattggtgactataagcagatttgttctcagttgagtgaaagattggagaagcagcagacagccaataaggtggaaattgagaaaattcggcaaaaagtggatgactgtgagcggtgccgggaatttttcaacaaagaagggcgtgtaaaaggcataagctcaaccaaggaggttttagatgaggacacggatgaagagaaagagacgctcaagaaccagctgagagaaatggagctagaactggcacagaccaaactccagctggtggaggccgagtgtaagatacaggacttggaacaccatttagggcttgccctcaatgaggtgcaggcagccaagaagacgtggtttaaccgaacactgagctccataaagacagcaaccggggttcaagggaaagagacttgctgagagcagctgccgcctcccgacaccttcagaaaacacgacaccttttgttgccttctttggccagatgtgtgattctgtgacttgtcccaggaccagaatgtacctaagtcagatccatagacgcatgttggtaggtcactggaccagagcttgtgaagcaggcaacctctggggtaagactactgatactaacaggcctgctagctcagccgacgctctggacactctagaaatcactcctcagtgtgacctcccaggcctcttccccgtgtacgtcaacacctcacccagcctaaaggctgagtttacatgatcagagttaggggatccttcagtctgttgattttttttctaaaccttttttttttaatatacatatatatatatatatatatatatatatatatatatatagtgggggtggggcaagggatcagaaattcaaataattcttttctgcttcaatgccagcagaaggtcccccaggtagacatggagaagcactttgttttaaataggagggtttcatagttgcatctgaagccacctggttctgttaaactgtatcgtgcaggttttgggtttggcattattcatgtttctgatcaattctatgcaactctcatagttcctgttactttttagcattagctgccaaatgacttcaaaaggctggggtgggtgacttgactgtgagactggattataacatggacaaatcttattttgcttaatgtgtttgtgtgtgtgtgtgtgtgtgtgtgtgtatgtatatatatatatataaatatctttcccaatatgccccgttgacagtgtttaaattccagactaggactgctgatctgcacaatttaattatgtggttattcgagcacttaatttcactcaaggttcattgggctctgctctcctccctgccattacgggagctgtggacagagctccctcacttcaagattcctagtgtttttgcacaacaggttgtccaagtgagaaagactgagttgcgtgtctgtaaatgtctgcgcagggtgcacatgctgcgaggtctccatcctccgggcctgtccctcccagatgggctgggcctttgggccctcctcagagtatgcctgggtacaaacctcactgttcagatgggctgtaagttctcacttcaaagctatggaatggattttagcacctttaaaaaaaaaaaaaaactttgacttttaatttatatagtgatatgctgacaggctgacacgcagatggttttgtcctgttttctgcgttcagtgttgaggcggctgcttacaagaggcactggttttgtatataaagacactcgggttgttttgtagctctttttcttattggctgtactaacgcttgctgaggttatctgtaataagggaggtaacaagtggcaaccccctccccaccaaccatcccctttgctgctttctgtgtctttcttgttcagttaccaaaatagctgtaagcctatctaatgctaggtgtgtggacattgtgctaaggtagtttcagtgtgtcaactttatgaattgaaatataaaccagtaaaattgtattactgtttcttttgttggttttattttaacagcatattgattaaatattttggtacaaacaaacagcattg

SEQ ID NO: 345773 - DNA, 2725 bp, Homo sapiens
atctccaacagaactctaaacgcattgagatgtttgggtcctaaggctttaactgacagtattagaatgaacaccctacagacatctccaacagaactctaaacgcattgagaatttggggtcctgggcttataccctactctgatgatttccctccaaaaaaataggaaataccacatccataatgactgagattgcccaggccaccagaagtcttggtcttcagtgcaggcactgaagcacccactactttctaatacttcttaatttaccctatgatttatcctacagattagtcagaagaagttgaaaaaatacgagaaagaatatcacaccatgagggaacagcaggcccagcaagaagaccccatcgagcgatttgagcgggagaataggcgtctacaagaagctaacatgaggttggaacaggaaaacgatgacttagcccatgagctggtgaccagcaagattgcactacggaaggacctggataacgctgaggaaaaggcagatgctctgaataaggagctgctgatgaccaaacagaagttgattgatgcagaagaagagaaaagacggctggaagaagagtctgctcagttaaaagaaatgtgccgtcgggaactcgacaaggcagaatctgagattaaaaaaaacagttctatcattggtgactataagcagatttgttctcagttgagtgaaagattggagaagcagcagacagccaataaggtggaaattgagaaaattcggcaaaaagtggatgactgtgagcggtgccgggaatttttcaacaaagaagggcgtgtaaaaggcataagctcaaccaaggaggttttagatgaggacacggatgaagagaaagagacgctcaagaaccagctgagagaaatggagctagaactggcacagaccaaactccagctggtggaggccgagtgtaagatacaggacttggaacaccatttagggcttgccctcaatgaggtgcaggcagccaagaagacgtggtttaaccgaacactgagctccataaagacagcaaccggggttcaagggaaagagacttgctgagagcagctgccgcctcccgacaccttcagaaaacacgacaccttttgttgccttctttggccagatgtgtgattctgtgacttgtcccaggaccagaatgtacctaagtcagatccatagacgcatgttggtaggtcactggaccagagcttgtgaagcaggcaacctctggggtaagactactgatactaacaggcctgctagctcagccgacgctctggacactctagaaatcactcctcagtgtgacctcccaggcctcttccccgtgtacgtcaacacctcacccagcctaaaggctgagtttacatgatcagagttaggggatccttcagtctgttgattttttttctaaaccttttttttttaatatacatatatatatatatatatatatatatatatatatatatagtgggggtggggcaagggatcagaaattcaaataattcttttctgcttcaatgccagcagaaggtcccccaggtagacatggagaagcactttgttttaaataggagggtttcatagttgcatctgaagccacctggttctgttaaactgtatcgtgcaggttttgggtttggcattattcatgtttctgatcaattctatgcaactctcatagttcctgttactttttagcattagctgccaaatgacttcaaaaggctggggtgggtgacttgactgtgagactggattataacatggacaaatcttattttgcttaatgtgtttgtgtgtgtgtgtgtgtgtgtgtgtgtatgtatatatatatatataaatatctttcccaatatgccccgttgacagtgtttaaattccagactaggactgctgatctgcacaatttaattatgtggttattcgagcacttaatttcactcaaggttcattgggctctgctctcctccctgccattacgggagctgtggacagagctccctcacttcaagattcctagtgtttttgcacaacaggttgtccaagtgagaaagactgagttgcgtgtctgtaaatgtctgcgcagggtgcacatgctgcgaggtctccatcctccgggcctgtccctcccagatgggctgggcctttgggccctcctcagagtatgcctgggtacaaacctcactgttcagatgggctgtaagttctcacttcaaagctatggaatggattttagcacctttaaaaaaaaaaaaaaactttgacttttaatttatatagtgatatgctgacaggctgacacgcagatggttttgtcctgttttctgcgttcagtgttgaggcggctgcttacaagaggcactggttttgtatataaagacactcgggttgttttgtagctctttttcttattggctgtactaacgcttgctgaggttatctgtaataagggaggtaacaagtggcaaccccctccccaccaaccatcccctttgctgctttctgtgtctttcttgttcagttaccaaaatagctgtaagcctatctaatgctaggtgtgtggacattgtgctaaggtagtttcagtgtgtcaactttatgaattgaaatataaaccagtaaaattgtattactgtttcttttgttggttttattttaacagcatattgattaaatattttggtacaaacaaacagcattg

SEQ ID NO: 345774 - DNA, 3289 bp, Homo sapiens
ataatgatgaacctctcctgagtggatctggtgatgtatccaaagaatgtgcagaaaaaattcttgaaacatggggagaactgttgtcaaaatggcatctcaacttgaatgtgagaccgaagcagttgtcatccttagtaagaaacggtgtccctgaagctcttcgaggagaagtctggcagctgctagcaggctgtcataacaatgaccacctggtagagaaataccgcattcttatcacaaaggagtctccccaggacagtgctatcacccgggatattaaccgaacattcccagcccatgactactttaaggacacaggaggagatggacaagattccttatataaaatatgcaaggcttattctgtgtatgatgaagagattggttattgccagggccagtcatttcttgctgctgtgctccttctccatatgcctgaagaacaggcattcagtgttctggtcaagatcatgtttgactatgggctcagggaacttttcaagcaaaacttcgaagatttgcattgcaaattttaccagttggagcgcctcatgcaggaatacattcctgacctgtacaaccacttcctggatataagccttgaagcacacatgtatgcctcccagtggtttcttactcttttcactgcaaaattccctctctacatggtcttccatatcatcgacctgcttttatgtgagggaataagtgttatttttaatgtcgcccttggattattaaagacttcgaaagatgacctgctgttgacagactttgaaggtgccttgaagttctttagggttcagcttcctaagagataccgctcagaagaaaatgcaaaaaaactaatggaattagcctgcaacatgaagattagtcagaagaagttgaaaaaatacgagaaagaatatcacaccatgagggaacagcaggcccagcaagaagaccccatcgagcgatttgagcgggagaataggcgtctacaagaagctaacatgaggttggaacaggaaaacgatgacttagcccatgagctggtgaccagcaagattgcactacggaaggacctggataacgctgaggaaaaggcagatgctctgaataaggagctgctgatgaccaaacagaagttgattgatgcagaagaagagaaaagacggctggaagaagagtctgctcagttaaaagaaatgtgccgtcgggaactcgacaaggcagaatctgagattaaaaaaaacagttctatcattggtgactataagcagatttgttctcagttgagtgaaagattggagaagcagcagacagccaataaggtggaaattgagaaaattcggcaaaaagtggatgactgtgagcggtgccgggaatttttcaacaaagaagggcgtgtaaaaggcataagctcaaccaaggaggttttagatgaggacacggatgaagagaaagagacgctcaagaaccagctgagagaaatggagctagaactggcacagaccaaactccagctggtggaggccgagtgtaagatacaggacttggaacaccatttagggcttgccctcaatgaggtgcaggcagccaagaagacgtggtttaaccgaacactgagctccataaagacagcaaccggggttcaagggaaagagacttgctgagagcagctgccgcctcccgacaccttcagaaaacacgacaccttttgttgccttctttggccagatgtgtgattctgtgacttgtcccaggaccagaatgtacctaagtcagatccatagacgcatgttggtaggtcactggaccagagcttgtgaagcaggcaacctctggggtaagactactgatactaacaggcctgctagctcagccgacgctctggacactctagaaatcactcctcagtgtgacctcccaggcctcttccccgtgtacgtcaacacctcacccagcctaaaggctgagtttacatgatcagagttaggggatccttcagtctgttgattttttttctaaaccttttttttttaatatacatatatatatatatatatattgggggtggggcaagggatcagaaattcaaataattcttttctgcttcaatgccagcagaaggtcccccaggtagacatggagaagcactttgttttaaataggagggtttcatagttgcatctgaagccacctggttctgttaaactgtatcgtgcaggttttgggtttggcattattcatgtttctgatcaattctatgcaactctcatagttcctgttactttttagcattagctgccaaatgacttcaaaaggctggggtgggtgacttgactgtgagactggattataacatggacaaatcttattttgcttaatgtgtttgtgtgtgtgtgtgtgtgtgtgtgtgtatgtatatatatatatataaatatctttcccaatatgccccgttgacagtgtttaaattccagactaggactgctgatctgcacaatttaattatgtggttattcgagcacttaatttcactcaaggttcattgggctctgctctcctccctgccattacgggagctgtggacagagctccctcacttcaagattcctagtgtttttgcacaacaggttgtccaagtgagaaagactgagttgcgtgtctgtaaatgtctgcgcagggtgcacatgctgcgaggtctccatcctccgggcctgtccctcccagatgggctgggcctttgggccctcctcagagtatgcctgggtacaaacctcactgttcagatgggctgtaagttctcacttcaaagctatggaatggattttagcacctttaaaaaaaaaaaaaaactttgacttttaatttatatagtgatatgctgacaggctgacacgcagatggttttgtcctgttttctgcgttcagtgttgaggcggctgcttacaagaggcactggttttgtatataaagacactcgggttgttttgtagctctttttcttattggctgtactaacgcttgctgaggttatctgtaataagggaggtaacaagtggcaaccccctccccaccaaccatcccctttgctgctttctgtgtctttcttgttcagttaccaaaatagctgtaagcctatctaatgctaggtgtgtggacattgtgctaaggtagtttcagtgtgtcaactttatgaattgaaatataaaccagtaaaattgtattactgtttcttttgttggttttattttaacagcatattgattaaatattttggtacaaacaaacagcattg

SEQ ID NO: 345775 - DNA, 1761 bp, Homo sapiens
  misc_feature (7)..(7): n is a, c, g, or t
cagtttntgccgcccgtttctctagaggatccccggcggcaagaggaggaacggcgccaagaagacgtggtttaaccgaacactgagctccataaagacagcaaccggggttcaagggaaagagacttgctgagagcagctgccgcctcccgacaccttcagaaaacacgacaccttttgttgccttctttggccagatgtgtgattctgtgacttgtcccaggaccagaatgtacctaagtcagatccatagacgcatgttggtaggtcactggaccagagcttgtgaagcaggcaacctctggggtaagactactgatactaacaggcctgctagctcagccgacgctctggacactctagaaatcactcctcagtgtgacctcccaggcctcttccccgtgtacgtcaacacctcacccagcctaaaggctgagtttacatgatcagagttaggggatccttcagtctgttgattttttttctaaaccttttttttttaatatacatatatatatatatatatattgggggtggggcaagggatcagaaattcaaataattcttttctgcttcaatgccagcagaaggtcccccaggtagacatggagaagcactttgttttaaataggagggtttcatagttgcatctgaagccacctggttctgttaaactgtatcgtgcaggttttgggtttggcattattcatgtttctgatcaattctatgcaactctcatagttcctgttactttttagcattagctgccaaatgacttcaaaaggctggggtgggtgacttgactgtgagactggattataacatggacaaatcttattttgcttaatgtgtttgtgtgtgtgtgtgtgtgtgtgtgtgtatgtatatatatatatataaatatctttcccaatatgccccgttgacagtgtttaaattccagactaggactgctgatctgcacaatttaattatgtggttattcgagcacttaatttcactcaaggttcattgggctctgctctcctccctgccattacgggagctgtggacagagctccctcacttcaagattcctagtgtttttgcacaacaggttgtccaagtgagaaagactgagttgcgtgtctgtaaatgtctgcgcagggtgcacatgctgcgaggtctccatcctccgggcctgtccctcccagatgggctgggcctttgggccctcctcagagtatgcctgggtacaaacctcactgttcagatgggctgtaagttctcacttcaaagctatggaatggattttagcacctttaaaaaaaaaaaaaaactttgacttttaatttatatagtgatatgctgacaggctgacacgcagatggttttgtcctgttttctgcgttcagtgttgaggcggctgcttacaagaggcactggttttgtatataaagacactcgggttgttttgtagctctttttcttattggctgtactaacgcttgctgaggttatctgtaataagggaggtaacaagtggcaaccccctccccaccaaccatcccctttgctgctttctgtgtctttcttgttcagttaccaaaatagctgtaagcctatctaatgctaggtgtgtggacattgtgctaaggtagtttcagtgtgtcaactttatgaattgaaatataaaccagtaaaattgtattactgtttcttttgttggttttattttaacagcatattgattaaatattttggtacaaacaaacagcattg

SEQ ID NO: 345776 - DNA, 908 bp, Homo sapiens
ataatgatgaacctctcctgagtggatctggtgatgtatccaaagaatgtgcagaaaaaattcttgaaacatggggagaactgttgtcaaaatggcatctcaacttgaatgtgagaccgaagcagttgtcatccttagtaagaaacggtgtccctgaagctcttcgaggagaagtctggcagctgctagcaggctgtcataacaatgaccacctggtagagaaataccgcattcttatcacaaaggagtctccccaggacagtgctatcacccgggatattaaccgaacattcccagcccatgactactttaaggacacaggaggagatggacaagattccttatataaaatatgcaaggcttattctgtgtatgatgaagagattggttattgccagggccagtcatttcttgctgctgtgctccttctccatatgcctgaagaacaggcattcagtgttctggtcaagatcatgtttgactatgggctcagggaacttttcaagcaaaacttcgaagatttgcattgcaaattttaccagttggagcgcctcatgcaggaatacattcctgacctgtacaaccacttcctggatataagccttgaagcacacatgtatgcctcccagtggtttcttactcttttcactgcaaaattccctctctacatggtcttccatatcatcgacctgcttttatgtgagggaataagtgttatttttaatgtcgcccttggattattaaagacttcgaaagatgacctgctgttgacagactttgaaggtgccttgaagttctttagggttcagcttcctaagagataccgctcagaagaaaatgcaaaaaaactaatggaattagcctgcaacatgaagcctacccatcatgaggacaaccaggatgaagac

SEQ ID NO: 345777 - DNA, 450 bp, Homo sapiens
actaagtatacatacaatttgtaataaaattttaagttataaatataatggatgcacactgttacttcttaaaataagaccataacattatacaagctgctggtttctttgcttttctggtcactttctccacctctacctaatcaggtcccaacattgtgcaaagacttctcctcctctttgtccccttggcacacacactcacataagaatcagctaagagaatagtttgtcaggtacttttcctcttaaaacctaacatctgaggaacgtggattttaattattgatgatgtgtgtggagtttcagtgtcacgcattttcttctgagttacagaatcctctgggggatatttcacaatacctttgtgtgtagttgctatgaaggaattaacctgtaaacctctgggatgattgaattgtgggtcaactaaaatgcaatctagctaag

SEQ ID NO: 345778 - DNA, 312 bp, Homo sapiens
cgattagtcatattactgttttccagtaagtgataagtcatttttctgtttgtgctttcaagatttttatgttgtatttggttttcagaagtttgagtttgactataaggtatcaagatttacttctctttgtttatttggagtttcttgagattcttggatctgtaggctaatgtttttcttttcttttcttttcttttctttttcttttaaacagacagggtctttttctgtttcccaggctcaagagatcctcccacctcagcctctggagtagctggttacatatcaccacgctgggctaatttttta

SEQ ID NO: 345779 - DNA, 484 bp, Homo sapiens
agcaaggcggtgaacaggctgttcggcgtggaagcctctggaaggagaatctggatccgcagggctgggggtcgctgtctctggcgtgacgacctcctggagcctgccaccaagcccagcatcgctggcaagttcaaggtgctagagcctcccatgctgggccacgacctgagactggccctgtgcttggccaacctcacctcccgggcccagcgggtgagggtcaacctgagcggtgccaccatcctctatacccgcaagccagtggcagagatcctgcatgaatcccacgccgtgaggctggggccgcaagaagagaagagaatcccaattacaatatcttactctaagtataaagaagacctgacagaggacaagaagatcctgttggctgccatgtgccttgtcaccaaaggagagaagcttctggtggagaaggacattactctagaggacttcatcaccatcaaggtgacctcagcct

SEQ ID NO: 345780 - DNA, 275 bp, Homo sapiens
actgtgctacgcaagggcatcaggtccgcccactgctccatctccagcacctaaatggtagcactcactcactcaggctcagccagaccaagtgcctgcctgaaccgcatctacaagccagtattttaggaaattctgttctgtgtcaaagcagcttcactgtagtctactcctgtgtttccccaaattaaacaaagaacagaggtcatgtccgtctggagctagggcggtttattttgtttgtttgtttgttttttcgagacaggatctcgctc

SEQ ID NO: 345781 - DNA, 431 bp, Homo sapiens
gaagttagcatctattatagccatggatgcattttctgttccatctgttacataaaacatatctctatattaaattgttttctttactcttcgtatctgttaacttccctctaatttcttcagtgtcatagtgtattcattttgattgttaatttgttcattaacttatctattcatttattcatttgtttatttaacaaatgatttccatatataagtttacaacagttaacaaagtctgtacctccttacggtttacattctggtacagagagaaatacaataaataaatgaataaatgcatattaggcagtgatatgtgagtgctaatgagacaatacagcattcagacattcgcaatgcatattggttggggataagatttactttttttcaggccgggcgcggtggctcacaactgtaatcccagc

SEQ ID NO: 345782 - DNA, 655 bp, Homo sapiens
cttgggggattatgggccttggtaatcacggaggggaagaagctatgtttatgaggtcctttcaatatttatccaacgcccacagggagcagaggctttgacctcagtggactggatgtgggttatagaacatgaggagttaccctcatcctcagagagcttatggtataaggtgggcttgctaagactcctaaacattcggaaacactgttcctgtcaggtgacacgtgcaaatgcctggaggtgggaaggatctcagcatagtcaaagaacattcacaggtccacgtggctgaattagagggttcctgagtgtaagattctccccggggcctgaaagcttaaggagatgcatcactcctcccttctcaggcccagtcccagggcgcaaggctacttgcgtcagcagcgtgccgaagcaagatagcggaatcaggaagagagccggccggaagacacctgccctggccggaagatacgtacccctgaagatcgagaaagaggccatccgggtatcacgtagcagtttcgtacgactaggagacttcctgttacaggagactatgaaacctttgttccgtcctcacttggggctgacgccattttaggcctcagcccgcctgcatccaggcgctcattaaaacagcatgttgctc

SEQ ID NO: 345783 - DNA, 594 bp, Homo sapiens
catttttttaaaaaaagtaattagattcctagatcatagtgacttgatgtatcattaaaaaaaagtcatgcataatacaacactcactttgtaaggaaagctagctcatttgtagacaggtatccagagttaagagcttcctcgaatttgagggaaggatatttaaatctcattagtaaccaaatcaaaatttttagagtcttactcataagtagtttctatatgtctgctaactggcctagtcaaagccagaggtagttatctatttacttatctagatatataattttatgtctactttaaatagttcttttctatgtagcaggcatagagaactttatccaaactgaatcttgtatgtacatatgtatgcatttggctgtggattcttcataattaatggatggagacaacccaaatgtaaaaagttttagtaaatactgatgcaaaaagtgtagtaggctggtatttttgacctaagcaaaaaagtaattaacataaagagagatattcattgattttttatagtaaaaatttcaaatgacctaaatatccaacactatgggaaatggtttaatacattatggctcacta

SEQ ID NO: 345784 - DNA, 292 bp, Homo sapiens
cattccacatacattatctgatttaacccctctataatgttttaaagatcaagaaactgttactcaaggaacttaagtaaggaacctgctcaagctcccagagctagtaaataacagatccaaaattaaaatagtctcccaattctggatccccaaacctttctactgaacatactgccttcataaaatctcctaccaaattattttaattaagaatgctggatgagcatggtggcatacacctgtaatcctaacactttgggaggccaaggcaggaggatcacttgagccc

SEQ ID NO: 345785 - DNA, 1131 bp, Homo sapiens
aatggcccggagttgctgcctcgcgtggccatgctgcgtcttctgacttgggtgatcgggacgggctcgcctcgcttacaggttctggcttcagacaccctgaccaccctgtgtgccagcagcagtggtgatgatggctgtgcctttgcagagcaggaggaggtggacgtgctgctctgtgccttgcagtccccgtgtgccagcgtgcgggaaaccgtgctccgggggctgatggaactccacatggtattgccagcacctgatactgatgagaagaatggcctgaaccttctgcggagactctgggtggtcaagtttgacaaggaggaggagatccggaagctggctgagaggctctggtcaatgatgggcctagacctgcagccagacctctgctccttgctgattgacgacgtgatctatcatgaggcggctgtaaggcaggcaggggccgaagccctctcccaagcagtggcacgttaccagcggcaggcggcggaggttatgggcaggctcatggagatttaccaggaaaagctctaccggccgcccccagtgctggatgctttgggacgagttatttcagaatctcctccagatcagtgggaagccaggtgtggcttggcgttggccctcaacaagctctcccagtatttggacagctctcaggtgaagccactctttcagttttttgtccctgatgccctcaatgaccgacacccagatgtccggaagtgcatgttggatgcagccctcgcaacgctcaacactcatgggaaggagaacgtcaactcgctgttgccagtattcgaggagttcctgaagaacgcgcccaatgatgccagctatgatgctgtgcgacagagtgtggtggtcctgatgggctctctggccaagcacctggacaagagtgaccccaaagtgaagcccattgttgccaagctcatcgctgccctctccaccccctcccagcaggtccaggagtccgtagccagctgcttgccaccccttgtgccagccatcaaggaggatgctggagggatgatccagaggcttatgcagcagctgctggagtcagacaagtacgcagagcgcaaaggggccgcctatggcctggcgggcctggtgaag

SEQ ID NO: 345786 - DNA, 1271 bp, Homo sapiens
gggctggctggccaatggctccactgcccaccctgtggttttccctgtggcggactgtggcaatggtcgggtgggcatagtcagcctgggtgcccgcaagaacctctcagaacgctgggatgcctactgcttccgtgtgccagcgtgcgggaaaccgtgctccgggggctgatggaactccacatggtattgccagcacctgatactgatgagaagaatggcctgaaccttctgcggagactctgggtggtcaagtttgacaaggaggaggagatccggaagctggctgagaggctctggtcaatgatgggcctagacctgcagccagacctctgctccttgctgattgacgacgtgatctatcatgaggcggctgtaaggcaggcaggggccgaagccctctcccaagcagtggcacgttaccagcggcaggcggcggaggttatgggcaggctcatggagatttaccaggaaaagctctacgtgagtgacctgtgcagccctgatgcagtctgggtgtgtgcggttgggtgggtctctgctcaccccgctactgctccagacaggaatctcggggctcacggtggctcagggtagctgcggctagtttcctgcctcacaatcctggtgcccaggtcattgatctgcccgttgcaaagcatttaccaacttgtctgttgcagcggccgcccccagtgctggatgctttgggacgagttatttcagaatctcctccagatcagtgggaagccaggtgtggcttggcgttggccctcaacaagctctcccagtatttggacagctctcaggtgaagccactctttcagttttttgtccctgatgccctcaatgaccgacacccagatgtccggaagtgcatgttggatgcagccctcgcaacgctcaacactcatgggaaggagaacgtcaactcgctgttgccagtattcgaggagttcctgaagaacgcgcccaatgatgccagctatgatgctgtgcgacagagtgtggtggtcctgatgggctctctggccaagcacctggacaagagtgaccccaaagtgaagcccattgttgccaagctcatcgctgccctctccaccccctcccagcaggtccaggagtccgtagccagctgcttgccaccccttgtgccagccatcaaggaggatgctggagggatgatccagaggcttatgcagcagctgctggagtcagacaagtacgcagagcgcaaaggggccgcctatggcctggcgggcctggtgaag

SEQ ID NO: 345787 - DNA, 551 bp, Homo sapiens
gagaacgtcaactcgctgttgccagtattcgaggagttcctgaagaacgcgcccaatgatgccagctatgatgctgtgcgacagagtgtggtggtcctgatgggctctctggccaagcacctggacaagagtgaccccaaagtgaagcccattgttgccaagctcatcgctgccctctccaccccctcccagcaggtacctgccatctggcctgggacccacatgtcggttagagaattgggacccggctgtggttaggcggtgggatactaggggtggagttggacaatcagggccctgaaagcccagttcttgttaaggattcaccccctctcgcaggggagagcctggtttatagtcaggaacactcctggagagggagtttctttgttactttgttctagtagacctcccagatagtttcatttttttctactcacctggtttatagtgaagaatgcccctggagagggagtttctttgttactttgttctaatagacctcctagatagttccattttttctattcactaacgtgcactgggaatcc

SEQ ID NO: 345788 - DNA, 1071 bp, Homo sapiens
gggctggctggccaatggctccactgcccaccctgtggttttccctgtggcggactgtggcaatggtcgggtgggcatagtcagcctgggtgcccgcaagaacctctcagaacgctgggatgcctactgcttccgtgtgccagcgtgcgggaaaccgtgctccgggggctgatggaactccacatggtattgccagcacctgatactgatgagaagaatggcctgaaccttctgcggagactctgggtggtcaagtttgacaaggaggaggagatccggaagctggctgagaggctctggtcaatgatgggcctagacctgcagccagacctctgctccttgctgattgacgacgtgatctatcatgaggcggctgtaaggcaggcaggggccgaagccctctcccaagcagtggcacgttaccagcggcaggcggcggaggttatgggcaggctcatggagatttaccaggaaaagctctaccggccgcccccagtgctggatgctttgggacgagttatttcagaatctcctccagatcagtgggaagccaggtgtggcttggcgttggccctcaacaagctctcccagtatttggacagctctcaggtgaagccactctttcagttttttgtccctgatgccctcaatgaccgacacccagatgtccggaagtgcatgttggatgcagccctcgcaacgctcaacactcatgggaaggagaacgtcaactcgctgttgccagtattcgaggagttcctgaagaacgcgcccaatgatgccagctatgatgctgtgcgacagagtgtggtggtcctgatgggctctctggccaagcacctggacaagagtgaccccaaagtgaagcccattgttgccaagctcatcgctgccctctccaccccctcccagcaggtccaggagtccgtagccagctgcttgccaccccttgtgccagccatcaaggaggatgctggagggatgatccagaggcttatgcagcagctgctggagtcagacaagtacgcagagcgcaaaggggccgcctatggcctggcgggcctggtgaag

SEQ ID NO: 345789 - DNA, 270 bp, Homo sapiens
gagataggaaattcaatagtgcatgaaaaggacttaacacagtcagattcaatgctcaagacacattaggtttttttctccttctgattatatcattccaagttcaaagattttattttcttctgcctaccaaagttcaacctcctaagtaggttttcttctttgagcatttcagcgtttgttatacacacatctttccagcttctgttcccctgaactctggacacactatcctaggaacacactctttactttactatggcctttgtc

SEQ ID NO: 345790 - DNA, 1184 bp, Homo sapiens
acctggggccccggtgaggttctagcgtgagccccggaaccccaagacaggggtacccggaacgcgcgtgaggaggaggccgctgctaggggaatacccccagccggggtcgtctcgcgggcagtggtggtcagaaggcttttctagcctggatgccacacccaccgggacactcccatggcgccggctgtttcgtttttgctgcccagctatgtcgcggctgcggcccagcgagcgctcccatgttgtcacctggcgctgtggagccgcgggtggagtcgtagctttccaagccaccgccctctctagacatcaggttgaaggagggaattgtcaaccagccgcttgccacggaaccggcctcccccttttaaatgaagcacacaacttccgagcatttcgcggagacccttgaagaggaggcccagggtcccggtggggctggaccctgcccgccacccgcgcttcgtgtggtcgctcccccaaccaggcgggaccggagcctcctatcaaaccggacgatgacagacagactcttttaaccttagatgagaaatggacaaaatggagcttgtgattctgccctaactttcgggagtggcctattctgtggcttcaacctagaaatttcttttccttttcatgtttaggactttactcctttctgaaggggcaggatgggaaggggattaacctgtcctagagacagactgaggagcactaaagaagagcagctcatgtccattcaccccgggttaacaatgcagtttttaccctaatgattctccagtggggcagggccaggaatgacgtccttatggcatgattccaaactttaagtttttagaaatgtccatcagttgttctcttttaagtgaagtggaggtcgttgctggtgggaatgatccctaacttggagataagggaggatggacgactcatgatttctgccctagcagctaaaagtcatccctgcaacaaaattcttaactcccatccggctcccccaccatacccggctcccctgcagtcttccttctctggcaccacctgtccacatctctctccctctctcactgtaggttccctactgtatattaatactgcccaaaattgtaaaaatgtgtacctttgatcaactattttatcctccaaatacaaattcctcgaatcaacctgaaatc

SEQ ID NO: 345791 - DNA, 694 bp, Homo sapiens
tgtttactgacaattgaccaacatgaatgtggtcaggtttagatgaatatctatacaactcacataatttttaatgaagggagttaaaagctaagcatgccaagaaaataagtatgactcaaaagtggccctttcttagtatattggatgtattatggcttctagttaccaagggcctttgaagatgactgggccattattttaatactttttaatatgcttctggattcaattattgcagatttttacaattatatttgatctctagttagtttataaggaggacactatctttgtcaggttttaatatcaagattgtgatagctttgtaagtaaatgtagatattttctatactttttctttgctttagaacagttgaaatagaacaagatcaatctgacatctaatgtttggttgaactcacttgtaaaactgtctgagccccttgacttccaaaggtaggtttttgataattcttgctatagtttaacatatcacacatatggaagactttatttatctatgttcaatctagagaatagtaatggaaggattacacatgttctcaccactgagttgcagaaacagaacactatcagtgtctttgaaggtcactgtgttcccgtacctgatcacctcctcctctctgccctaacccccatttgacgtaaacaacacgcgctaactttggta

SEQ ID NO: 345792 - DNA, 463 bp, Homo sapiens
taaaaataaaaattggtgaatttgagtaagagtatatgggagttctttgcactattcttgcagcttttctgtaagcttaaaattacataattggattcatgtggacataaagatgggaccaatagacactggagactccaaaaggaggaaaggcgagcaaggctgaaaaccttcctattggggactatgttcactatctgggtaatgggaccaatagaaagaagcccaaaccccagccccatatgacatactcttgtaacaaatctacacatggacccccctgaatctaaaataaaaatgaaaatgtaaagataaaattacatcaaaactttaagttcccaaggaaaagaggaaaaacttatttaagaaggagagcgaggccaggtgcagtggctcacgcctatcatcccaacattttgagaggcctaggcaggaggctcacttgagcccaggagttaaagac

SEQ ID NO: 345793 - DNA, 1310 bp, Homo sapiens
  misc_feature (509)..(509): n is a, c, g, or t
  misc_feature (511)..(511): n is a, c, g, or t
gagctcggtacccaaagagtgtctatccagacgtaggacaggttcacagagtccttatctcctgtgactgtggtcttgctgcctttgatttggggctttgctactactggacttagctcagtgactatgatcgtcttgactgttgtcctgttgcagccagtgactgagttattggcgtggcaggtataggatccactattattcacagtgatgttagggataaagagctcttgctctgctttgctgggtcctacgtcttgattgacactccccaaagagtgtcaatcaagacgtaggactactcaattgatccaataacttgaccaacggaacaagttaccctagggataacagcgcaatcctattctagagtccatatcaacaatagggtttacgacctcgatgttggatcaggacatcccgatggtgcagccgctattaaaggttcgtttgttcaacgattaaagtcctacgtgatctgagttcagaccggagtaatccaggtcggntnctatctacttcaaattcctcctgtacgaaaggacaagagaaataaggcctacttcacaaatgcgccttcccccggtacatgatactcatctcaactcagtatcatacccaccacccacccaagaacagggcccgtccaccacaaaacaccacacccaaccccaccaccccacacacagcccaccccccccacccccgaaaaaccacaccacaacacacacgacagcacgcgggcacccgggcacccaagacaacgacaagacccacccatgcaccaacccaggcgatcacccaacggacacacatgcccccacaccaaccgagcacaacaaagatcaaaccacccaaaaactacaaagaaaacccacggagagaaagcacaaacgagcctccagcaagacacctccccagagcacgcgacgcccacccagacacaaaacggcgcaaacatcaaacaccgaatacaaaagcgactcgcagcgaacaaaacactccccccccccccacacgacgggcgaccaaaccaccgcaccccccgcccaaccccgcgacgcccagaacgcgctccaacaactagcacaagccggagacggggggacaagaaggcgcacaacagccgtcagtgtgtgagaggcggcgagagagagaagagtagaagcgcaaagcagagagccgacggcggggcgtcagagcagcacagagaggacagccccggcgagcacaaccacacggacgggcgacaagaagatctagagagtcgaaggcacaccactcacgtgacgcgtctgaggcctacgcac

SEQ ID NO: 345794 - DNA, 1113 bp, Homo sapiens
  misc_feature (312)..(312): n is a, c, g, or t
  misc_feature (314)..(314): n is a, c, g, or t
taccaaacctgcagtaaaaatttcggttggggcgacctcggagcacgaacccaacctccgagcagtacatgctaagacttcaccagtcaaagcgaactactatactcaattgatccaataacttgaccaacggaacaagttaccctagggataacagcgcaatcctattctagagtccatatcaacaatagggtttacgacctcgatgttggatcaggacatcccgatggtgcagccgctattaaaggttcgtttgttcaacgattaaagtcctacgtgatctgagttcagaccggagtaatccaggtcggntnctatctacttcaaattcctcctgtacgaaaggacaagagaaataaggcctacttcacaaatgcgccttcccccggtacatgatactcatctcaactcagtatcatacccaccacccacccaagaacagggcccgtccaccacaaaacaccacacccaaccccaccaccccacacacagcccaccccccccacccccgaaaaaccacaccacaacacacacgacagcacgcgggcacccgggcacccaagacaacgacaagacccacccatgcaccaacccaggcgatcacccaacggacacacatgcccccacaccaaccgagcacaacaaagatcaaaccacccaaaaactacaaagaaaacccacggagagaaagcacaaacgagcctccagcaagacacctccccagagcacgcgacgcccacccagacacaaaacggcgcaaacatcaaacaccgaatacaaaagcgactcgcagcgaacaaaacactccccccccccccacacgacgggcgaccaaaccaccgcaccccccgcccaaccccgcgacgcccagaacgcgctccaacaactagcacaagccggagacggggggacaagaaggcgcacaacagccgtcagtgtgtgagaggcggcgagagagagaagagtagaagcgcaaagcagagagccgacggcggggcgtcagagcagcacagagaggacagccccggcgagcacaaccacacggacgggcgacaagaagatctagagagtcgaaggcacaccactcacgtgacgcgtctgaggcctacgcac

SEQ ID NO: 345795 - DNA, 644 bp, Homo sapiens
aggagatctacacttgtcatttttaaaagctattgtgacaccagcgttttctcagaagatctaaattttcattggataatttaattgctcctaagcaaagtaatgctggatccccagagaaagatgtatgtgtgtgtgtgacttcaggctcaagaataaaatgagggaagaaagaaatatatttataactgtgaacaattggaagcttggaaacagaatccaacttgaacagtatgagaatggttatattaatttcatactctgaaacctgattggagctccactgaagcagctctttgtttgctaaggtggcatagcaacagcagacacgtctgttttctcattgcaccatcacggacatggtccagcctgtgtgtgaccatcggagactagcgatcatcattcctgtcagtcatcaccatgtctttcacgttcatcttcagtggctctttatcttcatgtctacatctctatgtagacatgctgcatctagagacattggctaccaaggggtttaaggcatctctgtttctattttctgcatacccacagataaacaacaaagccaacgtggtaaccagccccaaagaaaatattcctaccccagcgctggtatacctggactctttgtaacccttcttaag

SEQ ID NO: 345796 - DNA, 445 bp, Homo sapiens
cactcattagttattgtactaaacacaataagatgaagataacaaaaaaaaattttaagagaaaacaaattagagtcctgcttaaaaaatacagatgttctggaatatcaagcaacaatttcaagctttcacacttctggattgaaacacagtttaaagagggaataaaaacctgaagaaagagccacaggactggactgagctaaggcatgttaatagccatgttctagagaaacgatctatgaactcctctgctgaggtccccacacctgtccttgttctctttcttcccgaggctgagtgtctttcctgctgttctgtgatgcttttgcaacactaatgaataaatctctctccaggaattgttttctttttcatgaaacacctctctcctcccttatctcaccacaaaaaagtaaaaaaataaaagaatatttaatgttca

SEQ ID NO: 345797 - DNA, 373 bp, Homo sapiens
tgattggtctagaaataaaagcaatggaatgaaattttgtcaattttatctcttccagggaataaaaacctgaagaaagagccacaggactggactgagctaaggcatgttaatagccatgttctagagaaacgatctatgaactcctctgctgaggtccccacacctgtccttgttctctttcttcccgaggctgagtgtctttcctgctgttctgtgatgcttttgcaacactaatgaataaatctctctccaggaattgttttctttttcatgaaacacctctctcctcccttatctcaccacaaaaaagtaaaaaaataaaagaatatttaatgttcagaatccacaagttattgaaacaaagctcctt

SEQ ID NO: 345798 - DNA, 239 bp, Homo sapiens
tgcaaactctgcctcccgggtacaagtgattctcctgcctcagcctctcaagtagctgggattacagggataaaagcaaacattaaacataaaatccgccctcaagaagcctattttcgcaaacaatcatcttccatacccactttgatgagataatcatctaatgaaaacaaattgatggtaatcaaattgatggtatacattaaaagaggtaaaaattaaagacaaaagaagtattg

SEQ ID NO: 345799 - DNA, 381 bp, Homo sapiens
agaagggcagtatatttcagcaccataaaaagtgacatgcgtttcagaaactgatcagttcctcaatcaccacccacccccagcctgccccagcctccctgttcatgacgtaagggctcacatttgatggtggaacaggctcccaactcacgtgggcaactgtccaaatcacctgataatgggtgcatcccatccattcccccctacaggggagccccgtgtggcgttcacgcacacatggctgggcactccaatcacaattaccagagaactttcatactcacagcaagaagctgttcaggaattattatccttctctcaaaatcatgaatgcttaaacttagtatatatgaaatcatgagagtggcaatgttacacttc

SEQ ID NO: 345800 - DNA, 246 bp, Homo sapiens
taaatgaaaataaatatacaacttatgagaactgtggaatgtagcaaaagagtttttgcattggaaaattttagcatttaatgcatatattagaaaagaagaaagatctaaaatgaactttctaagtttacaacttaggaaactagaaaaatatgagcaaattaaattcaaagtaagatgaaaagaaaattagaattagagcagaaatataatgaaaaacaaaatcaatagagaaaatcaatacaa

SEQ ID NO: 345801 - DNA, 696 bp, Homo sapiens
tgccatctcctcagtctcgccactccaccccagcctctggtaaccttcattttactctctgtttctatgtgtttgtcttttttatactccatatataagtgagatcataagtgaggtatttgtctttctgtgtctggtttatttcgctaaacataatgtcttccaagttcatccatgttttcacaaatgacatgatgataggatttccattgtgtggaaattttccttataattcatagaagattataggtcattgagtatgtgactttagctatgagattgtcctattgggcctttattgtgttgaggtacattccttctaaacctaattttttgagagttttttttcctaatccttaaaggatgttgaattttgttgaataacttttctgcatctgttgagattatcatatggttattgtcctttattctgatgtgatatatcacagtttttgatttgcatatggtgaaccatccttgcatcccagggataaatcttacttgatcaaggtgaatgctccttttaatgtgctgttcaattttgtttgcaaatattttgttgaggatttttgcatccatgttcatcaggaatattggtctgtaattttctttactggtctttggtatcaggaagacgctggccttataaaacaaatttggaagtttcccttctcttcaattttttggaaaagttag

SEQ ID NO: 345802 - DNA, 1367 bp, Homo sapiens
gaagaaaatcctgataaaacataacttgggactatatgtagttaacattcaaaccactaatagcctatataaaatagtatttcatgtgtgttttaaaaacacacatttcattaacccctatagaatatctcttaagaactgtatcttcccttcctaagttagtcagcaaacgtattttgagaacctactacgtaccaggcctattagaatgcttgggatcgaaggataaacatagttaggaagtaatattgaagagaggcaaggattactgagatatttattcattcaatcaatatctgaggtcttctgtatgccagacactgctctaggatgctaggaattcagagttggacttaccttcatggagactacatattattggtttagaaatcagggaaaaggagtgtttatgagatttaactaaaacatagttcaggatttgagctgagaaatgaattgtgcctttctcctcccagataaattagttaagtttccttcagcagctaaaaaagaaagagactaatgagtctaccaaatgagtccagggctaacctgagagtcactgaagtactataggacccaatgggaccagtagcagctccaagtggatcacttcatgcaaagaaacataccaaggcaaacaacctggtggaaacttgaacgtagcataatggcatgccaggaaaagtcagcactgttaggttcctgagtagaatcgtatttctaaagtccagtgaggagatttgcaaaaccttatcactgttggactgagagctgggacagagtgacagggagtgattgcaaagcctccctcatgcattgcaggagggcaggggtcaagaggagtgctggctgagagcacagaagaagcggtctttggctcggctggctcattccttcctgaagggcctgtagtgggtggcaatagggacagctagtaagaataaccatctgggtagctttaggcttccagcaggctgtttatcttgagtgtcatcagcctcttcctattggtgacctggaactctctgggatcaagaaacctaaactaattcaggaagcagactcctgccttggaacactgtatttccttgtcttctgggtgtcaaaggaattctttcttttttttttttttttttttcagatctggtatggcctatttgggtggggaaaattagaaattctgctggctaggcagtagctttttccatttttccccctcataccactcctttcaggaagacaaaaataacgcctatttctatcttgttcttgtaggtttgtttcctctggtactattttttcctgttgtactattgggtgagggtggtgggaattatgcatctttaataaagtttttgaggtga

SEQ ID NO: 345803 - DNA, 121 bp, Homo sapiens
gggcatgtaattggctaaatccaaaggtccttcgtgaggctacatataacaggaagcagaaccacagtaccaaccagagaggcaccggcatcacagcctgctgcctgaccccaagcacagg

SEQ ID NO: 345804 - DNA, 295 bp, Homo sapiens
atcccatggcctaaaagacaggtttccatggagagtggaggaattctgaggtcagccagcagtgttaacgccctcagaaaccctgatgtagaaaggactgtgaagaaaagtctgtgactctgctctgtgccccttgcttggctgttcaaggtaaaaagctccagctcacagagtgaaagcctgctcgcccttctccctcacaatcaagcacttgcgtccattgcccttggtgtacgtgcaagggtgaggaccagactcttctctgcatttgtggccatagccaaaatgccagagc

SEQ ID NO: 345805 - DNA, 975 bp, Homo sapiens
gcctggtggcgaattcggcacgagggaagtctgcttgaaaggaggtagtagtccagaaaaagattttgttttgctttatgaaaaggaagcaggaggagaaagtattattttttgtctttagatttaccatgagcatgtgatgcttaggctacggcagccatcttggtaccctgagaagagtcaccctaagagaagatgccagcattctaggaaaagcagggcggggatggagaaaaaatccagggcctggatgacattgctgagctgctgagttaacctagaactatcctaactcaagatttctctttataagaatctctcttgcaggagtaacacaggcatgtggagaatttctcagagtatttccgcagcaaccaactggcatgaagaatactttgctgaaacatggggttcaaaagcagcccacagctctctttcggacctctgaagtcacacccagtggtctagtcaacatttcctcttgcagagattgtaaaggtttcaatcttaacaccatgtgactaattcggtctctatgatcaaagccttataagaaagaatgactggttgacccgacatggaccaagtgaccgttcttgttcccagtgtgttgtgggctaagaagagatgggcacagaatgatgggaacgcagagcgaaagggcccaactctaccaggaggggaagataaaaactcctgaagaaattataccaaaaatagaatacttacaacagaattctcaacatcatttttccctgtttgaatccagcaagtcagccattggtcacttaagagcactaacccctccctggtttgaagatgttcttgactttaaatacaaacatctgatattccagcttagactcctccacaagaactagagtgtcatcctattttggcttccagctcagtccctctgctacaagtcttgactccagaactctgtgggataataaaatacaagatcatagcttg

SEQ ID NO: 345806 - DNA, 630 bp, Homo sapiens
aagacattttatgatatattattgagaaatatacattataatttagaaagatagtataagttcatagaaatatggataattaagtgttcatgtgtaatatagttacaggaaaatatttcctaaaggttcttagaaactttaggaattatgtcccaggcattgtaatttagggataagtttctttaggattttgaatatttatctcaatgttagtccaaaaataggaatcacaaattctgatgatataatttatagaaattaatattactttttatggagatgaatttatgtgttgattttcattcatttttttaaaaaaaatctaacaaccaagtctattactagatgcatattcagaaatttttattatggttagaaaccatggaatcgtagaaggggctgtgttttatggattgaacttaatgaagagccacttacaagacatctgagattatggatttggatatataattgtcagttgactttgggttagcatgagtttaaataattctggacttcttaaaaataatattgaaaaagtactagtttatttaagttgattgtgaatttgcttattttggtggtcagtaaaataaccctgggttatttggattattcctctatattact

SEQ ID NO: 345807 - DNA, 630 bp, Homo sapiens
taattagcaaataagatatttgaggacaactttacagattaccagggtaatgaaaaggaagtaatcaaagataagccccataaggatcaaatagcactgtaagtacagtaaaatgtttcttgattaaaatatggatcatgttgccacaggttaattacatgaaagaatgaatctcttgcagaggatgggagccagttgcacaatatctgaatatatgttatcccagggtttcttggaatctaaggaaaaaagcagagcaccagaaatgcaaaaagtaaattgcccatagttaaaggaacatctgagtagtcagatcattaaaatttatgaaacaattatttttcacaagtcatggtggctgaaatagagtgtataatttttttcctttcaaataagcgtattttcctcatattacactgacttaaaatttaaaaattactttgtaatgttgaaacctatagactgtggctcctgtaaaccccaggtcattttcctgccattcttacaactctgtctaagatctataaaagtatattctgctttttgttaggccattcatgcttttttcaacctgtacattctatgtatataatattgttcttggtgctaaatacactttcttttatctga

SEQ ID NO: 345808 - DNA, 173 bp, Homo sapiens
gtgaggaagtccccagacataggaaggaggtcagatgccagactggcacacaatgacagatgtacttgacagcaagtttgccagcttgtgggattgtctgggaatctgcatttaaaccagcaccctggaaattcccatgcaggtgctgcctgaaccacatttgcatccattgc

SEQ ID NO: 345809 - DNA, 472 bp, Homo sapiens
tctgacacttgttaaaatggtaaggaagactttatttgggactattgcaataggggaaagagatggagctcaactctgaatataagaacaagggagaatgacagccaacaagcagagtgagaggactgctggatggaaaactactaagaggagacaccacaattagggagattcttacaaaactcacctaacaggattcttgctgagggcaggccaacggcccaacatcaagggtggggaaatgaggaacttgatcaatattaagggtgatcagataccaagggtaggaggattcccactaaactgacttggaagaattcttgctaaaggcagaccaggagggagggagaagaggaaggaaacgaggggacgcagacggaggggagcagagaggcaggatgggatacagagggatgaagggagggagagatacgaagggagggaatggcgggaaggaatgtcaggggaggaa

SEQ ID NO: 345810 - DNA, 140 bp, Homo sapiens
tgagttggagcactgtgtattaagcatatggagggaagacatacgtgtgtatacacacacaggagtaggccctgctctctgaaaacttaccatattgtcatggagacctggaagataactaaggaagaagtaacaaagcc

SEQ ID NO: 345811 - DNA, 270 bp, Homo sapiens
caggaactactgacagagatctgggagagctgactttggtgaaaattctcaccttgcacaggcttgtgtctgttttccagaatcctacctgcagactccagaatgaagtgtcccagctgtccctttctcgttgccagaaacttctacccttctcattcctttgcttgtccccctgtaacaagagacagattaatgagagaaaatcatgcaagttgatttactgtatgttttatgtaacatgagtcttcataagaaaactaagcccaaaag

SEQ ID NO: 345812 - DNA, 400 bp, Homo sapiens
acactcccagacatacccacgtctagcctctgacccggaacagtttctcagaccttcaacctcttcctgtttcttagatgcactgacccctaaactcctaacagcttgatagaactccttccccacacctacctactaggaccctgtgatacactgatttttgattacttcatgctacctagacttgactgcctcactcttaggttattaggtacttaatactgctatcttcagctcacatctgtggtagtacccattgcttcagaaaaacccttaatcacagctccctgccctgtgacttttccctgtcttcctgaacacagattgttttcttctcattcactaactatatcctgtcattggcttttactcctgctagcttctgatgcttctaccttaa

SEQ ID NO: 345813 - DNA, 673 bp, Homo sapiens
ggttctgtgggagaatgccctggtctgtattccaagggtaatggagtagcaggttgacaaattactttcaaatggttcaaaaaagaaagttcttttcactgtacttgcaattcttatgtaagctggaaattatctcaaaattaacgagaattttttatcgacgtagtattttacatatttatggaaaacatgtaagtatttgttacatgcataaactgtgtaatgaccaagtcagagtatctggggtatccatgaccttgagtattaatcatttgtatgtgttgggagcattacaagttttcgagttaccaatttttttttttttcctttgagacagggtcttactctgtcgcccaggctggagtgcagtgggacgaccacggctcacgcagcacagcctccacctcccaggctcaagcgatccttccacctcaaccacccaagtagctgggactacaggtgtgtgctgccacccccagctaattttttaatttttttgtagagacagggtctcactatgctgccagggctggtactgaactcctaggctcaagagatcctcccacctcggtctcccaaagtgctgggatcataggcatgagccaccatacccagccaaattttttaaagttattttttaaatctccacttaattcgattttggtaaaacacg

SEQ ID NO: 345814 - DNA, 659 bp, Homo sapiens
ttgaaaataactgatatcaaaaattcactaagaggggttcagtagcagatttgagcaggcagaagaaagaatcaccaaatttgaagatagatcaactgagattattcagtctaaggagcagaaaaagaaaagagtgaagaaaactgaacagagcctaggagacctgtgggataccctcaagcataccaacatacacagaatgggagtcccagaaagagaagagagaaagaaaggagcagaaagaatatttgaagaaatattgtcttataaggtctgggctataaagaaaaaaatacttgaagaaataatggttgaaaactcctcaaaagtgataaagacatgaatgcacatctaagaagctcgacaaactccacataaaataaacctaaagagatccacactcaaacagattataaccaaattgttgacaaagaaacatagaaaatattgagtgcagcaagagggaagcagctcactacatataagtgatccttaataagattattccctgatttatcagaatgagggatgatgtatagtaaccctgaaagaaaaacaattgttaatcaagaatcctgtattcaataaaattctccaccaaaactgaaagaaggccaggcacagtggctcacacctgtaatcccactgtaatctcagca

SEQ ID NO: 345815 - DNA, 335 bp, Homo sapiens
aaaatttttttaaaaagaaactgtctttgaagaagcccagatatttgacttactaaacagagactttcaatcaactgtcttaaatatgctcaaagacacaaagaaagtgaaggacaaagaactaaagaaaatcaagagaacaatgttttacctaatagaagacatcaataaaaatatagaaatgataaaaaagggaaccaaatagaaaacctggagttgaaaataactgatatcaaaaattcactaagaggggttcagtagcagatttgagcaggcagaagaaagaatcaccaaatttgaagatagatcaactgagattattcagtctaaggagc

SEQ ID NO: 345816 - DNA, 314 bp, Homo sapiens
aatttctgttatttttaccacccagtctgtgatcatttgttacggcacgtctagcaaactaatgtagtcttccagtaggctttatctaataataacacccccttcccatttagcatggaagcctgaatcaaaggggttgttgagctcatcctgttcatttaaatgtagcacgatccattgagaaatgaacacagataccatcctcaggcaaaagcatgtgcttagaaatgccatctggcagtcctcctgatatccccactctaataagaaaagtaagtcaggctcttagatgcaatcaacaggtgactaagaaa

SEQ ID NO: 345817 - DNA, 845 bp, Homo sapiens
aggagagggggaagaaaggagtgttttttaggtaaaagtatatagaggtgggactcaactcttaccggtattcaaatcacaaagggtttttcagctttccaacaagtctgtgaatggagtgggtgggattccagttgctcccatttgtgagagggaaagctaaggaccagagaaggtacgtggcttgctcaaggtcacacagcaagtcactgatggagcccaggcttccacatgtctgccctatgcggcttttcagggtatttacagagcagatgacatggagtaatgagcacggggctgggtggtccgggaccctcactgccaaggcttgaatgcagcctgcggcttgtccctttgcctgggcggctccctacagaccaatctggggagaggggcagggagtggtgtccctttaagacttggaggctttcaaatgttttgacctctatccaaaacaagaaatatatatttctattgctatccatatctgtaactgaaaccaaaattttacaaagcagcatatatctttactacatgcaatatattctgatatattctacttatttaggaaaaaaaaaaaaaagcagttgccacccactaaattgatttcatgatcctctcttgggtctggatccacggtttgaaacagtgctctaaatggcatctttgcaattgattatggacaattaagtacttagaagaaggaatatcaagccaatcagaaattaagagaaagctgatttgaaattatgattgaaatgggatatgtatgagtatgtgtgctttaaattttttattatgtagcagaaaaagctaatatcttgagttgtagggactcatgtggg

SEQ ID NO: 345818 - DNA, 207 bp, Homo sapiens
cacatacgatgaatgcacagctcgtaggtatacagtttaacgacttatgacagtggtataaccacaagaccagcaacatttgaatctttccatcaccctagacagtttgccctgtgtcccattccagttaaattacctttcctacacacacaaaggcaactactgttctgatttttgacaccagagcttagaccaactattatttaa

SEQ ID NO: 345819 - DNA, 753 bp, Homo sapiens
cattaacttttcatgacacgtcatggaacctcattccctatctgcaagcatccaagcaggtaatccaaaacctacatacagatctatcataggtcccgttcgtttctctttcaacttgacagcaagcttcctttaatctgcgagtatcaaaaagacatttcttggctttagttttttttttttcccttgacccacagaagacaaaatgacttaggtgtcctctttaaaaaaaaaaaaaacaaaattctcacaaatgcccaggtttttataggagggcaatggacccggcgagctcttaaacaactcctccaagacacaactcaaaaagagaactaataaatgttcagttgcttctcaccatctactcattcccctcaatcccacgcagtcccgaaaagcatccatattacctgaaacctggcggggaggatggaaggagagagacccaacaagctcaggatttacaagtaaagctggtttctaccccgaagatcctgacagctccgcagagtgcgggcgcagggtctgacagtgccctctagaagggctctcccaccccatcccctccccttagagacaagtcctccttcaaaagtcactgcctccgagagaagataccccttcacaccgccccaggcccctcggcaggcttcctcagcacccgccccgcagtcaggccctctaacctgacccggtccaggcccgggcggctcacccctccggcccgacccctcccccgcgcggccgcccctc

SEQ ID NO: 345820 - DNA, 694 bp, Homo sapiens
cattaacttttcatgacacgtcatggaacctcattccctatctgcaagcatccaagcaggtaatccaaaacctacatacagatctatcataggtcccgttcgtttctctttcaacttgacagcaagcttcctttaatctgcgagtatcaaaaagacatttcttggctttagttttttttttttcccttgacccacagaagacaaaatgacttaggtgtcctctttaaaaagagctcttaaacaactcctccaagacacaactcaaaaagagaactaataaatgttcagttgcttctcaccatctactcattcccctcaatcccacgcagtcccgaaaagcatccatattacctgaaacctggcggggaggatggaaggagagagacccaacaagctcaggatttacaagtaaagctggtttctaccccgaagatcctgacagctccgcagagtgcgggcgcagggtctgacagtgccctctagaagggctctcccaccccatcccctccccttagagacaagtcctccttcaaaagtcactgcctccgagagaagataccccttcacaccgccccaggcccctcggcaggcttcctcagcacccgccccgcagtcaggccctctaacctgacccggtccaggcccgggcggctcacccctccggcccgacccctcccccgcgcggccgcccctc

SEQ ID NO: 345821 - DNA, 783 bp, Homo sapiens
tatttgatgccagatgtatgactgtgggctgatgaggaagaactggaaacaaatgacaggtgattcactgctttgtgtctggtgtgccatgactctcttgaaggggggcagtgttgatctgaatctttttgtctaatgctttttcttcctctgggagggatgctgaagaggggcagctgaaggagcagtcttaagcaaattggtcatggctttcttaaatattgtgattcgattgatatggaacattttttcagtctgtgagagacttttcattatggactagctcataaaaaaccgtagatttaatttgcccaggctgttggttctcttgtgtttgttatcatacgtcagcatgaaacctttggcctttgtggaagccttgtggagaccactgaacagacttggagccatatctgactcgcctgccagcattcctgatgttcagtgcctgttattgcccctctccatggcattctcctctgtggttatgtgaaaggaaaataaatcactaagccaagggaaaaatcaaactgggagctatgtcaggcaaacctgcctcccattttattcctaaataacatagctacatacctccctcgcaatttgccacagatcctcgtcccacaaggaaattcactgtgggacaaaggacagacagaactcaaagtcatccctctgagactcacctgagacaaatgcatatctgattgcttcctttgccctattgtttatgtaaaaatgcagattcactgagtcagactaagttgtgtattgagtggaagg

SEQ ID NO: 345822 - DNA, 260 bp, Homo sapiens
aataaagaaaatagattccatggaatcaatgaattgatttgctttactaaagagagatcttgactgattgaaatttaactgttaaattagagtttttttgttatgtaaaatgaactgtgtgaggaatctaaacacttatttttttgttctttctttgtcgttgatagaagaatatttcagtcctgatatttgctgtaactaataattactggataaacagagaagacacatggaggatattttacctgggtccaacaaaa

SEQ ID NO: 345823 - DNA, 647 bp, Homo sapiens
gctaatagctaacgtattgtacagaacagatctagactaaaacgtgttgtgaaaaagaattaaaaagacatttctgtgcattatcataagtctacagattattaaaagacggaaatatatttaaggtttaatttttctatctggctccctcattatatgaatagaaatactaaaaatcagcaaagttagatgattctctggaaatcattcagttaatcagagtggcagaatcaagacaacaatcctgttaggatgggaaaaaatcaaatatccaatcaaatgggcttaaacaataccttggatgatcttgatacctaacataacaagattcccatgttggttgcttcagaatctcaacagggccatcaaaagttccagttttttccatcctgctctgccatcctctgtgtgtcagctttgccctcagttggccccttcctggttgcaagatggctgtttctatcctggaaaaaaacctccagcaagaaggatgtatggaagaagaaaagagcagtctctttacatgcctttttcttaagagagagaaaactttttccagaagccctcaacagtagaatccttcttttatcttaatgaccagaaatggagttctgcttatccttaaaccaatcactggcaagacaaat

SEQ ID NO: 345824 - DNA, 191 bp, Homo sapiens
tgccggatagaatgtttctgagacctgctctctaatattctaactcagtaggccctacgcagggcctgagaatgtgcattttcagtaagtgccactgctgatgttgatcagttctctaagaaattctgggttagctatgggattataagcatatcctcagagtacaggtttttttttttttgttttttttt

SEQ ID NO: 345825 - DNA, 283 bp, Homo sapiens
acacattactttttccatttattgaaattttatggaaaaacttccctataaatcagaaaaaagggagagctcctctagctaagtccagggtggaagaccaagagcatttccttcccagtggaagctcttcattcaatggaattgcaaaatatatttacaagtcactgctacaaacatatggaacttagaaagcccactgtggcccccattaactgcgttaccaagagagatatgcaattaatactgaatccctcttaataatagccagggatattggtttaag

SEQ ID NO: 345826 - DNA, 573 bp, Homo sapiens
ctgagcgtgatggtttgcacctgtaatcccagctacttaggaggctgaggtgggaggatcgcttgagctctggaggtggaggctgcagtgatcagtgatcgcaccactgcactccagcctgggtgacagagcaagaccctgtctcaaaaaaaagaaaaaggtacaagtcgtagtagagaaaactgtgaggttcagagcagactgtgtgtaattatgaatgtgtgtttcgtggatctttaatctatggtgatggaggcctagacttaaagtgggttctcccgaagcgggcattacctgggttcattaccaagctgcattaatgtcagttttcaacttagggtttggactccacacatgctctgagttctggctgtttgtggttcagaaatttccaggatgactttttttctttgtttttctccctgaggccagatccaaggcagttttaacttttaaaaagtgcacttgctgaatccaaaggtgattttaggacttttaacttgtgctgccaaattgaattgctatcctcaactatttgaatatttccaaagatctagtactttttcttacact

SEQ ID NO: 345827 - DNA, 1439 bp, Homo sapiens
aagacttgccaatactagccaatcaaatccttccttcaattttagaaaacaggaattgcatgtaaacaagtctgggccaactcttacaacctgctttctatatcctcctcctctgttctccatctttcctagttctttcagccccagtggtcaggctgagctgagtatgagaaagggccctcaagaggccctggaagcatattccctcagctcctaaatgaagtctccataaggtgaccctaggagactgtgcagcatgactggccgcttgttttatcccagactcttttccagggtcttacttctgtcatccagactggagtgcagcagtgcgatctcagctcactgcaacctccacctcccaggtttaagcgactctcctgcctcagcctccacaataactgggaccacaggctatgattaaaagtttcatggatgtctaccagcttgcaagcactagaatcatgacattagagaaggaaatgacatctcatcgaagtcacattgcagccttgaaatcagaacttcacacagcttgtttacgtgaaaatgcaagtttacaatcaataggatcacgagaccattcaaatctctccattccttcaagagctcctcttcctgctgacacaactggtattggggatttcttaccattgaaagctgaacttgatactacttacactttcttaaaggagacatttataaatactgtgccccatgctctgacatcatctcactcctctccagtgactatgtctgctaatgccaacagaccaactcagattggattatgacttcatgaaattaaaaaatggaggaagagttaacagtacaattaaaattgttttgaatgggaattttcttatcagttgacttttgtttcagcagaagtggcagtggatttaaaaaatttgtgcgctatcttgatgtattctggtagctctgtctccttgaataaggaaatagccaacttttttctctccaagttttatttgttatcacagttgctcatttttatgtaacatatttttaaatgttaaggaatgacacattttgggtaatttccctcagacttaaaaaaatcaataagccattttagtctctatctatcaaagttgtttcatacttgtctattttaaagcaggactgcaatgctttaataggattgagagagctatttgaaatgtatgccaatgattcctgtcatttcatggcagcccggccatggttcactgagccccctcttctctcttgtcagctcaactgaagacaagcatttagttgcaaactttaagcaggttgtgcaaaacagaaatgatgtgactgcttctcctcctgcacaataatgtcactcctggtcaatgtgagaaggtcaggttgctccttgtaaagctacatgataccacttgcccatttgaacaagttaagttaactgctga

SEQ ID NO: 345828 - DNA, 802 bp, Homo sapiens
atatttgaagcacagtgtggatgttaatgtgtggctaaactgagcaagaagaaaacattatgtagtctctccgaggcaaagatggagctgagaagaaaagatcaatctctgcgtcagctcaatagacatcttacccagctggagcaggacaagcgtcgactggaggagaacatccatgatgcagagagtgccctccgcatggcagccaaagacaaagaatgtgttgctaatcacatgagagcagtagaaaatacgcttcacaaggtcagagatcagatctcgctgtcatggtctgcggcaagtaggaatgacttcaccctacagctacccaaactgcacctggagacctttgcaatggaggggctcaagggcgggccagaggtggtagcatgccaggttagagtctaaataacattgtttgctactgagacatatagaaaaataaattgcactaactggagagaatgaaagcctcaaagtattgtgaataatttaaaggagatgcaaatagatgtttcttcatttttcttctatcatgtaacagtatactttacaaaatactgtttttttctttaaagcctagaactagcctattaaaataatccagaaaagtgtttttaccaaggaaaaatgtgttttatggcaaagtacagtattaaaagaaaatactttcctatcagcagaggacaataagacactaggctgttacctctttaagcaagtctcaatttgttgcttttattgtttgaaaataagtaattttagaaaaaaaataaaataataaatcactttagttgtaaac

SEQ ID NO: 345829 - DNA, 833 bp, Homo sapiens
  misc_feature (7)..(7): n is a, c, g, or t
  misc_feature (14)..(15): n is a, c, g, or t
  misc_feature (40)..(40): n is a, c, g, or t
  misc_feature (47)..(47): n is a, c, g, or t
agcgggnagactgnncacgcatactggccgtcgtttacancgaatcntgccaggtcttacttctgtcatccagactggagtgcagcagtgcgatctcagctcactgcaacctccacctcccaggtttaagcgactctcctgcctcagcctccacaataactgggaccacaggtgtgtgccacaacacctggctaatttttgtattttttttatggagacagagttttactgtgttggccagggtggtctcgaacttctaacgtcaaatgatccacctgcctcggcctcccaaagtactgggattacagcccacatttctaaaataggaaaaatcctgaactgagaaacacattggttccaagggtttcagataaaggaatgtgagaattgtactagcattataaaacaggttctatgcaaaggacatatactgttgtttccatgcattgtgtcaatgcaatcaaacaaaggttttttgcttatagagaagcacattcagtctgtgggatggtatatttgagtgaatttttgctatctactctctcttgcatcttgttttgagtcataaaggaattgtgtagtattttatgccacttgaaaactcgaaagacttcaacagttgtgttatgtgcaaatcagataaggctctaataggctttatcttgcttgtgtatagtacctgtttgcaaactaaaggcacatttttactccatgccagtaggaatcctctgaggcattattttttgggcccctcccactttatgtactgaaagcagaatggatgaaatgccttgacacataacttacttatcttttcttactcaacattctaa

SEQ ID NO: 345830 - DNA, 679 bp, Homo sapiens
  misc_feature (89)..(89): n is a, c, g, or t
gtgtttatgtaaggtgatttatattaaatttcgcacttctttactatctgcctcacccacacaagacaagctccactaattccaactgnaaaagtatgaggatgaagacttttatgatgatccacttccacttaatgaatagtcagagatcagatctcgctgtcatggtctgcggcaagtaggaatgacttcaccctacagctacccaaactgcacctggagacctttgcaatggaggggctcaagggcgggccagaggtggtagcatgccaggttagagtctaaataacattgtttgctactgagacatatagaaaaataaattgcactaactggagagaatgaaagcctcaaagtattgtgaataatttaaaggagatgcaaatagatgtttcttcatttttcttctatcatgtaacagtatactttacaaaatactgtttttttctttaaagcctagaactagcctattaaaataatccagaaaagtgtttttaccaaggaaaaatgtgttttatggcaaagtacagtattaaaagaaaatactttcctatcagcagaggacaataagacactaggctgttacctctttaagcaagtctcaatttgttgcttttattgtttgaaaataagtaattttagaaaaaaaataaaataataaatcactttagttgtaaac

SEQ ID NO: 345831 - DNA, 1244 bp, Homo sapiens
cccagttggagaaaaaaagagttagatagcagctaacttggggaatgaacttcgacgtcagggaaaaaccatcaccaatatgaaatgtcagagatcagatctcgctgtcatggtctgcggcaagtaggaatgacttcaccctacagctacccaaactgcacctggagacctttgcaatggaggggctcaagggcgggccagaggtggtagcatgccaggctatgattaaaagtttcatggatgtctaccagcttgcaagcactagaatcatgacattagagaaggaaatgacatctcatcgaagtcacattgcagccttgaaatcagaacttcacacagcttgtttacgtgaaaatgcaagtttacaatcaataggatcacgagaccattcaaatctctccattccttcaagagctcctcttcctgctgacacaactggtattggggatttcttaccattgaaagctgaacttgatactacttacactttcttaaaggagacatttataaatactgtgccccatgctctgacatcatctcactcctctccagtgactatgtctgctaatgccaacagaccaactcagattggattatgacttcatgaaattaaaaaatggaggaagagttaacagtacaattaaaattgttttgaatgggaattttcttatcagttgacttttgtttcagcagaagtggcagtggatttaaaaaatttgtgcgctatcttgatgtattctggtagctctgtctccttgaataaggaaatagccaacttttttctctccaagttttatttgttatcacagttgctcatttttatgtaacatatttttaaatgttaaggaatgacacattttgggtaatttccctcagacttaaaaaaatcaataagccattttagtctctatctatcaaagttgtttcatacttgtctattttaaagcaggactgcaatgctttaataggattgagagagctatttgaaatgtatgccaatgattcctgtcatttcatggcagcccggccatggttcactgagccccctcttctctcttgtcagctcaactgaagacaagcatttagttgcaaactttaagcaggttgtgcaaaacagaaatgatgtgactgcttctcctcctgcacaataatgtcactcctggtcaatgtgagaaggtcaggttgctccttgtaaagctacatgataccacttgcccatttgaacaagttaagttaactgctga

SEQ ID NO: 345832 - DNA, 1377 bp, Homo sapiens
ctcctggagtttgctgggattccactccagaccctgtttgcctaggtatcaccaacagaggctgcagaacagcaaagattgctgcctgctccttcctctggaagcttcgtcccagagggacacctgccagataccagccggagctcttgtatatgaggcgtctgtcaacccctgctgggagttgtctccctgtcaggatgcatgggggtcagggacccccttgaggaggcagtctgtcccttagcagagctcgagtgctgtgctgggagatctgctgctctcttcagagctgacaggcaggaacgtttaagtctgctgaagctgtgcccacagctgccccccttcccccaggctatgattaaaagtttcatggatgtctaccagcttgcaagcactagaatcatgacattagagaaggaaatgacatctcatcgaagtcacattgcagccttgaaatcagaacttcacacagcttgtttacgtgaaaatgcaagtttacaatcaataggatcacgagaccattcaaatctctccattccttcaagagctcctcttcctgctgacacaactggtattggggatttcttaccattgaaagctgaacttgatactacttacactttcttaaaggagacatttataaatactgtgccccatgctctgacatcatctcactcctctccagtgactatgtctgctaatgccaacagaccaactcagattggattatgacttcatgaaattaaaaaatggaggaagagttaacagtacaattaaaattgttttgaatgggaattttcttatcagttgacttttgtttcagcagaagtggcagtggatttaaaaaatttgtgcgctatcttgatgtattctggtagctctgtctccttgaataaggaaatagccaacttttttctctccaagttttatttgttatcacagttgctcatttttatgtaacatatttttaaatgttaaggaatgacacattttgggtaatttccctcagacttaaaaaaatcaataagccattttagtctctatctatcaaagttgtttcatacttgtctattttaaagcaggactgcaatgctttaataggattgagagagctatttgaaatgtatgccaatgattcctgtcatttcatggcagcccggccatggttcactgagccccctcttctctcttgtcagctcaactgaagacaagcatttagttgcaaactttaagcaggttgtgcaaaacagaaatgatgtgactgcttctcctcctgcacaataatgtcactcctggtcaatgtgagaaggtcaggttgctccttgtaaagctacatgataccacttgcccatttgaacaagttaagttaactgctga

SEQ ID NO: 345833 - DNA, 477 bp, Homo sapiens
atatttgaagcacagtgtggatgttaatgtgtggctaaactgagcaagaagaaaacattatgtagtctctccgaggcaaagatggagctgagaagaaaagatcaatctctgcgtcagctcaatagacatcttacccagctggagcaggacaagcgtcgactggaggagaacatccatgatgcagagagtgccctccgcatggcagccaaagacaaagaatgtgttgctaatcacatgagagcagtagaaaatacgcttcacaaggtcagagatcagatctcgctgtcatggtctgcggcaagtaggaatgacttcaccctacagctacccaaactgcacctggagacctttgcaatggaggggctcaagggcgggccagaggtggtagcatgccaggttagagtctaaataacattgtttgctactgagacatatagaaaaataaattccagatgcggccggaattctcccctcggg

SEQ ID NO: 345834 - DNA, 533 bp, Homo sapiens
aaaacagccatcgatttacagaactatcaagaactgagccaggtgcattatatgcctttctccttttatcctcacaacaacagcacgggtagctattacctgcacataacagctatggaaatcaggcttaaaaaagttaactcatttacaaaggtcatacaatgaagaggtagcagaaataagatgagatgccagggctgatgccaagactaacgttcattaaactctacctcattatgcttattcatcgatagtccagatgcatcaattcatttgaatagaaaaactgtcatgtataccatatacagaataacaattgagcacaatataaacttatttggataattgagaagataaatcaagatcttatgatgcttgagtgtactagacgaaactgttgcagaccaaaaccatgtctttttttttcttcatacccttagtatctttgttcagtgctaggtatgtaacaagcattcaataaatattgaatgagtatttttgaagtaaataaatcatcccaataccaggaacaa

SEQ ID NO: 345835 - DNA, 178 bp, Homo sapiens
tacgagacagtcttgttctgttacccaggctggagtgcagtgcaatcctacggagaatttctagcccattagaagaacacatccatgaccccccttctcctttacctgccatatgcaactgattgccagattttgctgctttcacattaaagttaaccctcgcctttgccccttctgt

SEQ ID NO: 345836 - DNA, 1229 bp, Homo sapiens
acagtgttgcataaactctagtgcttaactaactttactctaaaaattactgttgaacatcttaaatatttttctatattttctactttcatagccatattttaaccttttcaacttactggtgaccaagcttttaggtgataaagaataaaagagggaagggaagagtaaggaagctataagaaaaatagatctgattctttgttcctttacctgttagacttacaaaaagtttgtttttctaataaaatttgtatcaactttggggcatattaggttgaggccttggctcctgcctgtagtcccagctacttaggaggctgagagaggaggatcgcgtgaacctggaagtttgaggctgtagtgagctatgattgcaccagtgcactccagcttggatgacagagtaagaccctacctctaataaaaatttttaaaattgtaaaacattataaaattaattcagttattttaatctgaagccaagaacatgtagaatgttatgattagagtttatcacatattaatgtatactggcaaattgtgttactggagtatacccataggaggaataaattcaaacctgttttatttatttgaacctatttacggtatgcttaagaattgaatcagtataaattctcaaatatgggagaaattttgttcttgagaattatctgagtcattaatatttttcaaaaacagctctcactgacttgaacctcttctgtaagctctaaccttttacctgctttacatttccacttgaatgtctagtaggcatctcttgaccaaaaacagcttttgattcctgttctccaacctgttcctctcctagttttctccatctcagaaatgttacttcctctgcaaagtctttccctgacttatctaaaataataacctcctctgtttgctgtgggaatttgtatagaatggtgggaaaatttcaagtttcatatttggattagctctgacatttatttatctgaacactggtaattgcctcagtaaagacactgataataagtaccttttagagttattttaatctttaatgctttaatgtgtaggaagagtatagtgtcctgttttgcacagaaaggcattctgtaaataataagttgccttaattttcctgtaatgttcattatattgttgtgggaaggtatttactcctattattaaaaataaaaatgtgtaaaatttaaaatacctgaagataacag

SEQ ID NO: 345837 - DNA, 584 bp, Homo sapiens
tttttaatactatttctaatatagggtgatggattggagttcaagagacacttcctgaagattaaagggaagctgattgaaaggtttggcttcctgccacatgatcggaccatcggctctggggaatcctggtgaatatagtgctgctatgttgacattatatcctgtcctgcaaactgcaaatagtagttcctgaagtgttcacttccctgtttatccaaacatcttccaatttattttgtttatacctatatcttaattgtaagcaaaactttggggaaaggatgaatagaattcatttgattatttcttcatgtgtgtttagtatctgaggaaaccaagtttcaggggacatgagttttccagcttttatacacacgtatctcatttttatcaaaacattttgtttaattcaaaaagtacatattccatgttgatttaattctaagatgaaccaataaagacataattcttgtgacttttggacagtagatttatcagtctgtgaagcgaagccagcttcaaaacatatccccaagatttgtacttatattttcaaaagggcctggccagttatataaacc

SEQ ID NO: 345838 - DNA, 2799 bp, Homo sapiens
ttttccctctcctctcttggggccccttgtgtccacgaaccctggtgcccgctacctgtgggccccccctgggggttctcttatgggcgcgtccccccctttttcttctctctcttttctcgctctcttttatgccgttgtaagatttattttggctctccccgcctgttctttgcacattaaaaatgaaaaagtttgtagaactaagctaagcagatggtcttcctgcaaaaagaccgggctgaagtaaagcattgttttggagctggttcacagaaaaaaggcaaaactggttatcctgacttcaagctccaacataaactgctcgctttctccgggaaacttgccccgccacacacacttgactgcgtggccagttctttcgaagcctctcgctcccaacacggagttcctcccatttcttcacagtcggctctcagcagctgctgctggtttctcggctccagcaccacgagtaccgcactctgaggtttacaaagcactctgcttcaccgactgtgatcctcacagtcctgtccggtggcctcacgcaggtggcggtgcagcctttcaggcccagagcggccaggagcgaagcccgcagccccgcctggaagcgcagcgcggtcggtcgcgcgcccctgaggcttggaggcctgggcttcccccagcagcgctcgagcaccgcccagtcgagcctcacaccggatgccacttcatatttgggcccagagctcaattcgcgccgatgcggtccgccgtccttaaatctcttcagccaggatctctccccgactgcaaagcagcctgggcgggagcggcaacatctccacgtcacccttttggagccgccgacattcagaggggcaggacacgggaacgcgcgctgtcttgctttacggcgcgggtgcgcgagtttgcggcagcgtgacgccctcaagttttggcgggaaaagcgctgcatttggattcctgcagtggtgggcaaaggacagtccgccgaggtgctcggtggagtcatggcagtgccctttgtggaagactgggacttggtgcaaaccctgggagaaggtgcctatggagaagttcaacttgctgtgaatagagtaactgaagaagcagtcgcagtgaagattgtagatatgaagcgtgccgtagactgtccagaaaatattaagaaagagatctgtatcaataaaatgctaaatcatgaaaatgtagtaaaattctatggtcacaggagagaaggcaatatccaatatttatttctggagtactgtagtggaggagagctttttgacagaatagagccagacataggcatgcctgaaccagatgctcagagattcttccatcaactcatggcaggggtggtttatctgcatggtattggaataactcacagggatattaaaccagaaaatcttctgttggatgaaagggataacctcaaaatctcagactttggcttggcaacagtatttcggtataataatcgtgagcgtttgttgaacaagatgtgtggtactttaccatatgttgctccagaacttctgaagagaagagaatttcatgcagaaccagttgatgtttggtcctgtggaatagtacttactgcaatgctcgctggagaattgccatgggaccaacccagtgacagctgtcaggagtattctgactggaaagaaaaaaaaacatacctcaacccttggaaaaaaatcgattctgctcctctagctctgctgcataaaatcttagttgagaatccatcagcaagaattaccattccagacatcaaaaaagatagatggtacaacaaacccctcaagaaaggggcaaaaaggccccgagtcacttcaggtggtgtgtcagagtctcccagtggattttctaagcacattcaatccaatttggacttctctccagtaaacagtgcttctagtgaagaaaatgtgaagtactccagttctcagccagaaccccgcacaggtctttccttatgggataccagcccctcatacattgataaattggtacaagggatcagcttttcccagcccacatgtcctgatcatatgcttttgaatagtcagttacttggcaccccaggatcctcacagaacccctggcagcggttggtcaaaagaatgacacgattctttaccaaattggatgcagacaaatcttatcaatgcctgaaagagacttgtgagaagttgggctatcaatggaagaaaagttgtatgaatcaggttactatatcaacaactgataggagaaacaataaactcattttcaaagtgaatttgttagaaatggatgataaaatattggttgacttccggctttctaagggtgatggattggagttcaagagacacttcctgaagattaaagggaagctgattgatattgtgagcagccagaaggtttggcttcctgccacatgatcggaccatcggctctggggaatggagtttcactcttgtctcccaggctggagtacaatggcatgatctcagcttactgcaacctccgtctcctgggttcaagcgattctcctgcctcagccttccaagtagctgggattacaggtgcccaccaccacacctggctaggttttgtatttttagtagagatggggttttttcatgttggccaggctgatctggaactcctgacctcaagtgatccacctgccttggcctcccaaagtgctgggattttaggtgtgagccacctcgcctggcaagggattctgttcttagtccttgaaaaaataaagttctgaatcttcaa

SEQ ID NO: 345839 - DNA, 3424 bp, Homo sapiens
ttttccctctcctctcttggggccccttgtgtccacgaaccctggtgcccgctacctgtgggccccccctgggggttctcttatgggcgcgtccccccctttttcttctctctcttttctcgctctcttttatgccgttgtaagatttattttggctctccccgcctgttctttgcacattaaaaatgaaaaagtttgtagaactaagctaagcagatggtcttcctgcaaaaagaccgggctgaagtaaagcattgttttggagctggttcacagaaaaaaggcaaaactggttatcctgacttcaagctccaacataaactgctcgctttctccgggaaacttgccccgccacacacacttgactgcgtggccagttctttcgaagcctctcgctcccaacacggagttcctcccatttcttcacagtcggctctcagcagctgctgctggtttctcggctccagcaccacgagtaccgcactctgaggtttacaaagcactctgcttcaccgactgtgatcctcacagtcctgtccggtggcctcacgcaggtggcggtgcagcctttcaggcccagagcggccaggagcgaagcccgcagccccgcctggaagcgcagcgcggtcggtcgcgcgcccctgaggcttggaggcctgggcttcccccagcagcgctcgagcaccgcccagtcgagcctcacaccggatgccacttcatatttgggcccagagctcaattcgcgccgatgcggtccgccgtccttaaatctcttcagccaggatctctccccgactgcaaagcagcctgggcgggagcggcaacatctccacgtcacccttttggagccgccgacattcagaggggcaggacacgggaacgcgcgctgtcttgctttacggcgcgggtgcgcgagtttgcggcagcgtgacgccctcaagttttggcgggaaaagcgctgcatttggattcctgcagtggtgggcaaaggacagtccgccgaggtgctcggtggagtcatggcagtgccctttgtggaagactgggacttggtgcaaaccctgggagaaggtgcctatggagaagttcaacttgctgtgaatagagtaactgaagaagcagtcgcagtgaagattgtagatatgaagcgtgccgtagactgtccagaaaatattaagaaagagatctgtatcaataaaatgctaaatcatgaaaatgtagtaaaattctatggtcacaggagagaaggcaatatccaatatttatttctggagtactgtagtggaggagagctttttgacagaatagagccagacataggcatgcctgaaccagatgctcagagattcttccatcaactcatggcaggggtggtttatctgcatggtattggaataactcacagggatattaaaccagaaaatcttctgttggatgaaagggataacctcaaaatctcagactttggcttggcaacagtatttcggtataataatcgtgagcgtttgttgaacaagatgtgtggtactttaccatatgttgctccagaacttctgaagagaagagaatttcatgcagaaccagttgatgtttggtcctgtggaatagtacttactgcaatgctcgctggagaattgccatgggaccaacccagtgacagctgtcaggagtattctgactggaaagaaaaaaaaacatacctcaacccttggaaaaaaatcgattctgctcctctagctctgctgcataaaatcttagttgagaatccatcagcaagaattaccattccagacatcaaaaaagatagatggtacaacaaacccctcaagaaaggggcaaaaaggccccgagtcacttcaggtggtgtgtcagagtctcccagtggattttctaagcacattcaatccaatttggacttctctccagtaaacagtgcttctagtgaagaaaatgtgaagtactccagttctcagccagaaccccgcacaggtctttccttatgggataccagcccctcatacattgataaattggtacaagggatcagcttttcccagcccacatgtcctgatcatatgcttttgaatagtcagttacttggcaccccaggatcctcacagaacccctggcagcggttggtcaaaagaatgacacgattctttaccaaattggatgcagacaaatcttatcaatgcctgaaagagacttgtgagaagttgggctatcaatggaagaaaagttgtatgaatcaggttactatatcaacaactgataggagaaacaataaactcattttcaaagtgaatttgttagaaatggatgataaaatattggttgacttccggctttctaagggtgatggattggagttcaagagacacttcctgaagattaaagggaagctgattgatattgtgagcagccagaaggtttggcttcctgccacatgatcggaccatcggctctggggagttgaggccttggctcctgcctgtagtcccagctacttaggaggctgagagaggaggatcgcgtgaacctggaagtttgaggctgtagtgagctatgattgcaccagtgcactccagcttggatgacagagtaagaccctacctctaataaaaatttttaaaattgtaaaacattataaaattaattcagttattttaatctgaagccaagaacatgtagaatgttatgattagagtttatcacatattaatgtatactggcaaattgtgttactggagtatacccataggaggaataaattcaaacctgttttatttatttgaacctatttacggtatgcttaagaattgaatcagtataaattctcaaatatgggagaaattttgttcttgagaattatctgagtcattaatatttttcaaaaacagctctcactgacttgaacctcttctgtaagctctaaccttttacctgctttacatttccacttgaatgtctagtaggcatctcttgaccaaaaacagcttttgattcctgttctccaacctgttcctctcctagttttctccatctcagaaatgttacttcctctgcaaagtctttccctgacttatctaaaataataacctcctctgtttgctgtgggaatttgtatagaatggtgggaaaatttcaagtttcatatttggattagctctgacatttatttatctgaacactggtaattgcctcagtaaagacactgataataagtaccttttagagttattttaatctttaatgctttaatgtgtaggaagagtatagtgtcctgttttgcacagaaaggcattctgtaaataataagttgccttaattttcctgtaatgttcattatattgttgtgggaaggtatttactcctattattaaaaataaaaatgtgtaaaatttaaaatacctgaagataacag

SEQ ID NO: 345840 - DNA, 3369 bp, Homo sapiens
  misc_feature (2932)..(2932): n is a, c, g, or t
ttttccctctcctctcttggggccccttgtgtccacgaaccctggtgcccgctacctgtgggccccccctgggggttctcttatgggcgcgtccccccctttttcttctctctcttttctcgctctcttttatgccgttgtaagatttattttggctctccccgcctgttctttgcacattaaaaatgaaaaagtttgtagaactaagctaagcagatggtcttcctgcaaaaagaccgggctgaagtaaagcattgttttggagctggttcacagaaaaaaggcaaaactggttatcctgacttcaagctccaacataaactgctcgctttctccgggaaacttgccccgccacacacacttgactgcgtggccagttctttcgaagcctctcgctcccaacacggagttcctcccatttcttcacagtcggctctcagcagctgctgctggtttctcggctccagcaccacgagtaccgcactctgaggtttacaaagcactctgcttcaccgactgtgatcctcacagtcctgtccggtggcctcacgcaggtggcggtgcagcctttcaggcccagagcggccaggagcgaagcccgcagccccgcctggaagcgcagcgcggtcggtcgcgcgcccctgaggcttggaggcctgggcttcccccagcagcgctcgagcaccgcccagtcgagcctcacaccggatgccacttcatatttgggcccagagctcaattcgcgccgatgcggtccgccgtccttaaatctcttcagccaggatctctccccgactgcaaagcagcctgggcgggagcggcaacatctccacgtcacccttttggagccgccgacattcagaggggcaggacacgggaacgcgcgctgtcttgctttacggcgcgggtgcgcgagtttgcggcagcgtgacgccctcaagttttggcgggaaaagcgctgcatttggattcctgcagtggtgggcaaaggacagtccgccgaggtgctcggtggagtcatggcagtgccctttgtggaagactgggacttggtgcaaaccctgggagaaggtgcctatggagaagttcaacttgctgtgaatagagtaactgaagaagcagtcgcagtgaagattgtagatatgaagcgtgccgtagactgtccagaaaatattaagaaagagatctgtatcaataaaatgctaaatcatgaaaatgtagtaaaattctatggtcacaggagagaaggcaatatccaatatttatttctggagtactgtagtggaggagagctttttgacagaatagagccagacataggcatgcctgaaccagatgctcagagattcttccatcaactcatggcaggggtggtttatctgcatggtattggaataactcacagggatattaaaccagaaaatcttctgttggatgaaagggataacctcaaaatctcagactttggcttggcaacagtatttcggtataataatcgtgagcgtttgttgaacaagatgtgtggtactttaccatatgttgctccagaacttctgaagagaagagaatttcatgcagaaccagttgatgtttggtcctgtggaatagtacttactgcaatgctcgctggagaattgccatgggaccaacccagtgacagctgtcaggagtattctgactggaaagaaaaaaaaacatacctcaacccttggaaaaaaatcgattctgctcctctagctctgctgcataaaatcttagttgagaatccatcagcaagaattaccattccagacatcaaaaaagatagatggtacaacaaacccctcaagaaaggggcaaaaaggccccgagtcacttcaggtggtgtgtcagagtctcccagtggattttctaagcacattcaatccaatttggacttctctccagtaaacagtgcttctagtgaagaaaatgtgaagtactccagttctcagccagaaccccgcacaggtctttccttatgggataccagcccctcatacattgataaattggtacaagggatcagcttttcccagcccacatgtcctgatcatatgcttttgaatagtcagttacttggcaccccaggatcctcacagaacccctggcagcggttggtcaaaagaatgacacgattctttaccaaattggatgcagacaaatcttatcaatgcctgaaagagacttgtgagaagttgggctatcaatggaagaaaagttgtatgaatcaggttactatatcaacaactgataggagaaacaataaactcattttcaaagtgaatttgttagaaatggatgataaaatattggttgacttccggctttctaagggtgatggattggagttcaagagacacttcctgaagattaaagggaagctgattgatattgtgagcagccagaaggtttggcttcctgccacatgatcggaccatcggctctggggagttgaggccttggctcctgcctgtagtcccagctacttaggaggctgagagaggaggatcgcgtgaacctggaagtttgaggctgtagtgagctatgattgcaccagtgcactccagcttggatgacagaatggagtttcactcttgtctcccaggctggagtacaatggcatgatctcagcttactgcaacctccgtctcctgggttcaagcgattctcctgcctcagccttccaagtagctgggattacaggtgcccaccaccacacctggctaggttttgtatttttagtagagatggggttttttcatgttggccaggctgatctggaactcctgacctcaagtgatccacctgccttggcctcccaaagtgctgggattttaggtgtgagccacctcgcctggcaagggattctgttcttagtccttgaaaaaataaagttctgaatcttcaaaanaaaaaaaaagaaaaaaaaaaaaaagggggggggcgcgcccacaaaaatccccccgggggggcccccacaagggagcgcgaccgcccggttttgtgtggagaaaggggggcccccactaggggggggcgctataaaggagggggcggggggggcgcggggtgttaaaaaaaaggccgtgtatggagcgggtgggaaaaaaattgcgtattatggtggaaacactcctttggtggaaagaaagacccaccatcaaattcggggggggggggagaacaaattggtggggaccacacaatcctcccctaagaaagttattaaaccccccagtggagagacaataaaccatttgacgggttactaattgtttgttacacaacgctctaattctctcgcaataaaaactctcgtccagggatgtattgaagacatattttccc

SEQ ID NO: 345841 - DNA, 2687 bp, Homo sapiens
  misc_feature (2513)..(2513): n is a, c, g, or t
  misc_feature (2531)..(2531): n is a, c, g, or t
  misc_feature (2543)..(2543): n is a, c, g, or t
  misc_feature (2545)..(2545): n is a, c, g, or t
  misc_feature (2561)..(2561): n is a, c, g, or t
  misc_feature (2563)..(2563): n is a, c, g, or t
  misc_feature (2583)..(2583): n is a, c, g, or t
  misc_feature (2611)..(2611): n is a, c, g, or t
  misc_feature (2621)..(2621): n is a, c, g, or t
  misc_feature (2623)..(2623): n is a, c, g, or t
  misc_feature (2660)..(2660): n is a, c, g, or t
ttttccctctcctctcttggggccccttgtgtccacgaaccctggtgcccgctacctgtgggccccccctgggggttctcttatgggcgcgtccccccctttttcttctctctcttttctcgctctcttttatgccgttgtaagatttattttggctctccccgcctgttctttgcacattaaaaatgaaaaagtttgtagaactaagctaagcagatggtcttcctgcaaaaagaccgggctgaagtaaagcattgttttggagctggttcacagaaaaaaggcaaaactggttatcctgacttcaagctccaacataaactgctcgctttctccgggaaacttgccccgccacacacacttgactgcgtggccagttctttcgaagcctctcgctcccaacacggagttcctcccatttcttcacagtcggctctcagcagctgctgctggtttctcggctccagcaccacgagtaccgcactctgaggtttacaaagcactctgcttcaccgactgtgatcctcacagtcctgtccggtggcctcacgcaggtggcggtgcagcctttcaggcccagagcggccaggagcgaagcccgcagccccgcctggaagcgcagcgcggtcggtcgcgcgcccctgaggcttggaggcctgggcttcccccagcagcgctcgagcaccgcccagtcgagcctcacaccggatgccacttcatatttgggcccagagctcaattcgcgccgatgcggtccgccgtccttaaatctcttcagccaggatctctccccgactgcaaagcagcctgggcgggagcggcaacatctccacgtcacccttttggagccgccgacattcagaggggcaggacacgggaacgcgcgctgtcttgctttacggcgcgggtgcgcgagtttgcggcagcgtgacgccctcaagttttggcgggaaaagcgctgcatttggattcctgcagtggtgggcaaaggacagtccgccgaggtgctcggtggagtcatggcagtgccctttgtggaagactgggacttggtgcaaaccctgggagaaggtgcctatggagaagttcaacttgctgtgaatagagtaactgaagaagcagtcgcagtgaagattgtagatatgaagcgtgccgtagactgtccagaaaatattaagaaagagatctgtatcaataaaatgctaaatcatgaaaatgtagtaaaattctatggtcacaggagagaaggcaatatccaatatttatttctggagtactgtagtggaggagagctttttgacagaatagagccagacataggcatgcctgaaccagatgctcagagattcttccatcaactcatggcaggggtggtttatctgcatggtattggaataactcacagggatattaaaccagaaaatcttctgttggatgaaagggataacctcaaaatctcagactttggcttggcaacagtatttcggtataataatcgtgagcgtttgttgaacaagatgtgtggtactttaccatatgttgctccagaacttctgaagagaagagaatttcatgcagaaccagttgatgtttggtcctgtggaatagtacttactgcaatgctcgctggagaattgccatgggaccaacccagtgacagctgtcaggagtattctgactggaaagaaaaaaaaacatacctcaacccttggaaaaaaatcgattctgctcctctagctctgctgcataaaatcttagttgagaatccatcagcaagaattaccattccagacatcaaaaaagatagatggtacaacaaacccctcaagaaaggggcaaaaaggccccgagtcacttcaggtggtgtgtcagagtctcccagtggattttctaagcacattcaatccaatttggacttctctccagtaaacagtgcttctagtgaagaaaatgtgaagtactccagttctcagccagaaccccgcacaggtctttccttatgggataccagcccctcatacattgataaattggtacaagggatcagcttttcccagcccacatgtcctgatcatatgcttttgaatagtcagttacttggcaccccaggatcctcacagaacccctggcagcggttggtcaaaagaatgacacgattctttaccaaattggatgcagacaaatcttatcaatgcctgaaagagacttgtgagaagttgggctatcaatggaagaaaagttgtatgaatcaggttactatatcaacaactgataggagaaacaataaactcattttcaaagtgaatttgttagaaatggatgataaaatattggttgacttccggctttctaagggtgatggattggagttcaagagacacttcctgaagattaaagggaagctgattgatattgtgagcagccagaaggtttggcttcctgccacatgatcggaccatcggctctggggacgcctctgcgcgcgcaatcctgcgcttgagcgcgttgcgctntttgctttgctagcttanagcttaatttgncncgcgctgcagcagagngnggcattgcgctgcaatttgncaagctttgcaggctgctagctgagctnatgcattgcnanaagctgcaatttaagctttgcgcatgcaaagcaatgncagctttttattttttgctttttttag

SEQ ID NO: 345842 - DNA, 2219 bp, Homo sapiens
gagcaattgggaggaggcgctgccgcaggcgttttctgccccataccgctccctatatcctcttcctctcttccccagacccccacctctccctcctccttccccagtcgttcgccggaaagcatttgtctcccacctcttcataacaacaattaatttcctctggggcctgaggagggcagaatttcaaccttcggtgtgcttgggagtggcgattgtgatttacacgacaaaatgccgaggtgctcggtggagtcatggcagtgccctttgtggaagactgggacttggtgcaaaccctgggagaaggtgcctatggagaagttcaacttgctgtgaatagagtaactgaagaagcagtcgcagtgaagattgtagatatgaagcgtgccgtagactgtccagaaaatattaagaaagagatctgtatcaataaaatgctaaatcatgaaaatgtagtaaaattctatggtcacaggagagaaggcaatatccaatatttatttctggagtactgtagtggaggagagctttttgacagaatagagccagacataggcatgcctgaaccagatgctcagagattcttccatcaactcatggcaggggtggtttatctgcatggtattggaataactcacagggatattaaaccagaaaatcttctgttggatgaaagggataacctcaaaatctcagactttggcttggcaacagtatttcggtataataatcgtgagcgtttgttgaacaagatgtgtggtactttaccatatgttgctccagaacttctgaagagaagagaatttcatgcagaaccagttgatgtttggtcctgtggaatagtacttactgcaatgctcgctggagaattgccatgggaccaacccagtgacagctgtcaggagtattctgactggaaagaaaaaaaaacatacctcaacccttggaaaaaaatcgattctgctcctctagctctgctgcataaaatcttagttgagaatccatcagcaagaattaccattccagacatcaaaaaagatagatggtacaacaaacccctcaagaaaggggcaaaaaggccccgagtcacttcaggtggtgtgtcagagtctcccagtggattttctaagcacattcaatccaatttggacttctctccagtaaacagtgcttctagtgaagaaaatgtgaagtactccagttctcagccagaaccccgcacaggtctttccttatgggataccagcccctcatacattgataaattggtacaagggatcagcttttcccagcccacatgtcctgatcatatgcttttgaatagtcagttacttggcaccccaggatcctcacagaacccctggcagcggttggtcaaaagaatgacacgattctttaccaaattggatgcagacaaatcttatcaatgcctgaaagagacttgtgagaagttgggctatcaatggaagaaaagttgtatgaatcaggttactatatcaacaactgataggagaaacaataaactcattttcaaagtgaatttgttagaaatggatgataaaatattggttgacttccggctttctaagggtgatggattggagttcaagagacacttcctgaagattaaagggaagctgattgatattgtgagcagccagaaggtttggcttcctgccacatgatcggaccatcggctctggggaatcctggtgaatatagtgctgctatgttgacattattcttcctagagaagattatcctgtcctgcaaactgcaaatagtagttcctgaagtgttcacttccctgtttatccaaacatcttccaatttattttgtttgttcggcatacaaataatacctatatcttaattgtaagcaaaactttggggaaaggatgaatagaattcatttgattatttcttcatgtgtgtttagtatctgaatttgaaactcatctggtggaaaccaagtttcaggggacatgagttttccagcttttatacacacgtatctcatttttatcaaaacattttgtttaattcaaaaagtacatattccatgttgatttaattctaagatgaaccaataaagacataattcttgtgacttttggacagtagatttatcagtctgtgaagcgaagccagcttcaaaacatatccccaagatttgtacttatattttcaaaagggcctggccagttatataaacc

SEQ ID NO: 345843 - DNA, 2062 bp, Homo sapiens
gagcaattgggaggaggcgctgccgcaggcgttttctgccccataccgctccctatatcctcttcctctcttccccagacccccacctctccctcctccttccccagtcgttcgccggaaagcatttgtctcccacctcttcataacaacaattaatttcctctggggcctgaggagggcagaatttcaaccttcggtgtgcttgggagtggcgattgtgatttacacgacaaaatggtcaggtttagaatagttgttcgtggttgaaagacttggataaatgtggatgagatagaaggggaagccgaggtgctcggtggagtcatggcagtgccctttgtggaagactgggacttggtgcaaaccctgggagaaggtgcctatggagaagccagacataggcatgcctgaaccagatgctcagagattcttccatcaactcatggcaggggtggtttatctgcatggtattggaataactcacagggatattaaaccagaaaatcttctgttggatgaaagggataacctcaaaatctcagactttggcttggcaacagtatttcggtataataatcgtgagcgtttgttgaacaagatgtgtggtactttaccatatgttgctccagaacttctgaagagaagagaatttcatgcagaaccagttgatgtttggtcctgtggaatagtacttactgcaatgctcgctggagaattgccatgggaccaacccagtgacagctgtcaggagtattctgactggaaagaaaaaaaaacatacctcaacccttggaaaaaaatcgattctgctcctctagctctgctgcataaaatcttagttgagaatccatcagcaagaattaccattccagacatcaaaaaagatagatggtacaacaaacccctcaagaaaggggcaaaaaggccccgagtcacttcaggtggtgtgtcagagtctcccagtggattttctaagcacattcaatccaatttggacttctctccagtaaacagtgcttctagtgaagaaaatgtgaagtactccagttctcagccagaaccccgcacaggtctttccttatgggataccagcccctcatacattgataaattggtacaagggatcagcttttcccagcccacatgtcctgatcatatgcttttgaatagtcagttacttggcaccccaggatcctcacagaacccctggcagcggttggtcaaaagaatgacacgattctttaccaaattggatgcagacaaatcttatcaatgcctgaaagagacttgtgagaagttgggctatcaatggaagaaaagttgtatgaatcaggttactatatcaacaactgataggagaaacaataaactcattttcaaagtgaatttgttagaaatggatgataaaatattggttgacttccggctttctaagggtgatggattggagttcaagagacacttcctgaagattaaagggaagctgattgatattgtgagcagccagaaggtttggcttcctgccacatgatcggaccatcggctctggggaatcctggtgaatatagtgctgctatgttgacattattcttcctagagaagattatcctgtcctgcaaactgcaaatagtagttcctgaagtgttcacttccctgtttatccaaacatcttccaatttattttgtttgttcggcatacaaataatacctatatcttaattgtaagcaaaactttggggaaaggatgaatagaattcatttgattatttcttcatgtgtgtttagtatctgaatttgaaactcatctggtggaaaccaagtttcaggggacatgagttttccagcttttatacacacgtatctcatttttatcaaaacattttgtttaattcaaaaagtacatattccatgttgatttaattctaagatgaaccaataaagacataattcttgtgacttttggacagtagatttatcagtctgtgaagcgaagccagcttcaaaacatatccccaagatttgtacttatattttcaaaagggcctggccagttatataaacc

SEQ ID NO: 345844 - DNA, 520 bp, Homo sapiens
gtatctttttgttaatctcgtcacatgaggagaaacatttccatctggctcttgttctcagttgcaaacaattgagaatcagatcagggaagactactccaagatacagcagcagagaaaaactgcatgaaattaaagcagtaatttagtagctttaattctttctcttccccaggaataatatttagacataagtaggctaacagaaaatgtgtttcttacctcaagccataggcttctctaacatgattctttcgtgaatgttgtcgtaatgtttgtttttagctctgctgcataaaatcttagttgagaatccatcagcaagaattaccattccagacatcaaaaaagatagatggtacaacaaacccctcaagaaaggtaatatccttaaactacaagtttgtttgtttttctgtggaagaaaaggtaattgcaaagttattatcacaagtcaacaacacatgatagctatgatctctgtcctcatggagattataatgtccagtagaaaaaaata

SEQ ID NO: 345845 - DNA, 2981 bp, Homo sapiens
ttttccctctcctctcttggggccccttgtgtccacgaaccctggtgcccgctacctgtgggccccccctgggggttctcttatgggcgcgtccccccctttttcttctctctcttttctcgctctcttttatgccgttgtaagatttattttggctctccccgcctgttctttgcacattaaaaatgaaaaagtttgtagaactaagctaagcagatggtcttcctgcaaaaagaccgggctgaagtaaagcattgttttggagctggttcacagaaaaaaggcaaaactggttatcctgacttcaagctccaacataaactgctcgctttctccgggaaacttgccccgccacacacacttgactgcgtggccagttctttcgaagcctctcgctcccaacacggagttcctcccatttcttcacagtcggctctcagcagctgctgctggtttctcggctccagcaccacgagtaccgcactctgaggtttacaaagcactctgcttcaccgactgtgatcctcacagtcctgtccggtggcctcacgcaggtggcggtgcagcctttcaggcccagagcggccaggagcgaagcccgcagccccgcctggaagcgcagcgcggtcggtcgcgcgcccctgaggcttggaggcctgggcttcccccagcagcgctcgagcaccgcccagtcgagcctcacaccggatgccacttcatatttgggcccagagctcaattcgcgccgatgcggtccgccgtccttaaatctcttcagccaggatctctccccgactgcaaagcagcctgggcgggagcggcaacatctccacgtcacccttttggagccgccgacattcagaggggcaggacacgggaacgcgcgctgtcttgctttacggcgcgggtgcgcgagtttgcggcagcgtgacgccctcaagttttggcgggaaaagcgctgcatttggattcctgcagtggtgggcaaaggacagtccgccgaggtgctcggtggagtcatggcagtgccctttgtggaagactgggacttggtgcaaaccctgggagaaggtgcctatggagaagttcaacttgctgtgaatagagtaactgaagaagcagtcgcagtgaagattgtagatatgaagcgtgccgtagactgtccagaaaatattaagaaagagatctgtatcaataaaatgctaaatcatgaaaatgtagtaaaattctatggtcacaggagagaaggcaatatccaatatttatttctggagtactgtagtggaggagagctttttgacagaatagagccagacataggcatgcctgaaccagatgctcagagattcttccatcaactcatggcaggggtggtttatctgcatggtattggaataactcacagggatattaaaccagaaaatcttctgttggatgaaagggataacctcaaaatctcagactttggcttggcaacagtatttcggtataataatcgtgagcgtttgttgaacaagatgtgtggtactttaccatatgttgctccagaacttctgaagagaagagaatttcatgcagaaccagttgatgtttggtcctgtggaatagtacttactgcaatgctcgctggagaattgccatgggaccaacccagtgacagctgtcaggagtattctgactggaaagaaaaaaaaacatacctcaacccttggaaaaaaatcgattctgctcctctagctctgctgcataaaatcttagttgagaatccatcagcaagaattaccattccagacatcaaaaaagatagatggtacaacaaacccctcaagaaaggggcaaaaaggccccgagtcacttcaggtggtgtgtcagagtctcccagtggattttctaagcacattcaatccaatttggacttctctccagtaaacagtgcttctagtgaagaaaatgtgaagtactccagttctcagccagaaccccgcacaggtctttccttatgggataccagcccctcatacattgataaattggtacaagggatcagcttttcccagcccacatgtcctgatcatatgcttttgaatagtcagttacttggcaccccaggatcctcacagaacccctggcagcggttggtcaaaagaatgacacgattctttaccaaattggatgcagacaaatcttatcaatgcctgaaagagacttgtgagaagttgggctatcaatggaagaaaagttgtatgaatcaggttactatatcaacaactgataggagaaacaataaactcattttcaaagtgaatttgttagaaatggatgataaaatattggttgacttccggctttctaagggtgatggattggagttcaagagacacttcctgaagattaaagggaagctgattgatattgtgagcagccagaaggtttggcttcctgccacatgatcggaccatcggctctggggaatcctggtgaatatagtgctgctatgttgacattattcttcctagagaagattatcctgtcctgcaaactgcaaatagtagttcctgaagtgttcacttccctgtttatccaaacatcttccaatttattttgtttgttcggcatacaaataatacctatatcttaattgtaagcaaaactttggggaaaggatgaatagaattcatttgattatttcttcatgtgtgtttagtatctgaatttgaaactcatctggtggaaaccaagtttcaggggacatgagttttccagcttttatacacacgtatctcatttttatcaaaacattttgtttaattcaaaaagtacatattccatgttgatttaattctaagatgaaccaataaagacataattcttgtgacttttggacagtagatttatcagtctgtgaagcgaagccagcttcaaaacatatccccaagatttgtacttatattttcaaaagggcctggccagttatataaacc

SEQ ID NO: 345846 - DNA, 2575 bp, Homo sapiens
  misc_feature (145)..(145): n is a, c, g, or t
  misc_feature (189)..(189): n is a, c, g, or t
  misc_feature (206)..(206): n is a, c, g, or t
  misc_feature (213)..(213): n is a, c, g, or t
agtgaggaaactcttggggccccagcggcgccccccccaaaggttccccttggctgtttgccgtgggaataaggtgccccgcctttgggcgtttcccggggccctttggccgccccccgtataaaccccaccttttcccaacaangttcgggtctcttcaagcaagctgctcgctggtttcttcggggncttcctcaaggcccaancccacanggaggtttacccgcaacttctgaggtttacaaagcactctgcttcaccgactgtgatcctcacagtcctgtccggtggcctcacaccggatgccacttcatatttgggcccagagctcaattcgcgccgatgcggtccgccgtccttaaatctcttcagccaggatctctccccgactgcaaagcagcctgggcgggagcggcaacatctccacgtcacccttttggagccgccgacattcagaggggcaggacacgggaacgcgcgctgtcttgctttacggcgcgggtgcgcgagtttgcggcagcgtgacgccctcaagttttggcgggaaaagcgctgcatttggattcctgcagtggtgggcaaaggacagtccgccgaggtgctcggtggagtcatggcagtgccctttgtggaagactgggacttggtgcaaaccctgggagaaggtgcctatggagaagttcaacttgctgtgaatagagtaactgaagaagcagtcgcagtgaagattgtagatatgaagcgtgccgtagactgtccagaaaatattaagaaagagatctgtatcaataaaatgctaaatcatgaaaatgtagtaaaattctatggtcacaggagagaaggcaatatccaatatttatttctggagtactgtagtggaggagagctttttgacagaatagagccagacataggcatgcctgaaccagatgctcagagattcttccatcaactcatggcaggggtggtttatctgcatggtattggaataactcacagggatattaaaccagaaaatcttctgttggatgaaagggataacctcaaaatctcagactttggcttggcaacagtatttcggtataataatcgtgagcgtttgttgaacaagatgtgtggtactttaccatatgttgctccagaacttctgaagagaagagaatttcatgcagaaccagttgatgtttggtcctgtggaatagtacttactgcaatgctcgctggagaattgccatgggaccaacccagtgacagctgtcaggagtattctgactggaaagaaaaaaaaacatacctcaacccttggaaaaaaatcgattctgctcctctagctctgctgcataaaatcttagttgagaatccatcagcaagaattaccattccagacatcaaaaaagatagatggtacaacaaacccctcaagaaaggggcaaaaaggccccgagtcacttcaggtggtgtgtcagagtctcccagtggattttctaagcacattcaatccaatttggacttctctccagtaaacagtgcttctagtgaagaaaatgtgaagtactccagttctcagccagaaccccgcacaggtctttccttatgggataccagcccctcatacattgataaattggtacaagggatcagcttttcccagcccacatgtcctgatcatatgcttttgaatagtcagttacttggcaccccaggatcctcacagaacccctggcagcggttggtcaaaagaatgacacgattctttaccaaattggatgcagacaaatcttatcaatgcctgaaagagacttgtgagaagttgggctatcaatggaagaaaagttgtatgaatcaggttactatatcaacaactgataggagaaacaataaactcattttcaaagtgaatttgttagaaatggatgataaaatattggttgacttccggctttctaagggtgatggattggagttcaagagacacttcctgaagattaaagggaagctgattgatattgtgagcagccagaaggtttggcttcctgccacatgatcggaccatcggctctggggaatcctggtgaatatagtgctgctatgttgacattattcttcctagagaagattatcctgtcctgcaaactgcaaatagtagttcctgaagtgttcacttccctgtttatccaaacatcttccaatttattttgtttgttcggcatacaaataatacctatatcttaattgtaagcaaaactttggggaaaggatgaatagaattcatttgattatttcttcatgtgtgtttagtatctgaatttgaaactcatctggtggaaaccaagtttcaggggacatgagttttccagcttttatacacacgtatctcatttttatcaaaacattttgtttaattcaaaaagtacatattccatgttgatttaattctaagatgaaccaataaagacataattcttgtgacttttggacagtagatttatcagtctgtgaagcgaagccagcttcaaaacatatccccaagatttgtacttatattttcaaaagggcctggccagttatataaacc

SEQ ID NO: 345847 - DNA, 2929 bp, Homo sapiens
ttttccctctcctctcttggggccccttgtgtccacgaaccctggtgcccgctacctgtgggccccccctgggggttctcttatgggcgcgtccccccctttttcttctctctcttttctcgctctcttttatgccgttgtaagatttattttggctctccccgcctgttctttgcacattaaaaatgaaaaagtttgtagaactaagctaagcagatggtcttcctgcaaaaagaccgggctgaagtaaagcattgttttggagctggttcacagaaaaaaggcaaaactggttatcctgacttcaagctccaacataaactgctcgctttctccgggaaacttgccccgccacacacacttgactgcgtggccagttctttcgaagcctctcgctcccaacacggagttcctcccatttcttcacagtcggctctcagcagctgctgctggtttctcggctccagcaccacgagtaccgcactctgaggtttacaaagcactctgcttcaccgactgtgatcctcacagtcctgtccggtggcctcacgcaggtggcggtgcagcctttcaggcccagagcggccaggagcgaagcccgcagccccgcctggaagcgcagcgcggtcggtcgcgcgcccctgaggcttggaggcctgggcttcccccagcagcgctcgagcaccgcccagtcgagcctcacaccggatgccacttcatatttgggcccagagctcaattcgcgccgatgcggtccgccgtccttaaatctcttcagccaggatctctccccgactgcaaagcagcctgggcgggagcggcaacatctccacgtcacccttttggagccgccgacattcagaggggcaggacacgggaacgcgcgctgtcttgctttacggcgcgggtgcgcgagtttgcggcagcgtgacgccctcaagttttggcgggaaaagcgctgcatttggattcctgcagtggtgggcaaaggacagtccgccgaggtgctcggtggagtcatggcagtgccctttgtggaagactgggacttggtgcaaaccctgggagaaggtgcctatggagaagttcaacttgctgtgaatagagtaactgaagaagcagtcgcagtgaagattgtagatatgaagcgtgccgtagactgtccagaaaatattaagaaagagatctgtatcaataaaatgctaaatcatgaaaatgtagtaaaattctatggtcacaggagagaaggcaatatccaatatttatttctggagtactgtagtggaggagagctttttgacagaatagagccagacataggcatgcctgaaccagatgctcagagattcttccatcaactcatggcaggggtggtttatctgcatggtattggaataactcacagggatattaaaccagaaaatcttctgttggatgaaagggataacctcaaaatctcagactttggcttggcaacagtatttcggtataataatcgtgagcgtttgttgaacaagatgtgtggtactttaccatatgttgctccagaacttctgaagagaagagaatttcatgcagaaccagttgatgtttggtcctgtggaatagtacttactgcaatgctcgctggagaattgccatgggaccaacccagtgacagctgtcaggagtattctgactggaaagaaaaaaaaacatacctcaacccttggaaaaaaatcgattctgctcctctagctctgctgcataaaatcttagttgagaatccatcagcaagaattaccattccagacatcaaaaaagatagatggtacaacaaacccctcaagaaaggggcaaaaaggccccgagtcacttcaggtggtgtgtcagagtctcccagtggattttctaagcacattcaatccaatttggacttctctccagtaaacagtgcttctagtgaagaaaatgtgaagtactccagttctcagccagaaccccgcacaggtctttccttatgggataccagcccctcatacattgataaattggtacaagggatcagcttttcccagcccacatgtcctgatcatatgcttttgaatagtcagttacttggcaccccaggatcctcacagaacccctggcagcggttggtcaaaagaatgacacgattctttaccaaattggatgcagacaaatcttatcaatgcctgaaagagacttgtgagaagttgggctatcaatggaagaaaagttgtatgaatcaggttactatatcaacaactgataggagaaacaataaactcattttcaaagtgaatttgttagaaatggatgataaaatattggttgacttccggctttctaagggtgatggattggagttcaagagacacttcctgaagattaaagggaagctgattgatattgtgagcagccagaaggtttggcttcctgccacatgatcggaccatcggctctggggagttgaggccttggctcctgcctgtagtcccagctacttaggaggctgagagaggaggatcgcgtgaacctggaagtttgaggctgtagtgagctatgattgcaccagtgcactccagcttggatgacagaatggagtttcactcttgtctcccaggctggagtacaatggcatgatctcagcttactgcaacctccgtctcctgggttcaagcgattctcctgcctcagccttccaagtagctgggattacaggtgcccaccaccacacctggctaggttttgtatttttagtagagatggggttttttcatgttggccaggctgatctggaactcctgacctcaagtgatccacctgccttggcctcccaaagtgctgggattttaggtgtgagccacctcgcctggcaagggattctgttcttagtccttgaaaaaataaagttctgaatcttcaa

SEQ ID NO: 345848 - DNA, 3287 bp, Homo sapiens
  misc_feature (2850)..(2850): n is a, c, g, or t
ttttccctctcctctcttggggccccttgtgtccacgaaccctggtgcccgctacctgtgggccccccctgggggttctcttatgggcgcgtccccccctttttcttctctctcttttctcgctctcttttatgccgttgtaagatttattttggctctccccgcctgttctttgcacattaaaaatgaaaaagtttgtagaactaagctaagcagatggtcttcctgcaaaaagaccgggctgaagtaaagcattgttttggagctggttcacagaaaaaaggcaaaactggttatcctgacttcaagctccaacataaactgctcgctttctccgggaaacttgccccgccacacacacttgactgcgtggccagttctttcgaagcctctcgctcccaacacggagttcctcccatttcttcacagtcggctctcagcagctgctgctggtttctcggctccagcaccacgagtaccgcactctgaggtttacaaagcactctgcttcaccgactgtgatcctcacagtcctgtccggtggcctcacgcaggtggcggtgcagcctttcaggcccagagcggccaggagcgaagcccgcagccccgcctggaagcgcagcgcggtcggtcgcgcgcccctgaggcttggaggcctgggcttcccccagcagcgctcgagcaccgcccagtcgagcctcacaccggatgccacttcatatttgggcccagagctcaattcgcgccgatgcggtccgccgtccttaaatctcttcagccaggatctctccccgactgcaaagcagcctgggcgggagcggcaacatctccacgtcacccttttggagccgccgacattcagaggggcaggacacgggaacgcgcgctgtcttgctttacggcgcgggtgcgcgagtttgcggcagcgtgacgccctcaagttttggcgggaaaagcgctgcatttggattcctgcagtggtgggcaaaggacagtccgccgaggtgctcggtggagtcatggcagtgccctttgtggaagactgggacttggtgcaaaccctgggagaaggtgcctatggagaagttcaacttgctgtgaatagagtaactgaagaagcagtcgcagtgaagattgtagatatgaagcgtgccgtagactgtccagaaaatattaagaaagagatctgtatcaataaaatgctaaatcatgaaaatgtagtaaaattctatggtcacaggagagaaggcaatatccaatatttatttctggagtactgtagtggaggagagctttttgacagaatagagccagacataggcatgcctgaaccagatgctcagagattcttccatcaactcatggcaggggtggtttatctgcatggtattggaataactcacagggatattaaaccagaaaatcttctgttggatgaaagggataacctcaaaatctcagactttggcttggcaacagtatttcggtataataatcgtgagcgtttgttgaacaagatgtgtggtactttaccatatgttgctccagaacttctgaagagaagagaatttcatgcagaaccagttgatgtttggtcctgtggaatagtacttactgcaatgctcgctggagaattgccatgggaccaacccagtgacagctgtcaggagtattctgactggaaagaaaaaaaaacatacctcaacccttggaaaaaaatcgattctgctcctctagctctgctgcataaaatcttagttgagaatccatcagcaagaattaccattccagacatcaaaaaagatagatggtacaacaaacccctcaagaaaggggcaaaaaggccccgagtcacttcaggtggtgtgtcagagtctcccagtggattttctaagcacattcaatccaatttggacttctctccagtaaacagtgcttctagtgaagaaaatgtgaagtactccagttctcagccagaaccccgcacaggtctttccttatgggataccagcccctcatacattgataaattggtacaagggatcagcttttcccagcccacatgtcctgatcatatgcttttgaatagtcagttacttggcaccccaggatcctcacagaacccctggcagcggttggtcaaaagaatgacacgattctttaccaaattggatgcagacaaatcttatcaatgcctgaaagagacttgtgagaagttgggctatcaatggaagaaaagttgtatgaatcaggttactatatcaacaactgataggagaaacaataaactcattttcaaagtgaatttgttagaaatggatgataaaatattggttgacttccggctttctaagggtgatggattggagttcaagagacacttcctgaagattaaagggaagctgattgatattgtgagcagccagaaggtttggcttcctgccacatgatcggaccatcggctctggggaatggagtttcactcttgtctcccaggctggagtacaatggcatgatctcagcttactgcaacctccgtctcctgggttcaagcgattctcctgcctcagccttccaagtagctgggattacaggtgcccaccaccacacctggctaggttttgtatttttagtagagatggggttttttcatgttggccaggctgatctggaactcctgacctcaagtgatccacctgccttggcctcccaaagtgctgggattttaggtgtgagccacctcgcctggcaagggattctgttcttagtccttgaaaaaataaagttctgaatcttcaaaaaaaagaaaaaaacaagaaagaaaaagaagaaaaaaaagaaaaaaaaaanaaaaaaaaagaaaaaaaaaaaaaagggggggggcgcgcccacaaaaatccccccgggggggcccccacaagggagcgcgaccgcccggttttgtgtggagaaaggggggcccccactaggggggggcgctataaaggagggggcggggggggcgcggggtgttaaaaaaaaggccgtgtatggagcgggtgggaaaaaaattgcgtattatggtggaaacactcctttggtggaaagaaagacccaccatcaaattcggggggggggggagaacaaattggtggggaccacacaatcctcccctaagaaagttattaaaccccccagtggagagacaataaaccatttgacgggttactaattgtttgttacacaacgctctaattctctcgcaataaaaactctcgtccagggatgtattgaagacatattttccc

SEQ ID NO: 345849 - DNA, 2757 bp, Homo sapiens
ttttccctctcctctcttggggccccttgtgtccacgaaccctggtgcccgctacctgtgggccccccctgggggttctcttatgggcgcgtccccccctttttcttctctctcttttctcgctctcttttatgccgttgtaagatttattttggctctccccgcctgttctttgcacattaaaaatgaaaaagtttgtagaactaagctaagcagatggtcttcctgcaaaaagaccgggctgaagtaaagcattgttttggagctggttcacagaaaaaaggcaaaactggttatcctgacttcaagctccaacataaactgctcgctttctccgggaaacttgccccgccacacacacttgactgcgtggccagttctttcgaagcctctcgctcccaacacggagttcctcccatttcttcacagtcggctctcagcagctgctgctggtttctcggctccagcaccacgagtaccgcactctgaggtttacaaagcactctgcttcaccgactgtgatcctcacagtcctgtccggtggcctcacgcaggtggcggtgcagcctttcaggcccagagcggccaggagcgaagcccgcagccccgcctggaagcgcagcgcggtcggtcgcgcgcccctgaggcttggaggcctgggcttcccccagcagcgctcgagcaccgcccagtcgagcctcacaccggatgccacttcatatttgggcccagagctcaattcgcgccgatgcggtccgccgtccttaaatctcttcagccaggatctctccccgactgcaaagcagcctgggcgggagcggcaacatctccacgtcacccttttggagccgccgacattcagaggggcaggacacgggaacgcgcgctgtcttgctttacggcgcgggtgcgcgagtttgcggcagcgtgacgccctcaagttttggcgggaaaagcgctgcatttggattcctgcagtggtgggcaaaggacagtccgccgaggtgctcggtggagtcatggcagtgccctttgtggaagactgggacttggtgcaaaccctgggagaaggtgcctatggagaagccagacataggcatgcctgaaccagatgctcagagattcttccatcaactcatggcaggggtggtttatctgcatggtattggaataactcacagggatattaaaccagaaaatcttctgttggatgaaagggataacctcaaaatctcagactttggcttggcaacagtatttcggtataataatcgtgagcgtttgttgaacaagatgtgtggtactttaccatatgttgctccagaacttctgaagagaagagaatttcatgcagaaccagttgatgtttggtcctgtggaatagtacttactgcaatgctcgctggagaattgccatgggaccaacccagtgacagctgtcaggagtattctgactggaaagaaaaaaaaacatacctcaacccttggaaaaaaatcgattctgctcctctagctctgctgcataaaatcttagttgagaatccatcagcaagaattaccattccagacatcaaaaaagatagatggtacaacaaacccctcaagaaaggggcaaaaaggccccgagtcacttcaggtggtgtgtcagagtctcccagtggattttctaagcacattcaatccaatttggacttctctccagtaaacagtgcttctagtgaagaaaatgtgaagtactccagttctcagccagaaccccgcacaggtctttccttatgggataccagcccctcatacattgataaattggtacaagggatcagcttttcccagcccacatgtcctgatcatatgcttttgaatagtcagttacttggcaccccaggatcctcacagaacccctggcagcggttggtcaaaagaatgacacgattctttaccaaattggatgcagacaaatcttatcaatgcctgaaagagacttgtgagaagttgggctatcaatggaagaaaagttgtatgaatcaggttactatatcaacaactgataggagaaacaataaactcattttcaaagtgaatttgttagaaatggatgataaaatattggttgacttccggctttctaagggtgatggattggagttcaagagacacttcctgaagattaaagggaagctgattgatattgtgagcagccagaaggtttggcttcctgccacatgatcggaccatcggctctggggaatcctggtgaatatagtgctgctatgttgacattattcttcctagagaagattatcctgtcctgcaaactgcaaatagtagttcctgaagtgttcacttccctgtttatccaaacatcttccaatttattttgtttgttcggcatacaaataatacctatatcttaattgtaagcaaaactttggggaaaggatgaatagaattcatttgattatttcttcatgtgtgtttagtatctgaatttgaaactcatctggtggaaaccaagtttcaggggacatgagttttccagcttttatacacacgtatctcatttttatcaaaacattttgtttaattcaaaaagtacatattccatgttgatttaattctaagatgaaccaataaagacataattcttgtgacttttggacagtagatttatcagtctgtgaagcgaagccagcttcaaaacatatccccaagatttgtacttatattttcaaaagggcctggccagttatataaacc

SEQ ID NO: 345850 - DNA, 1878 bp, Homo sapiens
ttttccctctcctctcttggggccccttgtgtccacgaaccctggtgcccgctacctgtgggccccccctgggggttctcttatgggcgcgtccccccctttttcttctctctcttttctcgctctcttttatgccgttgtaagatttattttggctctccccgcctgttctttgcacattaaaaatgaaaaagtttgtagaactaagctaagcagatggtcttcctgcaaaaagaccgggctgaagtaaagcattgttttggagctggttcacagaaaaaaggcaaaactggttatcctgacttcaagctccaacataaactgctcgctttctccgggaaacttgccccgccacacacacttgactgcgtggccagttctttcgaagcctctcgctcccaacacggagttcctcccatttcttcacagtcggctctcagcagctgctgctggtttctcggctccagcaccacgagtaccgcactctgaggtttacaaagcactctgcttcaccgactgtgatcctcacagtcctgtccggtggcctcacgcaggtggcggtgcagcctttcaggcccagagcggccaggagcgaagcccgcagccccgcctggaagcgcagcgcggtcggtcgcgcgcccctgaggcttggaggcctgggcttcccccagcagcgctcgagcaccgcccagtcgagcctcacaccggatgccacttcatatttgggcccagagctcaattcgcgccgatgcggtccgccgtccttaaatctcttcagccaggatctctccccgactgcaaagcagcctgggcgggagcggcaacatctccacgtcacccttttggagccgccgacattcagaggggcaggacacgggaacgcgcgctgtcttgctttacggcgcgggtgcgcgagtttgcggcagcgtgacgccctcaagttttggcgggaaaagcgctgcatttggattcctgcagtggtgggcaaaggacagtccgccgaggtgctcggtggagtcatggcagtgccctttgtggaagactgggacttggtgcaaaccctgggagaaggtgcctatggagaagttcaacttgctgtgaatagagtaactgaagaagcagtcgcagtgaagattgtagatatgaagcgtgccgtagactgtccagaaaatattaagaaagagatctgtatcaataaaatgctaaatcatgaaaatgtagtaaaattctatggtcacaggagagaaggcaatatccaatatttatttctggagtactgtagtggaggagagctttttgacagaatagagccagacataggcatgcctgaaccagatgctcagagattcttccatcaactcatggcaggggtggtttatctgcatggtattggaataactcacagggatattaaaccagaaaatcttctgttggatgaaagggataacctcaaaatctcagactttggcttggcaacagtatttcggtataataatcgtgagcgtttgttgaacaagatgtgtggtactttaccatatgttgctccagaacttctgaagagaagagaatttcatgcagaaccagttgatgtttggtcctgtggaatagtacttactgcaatgctcgctggagaattgccatgggaccaacccagtgacagctgtcaggagtattctgactggaaagaaaaaaaaacatacctcaacccttggaaaaaaatcgattctgctcctctaggtaactgaattatcttgagtgaaagagtaccgatttcttggatatgaagtcttgtgctatttgaattttttcttacttttttttttgttttaaacttacaaataattcatgttcgttgtagataaaatagtaactataagt

SEQ ID NO: 345851 - DNA, 402 bp, Homo sapiens
caggcatgagtctccatgctcagccaaaattacatctgtattttcactaacttttaacagaaatttagcatctcctttaattatgaatgtaggcaacaaatcactggtactggcagtaactgcaatgttattactaatagaaataacagatattttcattttacattacaagtgttgaagatacatctaaatattgtttgcattcagcacactttgtaattataattgatattagacttgctgttagatctttaatacattgataaaaatcagttacatcataaacattttaatattttgataattatatgtgaatataattgtttttctttatgaacccctgtgttttttgcaaatttaaaaaatgtttatttattttctttttttggaggccagagtttg

SEQ ID NO: 345852 - DNA, 1722 bp, Homo sapiens
acaaacaggaggtcggaaggaagcatgtgggggtagatctggaggtgacaagggagggatccttctgggataatgggtcttcagagactgtttcagtttagactccagtgaccccagaactagtgtgattggggttcttgtctccaggataaaaatggtaaagagttgtcagatgaggacataagagcagaagctgacactttcatgtttggaggccatgacaccacggccagtggcctctcctgggtcttgtacaacctcgcgaggcacccagaataccaagaacgctgccggcaggaggtgcaagagcttctgaaggaccgtgagcctaaagagattgaatgggacgacctggcccagttgcccttcctgaccatgtgcctgaaggagagcctgcggttgcatcccccaatccctacattcgcccgcggctgcacccaggacgtggtgctcccagacagccgagtcatccccaaagggaatgtctgtaacatcaacatcttcgcaatccatcacaacccctcagtctggccagaccctgaggtctatgaccccttccgcttcgaccccgaaaacgcccagaagaggtcacctatggcttttattcctttctcggcggggcccaggaactgcatcgggcagaagttcgcgatggcagagatgaaggtggtcctggcgctcacgctgctgcgcttccgcatcctgcccgaccacagggagccacgcaggacgccggagattgttttgcgtgcggaggacggactttggctgcgagtagaacccctgggctgaggcctgcagtgacccacccacctacctttgcatcacctacctttgcaccaattaccttttcagatttccggtaataaatctgtgttggcccctgtgcctgagtcccacggatggccagtagggggcgctggaggactgcggggatctagggcctggctgggaagaggcggggagatgtctctgtgcccaagatactcactgcctctctgggtgagcacaggagccccgtgctgagggtgggatctcccagagtctaagtaaagactttttcccccccaaaataattgtgtattctgatataaatttttgccaatttagaatccctgttttttagctaggtgcatagcagcctgaaatacagatcacatttgaaagcctttcttgaagctcaattggttaagtgactgtggctgtcccatgtgtagaagccaaagattatgtggtaattctggtaacctttcttaagagaaagctgctacagtctgtctgctcagtcctcccctcttccttcctgctgcttggaagatttttttttttttttgagacatggtgtctctcgtcgcccaggccggagtgcagtggctcactgcaacctccacctcctgggttcaagtgattctcctgactcagtcgcctgagtagataggataacaggcgcctaccaccacacccggctaattgtatttttagtacagatggggttttgctatgttggccaggctggtctcaaactcctggcctcaagtgatcagcccacctcagcctcccaaagtgccagaattgcaggtgtgagaataaaaattcttgagtttcaatgtttattttagaatcaggtgctaacatgcaaatttattacaaaggtatattgcatcatgctgaggtttggagtatgaatgactccatcacccatgtagtgagcatagtatctaa

SEQ ID NO: 345853 - DNA, 2695 bp, Homo sapiens
ctccagcctgggcaacagaacgagactccatctcaaaaactagcaaacaaacaaaacaaacaaacaacaacaacaacaaaacttcagagttttgcattcttggcatgctcagaaaaaaatgttcagggggatcacagggactttttgtaatcaatttataacaatgaagatgaatcaagataatatttattgagaactcatcatatgacagaaatgatgtaatatgcctattccatggtgtatgtggtctcatttaatttacaccgccttgtgaagtagaggatattttccaccctctcccccatgccatgacaaatggtgaaactgagggccagagaggttagagagatttcccaagttcacccagcttgtcagtgagtctaagagtgggggaaaaggggttctagcctggctccctggcatcaaagcaggtcatcttgattgctattgaggatttgacaggtgagacctagaggagggctgtgagttgaccaagggtacacacagcttaggaatcacagctggggcttgaacccagccatgggatcttcatctcctaatagtaacagcttccactctcacccaagcgtagtcctccctgaggatgggggtctgggacagaaaaccaggagcatgcctctgggggagtccatcctggtggttggggttgcagggggactcagaggagccaaggcctggccccagccctgctcccttctctggccaggccaagtggcaacgcctggccatggagggcagcacctgtctggatgtgtttgagcacatcagccttatgaccctggacagtctgcagaaatgcatcttcagctttgacagcaattgtcaggagaagcccagtgaatatattactgcgatcatggagctcagtgcccttgtagtgaaacggaataaccagttcttccggtacaaggacttcctgtacttcctcactccctgtggacggcgcttccacagggcctgcagactggtgcacgacttcacagatgccgtcatccaggagcggcgccgcaccctcactagccagggtgttgatgacttcctccaagccaaggccaagtccaagactttggactttattgatgtgctcctgctgagcgaggataaaaatggtaaagagttgtcagatgaggacataagagcagaagctgacactttcatgtttggaggccatgacaccacggccagtggcctctcctgggtcttgtacaacctcgcgaggcacccagaataccaagaacgctgccggcaggaggtgcaagagcttctgaaggaccgtgagcctaaagagattgaatgggacgacctggcccagttgcccttcctgaccatgtgcctgaaggagagcctgcggttgcatcccccaatccctacattcgcccgcggctgcacccaggacgtggtgctcccagacagccgagtcatccccaaagggaatgtctgtaacatcaacatcttcgcaatccatcacaacccctcagtctggccagaccctgaggtctatgaccccttccgcttcgaccccgaaaacgcccagaagaggtcacctatggcttttattcctttctcggcggggcccaggaactgcatcgggcagaagttcgcgatggcagagatgaaggtggtcctggcgctcacgctgctgcgcttccgcatcctgcccgaccacagggagccacgcaggacgccggagattgttttgcgtgcggaggacggactttggctgcgagtagaacccctgggctgaggcctgcagtgacccacccacctacctttgcatcacctacctttgcaccaattaccttttcagatttccggtaataaatctgtgttggcccctgtgcctgagtcccacggatggccagtagggggcgctggaggactgcggggatctagggcctggctgggaagaggcggggagatgtctctgtgcccaagatactcactgcctctctgggtgagcacaggagccccgtgctgagggtgggatctcccagagtctaagtaaagactttttcccccccaaaataattgtgtattctgatataaatttttgccaatttagaatccctgttttttagctaggtgcatagcagcctgaaatacagatcacatttgaaagcctttcttgaagctcaattggttaagtgactgtggctgtcccatgtgtagaagccaaagattatgtggtaattctggtaacctttcttaagagaaagctgctacagtctgtctgctcagtcctcccctcttccttcctgctgcttggaagatttttttttttttttgagacatggtgtctctcgtcgcccaggccggagtgcagtggctcactgcaacctccacctcctgggttcaagtgattctcctgactcagtcgcctgagtagataggataacaggcgcctaccaccacacccggctaattgtatttttagtacagatggggttttgctatgttggccaggctggtctcaaactcctggcctcaagtgatcagcccacctcagcctcccaaagtgccagaattgcaggtgtgagaataaaaattcttgagtttcaatgtttattttagaatcaggtgctaacatgcaaatttattacaaaggtatattgcatcatgctgaggtttggagtatgaatgactccatcacccatgtagtgagcatagtatctaa

SEQ ID NO: 345854 - DNA, 2547 bp, Homo sapiens
ctccagcctgggcaacagaacgagactccatctcaaaaactagcaaacaaacaaaacaaacaaacaacaacaacaacaaaacttcagagttttgcattcttggcatgctcagaaaaaaatgttcagggggatcacagggactttttgtaatcaatttataacaatgaagatgaatcaagataatatttattgagaactcatcatatgacagaaatgatgtaatatgcctattccatggtgtatgtggtctcatttaatttacaccgccttgtgaagtagaggatattttccaccctctcccccatgccatgacaaatggtgaaactgagggccagagaggttagagagatttcccaagttcacccagcttgtcagtgagtctaagagtgggggaaaaggggttctagcctggctccctggcatcaaagcaggtcatcttgattgctattgaggatttgacaggtgagacctagaggagggctgtgagttgaccaagggtacacacagcttaggaatcacagctggggcttgaacccagccatgggatcttcatctcctaatagtaacagcttccactctcacccaagcgtagtcctccctgaggatgggggtctgggacagaaaaccaggagcatgcctctgggggagtccatcctggtggttggggttgcagggggactcagaggagccaaggcctggccccagccctgctcccttctctggccaggccaagtggcaacgcctggccatggagggcagcacctgtctggatgtgtttgagcacatcagccttatgaccctggacagtctgcagaaatgcatcttcagctttgacagcaattgtcaggagaagcccagtgaatatattactgcgatcatggagctcagtgcccttgtagtgaaacggaataaccagttcttccggtacaaggacttcctgtacttcctcactccctgtggacggcgcttccacagggcctgcagactggtgcacgacttcacagatgccgtcatccaggagcggcgccgcaccctcactagccagggtgttgatgacttcctccaagccaaggccaagtccaagactttggactttattgatgtgctcctgctgagcgaggataaaaatggtaaagagttgtcagatgaggacataagagcagaagctgacactttcatgtttggaggccatgacaccacggccagtggcctctcctgggtcttgtacaacctcgcgaggcacccagaataccaagaacgctgccggcaggaggtgcaagagcttctgaaggaccgtgagcctaaagagattgaatgggacgacctggcccagttgcccttcctgaccatgtgcctgaaggagagcctgcggttgcatcccccaatccctacattcgcccgcggctgcacccaggacgtggtgctcccagacagccgagtcatccccaaaggaactgcatcgggcagaagttcgcgatggcagagatgaaggtggtcctggcgctcacgctgctgcgcttccgcatcctgcccgaccacagggagccacgcaggacgccggagattgttttgcgtgcggaggacggactttggctgcgagtagaacccctgggctgaggcctgcagtgacccacccacctacctttgcatcacctacctttgcaccaattaccttttcagatttccggtaataaatctgtgttggcccctgtgcctgagtcccacggatggccagtagggggcgctggaggactgcggggatctagggcctggctgggaagaggcggggagatgtctctgtgcccaagatactcactgcctctctgggtgagcacaggagccccgtgctgagggtgggatctcccagagtctaagtaaagactttttcccccccaaaataattgtgtattctgatataaatttttgccaatttagaatccctgttttttagctaggtgcatagcagcctgaaatacagatcacatttgaaagcctttcttgaagctcaattggttaagtgactgtggctgtcccatgtgtagaagccaaagattatgtggtaattctggtaacctttcttaagagaaagctgctacagtctgtctgctcagtcctcccctcttccttcctgctgcttggaagatttttttttttttttgagacatggtgtctctcgtcgcccaggccggagtgcagtggctcactgcaacctccacctcctgggttcaagtgattctcctgactcagtcgcctgagtagataggataacaggcgcctaccaccacacccggctaattgtatttttagtacagatggggttttgctatgttggccaggctggtctcaaactcctggcctcaagtgatcagcccacctcagcctcccaaagtgccagaattgcaggtgtgagaataaaaattcttgagtttcaatgtttattttagaatcaggtgctaacatgcaaatttattacaaaggtatattgcatcatgctgaggtttggagtatgaatgactccatcacccatgtagtgagcatagtatctaa

SEQ ID NO: 345855 - DNA, 2137 bp, Homo sapiens
ggaggtctgagtttggtggagaaaatggggcagatttgggagaaactgagtaataataggcaggagcagatgttttataagacagagagaggagatgcccatgatggccaagctgtgccctggggacctggggcaggaggcagctcacagagagtgggaggcagagagtgaagtgcgcttgcaggacacccctttctgcatggaatgtggtcctgggattctggctggaaggtgctcccaggctttcatgtgggtaaggagctgcttcctctctctggactggccctgcaggaagcccagtgaatatattactgcgatcatggagctcagtgcccttgtagtgaaacggaataaccagttcttccggtacaaggacttcctgtacttcctcactccctgtggacggcgcttccacagggcctgcagactggtgcacgacttcacagatgccgtcatccaggagcggcgccgcaccctcactagccagggtgttgatgacttcctccaagccaaggccaagtccaagactttggactttattgatgtgctcctgctgagcgaggataaaaatggtaaagagttgtcagatgaggacataagagcagaagctgacactttcatgtttggaggccatgacaccacggccagtggcctctcctgggtcttgtacaacctcgcgaggcacccagaataccaagaacgctgccggcaggaggtgcaagagcttctgaaggaccgtgagcctaaagagattgaatgggacgacctggcccagttgcccttcctgaccatgtgcctgaaggagagcctgcggttgcatcccccaatccctacattcgcccgcggctgcacccaggacgtggtgctcccagacagccgagtcatccccaaagggaatgtctgtaacatcaacatcttcgcaatccatcacaacccctcagtctggccagaccctgaggtctatgaccccttccgcttcgaccccgaaaacgcccagaagaggtcacctatggcttttattcctttctcggcggggcccaggaactgcatcgggcagaagttcgcgatggcagagatgaaggtggtcctggcgctcacgctgctgcgcttccgcatcctgcccgaccacagggagccacgcaggacgccggagattgttttgcgtgcggaggacggactttggctgcgagtagaacccctgggctgaggcctgcagtgacccacccacctacctttgcatcacctacctttgcaccaattaccttttcagatttccggtaataaatctgtgttggcccctgtgcctgagtcccacggatggccagtagggggcgctggaggactgcggggatctagggcctggctgggaagaggcggggagatgtctctgtgcccaagatactcactgcctctctgggtgagcacaggagccccgtgctgagggtgggatctcccagagtctaagtaaagactttttcccccccaaaataattgtgtattctgatataaatttttgccaatttagaatccctgttttttagctaggtgcatagcagcctgaaatacagatcacatttgaaagcctttcttgaagctcaattggttaagtgactgtggctgtcccatgtgtagaagccaaagattatgtggtaattctggtaacctttcttaagagaaagctgctacagtctgtctgctcagtcctcccctcttccttcctgctgcttggaagatttttttttttttttgagacatggtgtctctcgtcgcccaggccggagtgcagtggctcactgcaacctccacctcctgggttcaagtgattctcctgactcagtcgcctgagtagataggataacaggcgcctaccaccacacccggctaattgtatttttagtacagatggggttttgctatgttggccaggctggtctcaaactcctggcctcaagtgatcagcccacctcagcctcccaaagtgccagaattgcaggtgtgagaataaaaattcttgagtttcaatgtttattttagaatcaggtgctaacatgcaaatttattacaaaggtatattgcatcatgctgaggtttggagtatgaatgactccatcacccatgtagtgagcatagtatctaa

SEQ ID NO: 345856 - DNA, 1643 bp, Homo sapiens
aggggttggcagttaactagatcttaaggatcttgaaaagtcagacaaagggagatgcattttatccaaggttcctaaggagccatggaggtgtttgagcagatgagagacatggtcagtactgagcttggacactggactctatgggactctatggaagattgactgtcttgtacaacctcgcgaggcacccagaataccaagaacgctgccggcaggaggtgcaagagcttctgaaggaccgtgagcctaaagagattgaatgggacgacctggcccagttgcccttcctgaccatgtgcctgaaggagagcctgcggttgcatcccccaatccctacattcgcccgcggctgcacccaggacgtggtgctcccagacagccgagtcatccccaaagggaatgtctgtaacatcaacatcttcgcaatccatcacaacccctcagtctggccagaccctgaggtctatgaccccttccgcttcgaccccgaaaacgcccagaagaggtcacctatggcttttattcctttctcggcggggcccaggaactgcatcgggcagaagttcgcgatggcagagatgaaggtggtcctggcgctcacgctgctgcgcttccgcatcctgcccgaccacagggagccacgcaggacgccggagattgttttgcgtgcggaggacggactttggctgcgagtagaacccctgggctgaggcctgcagtgacccacccacctacctttgcatcacctacctttgcaccaattaccttttcagatttccggtaataaatctgtgttggcccctgtgcctgagtcccacggatggccagtagggggcgctggaggactgcggggatctagggcctggctgggaagaggcggggagatgtctctgtgcccaagatactcactgcctctctgggtgagcacaggagccccgtgctgagggtgggatctcccagagtctaagtaaagactttttcccccccaaaataattgtgtattctgatataaatttttgccaatttagaatccctgttttttagctaggtgcatagcagcctgaaatacagatcacatttgaaagcctttcttgaagctcaattggttaagtgactgtggctgtcccatgtgtagaagccaaagattatgtggtaattctggtaacctttcttaagagaaagctgctacagtctgtctgctcagtcctcccctcttccttcctgctgcttggaagatttttttttttttttgagacatggtgtctctcgtcgcccaggccggagtgcagtggctcactgcaacctccacctcctgggttcaagtgattctcctgactcagtcgcctgagtagataggataacaggcgcctaccaccacacccggctaattgtatttttagtacagatggggttttgctatgttggccaggctggtctcaaactcctggcctcaagtgatcagcccacctcagcctcccaaagtgccagaattgcaggtgtgagaataaaaattcttgagtttcaatgtttattttagaatcaggtgctaacatgcaaatttattacaaaggtatattgcatcatgctgaggtttggagtatgaatgactccatcacccatgtagtgagcatagtatctaa

SEQ ID NO: 345857 - DNA, 1347 bp, Homo sapiens
ctccagcctgggcaacagaacgagactccatctcaaaaactagcaaacaaacaaaacaaacaaacaacaacaacaacaaaacttcagagttttgcattcttggcatgctcagaaaaaaatgttcagggggatcacagggactttttgtaatcaatttataacaatgaagatgaatcaagataatatttattgagaactcatcatatgacagaaatgatgtaatatgcctattccatggtgtatgtggtctcatttaatttacaccgccttgtgaagtagaggatattttccaccctctcccccatgccatgacaaatggtgaaactgagggccagagaggttagagagatttcccaagttcacccagcttgtcagtgagtctaagagtgggggaaaaggggttctagcctggctccctggcatcaaagcaggtcatcttgattgctattgaggatttgacaggtgagacctagaggagggctgtgagttgaccaagggtacacacagcttaggaatcacagctggggcttgaacccagccatgggatcttcatctcctaatagtaacagcttccactctcacccaagcgtagtcctccctgaggatgggggtctgggacagaaaaccaggagcatgcctctgggggagtccatcctggtggttggggttgcagggggactcagaggagccaaggcctggccccagccctgctcccttctctggccaggccaagtggcaacgcctggccatggagggcagcacctgtctggatgtgtttgagcacatcagccttatgaccctggacagtctgcagaaatgcatcttcagctttgacagcaattgtcaggagtgagttcttgcccagggcctgggaacatgggatggagtgggggtgtgggtgtggggagagcaaagcccagggagacaagaagagccttcctggagagatgatgagaactaggcattgaaggacaaagaaggagagaaggagagagagagagagcgagagaaagagaagtttcctccaaacaagtggaactgtttgggtcaaggcaaggaggctaagatgaacagacatgtgtatccaatgcatacctcccacttataagtgagaacatgcaatattttgttttctgttcctgcattagtttgcttaggataatggcccccagctgcatctatgttgctgcaaacgacatgattttgtactttttaatgactgcatagtatttcatggtgtatttctacacattttctttatccactccaccattgatgggcacctgtgttgattcagcatcttcgctattgtgattagagctgcgataaacatgtggatgcttgtgt

SEQ ID NO: 345858 - DNA, 2500 bp, Homo sapiens
cagaaggatgtcgctgctgagcctgtcttggctgggcctcaggccggtggcagcatccccgtggctgctcctgctggtggtcggggcctcctggctcctggcccgcatcctggcctggacctatgccttctatcacaacggccgccgcctccggtgtttcccgcagccccggaaacagaactggttcttgggtcacctgggcctggtcactcccacagaggagggcttgagggtcctgacccagctggtggccacctacccccagggctttgtgaggtggttgggccccatcactcccatcatcaacttgtgccaccctgacatcgtccgatctgtcatcaatacctcagatgccattacagacaaggacatagtcttctacaagaccctgaagccctggctgggggatgggctcttgttaagtgttggtgacaagtggagacaccaccgtcgcttgctgacgcctgccttccatttcaacatcctgaagccctatataaagattttcagcaagagtgcaaacatcatgcatgccaagtggcaacgcctggccatggagggcagcacctgtctggatgtgtttgagcacatcagccttatgaccctggacagtctgcagaaatgcatcttcagctttgacagcaattgtcaggagaagcccagtgaatatattactgcgatcatggagctcagtgcccttgtagtgaaacggaataaccagttcttccggtacaaggacttcctgtacttcctcactccctgtggacggcgcttccacagggcctgcagactggtgcacgacttcacagatgccgtcatccaggagcggcgccgcaccctcactagccagggtgttgatgacttcctccaagccaaggccaagtccaagactttggactttattgatgtgctcctgctgagcgaggataaaaatggtaaagagttgtcagatgaggacataagagcagaagctgacactttcatgtttggaggccatgacaccacggccagtggcctctcctgggtcttgtacaacctcgcgaggcacccagaataccaagaacgctgccggcaggaggtgcaagagcttctgaaggaccgtgagcctaaagagattgaatgggacgacctggcccagttgcccttcctgaccatgtgcctgaaggagagcctgcggttgcatcccccaatccctacattcgcccgcggctgcacccaggacgtggtgctcccagacagccgagtcatccccaaagggaatgtctgtaacatcaacatcttcgcaatccatcacaacccctcagtctggccagaccctgaggtctatgaccccttccgcttcgaccccgaaaacgcccagaagaggtcacctatggcttttattcctttctcggcggggcccaggaactgcatcgggcagaagttcgcgatggcagagatgaaggtggtcctggcgctcacgctgctgcgcttccgcatcctgcccgaccacagggagccacgcaggacgccggagattgttttgcgtgcggaggacggactttggctgcgagtagaacccctgggctgaggcctgcagtgacccacccacctacctttgcatcacctacctttgcaccaattaccttttcagatttccggtaataaatctgtgttggcccctgtgcctgagtcccacggatggccagtagggggcgctggaggactgcggggatctagggcctggctgggaagaggcggggagatgtctctgtgcccaagatactcactgcctctctgggtgagcacaggagccccgtgctgagggtgggatctcccagagtctaagtaaagactttttcccccccaaaataattgtgtattctgatataaatttttgccaatttagaatccctgttttttagctaggtgcatagcagcctgaaatacagatcacatttgaaagcctttcttgaagctcaattggttaagtgactgtggctgtcccatgtgtagaagccaaagattatgtggtaattctggtaacctttcttaagagaaagctgctacagtctgtctgctcagtcctcccctcttccttcctgctgcttggaagatttttttttttttttgagacatggtgtctctcgtcgcccaggccggagtgcagtggctcactgcaacctccacctcctgggttcaagtgattctcctgactcagtcgcctgagtagataggataacaggcgcctaccaccacacccggctaattgtatttttagtacagatggggttttgctatgttggccaggctggtctcaaactcctggcctcaagtgatcagcccacctcagcctcccaaagtgccagaattgcaggtgtgagaataaaaattcttgagtttcaatgtttattttagaatcaggtgctaacatgcaaatttattacaaaggtatattgcatcatgctgaggtttggagtatgaatgactccatcacccatgtagtgagcatagtatctaa

SEQ ID NO: 345859 - DNA, 1080 bp, Homo sapiens
ggaggtctgagtttggtggagaaaatggggcagatttgggagaaactgagtaataataggcaggagcagatgttttataagacagagagaggagatgcccatgatggccaagctgtgccctggggacctggggcaggaggcagctcacagagagtgggaggcagagagtgaagtgcgcttgcaggacacccctttctgcatggaatgtggtcctgggattctggctggaaggtgctcccaggctttcatgtgggtaaggagctgcttcctctctctggactggccctgcaggaagcccagtgaatatattactgcgatcatggagctcagtgcccttgtagtgaaacggaataaccagttcttccggtacaaggacttcctgtacttcctcactccctgtggacggcgcttccacagggcctgcagactggtgcacgacttcacagatgccgtcatccaggagcggcgccgcaccctcactagccagggtgttgatgacttcctccaagccaaggccaagtccaagactttggactttattgatgtgctcctgctgagcgaggataaaaatggtaaagagttgtcagatgaggacataagagcagaagctgacactttcatgtttggaggccatgacaccacggccagtggcctctcctgggtcttgtacaacctcgcgaggcacccagaataccaagaacgctgccggcaggaggtgcaagagcttctgaaggaccgtgagcctaaagagattgaatgggacgacctggcccagttgcccttcctgaccatgtgcctgaaggagagcctgcggttgcatcccccaatccctacattcgcccgcggctgcacccaggacgtggtgctcccagacagccgagtcatccccaaagggaatgtctgtaacatcaacatcttcgcaatccatcacaacccctcagtctggccagaccctgagctattgaccctttccgcttccgaccccgaaaacgccaggaagaggtcactatggtcttattcctatttcgggggccccacggacactgcattgggacaaattccggaaggcgacataacgtg

SEQ ID NO: 345860 - DNA, 2630 bp, Homo sapiens
ctccagcctgggcaacagaacgagactccatctcaaaaactagcaaacaaacaaaacaaacaaacaacaacaacaacaaaacttcagagttttgcattcttggcatgctcagaaaaaaatgttcagggggatcacagggactttttgtaatcaatttataacaatgaagatgaatcaagataatatttattgagaactcatcatatgacagaaatgatgtaatatgcctattccatggtgtatgtggtctcatttaatttacaccgccttgtgaagtagaggatattttccaccctctcccccatgccatgacaaatggtgaaactgagggccagagaggttagagagatttcccaagttcacccagcttgtcagtgagtctaagagtgggggaaaaggggttctagcctggctccctggcatcaaagcaggtcatcttgattgctattgaggatttgacaggtgagacctagaggagggctgtgagttgaccaagggtacacacagcttaggaatcacagctggggcttgaacccagccatgggatcttcatctcctaatagtaacagcttccactctcacccaagcgtagtcctccctgaggatgggggtctgggacagaaaaccaggagcatgcctctgggggagtccatcctggtggttggggttgcagggggactcagaggagccaaggcctggccccagccctgctcccttctctggccaggccaagtggcaacgcctggccatggagggcagcacctgtctggatgtgtttgagcacatcagccttatgaccctggacagtctgcagaaatgcatcttcagctttgacagcaattgtcaggagaagcccagtgaatatattactgcgatcatggagctcagtgcccttgtagtgaaacggaataaccagttcttccggtacaaggacttcctgtacttcctcactccctgtggacggcgcttccacagggcctgcagactggtgcacgacttcacagatgccgtcatccaggagcggcgccgcaccctcactagccagggtgttgatgacttcctccaagccaaggccaagtccaagactttggactttattgatgtgctcctgctgagcgaggataaaaatggtaaagagttgtcagatgaggacataagagcagaagctgacactttcatgtttggaggccatgacaccacggccagtggcctctcctgggtcttgtacaacctcgcgaggcacccagaataccaagaacgctgccggcaggaggtgcaagagcttctgaaggaccgtgagcctaaagagattgaatgggacgacctggcccagttgcccttcctgaccatgtgcctgaaggagagcctgcggttgcatcccccaatccctacattcgcccgcggctgcacccaggacgtggtgctcccagacagccgagtcatccccaaaggtctatgaccccttccgcttcgaccccgaaaacgcccagaagaggtcacctatggcttttattcctttctcggcggggcccaggaactgcatcgggcagaagttcgcgatggcagagatgaaggtggtcctggcgctcacgctgctgcgcttccgcatcctgcccgaccacagggagccacgcaggacgccggagattgttttgcgtgcggaggacggactttggctgcgagtagaacccctgggctgaggcctgcagtgacccacccacctacctttgcatcacctacctttgcaccaattaccttttcagatttccggtaataaatctgtgttggcccctgtgcctgagtcccacggatggccagtagggggcgctggaggactgcggggatctagggcctggctgggaagaggcggggagatgtctctgtgcccaagatactcactgcctctctgggtgagcacaggagccccgtgctgagggtgggatctcccagagtctaagtaaagactttttcccccccaaaataattgtgtattctgatataaatttttgccaatttagaatccctgttttttagctaggtgcatagcagcctgaaatacagatcacatttgaaagcctttcttgaagctcaattggttaagtgactgtggctgtcccatgtgtagaagccaaagattatgtggtaattctggtaacctttcttaagagaaagctgctacagtctgtctgctcagtcctcccctcttccttcctgctgcttggaagatttttttttttttttgagacatggtgtctctcgtcgcccaggccggagtgcagtggctcactgcaacctccacctcctgggttcaagtgattctcctgactcagtcgcctgagtagataggataacaggcgcctaccaccacacccggctaattgtatttttagtacagatggggttttgctatgttggccaggctggtctcaaactcctggcctcaagtgatcagcccacctcagcctcccaaagtgccagaattgcaggtgtgagaataaaaattcttgagtttcaatgtttattttagaatcaggtgctaacatgcaaatttattacaaaggtatattgcatcatgctgaggtttggagtatgaatgactccatcacccatgtagtgagcatagtatctaa

SEQ ID NO: 345861 - DNA, 2451 bp, Homo sapiens
gtctttaactcttattctgtaaatgtgttttgtagagtgttgacttatgcttgggtgttgcagaacatgttggaccatgtaggagccatgtcaagacatgctgggtgtgctgtaccatgtcagggtgtatcattgctctatagtgttgttgcagcctagtccggtcccctttatgccccccaccctcctttcttcttctgcccatggcctccttcctgctatgctgggcttggagaaaagacgtccaaacctctggctgggagccaccctccatacccaaagtccctcctctattcctctccatggaccctgatggtcctcattcatgtcagatgccattacagacaaggacatagtcttctacaagaccctgaagccctggctgggtaagtaactgtaggtggacgggacggggaccaacttttgtggccaggggaagattctgcccttgcccacagcctttggctgccgtactaggggatgggctcttgttaagtgttggtgacaagtggagacaccaccgtcgcttgctgacgcctgccttccatttcaacatcctgaagccctatataaagattttcagcaagagtgcaaacatcatgcatgaagcccagtgaatatattactgcgatcatggagctcagtgcccttgtagtgaaacggaataaccagttcttccggtacaaggacttcctgtacttcctcactccctgtggacggcgcttccacagggcctgcagactggtgcacgacttcacagatgccgtcatccaggagcggcgccgcaccctcactagccagggtgttgatgacttcctccaagccaaggccaagtccaagactttggactttattgatgtgctcctgctgagcgaggataaaaatggtaaagagttgtcagatgaggacataagagcagaagctgacactttcatgtttggaggccatgacaccacggccagtggcctctcctgggtcttgtacaacctcgcgaggcacccagaataccaagaacgctgccggcaggaggtgcaagagcttctgaaggaccgtgagcctaaagagattgaatgggacgacctggcccagttgcccttcctgaccatgtgcctgaaggagagcctgcggttgcatcccccaatccctacattcgcccgcggctgcacccaggacgtggtgctcccagacagccgagtcatccccaaagggaatgtctgtaacatcaacatcttcgcaatccatcacaacccctcagtctggccagaccctgaggtctatgaccccttccgcttcgaccccgaaaacgcccagaagaggtcacctatggcttttattcctttctcggcggggcccaggaactgcatcgggcagaagttcgcgatggcagagatgaaggtggtcctggcgctcacgctgctgcgcttccgcatcctgcccgaccacagggagccacgcaggacgccggagattgttttgcgtgcggaggacggactttggctgcgagtagaacccctgggctgaggcctgcagtgacccacccacctacctttgcatcacctacctttgcaccaattaccttttcagatttccggtaataaatctgtgttggcccctgtgcctgagtcccacggatggccagtagggggcgctggaggactgcggggatctagggcctggctgggaagaggcggggagatgtctctgtgcccaagatactcactgcctctctgggtgagcacaggagccccgtgctgagggtgggatctcccagagtctaagtaaagactttttcccccccaaaataattgtgtattctgatataaatttttgccaatttagaatccctgttttttagctaggtgcatagcagcctgaaatacagatcacatttgaaagcctttcttgaagctcaattggttaagtgactgtggctgtcccatgtgtagaagccaaagattatgtggtaattctggtaacctttcttaagagaaagctgctacagtctgtctgctcagtcctcccctcttccttcctgctgcttggaagatttttttttttttttgagacatggtgtctctcgtcgcccaggccggagtgcagtggctcactgcaacctccacctcctgggttcaagtgattctcctgactcagtcgcctgagtagataggataacaggcgcctaccaccacacccggctaattgtatttttagtacagatggggttttgctatgttggccaggctggtctcaaactcctggcctcaagtgatcagcccacctcagcctcccaaagtgccagaattgcaggtgtgagaataaaaattcttgagtttcaatgtttattttagaatcaggtgctaacatgcaaatttattacaaaggtatattgcatcatgctgaggtttggagtatgaatgactccatcacccatgtagtgagcatagtatctaa

SEQ ID NO: 345862 - DNA, 280 bp, Homo sapiens
agactttgagaggtactgtcatatcctccaccagcctttctgacttttcttttcgttccttccttcctttccttccttccttccgtctttatttctttgctttctttcttttcttctttctttctttcttcctttctctttctttcctttctctcttgctctttctgtctttcttttcttttctttttgagagggtcttgctctgtcacccagactggagtgtgcagtggtgccatcatggttcactgcagccttgacctcctgggctcaatggatcttc

SEQ ID NO: 345863 - DNA, 1552 bp, Homo sapiens
catcatttcccctatgcaattttaagttttgataatgaaataaaacacaatgcagaatgattttgctataggttagatgaccactgtacttgataattgaaaaatggtttatgttcttagacaagccaatgaagcaatctcctgctcttggaacaaacaaaaaccacatgattaacctctcacaagattgacgtgcactgtggtgtagaaagtttgtttgcctttccataacccagtgtatctaagaattacctcggaacttccatttctattaatattacctactaacacttaagtctgagtgtggtggctcatgcctgtaatcccagcactttgggtaaggctggtctcgaactctcgacctcaggtgatccacctgcctcggcctcccaaagtgttgggattacaggtgtgcgcccccacgcctggcctaaatgtttttaaactctcatcctgatcagtatttaggttatagataattttttaaaactctacttagaatattgtttcagaggagtctgtaaataacaaaactctataattgcagtcatagctgatgtatctatacttggatcttttccaaatgctcttctactcttgtaatttctagtctggtcagctggaaataaaagtatccagtaactccacttgtccatctaaaaatataattatttttttaactaacccattaagtattttttatatgtatttattagccaatcatgttatttactgtgactttcctgtttgtttcttttgctcattttctcaacctgctgatttatgaatacacacacatactctagatcttgattcttctgttattttatatataatatccttttcctggagagtagctgtttaaagtgcattcatgatttttctgatactgatagttttcccacatactatcatattatatttggatgttgccattatcactctaaccataaactggtaatctatttatatttttaatagtatgtgagatttctgtgtattcagtcagattatctatgaatggaaatgaattttcttttaaaatcattattatttctttacttttattaaaataaatacgattatgtcaagtattggggtaatagccagtgtcttagttgtttaaacagtttaatggaaatcagtacaatattttaccattcaactaatatttactttgttgtatgcaagtatgctctataattagggctaacttcttatattttttcaaatcctatcacttcttttgctttgttcatatatcattctcctctgctattttaatgttataattcattctgatttcttgttttaaaccatttctgaaatataatatgcttagctgtggtatattattgttttgataagctgcttaatttatcttatgaatattttgtttgggatttttgtccaaatattcaaaattgatattaatattattagcattcatatattaacattcaaaattaagaattttttaaatttttgttattgccattatttgtttattaaaggttagataaaatttggctttaaacccatatggtcctgt

SEQ ID NO: 345864 - DNA, 1583 bp, Homo sapiens
catcatttcccctatgcaattttaagttttgataatgaaataaaacacaatgcagaatgattttgctataggttagatgaccactgtacttgataattgaaaaatggtttatgttcttagacaagccaatgaagcaatctcctgctcttggaacaaacaaaaaccacatgattaacctctcacaagattgacgtgcactgtggtgtagaaagtttgtttgcctttccataacccagtgtatctaagaattacctcggaacttccatttctattaatattacctactaacacttaagtctgagtgtggtggctcatgcctgtaatcccagcactttgggtaaggccgaggtggtcggatcacttgaggtcaggagctggtctcgaactctcgacctcaggtgatccacctgcctcggcctcccaaagtgttgggattacaggtgtgcgcccccacgcctggcctaaatgtttttaaactctcatcctgatcagtatttaggttatagataattttttaaaactctacttagaatattgtttcagaggagtctgtaaataacaaaactctataattgcagtcatagctgatgtatctatacttggatcttttccaaatgctcttctactcttgtaatttctagtctggtcagctggaaataaaagtatccagtaactccacttgtccatctaaaaatataattatttttttaactaacccattaagtattttttatatgtatttattagccaatcatgttatttactgtgactttcctgtttgtttcttttgctcattttctcaacctgctgatttatgaatacacacacatactctagatcttgattcttctgttattttatatataatatccttttcctggagagtagctgtttaaagtgcattcatgatttttctgatactgatagttttcccacatactatcatattatatttggatgttgccattatcactctaaccataaactggtaatctatttatatttttaatagtatgtgagatttctgtgtattcagtcagattatctatgaatggaaatgaattttcttttaaaatcattattatttctttacttttattaaaataaatacgattatgtcaagtattggggtaatagccagtgtcttagttgtttaaacagtttaatggaaatcagtacaatattttaccattcaactaatatttactttgttgtatgcaagtatgctctataattagggctaacttcttatattttttcaaatcctatcacttcttttgctttgttcatatatcattctcctctgctattttaatgttataattcattctgatttcttgttttaaaccatttctgaaatataatatgcttagctgtggtatattattgttttgataagctgcttaatttatcttatgaatattttgtttgggatttttgtccaaatattcaaaattgatattaatattattagcattcatatattaacattcaaaattaagaattttttaaatttttgttattgccattatttgtttattaaaggttagataaaatttggctttaaacccatatggtcctgt

SEQ ID NO: 345865 - DNA, 1017 bp, Homo sapiens
catcatttcccctatgcaattttaagttttgataatgaaataaaacacaatgcagaatgattttgctataggttagatgaccactgtacttgataattgaaaaatggtttatgttcttagacaagccaatgaagcaatctcctgctcttggaacaaacaaaaaccacatgattaacctctcacaagattgacgtgcactgtggtgtagaaagtttgtttgcctttccataacccagtgtatctaagaattacctcggaacttccatttctattaatattacctactaacacttaagtctgagtgtggtggctcatgcctgtaatcccagcactttgggtaaggccgaggtggtcggatcacttgaggtcaggagttgaagaccagcctggccaacatggtgaaaccccatctctactaaaaatacaaaaatgagccaggtgtggtggcgcatgcctgtaatcccagctgctctggagcctgaggcaggagaatcacttgaacccggaggcataggctgcagtgagccgagattgtgccactgcattccagcctgggtgacagagtgagactctgtctcaaaaaaaaaaaaaaaaaaaaatcgggacatgaaaccataagctgaaatgctgccaagacctaaaggaatgaccctcaaactggaatttcagcattttgtcatgtgattaatccccgggagaatgcagtcagctcacatgatgataggcaagtaaccacctttttctgtactcgtactactgttacttttctacaaaatgaaaaacctaaatgtttttttgttttgttttgttttttgggttttttttgttgttgttgttgtttttgagacggagttttgctcttgttgcccaggctggagtgcaatggtccgatcttgactcactgcaacctctgcctcccaggagaatcacttgaacccggaggcataggctgcagtgagccgagattgtgccactgcattccagcctgggtgacagagtgagactctgtctcaaaaa

SEQ ID NO: 345866 - DNA, 518 bp, Homo sapiens
ctcactgcaacctctgcctcccaggttcaagcgattctcctgcctcagcctcctgagtagctgggattacaggcacgcatcaccacgcctgcctaattttttttatacttttagtagagacagggtttctccatgttggtcaggctggtctcgaactctcgacctcaggtgatccacctgcctcggcctcccaaagtgttgggattacaggtgtgcgcccccacgcctggcctaaatgtttttaaactctcatcctgatcagtatttaggttatagataattttttaaaactctacttagaatattgtttcagaggagtctgtaaataacaaaactctataattgcagtcatagctgatgtatctatacttggatcttttccaaatgctcttctactcttgtaatttctagtctggtcagctggaaataaaagtatccagtaactccacttgtccatctaaaaatataattatttttttaactaacccattaagtattttttatatgtatttattagc

SEQ ID NO: 345867 - DNA, 541 bp, Homo sapiens
ttcccacaaacccggaagcggatcgcgtggagtgaaggtcacgccgcggcgcgattgacttctaaagagtcatgctgtgatgaaaaagcccagaagagaaggaagaggaaagcaaaggagtcagggatggctcttcctcagggacacttaacattcagggacgtggccatagaattctctcaggcggagtggaaatgcctggaccctgcacagagggctttatacaaggatgtgatgttggagaactacaggaacctggtctccctgggaatctctcttcctgacctgaatattaactccatgttggagcaaaggagggagccctggtctggtgagagtgaagtgaaaatagcaaaaaattcagatgggagggagtgcatcaaaggtgtgaacacagggagcagctatgcattgggaagcaatgcagaagacaaaccaattaaaaaacaacttggagtatcctttcacttacatctgtctgaactggagctatttccagatgaaagggtaataaatggatgtaatcaagttgaaaacttta

SEQ ID NO: 345868 - DNA, 349 bp, Homo sapiens
ttcccacaaacccggaagcggatcgcgtggagtgaaggtcacgccgcggcgcgattgacttctaaagagtcatgctgtgatgaaaaagcccagaagagaaggaagaggaaagcaaaggagtcagggatggctcttcctcagggacacttaacattcagggacgtggccatagaattctctcaggcggagtggaaatgcctggaccggagcagctatgcattgggaagcaatgcagaagacaaaccaattaaaaaacaacttggagtatcctttcacttacatctgtctgaactggagctatttccagatgaaagggtaataaatggatgtaatcaagttgaaaacttta

SEQ ID NO: 345869 - DNA, 2456 bp, Homo sapiens
ttcccacaaacccggaagcggatcgcgtggagtgaaggtcacgccgcggcgcgattgacttctaaagagtcatgctgtgatgaaaaagcccagaagagaaggaagaggaaagcaaaggagtcagggatggctcttcctcagggacacttaacattcagggacgtggccatagaattctctcaggcggagtggaaatgcctggaccctgcacagagggctttatacaaggatgtgatgttggagaactacaggaacctggtctccctgggaatctctcttcctgacctgaatattaactccatgttggagcaaaggagggagccctggtctggtgagagtgaagtgaaaatagcaaaaaattcagatgggagggagtgcatcaaaggtgtgaacacagggagcagctatgcattgggaagcaatgcagaagacaaaccaattaaaaaacaacttggagtatcctttcacttacatctgtctgaactggagctatttccagatgaaagggtaataaatggatgtaatcaagttgaaaactttatcaaccacagttcctctgtttcctgtcttcaagaaatgtcttccagtgtcaaaacccccatttttaataggaatgattttgatgattcttcatttctcccacaagaacagaaagtacaccttagagaaaaaccttatgaatgtaatgagcatagcaaagtctttagagtatcttccagccttactaaacatcaagtaatccatactgtagagaaaccttacaaatgtaattcatgcggcaaggtctttagtcgcaattcgcaccttgcagaacattgtagaattcatactggagagaaaccttacaaatgtaatgtctgtggcaaggtttttagttacaattcaaactttgcacgacatcaaagaattcataccagagagaagccgtatgaatgtaatgaatgtggtaaagtcttcagtaataattcttaccttgcacgacatcaaagaattcatgctgaagagaaaccttacaaatgtaatgaatgtggtaaaggcttcagtcataagtcatctctagcaaatcattggagaatttatactggagagaagccttacaaatgtgatgaatgtggcaaggccttctataggattgcgctccttgtacgacatcagaaaattcatactggagagaaaccttacaaatgtaatgaatgtggaaaggtctttattcaaaattcgcacctagcacaacattggagaattcatacaggagagaaaccttacaaatgtaatgaatgtggaaaagtatttaatcaactttcaaatcttgcacgacatcgaagaattcatactggagagaagccttacaaatgtaatgaatgtggtaaagcatttagtgagtattcaggcctttcagcccatcttgtaatccacactggagagaagccttacaaatgtagtgaatgtggcaaggcattcagacacaagttatcactaaccaatcatcagagaatccatactggagaaagaccttacaaatgtaatgaatgtggcaaggtcttcaatcgaattgcacaccttgcacgacatcggaaaattcatactggagagaaaccttacaaatgtaatgagtgtggcaaggcctttagtcgcatttcatacctagcacaacattggacaattcatatgggatagaaactacaaatgcaacaaatgcgtcaaagaatttagtgtgcactcaagccttactacccatcttttattccatactgcaaagaaattttgcaaatgtaaagaatatgacaaggtcttcaaacacaagtttttctaataactcattagagaatttatactggagagacttcacaattataataaatgtgtggaaaagtcttcaaaaaaatttcacaccttgcaaaaggagatctaaaaaacacaatcagaaatgacaaaggggacattaccaccaaccccacagaaatacgaaaaaccctcaaagattactataaacacctgtatgcacacaaactagaaaacctagaaaaaattaataaattccttgaaagatataaccccccaagattgaaccaagaagaaattgcatccctgaacagaccaataatgagttccaaaatttaatcactaattaaaaatctatcaaacaaaactctggaccagacagatttatagttgaagcctacgagatgtataaagaaaagctgttaccaatcttactgaaactgttcaaaaacatggatgcagagggactcctccctatctgattctatgaggccagcatcattctaataccaaaacctgacaggcacaatgaaaaaagaaaacttcaggctggtactcctgacgaatataggtgccaaaatcctcagcaaaatactagtaaaccaaatccatctgcacatcaaaaagctaatccaacattatcaagcaggctttagtgttgggctgcaaggttg

SEQ ID NO: 345870 - DNA, 1859 bp, Homo sapiens
ctcatgtaccgtacgcgatgttcgtgatcatgctccttgctgccacctgtgcggaatggacatccgaaagaaaaaccttatgaatgtaatgagcatagcaaagtctttagagtatcttccagccttactaaacatcaagtaatccatactgtagagaaaccttacaaatgtaattcatgcggcaaggtctttagtcgcaattcgcaccttgcagaacattgtagaattcatactggagagaaaccttacaaatgtaatgtctgtggcaaggtttttagttacaattcaaactttgcacgacatcaaagaattcataccagagagaagccgtatgaatgtaatgaatgtggtaaagtcttcagtaataattcttaccttgcacgacatcaaagaattcatgctgaagagaaaccttacaaatgtaatgaatgtggtaaaggcttcagtcataagtcatctctagcaaatcattggagaatttatactggagagaagccttacaaatgtgatgaatgtggcaaggccttctataggattgcgctccttgtacgacatcagaaaattcatactggagagaaaccttacaaatgtaatgaatgtggaaaggtctttattcaaaattcgcacctagcacaacattggagaattcatacaggagagaaaccttacaaatgtaatgaatgtggaaaagtatttaatcaactttcaaatcttgcacgacatcgaagaattcatactggagagaagccttacaaatgtaatgaatgtggtaaagcatttagtgagtattcaggcctttcagcccatcttgtaatccacactggagagaagccttacaaatgtagtgaatgtggcaaggcattcagacacaagttatcactaaccaatcatcagagaatccatactggagaaagaccttacaaatgtaatgaatgtggcaaggtcttcaatcgaattgcacaccttgcacgacatcggaaaattcatactggagagaaaccttacaaatgtaatgagtgtggcaaggcctttagtcgcatttcatacctagcacaacattggacaattcatatgggatagaaactacaaatgcaacaaatgcgtcaaagaatttagtgtgcactcaagccttactacccatcttttattccatactgcaaagaaattttgcaaatgtaaagaatatgacaaggtcttcaaacacaagtttttctaataactcattagagaatttatactggagagacttcacaattataataaatgtgtggaaaagtcttcaaaaaaatttcacaccttgcaaaaggagatctaaaaaacacaatcagaaatgacaaaggggacattaccaccaaccccacagaaatacgaaaaaccctcaaagattactataaacacctgtatgcacacaaactagaaaacctagaaaaaattaataaattccttgaaagatataaccccccaagattgaaccaagaagaaattgcatccctgaacagaccaataatgagttccaaaatttaatcactaattaaaaatctatcaaacaaaactctggaccagacagatttatagttgaagcctacgagatgtataaagaaaagctgttaccaatcttactgaaactgttcaaaaacatggatgcagagggactcctccctatctgattctatgaggccagcatcattctaataccaaaacctgacaggcacaatgaaaaaagaaaacttcaggctggtactcctgacgaatataggtgccaaaatcctcagcaaaatactagtaaaccaaatccatctgcacatcaaaaagctaatccaacattatcaagcaggctttagtgttgggctgcaaggttg

SEQ ID NO: 345871 - DNA, 515 bp, Homo sapiens
aaaacattactaattataaagggggaaagtgtaactttgctgtggagaaggctggtagacatcaccttactcagacggccaaagtggaaatctgctgtcatggaacaaactgaaattgaggtgggaagaatacaacattgtttctatctatgatcttcccgcctgagatgtaaaacctcaatctaatcacagagaaacatcaaaatccacactgagagaacttctacaaaataactggcctgtaattttcgaaattgtaaaggccatgaaagtcagggaatagttaagaaacggttccagattaaaggaagccgaagaggcatggcaactaaatgcaatgtatgattctgaactggatccttttgttataaaggacattattggaataattggtgaaacttgaattggatctgaaaattagatggtagtaatgtattcccgttagtgattttgatggttgtattgtggttattaggggaatgttcttttgtttgtttgtttgtttgtttgttttt

SEQ ID NO: 345872 - DNA, 332 bp, Homo sapiens
tttttttttctgatttaccagacaagaatatccaaacaccaaactgtgtaaatatttcaaaaccatacatacaaaagtattacctaatttgtagtgacttatcaaggcagggaagtaggaacttaatattcattaagtcatttgacattcttaacaatgtgcagaagatcatgctttgtgcagagttcaaaatagataacaaatgccttcttctgtgggaaaaacatgaacatcaatgtgtctaaagggctattcagtacatgttttgtatgcatcattatttgtatgctttataataatcgtcgagttaggcctattttatagatgagaag

SEQ ID NO: 345873 - DNA, 274 bp, Homo sapiens
tgtgtttgtctttctaatatggaaatgaaatcatcaattactaacttccagtatgtttcagttaagccttttagaggggcttcagccttttgaatgaaagcagtgaggttgagtgaaggtttgatactcacttccatgttctgtttgctgcatctgaaccactagcagactgacttgaggtttctctcacaaaagctgaagggattcacaggtgcttaggttaagtactggagagaccttcttgctgaggcctttaacaaaattgcaaaagaca

SEQ ID NO: 345874 - DNA, 397 bp, Homo sapiens
ggctgagtagttctattacatcttcaaaaaactgagctccagttcttgatggagacagaggaaggtcattgaggaggtggttcagctcaagagctaagtgaaaaatgtcttttgattcactcctgcttgtggatagaagtcatcttcgggatggaagagggagtgagatgacctagagtcttgaattggtggatctgcaggaacagaaactaaatacagtggagacctcttaactgagtaacaccacgagatggatttcctgacaaagtgccaatataggctaaatataaagattaaacatgtgcaataaaagtgatcatgcacttgtttttccagatatcaaatgcatttgtaccattttatgaatacatgttttcttaataactgattataaaac

SEQ ID NO: 345875 - DNA, 691 bp, Homo sapiens
tcctcaaacttattcgaccgtggaaatcttttgtcatgcttatttgttactgtctctcgctgtacttctgtggaatgtgcttttgagaaatactgacctagagaatagctatgtatgccagaggtaaagtttggcctgtggagcagactgtaaataacaagagaaagcgtcttgtctttattcctcttgctctgatcgtcagctccaactggtcacagacagaatggtattttgggaaactgaattcactctacgaggtgggcaccagtgaaccactaaagctgagtcaaagattagctgaattgaggatggacatgatgaagttaattccgtcaaccagcttcagaaatgggaaaaatggctttaacgtaaggtaaaatagaggtgctctaagtgagataaaatactcggtcctggctgggtgcggtggcttacacctgtagtcctagcactttgggaggccaaggtgggtggattgcttgagctcaggaattcaagaccagcctgggcaacgtgatgaaaccctgtctctacacacacaaaaaattagccaggcctggtggcacatgcctgtggtcccagctacttgcagggctgagatgggaggatcgcttgagcctaggaggtcaaggctgcagtgagctgagatcacaccactgcactcctgcctaggtgacaaagtgagactgtc

SEQ ID NO: 345876 - DNA, 715 bp, Homo sapiens
ctctgtggagctggtggtgctgcctggtggggctctctctgcccaggacgtggaacaactttcagccggaggactagaggaaatagttgtaggggaggaaaaattgtttccttctagccttttaggtcatttggctggtctacaaattaaattgatgtaagacagaggaacatgagaaaaacgatttgtcgaccgaaaggtgaaataacaggtactaaaacttaaagaaatcatggttagttttattactcggccaagtttgaggacttaagcctgggaacacagactcagtatagaccgagaacgtgtcccaaagtaagttagctgggagtataacctgaagaagactgagttttaatacccagaatatttgagtatcaatatctagactactgtgtcattttgtcgccaaagtaattttttatgaatccagttttgcaccaaataccaatatgacttaaatgttgtctgattgtgaggcctaagatggtcacagtctcatttatctttcttcctcaacaaaaacattttccatatattacatattattttgaatgggtagagactaaagccacgtttctataatttcaggattttaaacattttgtagacgataacattcgtcttgaagctgtggacaatctaaaacagaaatggagttccaaattttgtttttgtaatatggcccgtcaactgcacatgggaagaatgtggg

SEQ ID NO: 345877 - DNA, 1392 bp, Homo sapiens
gcagcgttagattctcatagcagcgggaaccctgttatgaaccgcatatgcaaggggtttgggttgtacactccttttgagaatctaatgcctgatgatctgaagtggaacagtttcatagttttatcctgaaaccatcccctgtcccagtccatggaaaaattgtcttccacgaaactagtccctactgccaaaagggttggggaccactgatttagagaagacatgctttaagttttatgtagaatataggcaaggtagtaaaaacagacatcattctgcatcatgtaagtatgtgtagtaagaaaaatttgctacagtttgcccaagtaatcccaaaggaatcatgattggattttttttaattgaagaaaaagtaattgatgtctcaaaattataataaaataattataaaattatcctagttttttccataaaagtaagatttaatttggaagtttgaggacaaaataggataaatttaagaaacacaagtagagttagcaaatttggacaatattttccgccttagcacattcaggctgctatataaaataccataagtgggtagctcataaacaatggaaatttatttcccacagttctgatgtctggaagtccaagatggaggtgctggcagatttggtgagagcctgctttctggttcacagaaggagccttctcattatgtccttatatgatgaagggccaaacaagctcccttgggtgctaatcccattttcaaggactctgccctcatgaccttatcacctcccaaaaggccccaccacttaatacaatcactttgggagttaggatttcaacaaatgaatctcagggggacacaaacattcagaccataggaatgttgcatgcatagttttgagtctaaattcaaagatttgggcacttatttttagcagtgatttttagaattgcttctattgtattttttaaaaatactgttattcttcgttttcaatataaataatactggtttaaaaagcttagtgctcttggggacactgtttatattttgtgagtataatatacttggaatagttaatctcattcttaaaattccattgtattctgatggctatttaatctgttatgtgcatatgcaggtacaacagagcctgtatcatggaggggtccagcatgaggaattcggactggttttcatttgcccatttgctgaaatacagccattgttttttcccaagtggtaatcatttaaaatttttcctggcttaagatagacgggatcttaatgcatacttcattatgctgccttaaacttttaagaagaaaaggatttgtacttgaaagaaaaacttgtcaactttctcaaatctttgataaaatataaatttgacttatcaaagcctt

SEQ ID NO: 345878 - DNA, 1223 bp, Homo sapiens
ctcagtttattagtatatcttttcaatatcatcacatatgtacttgttaccaaccgattgtgaataagaatattctggattaccgaacaaatgtagttgaagatctgctttgttttttagaccaatgaaatttctgataaagcttgattatagttcatatgtttaaataaggagggtttttttgtttgtttttttaataccttcttgaaggtgtggtgcttatttccctggcactatgtgcagatgccgtcattggaaatgttcaagagaaagctatgaaacttcataatgcttctaattctgaaatggtattgtattcgtattcaattggttttgtatacattttactgggattgacatgcactagtggattaggccctgcagtaacattttgtgcaaagaatccagttcggacctatggttatgcgttccttttttccctcactggatattttggaatctcctttgttctggctttgattaaaatttttggtgcacttattgctgtaacagtgacaacaggaagaaaagcaatgaccattgtactttcgtttatattctttgctaaaccattcacgtttcagtatgtatggtctggtttgttagttgtccttggtatatttcttaatgtttacagcaaaaatatggataaaataagactaccatcactgtatgatttgataaacaaatcagtggaagcaagaaagtcaaggacgctggcacagactgtatagacagtgattgtcctatttaaaatagaattttaagggaacaatcatcaattaattaactttccaaagggactgataaaaaccaaaggatctggaggcattgctatcccatttgtggacagatttcatatgaagttgttttgcggtgtcagccttttcttcagagcatttgtttgactgacttccaaagcaatcaagagagccacgtctagcagactttacaataaaatgtcaatatgaaggactgtaattcctagcagtttattgagaatttcactggaaatggaccatgtgttgcaagactaattggctataattatatcctatcaaagaaatcgatacgtaatagcagattgttttatattcattccattttgatggtgttatttaaattgattctctgttataagagtaaactgatgagttgaagtctggagagaataacattcattataaataaaattattctgtgatcttttttcaaaaaaaaaa

SEQ ID NO: 345879 - DNA, 409 bp, Homo sapiens
ctcagtttattagtatatcttttcaatatcatcacatatgtacttgttaccaaccgattgtgaataagaatattctggattaccgaacaaatgtagttgaagatctgctttgttttttagaccaatgaaatttctgataaagcttgattatagttcatatgtttaaataaggagggtttttttgtttgtttttttaataccttcttgaaggtgtggtgcttatttccctggcactatgtgcagatgccgtcattggaaatgttcaagagaaagctatgaaacttcataatgcttctaattctgaaatggtaaatactctagtgttttttcttcaaattagacagatttaaaaaatggtgatacacgtaatttgatgaaataattattataactagcattgcatttttaa

SEQ ID NO: 345880 - DNA, 300 bp, Homo sapiens
agtctccctcattgggagtgaccctgaaggtgtggcttccctcccactttttcctcagtattactttgccttagttttcccccaatggaaatggaccatgtgttgcaagactaattggctataattatatcctatcaaagaaatcgatacgtaatagcagattgttttatattcattccattttgatggtgttatttaaattgattctctgttataagagtaaactgatgagttgaagtctggagagaataacattcattataaataaaattattctgtgatcttttttcaaaaaaaaaa

SEQ ID NO: 345881 - DNA, 2215 bp, Homo sapiens
gcagggacacataggcggaagtggcctgcgggcgccggagttgagagtgctttccggggaggcgaccgccgcggtggaaagtgcaggagtgggcgaggaggaggaggaagaggaggtgatggcgacggaccaggggagggggagatgctccgtctagctcagacgccacgcaggctgccgtcacccttccgggtgacataccggccttggggtacgcgtgccttcggggcctttcctgtgtttgggacccagatctcctctcctccagaaaaccttgacactgcccatcttcctcatccagaaggagcgttcgaggaatggatgaggtcgggatggaagaaacgggtgattcccttttttgaaagagcggaaaccggccgggcggtttccagggaggagcatctgttcctcctcgcccgtttttcgccctcgggctggcgagaactccctcaggtcccaatccgtggactcgcaggggccatgattgattccggagcgcagttaatcaaggcataatggcatggacttgacacagcaagcaaaagacatacagaacataacagtccaggaaaccaacaaaaataactctgaaagcattgaatgcagcaaaataacaatggatctcaagttcaacaattccaggaaatatatttctatcactgtgccatccaaaacccaaacaatgtcaccacacatcaagtcagttgacgacgttgtggtacttggcatgaatctcagcaagtttaacaaacttactcagtttttcatatgtgttgctggagtttttgtattttacctaatttatgggtatttacaggaattaatattttcagtggagggttttaagtcctgtggctggtaccttaccttagtgcagtttgccttttactccatatttggcctaatagaacttcagcttattcaggacaaaaggaggagaataccaggaaaaacctacatgataatagcttttctaactgtgggtactatggggttatcaaacacttccttgggctacctgaattaccctacccaagtcatcttcaagtgctgcaaattgattcctgttatgctaggaggagtttttattcaaggaaagcgttataatgttgcagatgtgtctgctgccatatgtatgagccttggcctgatatggtttaccctcgctgacagcacaactgcaccaaatttcaacctgacgggtgtggtgcttatttccctggcactatgtgcagatgccgtcattggaaatgttcaagagaaagctatgaaacttcataatgcttctaattctgaaatggtattgtattcgtattcaattggttttgtatacattttactgggattgacatgcactagtggattaggccctgcagtaacattttgtgcaaagaatccagttcggacctatggttatgcgttccttttttccctcactggatattttggaatctcctttgttctggctttgattaaaatttttggtgcacttattgctgtaacagtgacaacaggaagaaaagcaatgaccattgtactttcgtttatattctttgctaaaccattcacgtttcagtatgtatggtctggtttgttagttgtccttggtatatttcttaatgtttacagcaaaaatatggataaaataagactaccatcactgtatgatttgataaacaaatcagtggaagcaagaaagtcaaggacgctggcacagactgtatagacagtgattgtcctatttaaaatagaattttaagggaacaatcatcaattaattaactttccaaagggactgataaaaaccaaaggatctggaggcattgctatcccatttgtggacagatttcatatgaagttgttttgcggtgtcagccttttcttcagagcatttgtttgactgacttccaaagcaatcaagagagccacgtctagcagactttacaataaaatgtcaatatgaaggactgtaattcctagcagtttattgagaatttcactggaaatggaccatgtgttgcaagactaattggctataattatatcctatcaaagaaatcgatacgtaatagcagattgttttatattcattccattttgatggtgttatttaaattgattctctgttataagagtaaactgatgagttgaagtctggagagaataacattcattataaataaaattattctgtgatcttttttcaaaaaaaaaa

SEQ ID NO: 345882 - DNA, 1949 bp, Homo sapiens
gcagggacacataggcggaagtggcctgcgggcgccggagttgagagtgctttccggggaggcgaccgccgcggtggaaagtgcaggagtgggcgaggaggaggaggaagaggaggtgatggcgacggaccaggggagggggagatgctccgtctagctcagacgccacgcaggctgccgtcacccttccgggtgacataccggccttggggccatgattgattccggagcgcagttaatcaaggcataatggcatggacttgacacagcaagcaaaagacatacagaacataacagtccaggaaaccaacaaaaataactctgaaagcattgaatgcagcaaaataacaatggatctcaagttcaacaattccaggaaatatatttctatcactgtgccatccaaaacccaaacaatgtcaccacacatcaagtcagttgacgacgttgtggtacttggcatgaatctcagcaagtttaacaaacttactcagtttttcatatgtgttgctggagtttttgtattttacctaatttatgggtatttacaggaattaatattttcagtggagggttttaagtcctgtggctggtaccttaccttagtgcagtttgccttttactccatatttggcctaatagaacttcagcttattcaggacaaaaggaggagaataccaggaaaaacctacatgataatagcttttctaactgtgggtactatggggttatcaaacacttccttgggctacctgaattaccctacccaagtcatcttcaagtgctgcaaattgattcctgttatgctaggaggagtttttattcaaggaaagcgttataatgttgcagatgtgtctgctgccatatgtatgagccttggcctgatatggtttaccctcgctgacagcacaactgcaccaaatttcaacctgacgggtgtggtgcttatttccctggcactatgtgcagatgccgtcattggaaatgttcaagagaaagctatgaaacttcataatgcttctaattctgaaatggtattgtattcgtattcaattggttttgtatacattttactgggattgacatgcactagtggattaggccctgcagtaacattttgtgcaaagaatccagttcggacctatggttatgcgttccttttttccctcactggatattttggaatctcctttgttctggctttgattaaaatttttggtgcacttattgctgtaacagtgacaacaggaagaaaagcaatgaccattgtactttcgtttatattctttgctaaaccattcacgtttcagtatgtatggtctggtttgttagttgtccttggtatatttcttaatgtttacagcaaaaatatggataaaataagactaccatcactgtatgatttgataaacaaatcagtggaagcaagaaagtcaaggacgctggcacagactgtatagacagtgattgtcctatttaaaatagaattttaagggaacaatcatcaattaattaactttccaaagggactgataaaaaccaaaggatctggaggcattgctatcccatttgtggacagatttcatatgaagttgttttgcggtgtcagccttttcttcagagcatttgtttgactgacttccaaagcaatcaagagagccacgtctagcagactttacaataaaatgtcaatatgaaggactgtaattcctagcagtttattgagaatttcactggaaatggaccatgtgttgcaagactaattggctataattatatcctatcaaagaaatcgatacgtaatagcagattgttttatattcattccattttgatggtgttatttaaattgattctctgttataagagtaaactgatgagttgaagtctggagagaataacattcattataaataaaattattctgtgatcttttttcaaaaaaaaaa

SEQ ID NO: 345883 - DNA, 2018 bp, Homo sapiens
gcagggacacataggcggaagtggcctgcgggcgccggagttgagagtgctttccggggaggcgaccgccgcggtggaaagtgcaggagtgggcgaggaggaggaggaagaggaggtgatggcgacggaccaggggagggggagatgctccgtctagctcagacgccacgcaggctgccgtcacccttccgggtgacataccggccttggggtacgcgtgccttcggggcctttcctgtgtttgggacccagatctcctctcctccagaaaaccttgacactgcccatcttcctcatccagaaggagcgttcgaggaatggatgaggacttgacacagcaagcaaaagacatacagaacataacagtccaggaaaccaacaaaaataactctgaaagcattgaatgcagcaaaataacaatggatctcaagttcaacaattccaggaaatatatttctatcactgtgccatccaaaacccaaacaatgtcaccacacatcaagtcagttgacgacgttgtggtacttggcatgaatctcagcaagtttaacaaacttactcagtttttcatatgtgttgctggagtttttgtattttacctaatttatgggtatttacaggaattaatattttcagtggagggttttaagtcctgtggctggtaccttaccttagtgcagtttgccttttactccatatttggcctaatagaacttcagcttattcaggacaaaaggaggagaataccaggaaaaacctacatgataatagcttttctaactgtgggtactatggggttatcaaacacttccttgggctacctgaattaccctacccaagtcatcttcaagtgctgcaaattgattcctgttatgctaggaggagtttttattcaaggaaagcgttataatgttgcagatgtgtctgctgccatatgtatgagccttggcctgatatggtttaccctcgctgacagcacaactgcaccaaatttcaacctgacgggtgtggtgcttatttccctggcactatgtgcagatgccgtcattggaaatgttcaagagaaagctatgaaacttcataatgcttctaattctgaaatggtattgtattcgtattcaattggttttgtatacattttactgggattgacatgcactagtggattaggccctgcagtaacattttgtgcaaagaatccagttcggacctatggttatgcgttccttttttccctcactggatattttggaatctcctttgttctggctttgattaaaatttttggtgcacttattgctgtaacagtgacaacaggaagaaaagcaatgaccattgtactttcgtttatattctttgctaaaccattcacgtttcagtatgtatggtctggtttgttagttgtccttggtatatttcttaatgtttacagcaaaaatatggataaaataagactaccatcactgtatgatttgataaacaaatcagtggaagcaagaaagtcaaggacgctggcacagactgtatagacagtgattgtcctatttaaaatagaattttaagggaacaatcatcaattaattaactttccaaagggactgataaaaaccaaaggatctggaggcattgctatcccatttgtggacagatttcatatgaagttgttttgcggtgtcagccttttcttcagagcatttgtttgactgacttccaaagcaatcaagagagccacgtctagcagactttacaataaaatgtcaatatgaaggactgtaattcctagcagtttattgagaatttcactggaaatggaccatgtgttgcaagactaattggctataattatatcctatcaaagaaatcgatacgtaatagcagattgttttatattcattccattttgatggtgttatttaaattgattctctgttataagagtaaactgatgagttgaagtctggagagaataacattcattataaataaaattattctgtgatcttttttcaaaaaaaaaa

SEQ ID NO: 345884 - DNA, 1921 bp, Homo sapiens
gcagggacacataggcggaagtggcctgcgggcgccggagttgagagtgctttccggggaggcgaccgccgcggtggaaagtgcaggagtgggcgaggaggaggaggaagaggaggccatgattgattccggagcgcagttaatcaaggcataatggcatgattttcagttttgctcataaagtttgccagtaccaccatccatttcaaaaatcgtatccaagcagaaggacttgacacagcaagcaaaagacatacagaacataacagtccaggaaaccaacaaaaataactctgaaagcattgaatgcagcaaaataacaatggatctcaagttcaacaattccaggaaatatatttctatcactgtgccatccaaaacccaaacaatgtcaccacacatcaagtcagttgacgacgttgtggtacttggcatgaatctcagcaagtttaacaaacttactcagtttttcatatgtgttgctggagtttttgtattttacctaatttatgggtatttacaggaattaatattttcagtggagggttttaagtcctgtggctggtaccttaccttagtgcagtttgccttttactccatatttggcctaatagaacttcagcttattcaggacaaaaggaggagaataccaggaaaaacctacatgataatagcttttctaactgtgggtactatggggttatcaaacacttccttgggctacctgaattaccctacccaagtcatcttcaagtgctgcaaattgattcctgttatgctaggaggagtttttattcaaggaaagcgttataatgttgcagatgtgtctgctgccatatgtatgagccttggcctgatatggtttaccctcgctgacagcacaactgcaccaaatttcaacctgacgggtgtggtgcttatttccctggcactatgtgcagatgccgtcattggaaatgttcaagagaaagctatgaaacttcataatgcttctaattctgaaatggtattgtattcgtattcaattggttttgtatacattttactgggattgacatgcactagtggattaggccctgcagtaacattttgtgcaaagaatccagttcggacctatggttatgcgttccttttttccctcactggatattttggaatctcctttgttctggctttgattaaaatttttggtgcacttattgctgtaacagtgacaacaggaagaaaagcaatgaccattgtactttcgtttatattctttgctaaaccattcacgtttcagtatgtatggtctggtttgttagttgtccttggtatatttcttaatgtttacagcaaaaatatggataaaataagactaccatcactgtatgatttgataaacaaatcagtggaagcaagaaagtcaaggacgctggcacagactgtatagacagtgattgtcctatttaaaatagaattttaagggaacaatcatcaattaattaactttccaaagggactgataaaaaccaaaggatctggaggcattgctatcccatttgtggacagatttcatatgaagttgttttgcggtgtcagccttttcttcagagcatttgtttgactgacttccaaagcaatcaagagagccacgtctagcagactttacaataaaatgtcaatatgaaggactgtaattcctagcagtttattgagaatttcactggaaatggaccatgtgttgcaagactaattggctataattatatcctatcaaagaaatcgatacgtaatagcagattgttttatattcattccattttgatggtgttatttaaattgattctctgttataagagtaaactgatgagttgaagtctggagagaataacattcattataaataaaattattctgtgatcttttttcaaaaaaaaaa

SEQ ID NO: 345885 - DNA, 1550 bp, Homo sapiens
gtttcttcatctggaaattggattatgataactaagaatacccatatctagggtggttgtgagaagtaaatggaataatccgtaccgagcttcaacacagtacctgacacacagcagatatttaggtttgctgctgctgctgctgctgctgattctgtttatgaaaagcatagtaaattgggattaaaaggttggttggaaaatagagaagttaagcagtagatatgccatatgctgcttattttcattatattttaatgtattttagaaacttaatttttttatgttttataagtatctttaaagctttttgttttgtttcatttaagtattttttttagaactctaatatgaaaatctggttgatttcaataattaagcctagaaagaaatgaatatgtaagcatatatgaaaggattaatattactaggtgttattttgtacataaaatgaggcatagacttataaaacattagaatcaaataacatttctggaaatttaggccatattgaaattataatgtttcttttaaaatgtttgttctgcaaacctaattgagccatagagttaaaacccttaatcttccattttcagtttcatagtacttttttctgctttatttttatctgctctgtattgtattcgtattcaattggttttgtatacattttactgggattgacatgcactagtggattaggccctgcagtaacattttgtgcaaagaatccagttcggacctatggttatgcgttccttttttccctcactggatattttggaatctcctttgttctggctttgattaaaatttttggtgcacttattgctgtaacagtgacaacaggaagaaaagcaatgaccattgtactttcgtttatattctttgctaaaccattcacgtttcagtatgtatggtctggtttgttagttgtccttggtatatttcttaatgtttacagcaaaaatatggataaaataagactaccatcactgtatgatttgataaacaaatcagtggaagcaagaaagtcaaggacgctggcacagactgtatagacagtgattgtcctatttaaaatagaattttaagggaacaatcatcaattaattaactttccaaagggactgataaaaaccaaaggatctggaggcattgctatcccatttgtggacagatttcatatgaagttgttttgcggtgtcagccttttcttcagagcatttgtttgactgacttccaaagcaatcaagagagccacgtctagcagactttacaataaaatgtcaatatgaaggactgtaattcctagcagtttattgagaatttcactggaaatggaccatgtgttgcaagactaattggctataattatatcctatcaaagaaatcgatacgtaatagcagattgttttatattcattccattttgatggtgttatttaaattgattctctgttataagagtaaactgatgagttgaagtctggagagaataacattcattataaataaaattattctgtgatcttttttcaaaaaaaaaa

SEQ ID NO: 345886 - DNA, 2149 bp, Homo sapiens
gcagggacacataggcggaagtggcctgcgggcgccggagttgagagtgctttccggggaggcgaccgccgcggtggaaagtgcaggagtgggcgaggaggaggaggaagaggaggtgatggcgacggaccaggggagggggagatgctccgtctagctcagacgccacgcaggctgccgtcacccttccgggtgacataccggccttggggtacgcgtgccttcggggcctttcctgtgtttgggacccagatctcctctcctccagaaaaccttgacactgcccatcttcctcatccagaaggagcgttcgaggaatggatgaggtcgggatggaagaaacgggtgattcccttttttgaaagagcggaaaccggccgggcggtttccagggaggagcatctgttcctcctcgcccgtttttcgccctcgggctggcgagaactccctcaggtcccaatccgtggactcgcaggggccatgattgattccggagcgcagttaatcaaggcataatggcatggacttgacacagcaagcaaaagacatacagaacataacagtccaggaaaccaacaaaaataactctgaaagcattgaatgcagcaaaataacaatggatctcaagttcaacaattccaggaaatatatttctatcactgtgccatccaaaacccaaacaatgtcaccacacatcaagtcagttgacgacgttgtggtacttggcatgaatctcagcaagtttaacaaacttactcagtttttcatatgtgttgctggagtttttgtattttacctaatttatgggtatttacaggaattaatattttcagtggagggttttaagtcctgtggctggtaccttaccttagtgcagtttgccttttactccatatttggcctaatagaacttcagcttattcaggacaaaaggaggagaataccaggaaaaacctacatgataatagcttttctaactgtgggtactatggggttatcaaacacttccttgggctacctgaattaccctacccaagtcatcttcaagtgctgcaaattgattcctgttatgctaggaggagtttttattcaaggaaagcgttataatgttgcagatgtgtctgctgccatatgtatgagccttggcctgatatggtttaccctcgctgacagcacaactgcaccaaatttcaacctgacgggtgtggtgcttatttccctggcactatgtgcagatgccgtcattggaaatgttcaagagaaagctatgaaacttcataatgcttctaattctgaaatggtattgtattcgtattcaattggttttgtatacattttactgggattgacatgcactagtggattaggccctgcagtaacattttgtgcaaagaatccagttcggacctatggttatgcgttccttttttccctcactggatattttggaatctcctttgttctggctttgattaaaatttttggtgcacttattgctgtaacagtgacaacaggaagaaaagcaatgaccattgtactttcgtttatattctttgctaaaccattcacgtttcagtatgtatggtctggtttgttagttgtccttggtatatttcttaatgtttacagcaaaaatatggataaaataagactaccatcactgtatgatttgataaacaaatcagtggaagcaagaaagtcaaggacgctggcacagactgtatagacagtgattgtcctatttaaaatagaattttaagggaacaatcatcaattaattaactttccaaagggactgataaaaaccaaaggatctggaggcattgctatcccatttgtggacagatttcatatgaagttgttttgcggtgtcagccttttcttcagagcatttgtttgactgacttccaaagcaatcaagagagccacgtctagcagactttacaataaaatgtcaatatgagatgtatcttgcagttatgaaattcctggaatggccggttggagatatggttatattctattaaatgagtttggagtgtttcatctggggtttaggttcgtaaaaggatgggggaaatttaatttggtttgaaaaaggggtatggggaactaacagtaaggatgagttgttttattgtttttttcg

SEQ ID NO: 345887 - DNA, 1840 bp, Homo sapiens
gcagggacacataggcggaagtggcctgcgggcgccggagttgagagtgctttccggggaggcgaccgccgcggtggaaagtgcaggagtgggcgaggaggaggaggaagaggaggtgatggcgacggaccaggggagggggagatgctccgtctagctcagacgccacgcaggctgccgtcacccttccgggtgacataccggccttggggtacgcgtgccttcggggcctttcctgtgtttgggacccagatctcctctcctccagaaaaccttgacactgcccatcttcctcatccagaaggagcgttcgaggaatggatgaggtcgggatggaagaaacgggtgattcccttttttgaaagagcggaaaccggccgggcggtttccagggaggagcatctgttcctcctcgcccgtttttcgccctcgggctggcgagaactccctcaggtcccaatccgtggactcgcaggggccatgattgattccggagcgcagttaatcaaggcataatggcatggacttgacacagcaagcaaaagacatacagaacataacagtccaggaaaccaacaaaaataactctgaaagcattgaatgcagcaaaataacaatggatctcaagttcaacaattccaggaaatatatttctatcactgtgccatccaaaacccaaacaatgtcaccacacatcaagtcagttgacgacgttgtggtacttggcatgaatctcagcaagtttaacaaacttactcagtttttcatatgtgttgctggagtttttgtattttacctaatttatgggtatttacaggaattaatattttcagtggagggttttaagtcctgtggctggtaccttaccttagtgcagtttgccttttactccatatttggcctaatagaacttcagcttattcaggacaaaaggaggagaataccaggaaaaacctacatgataatagcttttctaactgtgggtactatggggttatcaaacacttccttgggctacctgaattaccctacccaagtcatcttcaagtgctgcaaattgattcctgttatgctaggaggagtttttattcaaggaaagcgttataatgttgcagatgtgtctgctgccatatgtatgagccttggcctgatatggtttaccctcgctgacagcacaactgcaccaaatttcaacctgacgggtgtggtgcttatttccctggcactatgtgcagatgccgtcattggaaatgttcaagagaaagctatgaaacttcataatgcttctaattctgaaatggtattgtattcgtattcaattggttttgtatacattttactgggattgacatgcactagtggattaggccctgcagtaacattttgtgcaaagaatccagttcggacctatggttatgcgttccttttttccctcactggatattttggaatctcctttgttctggctttgattaaaatttttggtgcacttattgctgtaacagtgacaacaggaagaaaagcaatgaccattgtactttcgtttatattctttgctaaaccattcacgtttcagtacaacagagcctgtatcatggaggggtccagcatgaggaattcggactggttttcatttgcccatttgctgaaatacagccattgttttttcccaagtggtaatcatttaaaatttttcctggcttaagatagacgggatcttaatgcatacttcattatgctgccttaaacttttaagaagaaaaggatttgtacttgaaagaaaaacttgtcaactttctcaaatctttgataaaatataaatttgacttatcaaagcctt

SEQ ID NO: 345888 - DNA, 615 bp, Homo sapiens
ctgcattttttctacattaggatatcagaagcctagaattgttttttgattaaacgtttttctaagtgaattgagatagtttggaacttggaagagaggcagcatttcaaaataatttagacagcgttatttttacttaattacttaatatataaagtcctagtgttaactttttctcttgaaaaaaaaagaatagtcttcaaacattagcacagggtttctccaccttggtgtaatgatgtgtgtacaaagaaatgagatggaactttgttttttctgttttataatcgtacaccataggccatgattgattccggagcgcagttaatcaaggcataatggcatggtaagattcttttatttgtaacgttgagtgtggcaaagtatagttaaaatcacgttttttcaggttaatgacaccgtaatgacttttttttcatattctacctttttttggtgtgggacttttgtccttcaggtcggaaaactcaaaaataaactgaaataattgtgacttcaataggtcattgtaactcaacattatcactaattttaatttttaaatatacattgtatgccggaaatgctacctttttattccattttagcagttga

SEQ ID NO: 345889 - DNA, 1056 bp, Homo sapiens
gcagggacacataggcggaagtggcctgcgggcgccggagttgagagtgctttccggggaggcgaccgccgcggtggaaagtgcaggagtgggcgaggaggaggaggaagaggaggtgatggcgacggaccaggggagggggagatgctccgtctagctcagacgccacgcaggctgccgtcacccttccgggtgacataccggccttggggtacgcgtgccttcggggcctttcctgtgtttgggacccagatctcctctcctccagaaaaccttgacactgcccatcttcctcatccagaaggagcgttcgaggaatggatgaggtcgggatggaagaaacgggtgattcccttttttgaaagagcggaaaccggccgggcggtttccagggaggagcatctgttcctcctcgcccgtttttcgccctcgggctggcgagaactccctcaggtcccaatccgtggactcgcaggggtgaggtgacctcaaggggtcttttacgctgttctcggggtctctggagaactgtcagtcacctggatacctctagactgtatttacagttaactgtttcctcgttccgtgtttattaaataggggcactccaaggtactcttttctccatttggcttgcagtagaatgtgattgttctggctgggctattaagtttatggcataaacttccactagaagttctgcaagtttcctccagtctttgcaactgaattatctctcccgtctttttattatttaaggaatattgaaagtaaaagatggaatgatttggtgcgctaacaaaatcttaagtgttgagtatctgcattttttctacattaggatatcagaagcctagaattgttttttgattaaacgtttttctaagtgaattgagatagtttggaacttggaagagaggcagcatttcaaaataatttagacagcgttatttttacttaattacttaatatataaagtcctagtgttaactttttctcttgaaaaaaaaagaatagtcttcaaacattagcacagggtttctccaccttggtgta

SEQ ID NO: 345890 - DNA, 1903 bp, Homo sapiens
gcagggacacataggcggaagtggcctgcgggcgccggagttgagagtgctttccggggaggcgaccgccgcggtggaaagtgcaggagtgggcgaggaggaggaggaagaggaggtgatggcgacggaccaggggagggggagatgctccgtctagctcagacgccacgcaggctgccgtcacccttccgggtgacataccggccttggggacttgacacagcaagcaaaagacatacagaacataacagtccaggaaaccaacaaaaataactctgaaagcattgaatgcagcaaaataacaatggatctcaagttcaacaattccaggaaatatatttctatcactgtgccatccaaaacccaaacaatgtcaccacacatcaagtcagttgacgacgttgtggtacttggcatgaatctcagcaagtttaacaaacttactcagtttttcatatgtgttgctggagtttttgtattttacctaatttatgggtatttacaggaattaatattttcagtggagggttttaagtcctgtggctggtaccttaccttagtgcagtttgccttttactccatatttggcctaatagaacttcagcttattcaggacaaaaggaggagaataccaggaaaaacctacatgataatagcttttctaactgtgggtactatggggttatcaaacacttccttgggctacctgaattaccctacccaagtcatcttcaagtgctgcaaattgattcctgttatgctaggaggagtttttattcaaggaaagcgttataatgttgcagatgtgtctgctgccatatgtatgagccttggcctgatatggtttaccctcgctgacagcacaactgcaccaaatttcaacctgacgggtgtggtgcttatttccctggcactatgtgcagatgccgtcattggaaatgttcaagagaaagctatgaaacttcataatgcttctaattctgaaatggtattgtattcgtattcaattggttttgtatacattttactgggattgacatgcactagtggattaggccctgcagtaacattttgtgcaaagaatccagttcggacctatggttatgcgttccttttttccctcactggatattttggaatctcctttgttctggctttgattaaaatttttggtgcacttattgctgtaacagtgacaacaggaagaaaagcaatgaccattgtactttcgtttatattctttgctaaaccattcacgtttcagtatgtatggtctggtttgttagttgtccttggtatatttcttaatgtttacagcaaaaatatggataaaataagactaccatcactgtatgatttgataaacaaatcagtggaagcaagaaagtcaaggacgctggcacagactgtatagacagtgattgtcctatttaaaatagaattttaagggaacaatcatcaattaattaactttccaaagggactgataaaaaccaaaggatctggaggcattgctatcccatttgtggacagatttcatatgaagttgttttgcggtgtcagccttttcttcagagcatttgtttgactgacttccaaagcaatcaagagagccacgtctagcagactttacaataaaatgtcaatatgaaggactgtaattcctagcagtttattgagaatttcactggaaatggaccatgtgttgcaagactaattggctataattatatcctatcaaagaaatcgatacgtaatagcagattgttttatattcattccattttgatggtgttatttaaattgattctctgttataagagtaaactgatgagttgaagtctggagagaataacattcattataaataaaattattctgtgatcttttttcaaaaaaaaaa

SEQ ID NO: 345891 - DNA, 2154 bp, Homo sapiens
gcagggacacataggcggaagtggcctgcgggcgccggagttgagagtgctttccggggaggcgaccgccgcggtggaaagtgcaggagtgggcgaggaggaggaggaagaggaggtgatggcgacggaccaggggagggggagatgctccgtctagctcagacgccacgcaggctgccgtcacccttccgggtgacataccggccttggggccatgattgattccggagcgcagttaatcaaggcataatggcatggtttgaccaaatatttaggagagataatttaaagcatggttttaaaagaaagtcacatctcaaagataccctgcaagattacataaaaagtcttacaaatgacagtgattgaaacataatgtgggaagcaagaacaaaggaaagcgaagaataaacaagaggaatacagtaaacttcatgaaacaacttttctattagatataaggacttgacacagcaagcaaaagacatacagaacataacagtccaggaaaccaacaaaaataactctgaaagcattgaatgcagcaaaataacaatggatctcaagttcaacaattccaggaaatatatttctatcactgtgccatccaaaacccaaacaatgtcaccacacatcaagtcagttgacgacgttgtggtacttggcatgaatctcagcaagtttaacaaacttactcagtttttcatatgtgttgctggagtttttgtattttacctaatttatgggtatttacaggaattaatattttcagtggagggttttaagtcctgtggctggtaccttaccttagtgcagtttgccttttactccatatttggcctaatagaacttcagcttattcaggacaaaaggaggagaataccaggaaaaacctacatgataatagcttttctaactgtgggtactatggggttatcaaacacttccttgggctacctgaattaccctacccaagtcatcttcaagtgctgcaaattgattcctgttatgctaggaggagtttttattcaaggaaagcgttataatgttgcagatgtgtctgctgccatatgtatgagccttggcctgatatggtttaccctcgctgacagcacaactgcaccaaatttcaacctgacgggtgtggtgcttatttccctggcactatgtgcagatgccgtcattggaaatgttcaagagaaagctatgaaacttcataatgcttctaattctgaaatggtattgtattcgtattcaattggttttgtatacattttactgggattgacatgcactagtggattaggccctgcagtaacattttgtgcaaagaatccagttcggacctatggttatgcgttccttttttccctcactggatattttggaatctcctttgttctggctttgattaaaatttttggtgcacttattgctgtaacagtgacaacaggaagaaaagcaatgaccattgtactttcgtttatattctttgctaaaccattcacgtttcagtatgtatggtctggtttgttagttgtccttggtatatttcttaatgtttacagcaaaaatatggataaaataagactaccatcactgtatgatttgataaacaaatcagtggaagcaagaaagtcaaggacgctggcacagactgtatagacagtgattgtcctatttaaaatagaattttaagggaacaatcatcaattaattaactttccaaagggactgataaaaaccaaaggatctggaggcattgctatcccatttgtggacagatttcatatgaagttgttttgcggtgtcagccttttcttcagagcatttgtttgactgacttccaaagcaatcaagagagccacgtctagcagactttacaataaaatgtcaatatgaaggactgtaattcctagcagtttattgagaatttcactggaaatggaccatgtgttgcaagactaattggctataattatatcctatcaaagaaatcgatacgtaatagcagattgttttatattcattccattttgatggtgttatttaaattgattctctgttataagagtaaactgatgagttgaagtctggagagaataacattcattataaataaaattattctgtgatcttttttcaaaaaaaaaa

SEQ ID NO: 345892 - DNA, 2117 bp, Homo sapiens
gcagggacacataggcggaagtggcctgcgggcgccggagttgagagtgctttccggggaggcgaccgccgcggtggaaagtgcaggagtgggcgaggaggaggaggaagaggaggtgatggcgacggaccaggggagggggagatgctccgtctagctcagacgccacgcaggctgccgtcacccttccgggtgacataccggccttggggtacgcgtgccttcggggcctttcctgtgtttgggacccagatctcctctcctccagaaaaccttgacactgcccatcttcctcatccagaaggagcgttcgaggaatggatgaggtcgggatggaagaaacgggtgattcccttttttgaaagagcggaaaccggccgggcggtttccagggaggagcatctgttcctcctcgcccgtttttcgccctcgggctggcgagaactccctcaggtcccaatccgtggactcgcaggggccatgattgattccggagcgcagttaatcaaggcataatggcatggacttgacacagcaagcaaaagacatacagaacataacagtccaggaaaccaacaaaaataactctgaaagcattgaatgcagcaaaataacaatggatctcaagttcaacaattccaggaaatatatttctatcactgtgccatccaaaacccaaacaatgtcaccacacatcaagtcagttgacgacgttgtggtacttggcatgaatctcagcaagtttaacaaacttactcagtttttcatatgtgttgctggagtttttgtattttacctaatttatgggtatttacaggaattaatattttcagtggagggttttaagtcctgtggctggtaccttaccttagtgcagtttgccttttactccatatttggcctaatagaacttcagcttattcaggacaaaaggaggagaataccaggaaaaacctacatgataatagcttttctaactgtgggtactatggggttatcaaacacttccttgggctacctgaattaccctacccaagtcatcttcaagtgctgcaaattgattcctgttatgctaggaggagtttttattcaaggaaagcgttataatgttgcagatgtgtctgctgccatatgtatgagccttggcctgatatggtttaccctcgctgacagcacaactgcaccaaatttcaacctgacgggtattgtattcgtattcaattggttttgtatacattttactgggattgacatgcactagtggattaggccctgcagtaacattttgtgcaaagaatccagttcggacctatggttatgcgttccttttttccctcactggatattttggaatctcctttgttctggctttgattaaaatttttggtgcacttattgctgtaacagtgacaacaggaagaaaagcaatgaccattgtactttcgtttatattctttgctaaaccattcacgtttcagtatgtatggtctggtttgttagttgtccttggtatatttcttaatgtttacagcaaaaatatggataaaataagactaccatcactgtatgatttgataaacaaatcagtggaagcaagaaagtcaaggacgctggcacagactgtatagacagtgattgtcctatttaaaatagaattttaagggaacaatcatcaattaattaactttccaaagggactgataaaaaccaaaggatctggaggcattgctatcccatttgtggacagatttcatatgaagttgttttgcggtgtcagccttttcttcagagcatttgtttgactgacttccaaagcaatcaagagagccacgtctagcagactttacaataaaatgtcaatatgaaggactgtaattcctagcagtttattgagaatttcactggaaatggaccatgtgttgcaagactaattggctataattatatcctatcaaagaaatcgatacgtaatagcagattgttttatattcattccattttgatggtgttatttaaattgattctctgttataagagtaaactgatgagttgaagtctggagagaataacattcattataaataaaattattctgtgatcttttttcaaaaaaaaaa

SEQ ID NO: 345893 - DNA, 1197 bp, Homo sapiens
gcagggacacataggcggaagtggcctgcgggcgccggagttgagagtgctttccggggaggcgaccgccgcggtggaaagtgcaggagtgggcgaggaggaggaggaagaggaggtgatggcgacggaccaggggagggggagatgctccgtctagctcagacgccacgcaggctgccgtcacccttccgggtgacataccggccttggggtacgcgtgccttcggggcctttcctgtgtttgggacccagatctcctctcctccagaaaaccttgacactgcccatcttcctcatccagaaggagcgttcgaggaatggatgaggtcgggatggaagaaacgggtgattcccttttttgaaagagcggaaaccggccgggcggtttccagggaggagcatctgttcctcctcgcccgtttttcgccctcgggctggcgagaactccctcaggtcccaatccgtggactcgcaggggccatgattgattccggagcgcagttaatcaaggcataatggcatggacttgacacagcaagcaaaagacatacagaacataacagtccaggaaaccaacaaaaataactctgaaagcattgaatgcagcaaaataacaatggatctcaagttcaacaattccaggaaatatatttctatcactgtgccatccaaaacccaaacaatgtcaccacacatcaagtcagttgacgacgttgtggtacttggcatgaatctcagcaagtttaacaaacttactcagtttttcatatgtgttgctggagtttttgtattttacctaatttatgggtatttacaggtaaaaaagttatatgtttgtaatatgttaattatttataataattgcggtcagtatgggcatttactagttttgcccaagatagtcacttaggggatactggctgattcataaatttgaattttttagtatagagtagaaaagagcttcttaacagatcaaaattcaagagttaaataatttaagtggggaggaggcatatgtagagactatcttgaaaaattttcattatgaaaattaagttttaaatatttaacaaaatgtgtgcttccaagagaaagcaatgattcacgtattgattggtatcttggaatattattgaatgatagtgcagtttacttgattcttggagctcaataataaaagatcatttttgcaaa

SEQ ID NO: 345894 - DNA, 537 bp, Homo sapiens
gccgcatctggtcacctttctggtgcacctctttggacagcagccatctggctgttcccagcctgctcccaccctgtgttttagttcgctatgcacttttaaatgtcagcgtgatcgtactcccggtgcacttttgtcagctcaggaagcaggccctctctgtaagccttgcagctggtgctgggcgctgaggagctctccaagctcccgggcactggggaattcagcccagggagttctcaaggttggagccctggaagccaggatgagtaataacccttcagtggccaggatcggacttcatcagcaccatagtaactgtctttatcttctccatcccccactccctccatccgctagaggtggaattctcaggcttggatgtgggggaggggaaaatgatggatttcagaaaggcctgggctagaagtggaaagccagccaaggaaacccagcgccccccaggagtggtggtggggacagagtcccccgggaacgtgcctgcggggtgaagatgctagacttggggaggaccca

SEQ ID NO: 345895 - DNA, 602 bp, Homo sapiens
agggccacaggggaagcaccggtgtcggtcgggggcagaagcaggagcaagaagaaagcataggctttgactgaggtttctgcagggaggcaaggcagagcaaggccaacagtttccaattggcaagtctgaataattccagcaggctctgggctggaggggcggtctccatttgcttggtacctagcccctggggtgagttagggcaatttctatattggcttggtgtgtgaaagttagataaaggggaaggttgcggctatgttcttgacaatagttagatatgctcagggctcagtcctttgctgtctccaagaattagctagtcctgggagtctcttccctgccagcaaaatttataagataccagaacatcataagatacagaaaaaaaaccgtgatgaatgcaacttcacaatattgcctcctttttccttgcactgcctttccctgatccctctaccactttggttattgtgacagcaacaagattcatctttcaaccatctacaccaggggtcagcaaactatgggctgatggccagatctagccagctgcttgttttgtatggcccacaaggtaacaatgctagaaaaaaaaa

SEQ ID NO: 345896 - DNA, 438 bp, Homo sapiens
tatacacagcggtgtacaagtatttatgtgagtctttgttttcatttgggtatgtatctagtggaattgctgagaaatataattttgtttagtattttaaggaaccaccaagctgttttgcacagtatttgtaccattcttaatggcaatacacaagggttcaaatttctccacggccttcatcctggtgattgtgaagtgatatttcattattgtttgatttagagtacccttaaactaatggttttgagcatcctttcatgtgcttattggccacatgtatagcttcttggagaaatgtctattcaaatcctttgcccttttttgaattggttgtgaggggtttggttgtcaaattgtaggagttctaaatatattctgaatattaatcccattgccaaatacatgatttgcatatattttgtcccactttgctgt

SEQ ID NO: 345897 - DNA, 254 bp, Homo sapiens
tggtcctcttgtaggctgtttgactgtgggctctagtgctggaccatgtaagccattcttagcaaaggtttcaagacaaacatacattgggatgggagagagctatggggctggaagctgtttctctggagggcagaaagttttccccgcttcattcgtggcataagctcttgtgattttatttgtaagcctttattattattatttgagccggagtcttgctctgtcacccagactagagtgcagtggcgaga

SEQ ID NO: 345898 - DNA, 807 bp, Homo sapiens
ctcatcctcatggatgcagaggcaggacaatgccagtggactccccaagtttctcctgccttggattagctggtgttgggtcaagatgcagcccttatcagaggctttcctgggcttggagcctctcactgctgtggctgtgtgtcaggtggaggctggcttccttgtgaagtccctgtgcatagatggcaccctggtcctagaggaggctggctggaagtgagccactcttactccaggtgccagtgaggctgaatttgcacttggaaatgcgggtgcctgggcagcatgaagtcttggcccagcttctgctacacctgggacttgtggctcatgataagagtgcaggcagtgtacggtgtcagagctgtggctggaggtctcgccacccatttttagggtgtggctgctctcctgtgtgaattttggtggatcagcaagttggatgtcagagaaaagtgtcttgtgaaggagacttgtttcctacctgtgtgagtgctttggggatgaccagagggtaccccatgtccagctcttcccaaaactggtcctcttgtaggctgtttgactgtgggctctagtgctggaccatgtaagccattcttagcaaaggtttcaagacaaacatacattgggatgggagagagctatggggctggaagctgtttctctggagggcagaaagttttccccgcttcattcgtggcataagctcttgtgattttatttgtaagcctttattattattatttgagccgggagatcatgccactgacagagtaagtgagaagctgtctcagaaaaaaa

SEQ ID NO: 345899 - DNA, 503 bp, Homo sapiens
ctgtggtgttggtttccaggccccaccaatctgtgtcagttcccctggagccgacagaaaaaaaaccctcagcctgagtccagagaggtaaagtgactcccccaaggtcccacaggtagtaagggtagagcagccctcagactcagaccatttcacttctgaattctgggggctggaaaaaaatccttctcaaaaccagaaggtgcgctgcattgggtctgagagtgttggggccacttgtgagatcagggacttgcaaacaagtgcctatgagggccagacaggggaaaatgctacttaatattactgagcacttaactttgcaccagactgtgcagagagctctggcatgggtcctgtcaagcagtccctgcagctctgagaagtgagtactctttgcaccatttgcagatggggaaactgaggcacagaggtcatgtgatatgcccaaggtcacacagctggtaggtggcagaatcaggatttgagccagcgtctgtacc

SEQ ID NO: 345900 - DNA, 2357 bp, Homo sapiens
  misc_feature (1526)..(1526): n is a, c, g, or t
tacttctgcccccggctgagacgccggttccgcgctggaagtctccgggggagtcgctgttgctgaggctgtcgcctgaggtttttcgcgctcctccctttcctcctcctctttctcctcctccttatccgaaccccagtcagaccgatctgctctgctctcggtgaccttgcaacttcatggatgacgacaaaccttttcaaccaaaaaacatttcaaaaatggcagaactctttatggaatgtgaagaagaagagctagagccatggcagaagaaagtagaagaaactcaggatgaggatgacgatgaactgatctttgttggagagatatcaagttcaaaaccagccatttcaaatattttgaacagaggccactccagctcatcttcaaaaggaataaagagtgagccacacagtccaggtattcctgaaatattcaggactgcaagtcaacgctgcagagacccaccatcaaatccagtggctgcctcgcctagatttcatcttgtatctaaatcttcacaaagctctgttactgttgagaatgcgtctaaacctgattttacaaagaattcacaagttggatcggataattcttcaattttactgtttgactcgacccaggaatcactaccaccatcccaagacataccagcaatttttagagaaggtatgaaaaatacttcatatgtgttgaaacatccttctacttctaaagtaaacagtgttactccaaaaaaaccaaagaccagtgaagatgttcctcagataaatccctccacttcattgcctttaattggctctcctccagtgacatcctcccaagttatgctgtcaaaaggtacaaatacctcatctccatatgatgctggagcagattacctaagagcttgtccaaagtgcaatgttcagttcaatcttttggatcctttgaaataccacatgaagcattgttgtccagacatgataactaaatttttgggagtaattgttaaatcagaacgtccatgtgatgaagacaagactgattcagagacaggaaagttgatcatgttagtcaatgagttttattatggaaggcatgaaggagtcactgagaaagagccaaagacttacacaacctttaaatgcttcagttgctcgaaagttcttaaaaataatattaggtttatgaaccacatgaaacatcacttggaacttgagaagcagaacaatgaaagctgggaaaaccacaccacctgccagcactgttaccggcaatatcccacacccttccaactgcagtgccacattgagagtacacacactccccatgagttttctactatttgcaaaatctgtgaattatcatttgaaacagagcatattcttttacaacatatgaaggacacccataaacctggtgaaatgccatatgtttgccaggtttgccagtttagatcatcaacattttctgatgtagaagctcattttagagcagcccatgaaaacactaagaacttgctatgtccattttgcctcaangttagtaaaatggcaaccccctacatgaatcattacatgaagcatcagaaaaaaggagttcatcgttgcccaaaatgcagactacaatttttgaccagcaaggagaaagctgaacataaggcgcagcatcgtacatttataaagcctaaagaactagaaggattgcctcctggagcaaaagttactattcgagcttcacttggacctctccagtcaaaattaccaactgcacctttcggttgcgctccaggcacttcttttcttcaggtcacacctccgacatctcaaaatacaactgctagaaatcctagaaaatctaatgccagtagatctaagacaagtaagcttcatgcaactacatccactgcaagtaaagttaatacaagtaagccaaggggacgtatagctaagtccaaagcaaaaccctcttacaagcaaaagcgacagcgcaacagaaaaaataaaatgagccttgctttgaagaacataaggtgtcgtcggggaattcacaagtgcattgaatgtcattccaaaataaaagattttgcaagccacttttctatatacatccactgcagtttttgcaagtacaatactaactgtaacaaagcctttgtaaatcatatgatgagctctcatagcaaccatccaggtaaacggttttgtattttcaagaagcattcaggaactctcaggggcattactctagtgtgccttaaatgtgatttcctagctgattcttccggcttagatcgtatggctaaacacttaagtcaacgtaaaactcatacttgccaagttataatagagaatggtacgtatatataattg

SEQ ID NO: 345901 - DNA, 1744 bp, Homo sapiens
  misc_feature (913)..(913): n is a, c, g, or t
agtaagccagtataatagataaaacaaaaggttcttgtaattatagtcattaaaattgctattgcatgcatttagaaaccaagacacaaataaaaatataccagcagtttgtcttttgagcagctgaaaccttcagagctttcaaagatttgtctcttcactgtagctgcttttggtggtagagtttccatcctttcagtattttattttaaaatgtaaatagtatttcatgtatggaaaagaagcctgctatttttctttgctaaaaaaaattttaaatctaaaataatgatatagtgttacagcaaattagtgatgtttcatactactacattaatggattattttagaaacaaagataaaaaaaccttactgagccacttaatgaaagtaaattatttaaagtacacactttatagagtgctttcaggccttggagatgttattttgagtcatagaattacattttaaaaatttattttcagagacttatttgtgaggtttttctttggttataagtctgaatttttgctcttactggcaaattgtttgtaggtttatgaaccacatgaaacatcacttggaacttgagaagcagaacaatgaaagctgggaaaaccacaccacctgccagcactgttaccggcaatatcccacacccttccaactgcagtgccacattgagagtacacacactccccatgagttttctactatttgcaaaatctgtgaattatcatttgaaacagagcatattcttttacaacatatgaaggacacccataaacctggtgaaatgccatatgtttgccaggtttgccagtttagatcatcaacattttctgatgtagaagctcattttagagcagcccatgaaaacactaagaacttgctatgtccattttgcctcaangttagtaaaatggcaaccccctacatgaatcattacatgaagcatcagaaaaaaggagttcatcgttgcccaaaatgcagactacaatttttgaccagcaaggagaaagctgaacataaggcgcagcatcgtacatttataaagcctaaagaactagaaggattgcctcctggagcaaaagttactattcgagcttcacttggacctctccagtcaaaattaccaactgcacctttcggttgcgctccaggcacttcttttcttcaggtcacacctccgacatctcaaaatacaactgctagaaatcctagaaaatctaatgccagtagatctaagacaagtaagcttcatgcaactacatccactgcaagtaaagttaatacaagtaagccaaggggacgtatagctaagtccaaagcaaaaccctcttacaagcaaaagcgacagcgcaacagaaaaaataaaatgagccttgctttgaagaacataaggtgtcgtcggggaattcacaagtgcattgaatgtcattccaaaataaaagattttgcaagccacttttctatatacatccactgcagtttttgcaagtacaatactaactgtaacaaagcctttgtaaatcatatgatgagctctcatagcaaccatccaggtaaacggttttgtattttcaagaagcattcaggaactctcaggggcattactctagtgtgccttaaatgtgatttcctagctgattcttccggcttagatcgtatggctaaacacttaagtcaacgtaaaactcatacttgccaagttataatagagaatggtacgtatatataattg

SEQ ID NO: 345902 - DNA, 2166 bp, Homo sapiens
  misc_feature (1335)..(1335): n is a, c, g, or t
ctcttctcttgaaaattagacatttcaaaaatggcagaactctttatggaatgtgaagaagaagagctagagccatggcagaagaaagtagaagaaactcaggatgaggatgacgatgaactgatctttgttggagagatatcaagttcaaaaccagccatttcaaatattttgaacagaggccactccagctcatcttcaaaaggaataaagagtgagccacacagtccaggtattcctgaaatattcaggactgcaagtcaacgctgcagagacccaccatcaaatccagtggctgcctcgcctagatttcatcttgtatctaaatcttcacaaagctctgttactgttgagaatgcgtctaaacctgattttacaaagaattcacaagttggatcggataattcttcaattttactgtttgactcgacccaggaatcactaccaccatcccaagacataccagcaatttttagagaaggtatgaaaaatacttcatatgtgttgaaacatccttctacttctaaagtaaacagtgttactccaaaaaaaccaaagaccagtgaagatgttcctcagataaatccctccacttcattgcctttaattggctctcctccagtgacatcctcccaagttatgctgtcaaaaggtacaaatacctcatctccatatgatgctggagcagattacctaagagcttgtccaaagtgcaatgttcagttcaatcttttggatcctttgaaataccacatgaagcattgttgtccagacatgataactaaatttttgggagtaattgttaaatcagaacgtccatgtgatgaagacaagactgattcagagacaggaaagttgatcatgttagtcaatgagttttattatggaaggcatgaaggagtcactgagaaagagccaaagacttacacaacctttaaatgcttcagttgctcgaaagttcttaaaaataatattaggtttatgaaccacatgaaacatcacttggaacttgagaagcagaacaatgaaagctgggaaaaccacaccacctgccagcactgttaccggcaatatcccacacccttccaactgcagtgccacattgagagtacacacactccccatgagttttctactatttgcaaaatctgtgaattatcatttgaaacagagcatattcttttacaacatatgaaggacacccataaacctggtgaaatgccatatgtttgccaggtttgccagtttagatcatcaacattttctgatgtagaagctcattttagagcagcccatgaaaacactaagaacttgctatgtccattttgcctcaangttagtaaaatggcaaccccctacatgaatcattacatgaagcatcagaaaaaaggagttcatcgttgcccaaaatgcagactacaatttttgaccagcaaggagaaagctgaacataaggcgcagcatcgtacatttataaagcctaaagaactagaaggattgcctcctggagcaaaagttactattcgagcttcacttggacctctccagtcaaaattaccaactgcacctttcggttgcgctccaggcacttcttttcttcaggtcacacctccgacatctcaaaatacaactgctagaaatcctagaaaatctaatgccagtagatctaagacaagtaagcttcatgcaactacatccactgcaagtaaagttaatacaagtaagccaaggggacgtatagctaagtccaaagcaaaaccctcttacaagcaaaagcgacagcgcaacagaaaaaataaaatgagccttgctttgaagaacataaggtgtcgtcggggaattcacaagtgcattgaatgtcattccaaaataaaagattttgcaagccacttttctatatacatccactgcagtttttgcaagtacaatactaactgtaacaaagcctttgtaaatcatatgatgagctctcatagcaaccatccaggtaaacggttttgtattttcaagaagcattcaggaactctcaggggcattactctagtgtgccttaaatgtgatttcctagctgattcttccggcttagatcgtatggctaaacacttaagtcaacgtaaaactcatacttgccaagttataatagagaatggtacgtatatataattg

SEQ ID NO: 345903 - DNA, 494 bp, Homo sapiens
tttatgaaccacatgaaacatcacttggaacttgagaagcagaacaatgaaagctgggaaaaccacaccacctgccagcactgttaccggcaatatcccacacccttccaactgcagtgccacattgagagtacacacactccccatgagttttctagtaagtgaaagtttctttggaatcctgaatattgttgactttgatcatccgaactgtgaggaaaccttaaaaattctggcagaaaaaaataagaagtagactttgtaatatgagggcaaaattgaaaaaaaaaatcataacttttataaacctagatgaaatgtgttctaaagccaggtgtgatggtgcatgcctatacacccagctactgaggaggctgaggcaggaggatcacttgagcccatgagttcagtactatagaatgctatgatcaattgcacctgtgaatagccactgcactccagcctgggcaacatagtaagaccctgcctctaca

SEQ ID NO: 345904 - DNA, 2210 bp, Homo sapiens
tacttctgcccccggctgagacgccggttccgcgctggaagtctccgggggagtcgctgttgctgaggctgtcgcctgaggtttttcgcgctcctccctttcctcctcctctttctcctcctccttatccgaaccccagtcagaccgatctgctctgctctcggtgaccttgcaacttcatggatgacgacaaaccttttcaaccaaaaaacatttcaaaaatggcagaactctttatggaatgtgaagaagaagagctagagccatggcagaagaaagtagaagaaactcaggatgaggatgacgatgaactgatctttgttggagagatatcaagttcaaaaccagccatttcaaatattttgaacagaggccactccagctcatcttcaaaaggaataaagagtgagccacacagtccaggtattcctgaaatattcaggactgcaagtcaacgctgcagagacccaccatcaaatccagtggctgcctcgcctagatttcatcttgtatctaaatcttcacaaagctctgttactgttgagaatgcgtctaaacctgattttacaaagaattcacaagttggatcggataattcttcaattttactgtttgactcgacccaggaatcactaccaccatcccaagacataccagcaatttttagagaaggtatgaaaaatacttcatatgtgttgaaacatccttctacttctaaagtaaacagtgttactccaaaaaaaccaaagaccagtgaagatgttcctcagataaatccctccacttcattgcctttaattggctctcctccagtgacatcctcccaagttatgctgtcaaaaggtacaaatacctcatctccatatgatgctggagcagattacctaagagcttgtccaaagtgcaatgttcagttcaatcttttggatcctttgaaataccacatgaagcattgttgtccagacatgataactaaatttttgggagtaattgttaaatcagaacgtccatgtgatgaagacaagactgattcagagacaggaaagttgatcatgttagtcaatgagttttattatggaaggcatgaaggagtcactgagaaagagccaaagacttacacaacctttaaatgcttcagttgctcgaaagttcttaaaaataatattaggtttatgaaccacatgaaacatcacttggaacttgagaagcagaacaatgaaagctgggaaaaccacaccacctgccagcactgttaccggcaatatcccacacccttccaactgcagtgccacattgagagtacacacactccccatgagttttctactatttgcaaaatctgtgaattatcatttgaaacagagcatattcttttacaacatatgaaggacacccataaacctggtgaaatgccatatgtttgccagaaaaaaggagttcatcgttgcccaaaatgcagactacaatttttgaccagcaaggagaaagctgaacataaggcgcagcatcgtacatttataaagcctaaagaactagaaggattgcctcctggagcaaaagttactattcgagcttcacttggacctctccagtcaaaattaccaactgcacctttcggttgcgctccaggcacttcttttcttcaggtcacacctccgacatctcaaaatacaactgctagaaatcctagaaaatctaatgccagtagatctaagacaagtaagcttcatgcaactacatccactgcaagtaaagttaatacaagtaagccaaggggacgtatagctaagtccaaagcaaaaccctcttacaagcaaaagcgacagcgcaacagaaaaaataaaatgagccttgctttgaagaacataaggtgtcgtcggggaattcacaagtgcattgaatgtcattccaaaataaaagattttgcaagccacttttctatatacatccactgcagtttttgcaagtacaatactaactgtaacaaagcctttgtaaatcatatgatgagctctcatagcaaccatccaggtaaacggttttgtattttcaagaagcattcaggaactctcaggggcattactctagtgtgccttaaatgtgatttcctagctgattcttccggcttagatcgtatggctaaacacttaagtcaacgtaaaactcatacttgccaagttataatagagaatggtacgtatatataattg

SEQ ID NO: 345905 - DNA, 245 bp, Homo sapiens
ggacaaccttcttctctttccattgcaaatcttagaactccaggtcctctgacttttagactctgggacttgaaccagcagcccccaggtctcaggcccttggccttggactgagagttataccatcagcttctgtggttctgaggccttcagacttggactgagccaagctacctggacctccagcttgcacatagcctataatgaaacttcttagcctccatgatcacatgacccaattcccc

SEQ ID NO: 345906 - DNA, 386 bp, Homo sapiens
aaatagataaaactgtcaaaagtatgttgtcaaacacgtcagagttctgtttttatgccataatgtaacaattgaaaatttttcatcaaaataaaaaataaatagaaaaaaaaaaaaaaaaaaaaaaaaaaaaaaaaaaaaaaaaaaaaaaaaaaaaaaaaaaaaaaaaaaaaaaaaaaaaaaaaaaaaaaaaaaaaaaaaaacctcggggggggccccggaccccaattccccttatagggagccgttttacaattaattggccgtcttttaaaaacgtcggaattggaaaaaccttggctttcccaaacttaatccctttgaaaaaaatccccttttcgccagttggcgtaataccaaaaaggcccgaaccaatggcctttcca

SEQ ID NO: 345907 - DNA, 543 bp, Homo sapiens
ttactcacttcccaccctgtgccttgtaaggtcctcacccgcgaggtgcattcaccctttgggtcccctaagcctcgcccttcattgcgtctgcacagcagcaccgcagctccggtgcaagagagtcctcgccctggtcctgggattccacagatcccacccctcccctgagacaccctcccatcttgctctcattgagccttgccctctatcctgcaggcctccccctcataagcatggcttcctctgacccagcgttgaaggaggtgacttgggcctgtctgttcacctccaatgttcttttgtcccagattccactccactaggaaaagtgctttcagtaggtgggcatcttattccatccccttccctgtaaatatgtggccacaggggatcaggagaaagagagacaggagaaagaggaaatagaaaaactgagaaggagtgagaaggacgggtgagaaccatgaacagatggcaacgcagaggatgggtggggaatttgcagacagacactgagagtgaaagacaaagctgagaaag

SEQ ID NO: 345908 - DNA, 923 bp, Homo sapiens
cctggtgacagtgtaagactctcttaaaaaataaaataaaataaaataaaataaaaaatcaaccatagttccacaactaagagacaattacagttcacattttatttccctggtattttccctctgcatatgtgtgtttatatctgtacttttaagggaaaattgatatcacactatacattcaccatgtacagatctgctgtaagggctggaaacttggcattttcatacagagccaaaatttgatgtgctcaaagaaaactttaagttagaaatgttactctggtttttatgaattttctagcagttgagggaatgggttcttgtaaatacagttactcctagttttcttcctgaaaaccatatgtaaaatatatatatggtcttcaaatggaaggtttttttgtttttttttagctgtgcctctgtgggctgagtgaccgtgaccgcaaggtggctcatggagaactggtgggtgtgcaactgctactggaagatgttctgagtagctatcatgtgaccatggaggccccccaaagacagcaagccacactgggcaaaaatacacagccagattggtccaaagtgccaggattcagaagtcagttccgaagcagcccaaagacctctgagctgctggagggcctgtgcgatgcggtgatgtcctttgctttgctgagatcatttctgatactgtggaagcagctggaagtgctaaaggagcactggggccgactcaagctgcaaggccaggatatcaactctgtctctctccacaaacggttttcagagctctatgaaactgacgttctctaccccagcatgaaagctatagccaggcagatggggaaagaagatgaatttgaaggatttatagtaaataatcagtctgttcttccccccagtggagcctcagaagttga

SEQ ID NO: 345909 - DNA, 563 bp, Homo sapiens
ttcccaatagcaaaaggcagtgtaaaggtagttcactccaaaagttttgcttagggttccagagctcatagtaatttcactcgtcctaagacatcacaaggctattttagagaacagtatgtttttccttactcttggttcaagcaagaacatccaaaagtaacctgatgtaccaatgtgactccttatcccaagctaaagaatatcctttcaaggcaaattcatccaaatcagcttgacatctgatgggagggggttggataaacaaggttgtagagaaatcaagtctgaagagtaaccttgcacagcttgatctgtttactttttaaatgcaggtttgttcagtgggtatcgcactctacttttgaaacataggactaaattttcacaaaaatgtgaagatcctgcccgtgtactctggaaaattgcttgtctaattgggtgcacagctgcacctgtaccctcttgaatgactcagtcatggtgtgctcaagggccaagtaacttgttatggtgctaagtgaagaacaaaaatatataaaattcagttactttggcaatga

SEQ ID NO: 345910 - DNA, 655 bp, Homo sapiens
tggctcacgcgtgcgccctttaaatagtgacccccggctccagaattcgatggcactttcgatctatcccatcgacgcaaatcactggagctttagtagaaaatcaactggatcttcaagaaactaagtttccaagatctgactgctctgtcccttacgaattacgtgttccttagcaacttaacttctctagggctgaagtttctttaccgacataataagagagatgggtatgggcatcacatgctcaaaggcctgaggggcagctcggatgactttaaatcagtatggaatatcttgagatatcccaattctagagatgtttagaagcagaggatgaaaagtgtgcaataatgtctttgcacgctcttatttatcatctctcccacagattactgcaatgacctgttaaccctgccttgactcgttttccctgtcccctccaaacttgtggtgacattacactcagagtgaactttttaaaaatacaaatcttattccatcactcctgtggaaaactgcgaaaacaaggaactgcaaaaacaaagagctacaaattgctctcattcctgtacacacacattttcacaatatgactttgctgccaattccatcaaaaggttcaatctgtttctccatgtccctagatcaaagc

SEQ ID NO: 345911 - DNA, 208 bp, Homo sapiens
ctgtgatatgagttcagttaatgaaaactcaaagaatcagaagtaattgttttcttttttggtgggtccagaatttaggcgtgtaaaaaataaaataaaattttaggaccttccagatttattatgtcaaggggtaatagttaagccctggaaactgaatcaacctttctttcttttcttgtattcattcattcattctttctttctt

SEQ ID NO: 345912 - DNA, 446 bp, Homo sapiens
catttactgcaagccagttttttccagaggaacaataactaaactaaatcacttactatattctgcacgtatttgttgcgttcccacagagtgccaaaaattttgaaatagtaagtaaattttgaaatgcaggattaaaagtagaattggaggccaggtatggtggctcaacgcctgtaatcccagcactttgggaggtcgaggtgggtggatcactagagcccaggagtttgagatcagcctgggcaacactttttttctctacaaaatatatatacgcaaaaattagctgggccagtggagcttgtctgtggtcccagctacctgggaggctaaggcaggaggatcacttgagcccagaaggttgaggctgcagtgagccatgatcgtgccactattctccagcctgggtgacagagtaagaccctgtctctaaaaaaaaaaaa

SEQ ID NO: 345913 - DNA, 832 bp, Homo sapiens
aaatatccaagaactgtgaaacaattacaaaaggtataagtgtactagaacaccagaaggagaagagaaagctaaagaaatctttgaaacaatcactgagaatttatcctaaattaagtcagacaacttgctttatcttcttgctactgcatgcactctccctcttctctgtgtatatgtgtacacacatgggaaaacacacaatttgaacttttttttttaacttttaacttcaggggtacatgtacaggatgtgtaagtttgttacttaggtaaacgcgtgtcatggagatttgctatacagattctttcatcacccaagtattaagcctagtatcttagttgtttttcctgatcctcaaacaacattttaatgaaaactttttaaaatacaaaactagaaataggcattaatagcgttagagcagccagattgtttcatttttaaatttgcaagcatttttacatgggtcttgtctacccacttttacttccttacttgctcctgctgttacgttctctgtcaattgttaaatgtgaaaaccaggccaggcacagtggctcacgcctgtaaccagcactttgggaggccaaggtgggcagatcgcttgagtataggagtttgagaacagcctgggcaacaaacatggcaagaccgtgtgtgtgcaaaaagttatctgggcatggtgattcatgcctgtaggctcagctactcaggaggctgaggtgggaggatggcatgagcccaggaggtcgaggctacagtgaggtgtgatcatgccacctcattccagcctgggcgacagagcgagaccctgtctcaaaaaaaaaa

SEQ ID NO: 345914 - DNA, 688 bp, Homo sapiens
tatcttgaggatccctgctgctgactatttgttgtatcgtatataatattgtatgatatgaatatgccacagttcatgtatccagtctactgttagtggacattgggtacattctgaattctaggcttttacaatgaaagcttcttttctccttctgctgtgcatgtattcacacttctgttgagtacagatccagaagtaggaacgctgggtcagcggcccctgagagtctgcgcttgtggatgagtctgtctcttagttctgtaactttttggttcacatactttgatattatatgaagtggattgctctcttattgataattgttttatctacctgttgaattggcctttgggtggttatgaaatgcctctcttcctctaacatcgctcaccacctgcagtacgcagtgtctgatattagttaaactgtggaagcttttcttcagttagtgatggcatgggggtacttttggtatcgttttaccttcacctttctttgctccatttcagtttaatttctgctacttgctactgttgttgttatctgagatttctgaatcctatgtgatcatctttgcttcttatttggagtatgtagttaattttcatttagtgcattagattgaaccatgtggaactgcaatattagataacaaccacaaatagtcagcgggacctgtgtcccc

SEQ ID NO: 345915 - DNA, 1804 bp, Homo sapiens
caatggcgggctcccctcccccagcctcgctgctgccttgcagtttgatctcagactgctgtgctagcaatcagcgagactccgtgggcgtaggaccctccgagccaggtgtgggatatagtctcgtggtgcgccgttttttaagcccgtcggaaaagcgcagtattcgggtgggagtgacccgattttccaggtgcgtccgtcacccctttctttgactcggaaagggaactccctgaccccttgcgcttcccaagtgaggcaatgcctcgccctgcttcggctcgcgcacggtgcgcgcacccactgacctgcgcccactgtctggcactccctagagagatgaacccggtacctcagatggaaatgcagaaatcaccgtcttctgcgtcgctcacgctgggagctgtagaccagagctgttcctattcggccatcttggctccttattctcattaccttcttgagttgtggctcagacactacaacagagctccgtcacctctttctaaaagctgggaaatggttattgtcaacgccagccccattttggaggcacctggttgcaggggaccacagctagctgggtgcggtggctcaggactgtaattccagctacatgagaggattgcctgaggccaggagtttgagaccagcctgaacaacataatagactgggagctccatgaggtccgagacaacctgaagacgcccagctcagcagagactggctacggcaatcactcagtaactatttgttgaattggacataatagaagagctgaagaattttaaacaagtcaccatcagtgcagtggattcctcaaagcaaacctggaaatctcggcatgagttggatttaaggcagtacattttcagctcctgaaaatttgaacagtttctcaagagaacaacttgaaacagaaaggcaaggatgtagatgtggttgtagaagatgatgtctgcggccaccaaactgtccactgtgaagacaaaccatgcatgtttagtaggcagtggctcctcttccctgtggggagtcccactgcttccctggcctgggtgttctctgccggtagatgttattgacaaaataagcaaagtcctctgattctgagaattagagttaatgatagctctagattgcctctgccatgctatttaaagtcctgctttattgtctgacatgagttcggcatctatgaggacttgtccagtgcaaagtacaatctccactgaaagatatcaccagcacatcttgtcactgtgctgtagcaagctgggcagtacaatgatgttggcaggatcctgtttaggtggaggatggccacctgggcatcaagaatcttctaccctgattccacattgactccccaaagtgggcttcagacagctctttacttacgtcttctgattaaagcagcagacagggtcccagctagagaaaagttctgggagcaggagaggtgttggtggctttaaaaccaggggtgaagattgaattaggaggttaggcaggagtaggatcaaagacttagaaaatgcttgtttcctcctattattcttatgagagctgatacggggctttcagttttgggggagagccttggaagagaatgagggaatttaatcaactagcgggacctttccaacttacatttcccagtgtttgttggatgatacgtttgcctaataagttaaagcttccaaaaatagaaagtaaagcttggtgacactaagctctggcatgctgtcatcttctggctaggggtcttgtgcttctgtttttctatttctgaccaaa

SEQ ID NO: 345916 - DNA, 735 bp, Homo sapiens
caatggcgggctcccctcccccagcctcgctgctgccttgcagtttgatctcagactgctgtgctagcaatcagcgagactccgtgggcgtaggaccctccgagccaggtgtgggatatagtctcgtggtgcgccgttttttaagcccgtcggaaaagcgcagtattcgggtgggagtgacccgattttccaggtgcgtccgtcacccctttctttgactcggaaagggaactccctgaccccttgcgcttcccaagtgaggcaatgcctcgccctgcttcggctcgcgcacggtgcgcgcacccactgacctgcgcccactgtctggcactccctagagagatgaacccggtacctcagatggaaatgcagaaatcaccgtcttctgcgtcgctcacgctgggagctgtagaccagagctgttcctattcggccatcttggctccttattctcattaccttcttgagttgtggctcagacactacaacagagctccgtcacctctttctaaaagctgggaaatggttattgtcaacgccagccccattttggaggcacctggttgcaggggaccacagctagacccgagtcatccctggagtctcacacttgatcttagccaaaaggccgagaagcgatcatccctggagtctctctgaatctgccgtgatcctgggggctgcccgattcgtgcattgttcattgctcaattaaactcctttaaatttaatttg

SEQ ID NO: 345917 - DNA, 1482 bp, Homo sapiens
taacaaaaattagctgggcattttggtgcatgcctgtagtcccagctatttgggaggctaaggcaggagaactgctcgaacccaggaggtggaggttgcagtgagccaagatcatgccattgcactccagcctgggcaacagagcgagactccatgtcaaaaaaatagaaaaaaaaaaaaaaaaaagaaattgttggggttttttttcaggtgtgatactggtattgtggttatgtttttaaaaagtctttatgtttttagctgggtgcggtggctcaggactgtaattccagctacatgagaggattgcctgaggccaggagtttgagaccagcctgaacaacataatagactgggagctccatgaggtccgagacaacctgaagacgcccagctcagcagagactggctacggcaatcactcagtaactatttgttgaattggacataatagaagagctgaagaattttaaacaagtcaccatcagtgcagtggattcctcaaagcaaacctggaaatctcggcatgagttggatttaaggcagtacattttcagctcctgaaaatttgaacagtttctcaagagaacaacttgaaacagaaaggcaaggatgtagatgtggttgtagaagatgatgtctgcggccaccaaactgtccactgtgaagacaaaccatgcatgtttagtaggcagtggctcctcttccctgtggggagtcccactgcttccctggcctgggtgttctctgccggtagatgttattgacaaaataagcaaagtcctctgattctgagaattagagttaatgatagctctagattgcctctgccatgctatttaaagtcctgctttattgtctgacatgagttcggcatctatgaggacttgtccagtgcaaagtacaatctccactgaaagatatcaccagcacatcttgtcactgtgctgtagcaagctgggcagtacaatgatgttggcaggatcctgtttaggtggaggatggccacctgggcatcaagaatcttctaccctgattccacattgactccccaaagtgggcttcagacagctctttacttacgtcttctgattaaagcagcagacagggtcccagctagagaaaagttctgggagcaggagaggtgttggtggctttaaaaccaggggtgaagattgaattaggaggttaggcaggagtaggatcaaagacttagaaaatgcttgtttcctcctattattcttatgagagctgatacggggctttcagttttgggggagagccttggaagagaatgagggaatttaatcaactagcgggacctttccaacttacatttcccagtgtttgttggatgatacgtttgcctaataagttaaagcttccaaaaatagaaagtaaagcttggtgacactaagctctggcatgctgtcatcttctggctaggggtcttgtgcttctgtttttctatttctgaccaaa

SEQ ID NO: 345918 - DNA, 245 bp, Homo sapiens
ctttcagttttgggggagagccttggaagagaatgagggaatttaatcaactagcgggacctttccaacttacatttcccagtgtttgttggatgatacgtttgcctaataagttaaagcttccaaaaatagaaagtaaagcttggtgacactaagctctggcatgctgtcatcttctggctaggggtcttgtgcttctgtttttctatttctgaccaaagacataaaatgtgttgtgacctctc

SEQ ID NO: 345919 - DNA, 692 bp, Homo sapiens
caatggcgggctcccctcccccagcctcgctgctgccttgcagtttgatctcagactgctgtgctagcaatcagcgagactccgtgggcgtaggaccctccgagccaggtgtgggatatagtctcgtggtgcgccgttttttaagcccgtcggaaaagcgcagtattcgggtgggagtgacccgattttccaggtgcgtccgtcacccctttctttgactcggaaagggaactccctgaccccttgcgcttcccaagtgaggcaatgcctcgccctgcttcggctcgcgcacggtgcgcgcacccactgacctgcgcccactgtctggcactccctagagagatgaacccggtacctcagatggaaatgcagaaatcaccgtcttctgcgtcgctcacgctgggagctgtagaccagagctgttcctattcggccatcttggctccttattctcattaccttcttgagttgtggctcagacactacaacagagctccgtcacctctttctaaaagctgggaaatggttattgtcaacgccagccccattttggaggcacctggttgcaggggaccacagctagctgggtgcggtggctcaggactgtaattccagctacatgagaggattgcctgaggccaggagtttgagaccagcctgaacaacatagtgagtacctgtctctaaaaaaa

SEQ ID NO: 345920 - DNA, 943 bp, Homo sapiens
tgatttgatcataagtttttgagttttttaccttttctgtttgccaaattatatgagttatctcattaaaaccacacaaaaacttaatatgaagaatgataaaaataattacataaaaatagtgaaattagctgagaaaatcttgccctcaagttggaagatgttatctctgagtaccttgaaaaagtgcattttcttttgcttactgataacaggcaaataatccagttaaataaagcactgtaaaactagtgtgtgcaatttctggcctaaatacagaaaaaatagtaacaggaggcagatacgtaaacagagtaaatagccataggcctatataaacatccttcttgaaccaaaaactaaggtaaaatgagctgcaacaaatggctaccaaaagatattatgtgaagtctattccataggctatttttcttcccttctttcccctccccacagctttttaaaaaaccatcatgctgattgaataattgtagagactggaaaatctcaaattgatatccttatataaaatcctgcctcagctcattagttcagaaagaaatccaaaagttcagttctctgagttgcttcaacacataagtatattagttttatgaaagattttttttttatttcataaaaccttaatacttctgccagaatcagaagtgcattgtgctctggtacaatttacatgaactttggttcccaccacctgttagctgcgcagcgttttgccaattaagctctttgagactcggctcttaaattcaattataagaccagaatcttgctgttttttctatacatcccatctgttgtttatttctgtttctacttttcatgcacttttggttttaattgaataatttttgtgttccatcttatttcctctgttttctttttagttattataaaaggtgttattatggaattgctgaaa

SEQ ID NO: 345921 - DNA, 262 bp, Homo sapiens
atcctaaccccaggtgacatgttgcctttttttcctccttggaggctactttttctcaaagttacccacttcccaggtaagaatgccggcctcctctttgttaggattcaacttagctgtgcaggcatctaagcagtgcctccttagagtcaggctcgtccaagaaccgctcccaccacctccccacacacacccacatcccccgatcctccatcccaactacattgtaatacttcagaaataaatgtttaaagcacattta

SEQ ID NO: 345922 - DNA, 354 bp, Homo sapiens
tgaaagaggtgacatttttcttagcatacacattatcagccttgaagtaattttctggttataaaggtttaggagaagctggtttatttagtaaattaattggtaatctgaagctattcagaaagttactgcgcttttccaagattactgttggtgctaccagagaagatttaagtagataatggccatttagagacagggccgttaggcaactcagaactttctatttcctagtgctttgccctcacagagatgctctttgtcatataaataaatgaagaaaagctgacattttaaatttcagcattgtctcattcagatagttaatttgaatctgatagggcaatacttcat

SEQ ID NO: 345923 - DNA, 668 bp, Homo sapiens
aaagctgatgaatttgtggtcttgtgccccctgttcctccccactccccccagtttggccctctctcaacaactctctttggtgctggaaaccccagtgattctctgccgcatactcctgtgggcctaaagcctctctagtcagtatctacgccatatagggattaagagacacctcttcctgaccatgctgctctgctctcttaatgctgttgggaccacagttagtccatccgtgctacagaacagcttccttccacagttccagtagggaaaaggcaaaagcctctttgcccttggcgctgctgcttccttctctgaggcttcgcagccccaggtcaggttgattacatcatattcttccctttcttgtctctactccatttacccccgttcatcagaatgggaagagacatatttctcccctttgtcaagcctcttacttcttccttcctttcattgtttgggattttaacttcctaatgggattttaattgctctagtagaacttaatagtgcaattatcaaatctggaacatttttacatagcagtcattgtatttgggctatgctgtcatatggaactcatttaataatctctactagacaaagtttaacaacttggctgggcataattcaagaatgacttcagtctagaaaatggcatgg

SEQ ID NO: 345924 - DNA, 584 bp, Homo sapiens
tttacttcacagtgatcaattaaaatgagaaaatgacctattagctttgaattaccagtataaaataagttgctattatacttgacatattacctttctaatgtatgtatggaattatcaatggaaataatgtggataacttagcaataattttgtaatagttgggtgacattgaattttaaaggattatcaacttagtaatttgattatggcatttctaggaatgaggtgagtctgaattggaaatcatctctagagggtgacacagcaggacatgttggtgtgcgtggtctttgcatcctactaggtggcggtatagaatgaaattaaaaattaaatgaagtctgaggtagccttagaaaacacaaatttggctggttgcagtggctcacacctgtaatctgcagtattcaatacagcatgttactgtactgagtactgtaggcagttgtaatgcagtggtatttgggtaatcttttgggactacagcactttgggaggccacggtgggaggatcacttgagcccaggagttcgagaccagcctgggaaacatggggtggccccagctctacaaaatagaaa

SEQ ID NO: 345925 - DNA, 301 bp, Homo sapiens
tactatggctctggttttctttcacagatcccatctctctttagtttctttcctacgagaacaatcattttctcctctggggacgcacagggtctcactccttaaccaagaccaacatcatgggtattattctcatcacctggtttcttggagctgcgggctcttcctggggagcagggagcatgcgcagctttgctggtctcgaaacccctagcaaccaccgccaagcactcaggaaaaagaaaaacccttctcagttttacaactgagatttgtcagttagcacgtcttaacctacgac

SEQ ID NO: 345926 - DNA, 2518 bp, Homo sapiens
ggcgcgcccgggccgcccagatgcgagcactgcggctgggcgctgaggatcagccgcttcctgcctggattccacagcttcgcgccgtgtactgtcgccccatccctgcgcgcccagcctgccaagcagcgtgccccggttgcaggcgtcatgcagcgggcgcgacccacgctctgggccgctgcgctgactctgctggtgctgctccgcgggccgccggtggcgcgggctggcgcgagctcggggggcttgggtcccgtggtgcgctgcgagccgtgcgacgcgcgtgcactggcccagtgcgcgcctccgcccgccgtgtgcgcggagctggtgcgcgagccgggctgcggctgctgcctgacgtgcgcactgagcgagggccagccgtgcggcatctacaccgagcgctgtggctccggccttcgctgccagccgtcgcccgacgaggcgcgaccgctgcaggcgctgctggacggccgcgggctctgcgtcaacgctagtgccgtcagccgcctgcgcgcctacctgctgccagcgccgccagctccaggaaatgctagtgagtcggaggaagaccgcagcgccggcagtgtggagagcccgtccgtctccagcacgcaccgggtgtctgatcccaagttccaccccctccattcaaagataatcatcatcaagaaagggcatgctaaagacagccagcgctacaaagttgactacgagtctcagagcacagatacccagaacttctcctccgagtccaagcgggagacagaatatggtccctgccgtagagaaatggaagacacactgaatcacctgaagttcctcaatgtgctgagtcccaggggtgtacacattcccaactgtgacaagaagggattttataagaaaaagcagtgtcgcccttccaaaggcaggaagcggggcttctgctggtgtgtggataagtatgggcagcctctcccaggctacaccaccaaggggaaggaggacgtgcactgctacagcatgcagagcaagtagacgcctgccgcaaggttaatgtggagctcaaatatgccttattttgcacaaaagactgccaaggacatgaccagcagctggctacagcctcgatttatatttctgtttgtggtgaactgattttttttaaaccaaagtttagaaagaggtttttgaaatgcctatggtttctttgaatggtaaacttgagcatcttttcactttccagtagtcagcaaagagcagtttgaattttcttgtcgcttcctatcaaaatattcagagactcgagcacagcacccagacttcatgcgcccgtggaatgctcaccacatgttggtcgaagcggccgaccactgactttgtgacttaggcggctgtgttgcctatgtagagaacacgcttcacccccactccccgtacagtgcgcacaggctttatcgagaataggaaaacctttaaaccccggtcatccggacatcccaacgcatgctcctggagctcacagccttctgtggtgtcatttctgaaacaagggcgtggatccctcaaccaagaagaatgtttatgtcttcaagtgacctgtactgcttggggactattggagaaaataaggtggagtcctacttgtttaaaaaatatgtatctaagaatgttctagggcactctgggaacctataaaggcaggtatttcgggccctcctcttcaggaatcttcctgaagacatggcccagtcgaaggcccaggatggcttttgctgcggccccgtggggtaggagggacagagagacagggagagtcagcctccacattcagaggcatcacaagtaatggcacaattcttcggatgactgcagaaaatagtgttttgtagttcaacaactcaagacgaagcttatttctgaggataagctctttaaaggcaaagctttattttcatctctcatcttttgtcctccttagcacaatgtaaaaaagaatagtaatatcagaacaggaaggaggaatggcttgctggggagcccatccaggacactgggagcacatagagattcacccatgtttgttgaacttagagtcattctcatgcttttctttataattcacacatatatgcagagaagatatgttcttgttaacattgtatacaacatagccccaaatatagtaagatctatactagataatcctagatgaaatgttagagatgctatatgatacaactgtggccatgactgaggaaaggagctcacgcccagagactgggctgctctcccggaggccaaacccaagaaggtctggcaaagtcaggctcagggagactctgccctgctgcagacctcggtgtggacacacgctgcatagagctctccttgaaaacagaggggtctcaagacattctgcctacctattagcttttctttatttttttaactttttggggggaaaagtatttttgagaagtttgtcttgcaatgtatttataaatagtaaataaagtttttaccatta

SEQ ID NO: 345927 - DNA, 2494 bp, Homo sapiens
  misc_feature (28)..(28): n is a, c, g, or t
aaggctaggtacgaggctggtgttcatnggccgagggtgcctggattccacagcttcgcgccgtgtactgtcgccccatccctgcgcgcccagcctgccaagcagcgtgccccggttgcaggcgtcatgcagcgggcgcgacccacgctctgggccgctgcgctgactctgctggtgctgctccgcgggccgccggtggcgcgggctggcgcgagctcggggggcttgggtcccgtggtgcgctgcgagccgtgcgacgcgcgtgcactggcccagtgcgcgcctccgcccgccgtgtgcgcggagctggtgcgcgagccgggctgcggctgctgcctgacgtgcgcactgagcgagggccagccgtgcggcatctacaccgagcgctgtggctccggccttcgctgccagccgtcgcccgacgaggcgcgaccgctgcaggcgctgctggacggccgcgggctctgcgtcaacgctagtgccgtcagccgcctgcgcgcctacctgctgccagcgccgccagctccaggaaatgctagtgagtcggaggaagaccgcagcgccggcagtgtggagagcccgtccgtctccagcacgcaccgggtgtctgatcccaagttccaccccctccattcaaagataatcatcatcaagaaagggcatgctaaagacagccagcgctacaaagttgactacgagtctcagagcacagatacccagaacttctcctccgagtccaagcgggagacagaatatggtccctgccgtagagaaatggaagacacactgaatcacctgaagttcctcaatgtgctgagtcccaggggtgtacacattcccaactgtgacaagaagggattttataagaaaaagcagtgtcgcccttccaaaggcaggaagcggggcttctgctggtgtgtggataagtatgggcagcctctcccaggctacaccaccaaggggaaggaggacgtgcactgctacagcatgcagagcaagtagacgcctgccgcaaggttaatgtggagctcaaatatgccttattttgcacaaaagactgccaaggacatgaccagcagctggctacagcctcgatttatatttctgtttgtggtgaactgattttttttaaaccaaagtttagaaagaggtttttgaaatgcctatggtttctttgaatggtaaacttgagcatcttttcactttccagtagtcagcaaagagcagtttgaattttcttgtcgcttcctatcaaaatattcagagactcgagcacagcacccagacttcatgcgcccgtggaatgctcaccacatgttggtcgaagcggccgaccactgactttgtgacttaggcggctgtgttgcctatgtagagaacacgcttcacccccactccccgtacagtgcgcacaggctttatcgagaataggaaaacctttaaaccccggtcatccggacatcccaacgcatgctcctggagctcacagccttctgtggtgtcatttctgaaacaagggcgtggatccctcaaccaagaagaatgtttatgtcttcaagtgacctgtactgcttggggactattggagaaaataaggtggagtcctacttgtttaaaaaatatgtatctaagaatgttctagggcactctgggaacctataaaggcaggtatttcgggccctcctcttcaggaatcttcctgaagacatggcccagtcgaaggcccaggatggcttttgctgcggccccgtggggtaggagggacagagagacagggagagtcagcctccacattcagaggcatcacaagtaatggcacaattcttcggatgactgcagaaaatagtgttttgtagttcaacaactcaagacgaagcttatttctgaggataagctctttaaaggcaaagctttattttcatctctcatcttttgtcctccttagcacaatgtaaaaaagaatagtaatatcagaacaggaaggaggaatggcttgctggggagcccatccaggacactgggagcacatagagattcacccatgtttgttgaacttagagtcattctcatgcttttctttataattcacacatatatgcagagaagatatgttcttgttaacattgtatacaacatagccccaaatatagtaagatctatactagataatcctagatgaaatgttagagatgctatatgatacaactgtggccatgactgaggaaaggagctcacgcccagagactgggctgctctcccggaggccaaacccaagaaggtctggcaaagtcaggctcagggagactctgccctgctgcagacctcggtgtggacacacgctgcatagagctctccttgaaaacagaggggtctcaagacattctgcctacctattagcttttctttatttttttaactttttggggggaaaagtatttttgagaagtttgtcttgcaatgtatttataaatagtaaataaagtttttaccatta

SEQ ID NO: 345928 - DNA, 2536 bp, Homo sapiens
ggcgcgcccgggccgcccagatgcgagcactgcggctgggcgctgaggatcagccgcttcctgcctggattccacagcttcgcgccgtgtactgtcgccccatccctgcgcgcccagcctgccaagcagcgtgccccggttgcaggcgtcatgcagcgggcgcgacccacgctctgggccgctgcgctgactctgctggtgctgctccgcgggccgccggtggcgcgggctggcgcgagctcggggggcttgggtcccgtggtgcgctgcgagccgtgcgacgcgcgtgcactggcccagtgcgcgcctccgcccgccgtgtgcgcggagctggtgcgcgagccgggctgcggctgctgcctgacgtgcgcactgagcgagggccagccgtgcggcatctacaccgagcgctgtggctccggccttcgctgccagccgtcgcccgacgaggcgcgaccgctgcaggcgctgctggacggccgcgggctctgcgtcaacgctagtgccgtcagccgcctgcgcgcctacctgctgccagcgccgccagctccaggtgagccgcccgcgccaggaaatgctagtgagtcggaggaagaccgcagcgccggcagtgtggagagcccgtccgtctccagcacgcaccgggtgtctgatcccaagttccaccccctccattcaaagataatcatcatcaagaaagggcatgctaaagacagccagcgctacaaagttgactacgagtctcagagcacagatacccagaacttctcctccgagtccaagcgggagacagaatatggtccctgccgtagagaaatggaagacacactgaatcacctgaagttcctcaatgtgctgagtcccaggggtgtacacattcccaactgtgacaagaagggattttataagaaaaagcagtgtcgcccttccaaaggcaggaagcggggcttctgctggtgtgtggataagtatgggcagcctctcccaggctacaccaccaaggggaaggaggacgtgcactgctacagcatgcagagcaagtagacgcctgccgcaaggttaatgtggagctcaaatatgccttattttgcacaaaagactgccaaggacatgaccagcagctggctacagcctcgatttatatttctgtttgtggtgaactgattttttttaaaccaaagtttagaaagaggtttttgaaatgcctatggtttctttgaatggtaaacttgagcatcttttcactttccagtagtcagcaaagagcagtttgaattttcttgtcgcttcctatcaaaatattcagagactcgagcacagcacccagacttcatgcgcccgtggaatgctcaccacatgttggtcgaagcggccgaccactgactttgtgacttaggcggctgtgttgcctatgtagagaacacgcttcacccccactccccgtacagtgcgcacaggctttatcgagaataggaaaacctttaaaccccggtcatccggacatcccaacgcatgctcctggagctcacagccttctgtggtgtcatttctgaaacaagggcgtggatccctcaaccaagaagaatgtttatgtcttcaagtgacctgtactgcttggggactattggagaaaataaggtggagtcctacttgtttaaaaaatatgtatctaagaatgttctagggcactctgggaacctataaaggcaggtatttcgggccctcctcttcaggaatcttcctgaagacatggcccagtcgaaggcccaggatggcttttgctgcggccccgtggggtaggagggacagagagacagggagagtcagcctccacattcagaggcatcacaagtaatggcacaattcttcggatgactgcagaaaatagtgttttgtagttcaacaactcaagacgaagcttatttctgaggataagctctttaaaggcaaagctttattttcatctctcatcttttgtcctccttagcacaatgtaaaaaagaatagtaatatcagaacaggaaggaggaatggcttgctggggagcccatccaggacactgggagcacatagagattcacccatgtttgttgaacttagagtcattctcatgcttttctttataattcacacatatatgcagagaagatatgttcttgttaacattgtatacaacatagccccaaatatagtaagatctatactagataatcctagatgaaatgttagagatgctatatgatacaactgtggccatgactgaggaaaggagctcacgcccagagactgggctgctctcccggaggccaaacccaagaaggtctggcaaagtcaggctcagggagactctgccctgctgcagacctcggtgtggacacacgctgcatagagctctccttgaaaacagaggggtctcaagacattctgcctacctattagcttttctttatttttttaactttttggggggaaaagtatttttgagaagtttgtcttgcaatgtatttataaatagtaaataaagtttttaccatta

SEQ ID NO: 345929 - DNA, 2518 bp, Homo sapiens
  misc_feature (753)..(753): n is a, c, g, or t
ggcgcgcccgggccgcccagatgcgagcactgcggctgggcgctgaggatcagccgcttcctgcctggattccacagcttcgcgccgtgtactgtcgccccatccctgcgcgcccagcctgccaagcagcgtgccccggttgcaggcgtcatgcagcgggcgcgacccacgctctgggccgctgcgctgactctgctggtgctgctccgcgggccgccggtggcgcgggctggcgcgagctcggggggcttgggtcccgtggtgcgctgcgagccgtgcgacgcgcgtgcactggcccagtgcgcgcctccgcccgccgtgtgcgcggagctggtgcgcgagccgggctgcggctgctgcctgacgtgcgcactgagcgagggccagccgtgcggcatctacaccgagcgctgtggctccggccttcgctgccagccgtcgcccgacgaggcgcgaccgctgcaggcgctgctggacggccgcgggctctgcgtcaacgctagtgccgtcagccgcctgcgcgcctacctgctgccagcgccgccagctccaggaaatgctagtgagtcggaggaagaccgcagcgccggcagtgtggagagcccgtccgtctccagcacgcaccgggtgtctgatcccaagttccaccccctccattcaaagataatcatcatcaagaaagggcatgctaaagacagccagcgctacaaagttgactacgagtctcagagcacagatacccagaacttctgngggggggggggggggggggggggggggggtccctgccgtagagaaatggaagacacactgaatcacctgaagttcctcaatgtgctgagtcccaggggtgtacacattcccaactgtgacaagaagggattttataagaaaaagcagtgtcgcccttccaaaggcaggaagcggggcttctgctggtgtgtggataagtatgggcagcctctcccaggctacaccaccaaggggaaggaggacgtgcactgctacagcatgcagagcaagtagacgcctgccgcaaggttaatgtggagctcaaatatgccttattttgcacaaaagactgccaaggacatgaccagcagctggctacagcctcgatttatatttctgtttgtggtgaactgattttttttaaaccaaagtttagaaagaggtttttgaaatgcctatggtttctttgaatggtaaacttgagcatcttttcactttccagtagtcagcaaagagcagtttgaattttcttgtcgcttcctatcaaaatattcagagactcgagcacagcacccagacttcatgcgcccgtggaatgctcaccacatgttggtcgaagcggccgaccactgactttgtgacttaggcggctgtgttgcctatgtagagaacacgcttcacccccactccccgtacagtgcgcacaggctttatcgagaataggaaaacctttaaaccccggtcatccggacatcccaacgcatgctcctggagctcacagccttctgtggtgtcatttctgaaacaagggcgtggatccctcaaccaagaagaatgtttatgtcttcaagtgacctgtactgcttggggactattggagaaaataaggtggagtcctacttgtttaaaaaatatgtatctaagaatgttctagggcactctgggaacctataaaggcaggtatttcgggccctcctcttcaggaatcttcctgaagacatggcccagtcgaaggcccaggatggcttttgctgcggccccgtggggtaggagggacagagagacagggagagtcagcctccacattcagaggcatcacaagtaatggcacaattcttcggatgactgcagaaaatagtgttttgtagttcaacaactcaagacgaagcttatttctgaggataagctctttaaaggcaaagctttattttcatctctcatcttttgtcctccttagcacaatgtaaaaaagaatagtaatatcagaacaggaaggaggaatggcttgctggggagcccatccaggacactgggagcacatagagattcacccatgtttgttgaacttagagtcattctcatgcttttctttataattcacacatatatgcagagaagatatgttcttgttaacattgtatacaacatagccccaaatatagtaagatctatactagataatcctagatgaaatgttagagatgctatatgatacaactgtggccatgactgaggaaaggagctcacgcccagagactgggctgctctcccggaggccaaacccaagaaggtctggcaaagtcaggctcagggagactctgccctgctgcagacctcggtgtggacacacgctgcatagagctctccttgaaaacagaggggtctcaagacattctgcctacctattagcttttctttatttttttaactttttggggggaaaagtatttttgagaagtttgtcttgcaatgtatttataaatagtaaataaagtttttaccatta

SEQ ID NO: 345930 - DNA, 1937 bp, Homo sapiens
ggcgcgcccgggccgcccagatgcgagcactgcggctgggcgctgaggatcagccgcttccttccaccccctccattcaaagataatcatcatcaagaaagggcatgctaaagacagccagcgctacaaagttgactacgagtctcagagcacagatacccagaacttctcctccgagtccaagcgggagacagaatatggtccctgccgtagagaaatggaagacacactgaatcacctgaagttcctcaatgtgctgagtcccaggggtgtacacattcccaactgtgacaagaagggattttataagaaaaagcagtgtcgcccttccaaaggcaggaagcggggcttctgctggtgtgtggataagtatgggcagcctctcccaggctacaccaccaaggggaaggaggacgtgcactgctacagcatgcagagcaagtagacgcctgccgcaaggttaatgtggagctcaaatatgccttattttgcacaaaagactgccaaggacatgaccagcagctggctacagcctcgatttatatttctgtttgtggtgaactgattttttttaaaccaaagtttagaaagaggtttttgaaatgcctatggtttctttgaatggtaaacttgagcatcttttcactttccagtagtcagcaaagagcagtttgaattttcttgtcgcttcctatcaaaatattcagagactcgagcacagcacccagacttcatgcgcccgtggaatgctcaccacatgttggtcgaagcggccgaccactgactttgtgacttaggcggctgtgttgcctatgtagagaacacgcttcacccccactccccgtacagtgcgcacaggctttatcgagaataggaaaacctttaaaccccggtcatccggacatcccaacgcatgctcctggagctcacagccttctgtggtgtcatttctgaaacaagggcgtggatccctcaaccaagaagaatgtttatgtcttcaagtgacctgtactgcttggggactattggagaaaataaggtggagtcctacttgtttaaaaaatatgtatctaagaatgttctagggcactctgggaacctataaaggcaggtatttcgggccctcctcttcaggaatcttcctgaagacatggcccagtcgaaggcccaggatggcttttgctgcggccccgtggggtaggagggacagagagacagggagagtcagcctccacattcagaggcatcacaagtaatggcacaattcttcggatgactgcagaaaatagtgttttgtagttcaacaactcaagacgaagcttatttctgaggataagctctttaaaggcaaagctttattttcatctctcatcttttgtcctccttagcacaatgtaaaaaagaatagtaatatcagaacaggaaggaggaatggcttgctggggagcccatccaggacactgggagcacatagagattcacccatgtttgttgaacttagagtcattctcatgcttttctttataattcacacatatatgcagagaagatatgttcttgttaacattgtatacaacatagccccaaatatagtaagatctatactagataatcctagatgaaatgttagagatgctatatgatacaactgtggccatgactgaggaaaggagctcacgcccagagactgggctgctctcccggaggccaaacccaagaaggtctggcaaagtcaggctcagggagactctgccctgctgcagacctcggtgtggacacacgctgcatagagctctccttgaaaacagaggggtctcaagacattctgcctacctattagcttttctttatttttttaactttttggggggaaaagtatttttgagaagtttgtcttgcaatgtatttataaatagtaaataaagtttttaccatta

SEQ ID NO: 345931 - DNA, 2546 bp, Homo sapiens
ggcgcgcccgggccgcccagatgcgagcactgcggctgggcgctgaggatcagccgcttcctgcctggattccacagcttcgcgccgtgtactgtcgccccatccctgcgcgcccagcctgccaagcagcgtgccccggttgcaggcgtcatgcagcgggcgcgacccacgctctgggccgctgcgctgactctgctggtgctgctccgcgggccgccggtggcgcgggctggcgcgagctcggggggcttgggtcccgtggtgcgctgcgagccgtgcgacgcgcgtgcactggcccagtgcgcgcctccgcccgccgtgtgcgcggagctggtgcgcgagccgggctgcggctgctgcctgacgtgcgcactgagcgagggccagccgtgcggcatctacaccgagcgctgtggctccggccttcgctgccagccgtcgcccgacgaggcgcgaccgctgcaggcgctgctggacggccgcgggctctgcgtcaacgctagtgccgtcagccgcctgcgcgcctacctgctgccagcgccgccagctccaggaaatgctagtgagtcggaggaagaccgcagcgccggcagtgtggagagcccgtccgtctccagcacgcaccgggtgtctgatcccaagttccaccccctccattcaaagataatcatcatcaagaaagggcatgctaaagacagccagcgctacaaagttgactacgagtctcagagcacagatacccagaacttctcctccgagtccaagcgggagacagaatatggtccctgccgtagagaaatggaagacacactgaatcacctgaagttcctcaatgtgctgagtcccaggggtgtacacattcccaactgtgacaagaagggattttataagaaaaagcagtgtcgcccttccaaaggcaggaagcggggcttctgctggtgtgtggataagtatgggcagcctctcccaggctacaccaccaaggggaaggaggacgtgcactgctacagcatgcagagcaagtagacgcctgccgcaaggttaatgtggagctcaaatatgccttattttgcacaaaagactgccaaggacatgaccagcagctggctacagcctcgatttatatttctgtttgtggtgaactgattttttttaaaccaaagtttagaaagaggtttttgaaatgcctatggtttctttgaatggtaaacttgagcatcttttcactttccagtagtcagcaaagagcagtttgaattttcttgtcgcttcctatcaaaatattcagagactcgagcacagcacccagacttcatgcgcccgtggaatgctcaccacatgttggtcgaagcggccgaccactgactttgtgacttaggcggctgtgttgcctatgtagagaacacgcttcacccccactccccgtacagtgcgcacaggctttatcgagaataggaaaacctttaaaccccggtcatccggacatcccaacgcatgctcctggagctcacagccttctgtggtgtcatttctgaaacaagggcgtggatccctcaaccaagaagaatgtttatgtcttcaagtgacctgtactgcttggggactattggagaaaataaggtggagtcctacttgtttaaaaaatatgtatctaagaatgttctagggcactctgggaacctataaaggcaggtatttcgggccctcctcttcaggaatcttcctgaagacatggcccagtcgaaggcccaggatggcttttgctgcggccccgtggggtaggagggacagagagacagggagagtcagcctccacattcagaggcatcacaagtaatggcacaattcttcggatgactgcagaaaatagtgttttgtagttcaacaactcaagacgaagcttatttctgaggataagctctttaaaggcaaagctttattttcatctctcatcttttgtcctccttagcacaatgtaaaaaagaatagtaatatcagaacaggaaggaggaatggcttgctggggagcccatccaggacactgggagcacatagagattcacccatgtttgttgaacttagagtcattctcatgcttttctttataattcacacatatatgcagagaagatatgttcttgttaacattgtatacaacatagccccaaatatagtaagatctatactagataatcctagatgaaatgttagagatgctatatgatacaactgtggccatgactgaggaaaggagctcacgcccagagactgggctgctctcccggaggccaaacccaagaaggtctggcaaagtcaggctcagggagactctgccctgctgcagacctcggtgtggacacacgctgcatagagctctccttgaaaacagaggggtctcaagacattctgcctacctattagcttttctttatttttttaactttttggggggaaaagtatttttgagaagtttgtcttgcaatgctcgtgccgaattcggcacgagccatcacaagaaatgggacagcttgggtctgtaacaaagc

SEQ ID NO: 345932 - DNA, 1542 bp, Homo sapiens
tatgctgttctagaggatctcgaggagatagcaggatgcagagcaagtagacgcctgccgcaaggttaatgtggagctcaaatatgccttattttgcacaaaagactgccaaggacatgaccagcagctggctacagcctcgatttatatttctgtttgtggtgaactgattttttttaaaccaaagtttagaaagaggtttttgaaatgcctatggtttctttgaatggtaaacttgagcatcttttcactttccagtagtcagcaaagagcagtttgaattttcttgtcgcttcctatcaaaatattcagagactcgagcacagcacccagacttcatgcgcccgtggaatgctcaccacatgttggtcgaagcggccgaccactgactttgtgacttaggcggctgtgttgcctatgtagagaacacgcttcacccccactccccgtacagtgcgcacaggctttatcgagaataggaaaacctttaaaccccggtcatccggacatcccaacgcatgctcctggagctcacagccttctgtggtgtcatttctgaaacaagggcgtggatccctcaaccaagaagaatgtttatgtcttcaagtgacctgtactgcttggggactattggagaaaataaggtggagtcctacttgtttaaaaaatatgtatctaagaatgttctagggcactctgggaacctataaaggcaggtatttcgggccctcctcttcaggaatcttcctgaagacatggcccagtcgaaggcccaggatggcttttgctgcggccccgtggggtaggagggacagagagacagggagagtcagcctccacattcagaggcatcacaagtaatggcacaattcttcggatgactgcagaaaatagtgttttgtagttcaacaactcaagacgaagcttatttctgaggataagctctttaaaggcaaagctttattttcatctctcatcttttgtcctccttagcacaatgtaaaaaagaatagtaatatcagaacaggaaggaggaatggcttgctggggagcccatccaggacactgggagcacatagagattcacccatgtttgttgaacttagagtcattctcatgcttttctttataattcacacatatatgcagagaagatatgttcttgttaacattgtatacaacatagccccaaatatagtaagatctatactagataatcctagatgaaatgttagagatgctatatgatacaactgtggccatgactgaggaaaggagctcacgcccagagactgggctgctctcccggaggccaaacccaagaaggtctggcaaagtcaggctcagggagactctgccctgctgcagacctcggtgtggacacacgctgcatagagctctccttgaaaacagaggggtctcaagacattctgcctacctattagcttttctttatttttttaactttttggggggaaaagtatttttgagaagtttgtcttgcaatgtatttataaatagtaaataaagtttttaccatta

SEQ ID NO: 345933 - DNA, 1571 bp, Homo sapiens
agcataaactattacagcataaactattacagcataaactattacagcataaactattacagcataaactattacagcataaactattacagcataaactattacagcataaactagtacagcataaactattacagcataaactatgaccagcagctggctacagcctcgatttatatttctgtttgtggtgaactgattttttttaaaccaaagtttagaaagaggtttttgaaatgcctatggtttctttgaatggtaaacttgagcatcttttcactttccagtagtcagcaaagagcagtttgaattttcttgtcgcttcctatcaaaatattcagagactcgagcacagcacccagacttcatgcgcccgtggaatgctcaccacatgttggtcgaagcggccgaccactgactttgtgacttaggcggctgtgttgcctatgtagagaacacgcttcacccccactccccgtacagtgcgcacaggctttatcgagaataggaaaacctttaaaccccggtcatccggacatcccaacgcatgctcctggagctcacagccttctgtggtgtcatttctgaaacaagggcgtggatccctcaaccaagaagaatgtttatgtcttcaagtgacctgtactgcttggggactattggagaaaataaggtggagtcctacttgtttaaaaaatatgtatctaagaatgttctagggcactctgggaacctataaaggcaggtatttcgggccctcctcttcaggaatcttcctgaagacatggcccagtcgaaggcccaggatggcttttgctgcggccccgtggggtaggagggacagagagacagggagagtcagcctccacattcagaggcatcacaagtaatggcacaattcttcggatgactgcagaaaatagtgttttgtagttcaacaactcaagacgaagcttatttctgaggataagctctttaaaggcaaagctttattttcatctctcatcttttgtcctccttagcacaatgtaaaaaagaatagtaatatcagaacaggaaggaggaatggcttgctggggagcccatccaggacactgggagcacatagagattcacccatgtttgttgaacttagagtcattctcatgcttttctttataattcacacatatatgcagagaagatatgttcttgttaacattgtatacaacatagccccaaatatagtaagatctatactagataatcctagatgaaatgttagagatgctatatgatacaactgtggccatgactgaggaaaggagctcacgcccagagactgggctgctctcccggaggccaaacccaagaaggtctggcaaagtcaggctcagggagactctgccctgctgcagacctcggtgtggacacacgctgcatagagctctccttgaaaacagaggggtctcaagacattctgcctacctattagcttttctttatttttttaactttttggggggaaaagtatttttgagaagtttgtcttgcaatgtatttataaatagtaaataaagtttttaccatta

SEQ ID NO: 345934 - DNA, 1240 bp, Homo sapiens
cccactccccgtacagtgcgcacagggagtgggggtgaagcgtgttctctacataggcaacacagccgcctaagtcacaaagtcagtggtcggccgcttcgaccaacatgtggtgagcattccacgggcgcatgaagtctagggtgctgcagtgcgcacaggctttatcgagaataggaaaacctttaaaccccggtcatccggacatcccaacgcatgctcctggagctcacagccttctgtggtgtcatttctgaaacaagggcgtggatccctcaaccaagaagaatgtttatgtcttcaagtgacctgtactgcttggggactattggagaaaataaggtggagtcctacttgtttaaaaaatatgtatctaagaatgttctagggcactctgggaacctataaaggcaggtatttcgggccctcctcttcaggaatcttcctgaagacatggcccagtcgaaggcccaggatggcttttgctgcggccccgtggggtaggagggacagagagacagggagagtcagcctccacattcagaggcatcacaagtaatggcacaattcttcggatgactgcagaaaatagtgttttgtagttcaacaactcaagacgaagcttatttctgaggataagctctttaaaggcaaagctttattttcatctctcatcttttgtcctccttagcacaatgtaaaaaagaatagtaatatcagaacaggaaggaggaatggcttgctggggagcccatccaggacactgggagcacatagagattcacccatgtttgttgaacttagagtcattctcatgcttttctttataattcacacatatatgcagagaagatatgttcttgttaacattgtatacaacatagccccaaatatagtaagatctatactagataatcctagatgaaatgttagagatgctatatgatacaactgtggccatgactgaggaaaggagctcacgcccagagactgggctgctctcccggaggccaaacccaagaaggtctggcaaagtcaggctcagggagactctgccctgctgcagacctcggtgtggacacacgctgcatagagctctccttgaaaacagaggggtctcaagacattctgcctacctattagcttttctttatttttttaactttttggggggaaaagtatttttgagaagtttgtcttgcaatgtatttataaatagtaaataaagtttttaccatta

SEQ ID NO: 345935 - DNA, 1454 bp, Homo sapiens
cgcaggccagttagttcggaggggcacagaggctccatgcctcatgattgaacatgcgacctcccagcatctcctgtgtcagcaaccctgaaagctctgcaaacccctttcagggtgtttatggaggctttattatgcaagcatgattgataaaacctttggctgttggtgattaagtcagtctccagcccctcttccccctggagttcagtgcatgaggctgaaagttccaagcctcttaccatgtggttgcatggtaatcagccctcctcttgaagaaatttaggagcttgcagtcacccagtcatctcaacaacatccccaaatgcattcttaccatgctggagatcccaaagttcttagaggctcttgtgttagaaacctgcgaacctatgacataggttcgcaggccatccggacatcccaacgcatgctcctggagctcacagccttctgtggtgtcatttctgaaacaagggcgtggatccctcaaccaagaagaatgtttatgtcttcaagtgacctgtactgcttggggactattggagaaaataaggtggagtcctacttgtttaaaaaatatgtatctaagaatgttctagggcactctgggaacctataaaggcaggtatttcgggccctcctcttcaggaatcttcctgaagacatggcccagtcgaaggcccaggatggcttttgctgcggccccgtggggtaggagggacagagagacagggagagtcagcctccacattcagaggcatcacaagtaatggcacaattcttcggatgactgcagaaaatagtgttttgtagttcaacaactcaagacgaagcttatttctgaggataagctctttaaaggcaaagctttattttcatctctcatcttttgtcctccttagcacaatgtaaaaaagaatagtaatatcagaacaggaaggaggaatggcttgctggggagcccatccaggacactgggagcacatagagattcacccatgtttgttgaacttagagtcattctcatgcttttctttataattcacacatatatgcagagaagatatgttcttgttaacattgtatacaacatagccccaaatatagtaagatctatactagataatcctagatgaaatgttagagatgctatatgatacaactgtggccatgactgaggaaaggagctcacgcccagagactgggctgctctcccggaggccaaacccaagaaggtctggcaaagtcaggctcagggagactctgccctgctgcagacctcggtgtggacacacgctgcatagagctctccttgaaaacagaggggtctcaagacattctgcctacctattagcttttctttatttttttaactttttggggggaaaagtatttttgagaagtttgtcttgcaatgtatttataaatagtaaataaagtttttaccatta

SEQ ID NO: 345936 - DNA, 992 bp, Homo sapiens
ggtgctgggtcgatctagaggttccccgacgctctctctgtggggtaggaggacagagagacagagagagcgtcggactattggagaaaataaggtggagtcctacttgtttaaaaaatatgtatctaagaatgttctagggcactctgggaacctataaaggcaggtatttcgggccctcctcttcaggaatcttcctgaagacatggcccagtcgaaggcccaggatggcttttgctgcggccccgtggggtaggagggacagagagacagggagagtcagcctccacattcagaggcatcacaagtaatggcacaattcttcggatgactgcagaaaatagtgttttgtagttcaacaactcaagacgaagcttatttctgaggataagctctttaaaggcaaagctttattttcatctctcatcttttgtcctccttagcacaatgtaaaaaagaatagtaatatcagaacaggaaggaggaatggcttgctggggagcccatccaggacactgggagcacatagagattcacccatgtttgttgaacttagagtcattctcatgcttttctttataattcacacatatatgcagagaagatatgttcttgttaacattgtatacaacatagccccaaatatagtaagatctatactagataatcctagatgaaatgttagagatgctatatgatacaactgtggccatgactgaggaaaggagctcacgcccagagactgggctgctctcccggaggccaaacccaagaaggtctggcaaagtcaggctcagggagactctgccctgctgcagacctcggtgtggacacacgctgcatagagctctccttgaaaacagaggggtctcaagacattctgcctacctattagcttttctttatttttttaactttttggggggaaaagtatttttgagaagtttgtcttgcaatgtatttataaatagtaaataaagtttttaccatta

SEQ ID NO: 345937 - DNA, 980 bp, Homo sapiens
  misc_feature (913)..(913): n is a, c, g, or t
  misc_feature (915)..(915): n is a, c, g, or t
ggcgcgcccgggccgcccagatgcgagcactgcggctgggcgctgaggatcagccgcttcctgcctggattccacagcttcgcgccgtgtactgtcgccccatccctgcgcgcccagcctgccaagcagcgtgccccggttgcaggcgtcatgcagcgggcgcgacccacgctctgggccgctgcgctgactctgctggtgctgctccgcgggccgccggtggcgcgggctggcgcgagctcggggggcttgggtcccgtggtgcgctgcgagccgtgcgacgcgcgtgcactggcccagtgcgcgcctccgcccgccgtgtgcgcggagctggtgcgcgagccgggctgcggctgctgcctgacgtgcgcactgagcgagggccagccgtgcggcatctacaccgagcgctgtggctccggccttcgctgccagccgtcgcccgacgaggcgcgaccgctgcaggcgctgctggacggccgcgggctctgcgtcaacgctagtgccgtcagccgcctgcgcgcctacctgctgccagcgccgccagctccaggaaatgctagtgagtcggaggaagaccgcagcgccggcagtgtggagagcccgtccgtctccagcacgcaccgggtgtctgatcccaagttccaccccctccattcaaagataatcatcatcaagaaagggcatgctaaagacagccagcgctacaaagttgactacgagtctcagagcacagatacccagaacttctcctccgagtccaagcgggagacagaatatggtccctgccgtagagaaatggaagacacactgaatcacctgaagttcctcaatgtgctgagtcccaggggtgtacacattcccaactgtgacaagaaggttttagaaagcaggtgccttcaaagcagaaggntngcggggtgaatggggcgctccgaccacattttcagtgtggttagaaaaaaccgggatggaaaata

SEQ ID NO: 345938 - DNA, 308 bp, Homo sapiens
accgcagcgccggcagtgtggagagcccgtccgtctccagcacgcaccgggtgtctgatcccaagttccaccccctccattcaaagataatcatcatcaagaaagggcatgctaaagacagccagcgctacaaagttgactacgagtctcagagcacagatacccagaacttctcctccgagtccaagcgggagacagaatatgtgagagcttttcctcttgttaaaggaggagggcaagacctgccaagcctgggtactcagagcctcttgagggcaattcttactcaacaaaccccagcgcctggc

SEQ ID NO: 345939 - DNA, 2641 bp, Homo sapiens
ggcgcgcccgggccgcccagatgcgagcactgcggctgggcgctgaggatcagccgcttcctgcctggattccacagcttcgcgccgtgtactgtcgccccatccctgcgcgcccagcctgccaagcagcgtgccccggttgcaggcgtcatgcagcgggcgcgacccacgctctgggccgctgcgctgactctgctggtgctgctccgcgggccgccggtggcgcgggctggcgcgagctcggggggcttgggtcccgtggtgcgctgcgagccgtgcgacgcgcgtgcactggcccagtgcgcgcctccgcccgccgtgtgcgcggagctggtgcgcgagccgggctgcggctgctgcctgacgtgcgcactgagcgagggccagccgtgcggcatctacaccgagcgctgtggctccggccttcgctgccagccgtcgcccgacgaggcgcgaccgctgcaggcgctgctggacggccgcgggctctgcgtcaacgctagtgccgtcagccgcctgcgcgcctacctgctgccagcgccgccagctccaggaaatgctagtgagtcggaggaagaccgcagcgccggcagtgtggagagcccgtccgtctccagcacgcaccgggtgtctgatcccaagttccaccccctccattcaaagataatcatcatcaagaaagggcatgctaaagacagccagcgctacaaagttgactacgagtctcagagcacagatacccagaacttctcctccgagtccaagcgggagacagaatatggtccctgccgtagagaaatggaagacacactgaatcacctgaagttcctcaatgtgctgagtcccaggggtgtacacattcccaactgtgacaagaagggattttataagaaaaagcagtgtcgcccttccaaaggcaggaagcggggcttctgctggtgtgtggataagtatgggcagcctctcccaggctacaccaccaaggggaaggaggacgtgcactgctacagcatgcagagcaagtagacgcctgccgcaaggttaatgtggagctcaaatatgccttattttgcacaaaagactgccaaggacatgaccagcagctggctacagcctcgatttatatttctgtttgtggtgaactgattttttttaaaccaaagtttagaaagaggtttttgaaatgcctatggtttctttgaatggtaaacttgagcatcttttcactttccagtagtcagcaaagagcagtttgaattttcttgtcgcttcctatcaaaatattcagagactcgagcacagcacccagacttcatgcgcccgtggaatgctcaccacatgttggtcgaagcggccgaccactgactttgtgacttaggcggctgtgttgcctatgtagagaacacgcttcacccccactccccgtacagtgcgcacaggctttatcgagaataggaaaacctttaaaccccggtcatccggacatcccaacgcatgctcctggagctcacagccttctgtggtgtcatttctgaaacaagggcgtggatccctcaaccaagaagaatgtttatgtcttcaagtgacctgtactgcttggggactattggagaaaataaggtggagtcctacttgtttaaaaaatatgtatctaagaatgttctagggcactctgggaacctataaaggcaggtatttcgggccctcctcttcaggaatcttcctgaagacatggcccagtcgaaggcccaggatggcttttgctgcggccccgtggggtaggagggacagagagacagggagagtcagcctccacattcagaggcatcacaagtaatggcacaattcttcggatgactgcagaaaatagtgttttgtagttcaacaactcaagacgaagcttatttctgaggataagctctttaaaggcaaagctttattttcatctctcatcttttgtcctccttagcacaatgtaaaaaagaatagtaatatcagaacaggaaggaggaatggcttgctggggagcccatccaggacactgggagcacatagagattcacccatgtttgttgaacttagagtcattctcatgcttttctttataattcacacatatatgcagagaagatatgttcttgttaacattgtatacaacatagccccaaatatagtaagatctatactagataatcctagatgaaatgttagagatgctatatgatacaactgtggccatgactgaggaaaggagctcacgcccagagactgggctgctctcccggaggccaaacccaagaaggtctggcaaagtcaggctcagggagactctgccctgctgcagacctcggtgtggacacacgctgcatagagctctccttgaaaacagaggggtctcaagacattctgcctacctattagcttttctttatttttttaactttttggggggaaaagtatttttgagaagtttgtcttgcaatgtatttataaatagtaaataaagtttttaccattaaaaaaatatctttccctttgttattgaccatctctgggctttgtatcactaattattttattttattatataataattattttattataataaaatcctgaaaggggaaaataaaaaaaagta

SEQ ID NO: 345940 - DNA, 2317 bp, Homo sapiens
ggcgcgcccgggccgcccagatgcgagcactgcggctgggcgctgaggatcagccgcttcctgcctggattccacagcttcgcgccgtgtactgtcgccccatccctgcgcgcccagcctgccaagcagcgtgccccggttgcaggcgtcatgcagcgggcgcgacccacgctctgggccgctgcgctgactctgctggtgctgctccgcgggccgccggtggcgcgggctggcgcgagctcggggggcttgggtcccgtggtgcgctgcgagccgtgcgacgcgcgtgcactggcccagtgcgcgcctccgcccgccgtgtgcgcggagctggtgcgcgagccgggctgcggctgctgcctgacgtgcgcactgagcgagggccagccgtgcggcatctacaccgagcgctgtggctccggccttcgctgccagccgtcgcccgacgaggcgcgaccgctgcaggcgctgctggacggccgcgggctctgcgtcaacgctagtgccgtcagccgcctgcgcgcctacctgctgccagcgccgccagctccaggaaatgctagtgagtcggaggaagaccgcagcgccggcagtgtggagagcccgtccgtctccagcacgcaccgggtgtctgatcccaagttccaccccctccattcaaagataatcatcatcaagaaagggcatgctaaagacagccagcgctacaaagttgactacgagtctcagagcacagatacccagaacttctcctccgagtccaagcgggagacagaatatggtccctgccgtagagaaatggaagacacactgaatcacctgaagttcctcaatgtgctgagtcccaggggtgtacacattcccaactgtgacaagaagggattttataagaaaaagcagtgtcgcccttccaaaggcaggaagcggggcttctgctggtgtgtggataagtatgggcagcctctcccaggctacaccaccaaggggaaggaggacgtgcactgctacagcatgcagagcaagtagacgcctgccgcaaggaaagagcagtttgaattttcttgtcgcttcctatcaaaatattcagagactcgagcacagcacccagacttcatgcgcccgtggaatgctcaccacatgttggtcgaagcggccgaccactgactttgtgacttaggcggctgtgttgcctatgtagagaacacgcttcacccccactccccgtacagtgcgcacaggctttatcgagaataggaaaacctttaaaccccggtcatccggacatcccaacgcatgctcctggagctcacagccttctgtggtgtcatttctgaaacaagggcgtggatccctcaaccaagaagaatgtttatgtcttcaagtgacctgtactgcttggggactattggagaaaataaggtggagtcctacttgtttaaaaaatatgtatctaagaatgttctagggcactctgggaacctataaaggcaggtatttcgggccctcctcttcaggaatcttcctgaagacatggcccagtcgaaggcccaggatggcttttgctgcggccccgtggggtaggagggacagagagacagggagagtcagcctccacattcagaggcatcacaagtaatggcacaattcttcggatgactgcagaaaatagtgttttgtagttcaacaactcaagacgaagcttatttctgaggataagctctttaaaggcaaagctttattttcatctctcatcttttgtcctccttagcacaatgtaaaaaagaatagtaatatcagaacaggaaggaggaatggcttgctggggagcccatccaggacactgggagcacatagagattcacccatgtttgttgaacttagagtcattctcatgcttttctttataattcacacatatatgcagagaagatatgttcttgttaacattgtatacaacatagccccaaatatagtaagatctatactagataatcctagatgaaatgttagagatgctatatgatacaactgtggccatgactgaggaaaggagctcacgcccagagactgggctgctctcccggaggccaaacccaagaaggtctggcaaagtcaggctcagggagactctgccctgctgcagacctcggtgtggacacacgctgcatagagctctccttgaaaacagaggggtctcaagacattctgcctacctattagcttttctttatttttttaactttttggggggaaaagtatttttgagaagtttgtcttgcaatgtatttataaatagtaaataaagtttttaccatta

SEQ ID NO: 345941 - DNA, 2398 bp, Homo sapiens
ggcgcgcccgggccgcccagatgcgagcactgcggctgggcgctgaggatcagccgcttcctgcctggattccacagcttcgcgccgtgtactgtcgccccatccctgcgcgcccagcctgccaagcagcgtgccccggttgcaggcgtcatgcagcgggcgcgacccacgctctgggccgctgcgctgactctgctggtgctgctccgcgggccgccggtggcgcgggctggcgcgagctcggggggcttgggtcccgtggtgcgctgcgagccgtgcgacgcgcgtgcactggcccagtgcgcgcctccgcccgccgtgtgcgcggagctggtgcgcgagccgggctgcggctgctgcctgacgtgcgcactgagcgagggccagccgtgcggcatctacaccgagcgctgtggctccggccttcgctgccagccgtcgcccgacgaggcgcgaccgctgcaggcgctgctggacggccgcgggctctgcgtcaacgctagtgccgtcagccgcctgcgcgcctacctgctgccagcgccgccagctccaggaaatgctagtgagtcggaggaagaccgcagcgccggcagtgtggagagcccgtccgtctccagcacgcaccgggtgtctgatcccaagttccaccccctccattcaaagataatcatcatcaagaaagggcatgctaaagacagccagcgctacaaagttgactacgagtctcagagcacagatacccagaacttctcctccgagtccaagcgggagacagaatattgtcgcccttccaaaggcaggaagcggggcttctgctggtgtgtggataagtatgggcagcctctcccaggctacaccaccaaggggaaggaggacgtgcactgctacagcatgcagagcaagtagacgcctgccgcaaggttaatgtggagctcaaatatgccttattttgcacaaaagactgccaaggacatgaccagcagctggctacagcctcgatttatatttctgtttgtggtgaactgattttttttaaaccaaagtttagaaagaggtttttgaaatgcctatggtttctttgaatggtaaacttgagcatcttttcactttccagtagtcagcaaagagcagtttgaattttcttgtcgcttcctatcaaaatattcagagactcgagcacagcacccagacttcatgcgcccgtggaatgctcaccacatgttggtcgaagcggccgaccactgactttgtgacttaggcggctgtgttgcctatgtagagaacacgcttcacccccactccccgtacagtgcgcacaggctttatcgagaataggaaaacctttaaaccccggtcatccggacatcccaacgcatgctcctggagctcacagccttctgtggtgtcatttctgaaacaagggcgtggatccctcaaccaagaagaatgtttatgtcttcaagtgacctgtactgcttggggactattggagaaaataaggtggagtcctacttgtttaaaaaatatgtatctaagaatgttctagggcactctgggaacctataaaggcaggtatttcgggccctcctcttcaggaatcttcctgaagacatggcccagtcgaaggcccaggatggcttttgctgcggccccgtggggtaggagggacagagagacagggagagtcagcctccacattcagaggcatcacaagtaatggcacaattcttcggatgactgcagaaaatagtgttttgtagttcaacaactcaagacgaagcttatttctgaggataagctctttaaaggcaaagctttattttcatctctcatcttttgtcctccttagcacaatgtaaaaaagaatagtaatatcagaacaggaaggaggaatggcttgctggggagcccatccaggacactgggagcacatagagattcacccatgtttgttgaacttagagtcattctcatgcttttctttataattcacacatatatgcagagaagatatgttcttgttaacattgtatacaacatagccccaaatatagtaagatctatactagataatcctagatgaaatgttagagatgctatatgatacaactgtggccatgactgaggaaaggagctcacgcccagagactgggctgctctcccggaggccaaacccaagaaggtctggcaaagtcaggctcagggagactctgccctgctgcagacctcggtgtggacacacgctgcatagagctctccttgaaaacagaggggtctcaagacattctgcctacctattagcttttctttatttttttaactttttggggggaaaagtatttttgagaagtttgtcttgcaatgtatttataaatagtaaataaagtttttaccatta

SEQ ID NO: 345942 - DNA, 2438 bp, Homo sapiens
  misc_feature (2437)..(2437): n is a, c, g, or t
ggcgcgcccgggccgcccagatgcgagcactgcggctgggcgctgaggatcagccgcttcctgcctggattccacagcttcgcgccgtgtactgtcgccccatccctgcgcgcccagcctgccaagcagcgtgccccggttgcaggcgtcatgcagcgggcgcgacccacgctctgggccgctgcgctgactctgctggtgctgctccgcgggccgccggtggcgcgggctggcgcgagctcggggggcttgggtcccgtggtgcgctgcgagccgtgcgacgcgcgtgcactggcccagtgcgcgcctccgcccgccgtgtgcgcggagctggtgcgcgagccgggctgcggctgctgcctgacgtgcgcactgagcgagggccagccgtgcggcatctacaccgagcgctgtggctccggccttcgctgccagccgtcgcccgacgaggcgcgaccgctgcaggcgctgctggacggccgcgggctctgcgtcaacgctagtgccgtcagccgcctgcgcgcctacctgctgccagcgccgccagctccaggaaatgctagtgagtcggaggaagaccgcagcgccggcagtgtggagagcccgtccgtctccagcacgcaccgggtgtctgatcccaagttccaccccctccattcaaagataatcatcatcaagaaagggcatgctaaagacagccagcgctacaaagttgactacgagtctcagagcacagatacccagaacttctcctccgagtccaagcgggagacagaatatggtccctgccgtagagaaatggaagacacactgaatcacctgaagttcctcaatgtgctgagtcccaggggtgtacacattcccaactgtgacaagaagggattttataagaaaaagcagtgtcgcccttccaaaggcaggaagcggggcttctgctggtgtgtggataagtatgggcagcctctcccaggctacaccaccaaggggaaggaggacgtgcactgctacagcatgcagagcaagtagacgcctgccgcaaggttaatgtggagctcaaatatgccttattttgcacaaaagactgccaaggacatgaccagcagctggctacagcctcgatttatatttctgtttgtggtgaactgattttttttaaaccaaagtttagaaagaggtttttgaaatgcctatggtttctttgaatggtaaacttgagcatcttttcactttccagtagtcagcaaagagcagtttgaattttcttgtcgcttcctatcaaaatattcagagactcgagcacagcacccagacttcatgcgcccgtggaatgctcaccacatgttggtcgaagcggccgaccactgactttgtgacttaggcggctgtgttgcctatgtagagaacacgcttcacccccactccccgtacagtgcgcacaggctttatcgagaataggaaaacctttaaaccccggtcatccggacatcccaacgcatgctcctggagctcacagccttctgtggtgtcatttctgaaacaagggcgtggatccctcaaccaagaagaatgtttatgtcttcaagtgacctgtactgcttggggactattggagaaaataaggtggagtcctacttgtttaaaaaatatgtatctaagaatgttctagggcactctgggaacctataaaggcaggtatttcgggccctcctcttcaggaatcttcctgaagacatggcccagtcgaaggcccaggatggcttttgctgcggccccgtggggtaggagggacagagagacagggagagtcagcctccacattcagaggcatcacaagtaatggcacaattcttcggatgactgcagaaaatagtgttttgtagttcaacaactcaagacgaagcttatttctgaggataagctctttaaaggcaaagctttattttcatctctcatcttttgtcctccttagcacaatgtaaaaaagaatagtaatatcagaacaggaaggaggaatggcttgctggggagcccatccaggacactgggagcacatagagattcacccatgtttgttgaacttagagtcattctcatgcttttctttataattcacacatatatgcagagaagatatgttcttgttaacattgtatacaacatagccccaaatatagtaagatctatactagataatcctagatgaaatgttagagatgctatatgatacaactgtggccgatgagaagagtcagccagagatggtgtctcggaggcaacagagttggagtggttaggattgccgtggactgggggaaagtgaagttcttgagggggtcaattgcacaatttatttaatgggaattggaggggggttaggaaagtgctaaaaaaaacaaaaaaggggtgcggccgtttagtagaggaggagaaatttgang

SEQ ID NO: 345943 - DNA, 2464 bp, Homo sapiens
ggcgcgcccgggccgcccagatgcgagcactgcggctgggcgctgaggatcagccgcttcctgcctggattccacagcttcgcgccgtgtactgtcgccccatccctgcgcgcccagcctgccaagcagcgtgccccggttgcaggcgtcatgcagcgggcgcgacccacgctctgggccgctgcgctgactctgctggtgctgctccgcgggccgccggtggcgcgggctggcgcgagctcggggggcttgggtcccgtggtgcgctgcgagccgtgcgacgcgcgtgcactggcccagtgcgcgcctccgcccgccgtgtgcgcggagctggtgcgcgagccgggctgcggctgctgcctgacgtgcgcactgagcgagggccagccgtgcggcatctacaccgagcgctgtggctccggccttcgctgccagccgtcgcccgacgaggcgcgaccgctgcaggcgctgctggacggccgcgggctctgcgtcaacgctagtgccgtcagccgcctgcgcgcctacctgctgccagcgccgccagctccaggaaatgctagtgagtcggaggaagaccgcagcgccggcagtgtggagagcccgtccgtctccagcacgcaccgggtgtctgatcccaagttccaccccctccattcaaagataatcatcatcaagaaagggcatgctaaagacagccagcgctacaaagttgactacgagtctcagagcacagatacccagaacttctcctccgagtccaagcgggagacagaatatggtccctgccgtagagaaatggaagacacactgaatcacctgaagttcctcaatgtgctgagtcccaggggtgtacacattcccaactgtgacaagaagggattttataagaaaaagcagtgtcgcccttccaaaggcaggaagcggggcttctgctggtgtgtggataagtatgggcagcctctcccaggctacaccaccaaggggaaggaggacgtgcactgctacagcatgcagagcaagtagacgcctgccgcaaggttaatgtggagctcaaatatgccttattttgcacaaaagactgccaaggacatgaccagcagctggctacagcctcgatttatatttctgtttgtggtgaactgattttttttaaaccaaagtttagaaagaggtttttgaaatgcctatggtttctttgaatggtaaacttgagcatcttttcactttccagtagtcagcaaagagcagtttgaattttcttgtcgcttcctatcaaaatattcagagactcgagcacagcacccagacttcatgcgcccgtggaatgctcaccacatgttggtcgaagcggccgaccactgactttgtgacttaggcggctgtgttgcctatgtagagaacacgcttcacccccactccccgtacagtgcgcacaggctttatcgagaataggaaaacctttaaaccccggtcatccggacatcccaacgcatgctcctggagctcacagccttctgtggtgtcatttctgaaacaagggcgtggatccctcaaccaagaagaatgtttatgtcttcaagtgacctgtactgcttggggactattggagaaaataaggtggagtcctacttgtttaaaaaatatgtatctaagaatgttctagggcactctgggaacctataaaggcaggtatttcgggccctcctcttcaggaatcttcctgaagacatggcccagtcgaaggcccaggatggcttttgctgcggccccgtggggtaggagggacagagagacagggagagtcagcctccacattcagaggcatcacaagtaatggcacaattcttcggatgactgcagaaaatagtgttttgtagttcaacaactcaagacgaagcttatttctgaggataagctctttaaaggcaaagctttattttcatctctcatcttttgtcctccttagcacaatgtaaccaggacactgggagcacatagagattcacccatgtttgttgaacttagagtcattctcatgcttttctttataattcacacatatatgcagagaagatatgttcttgttaacattgtatacaacatagccccaaatatagtaagatctatactagataatcctagatgaaatgttagagatgctatatgatacaactgtggccatgactgaggaaaggagctcacgcccagagactgggctgctctcccggaggccaaacccaagaaggtctggcaaagtcaggctcagggagactctgccctgctgcagacctcggtgtggacacacgctgcatagagctctccttgaaaacagaggggtctcaagacattctgcctacctattagcttttctttatttttttaactttttggggggaaaagtatttttgagaagtttgtcttgcaatgtatttataaatagtaaataaagtttttaccatta

SEQ ID NO: 345944 - DNA, 1494 bp, Homo sapiens
ggcgcgcccgggccgcccagatgcgagcactgcggctgggcgctgaggatcagccgcttcctgcctggattccacagcttcgcgccgtgtactgtcgccccatccctgcgcgcccagcctgccaagcagcgtgccccggttgcaggcgtcatgcagcgggcgcgacccacgctctgggccgctgcgctgactctgctggtgctgctccgcgggccgccggtggcgcgggctggcgcgagctcggggggcttgggtcccgtggtgcgctgcgagccgtgcgacgcgcgtgcactggcccagtgcgcgcctccgcccgccgtgtgcgcggagctggtgcgcgagccgggctgcggctgctgcctgacgtgcgcactgagcgagggccagccgtgcggcatctacaccgagcgctgtggctccggccttcgctgccagccgtcgcccgacgaggcgcgaccgctgcaggcgctgctggacggccgcgggctctgcgtcaacgctagtgccgtcagccgcctgcgcgcctacctgctgccagcgccgccagctccaggaaatgctagtgagtcggaggaagaccgcagcgccggcagtgtggagagcccgtccgtctccagcacgcaccgggtgtctgatcccaagttccaccccctccattcaaagataatcatcatcaagaaagggcatgctaaagacagccagcgctacaaagttgactacgagtctcagagcacagatacccagaacttctcctccgagtccaagcgggagacagaatatggtccctgccgtagagaaatggaagacacactgaatcacctgaagttcctcaatgtgctgagtcccaggggtgtacacattcccaactgtgacaagaagggattttataagaaaaagcagtgtcgcccttccaaaggcaggaagcggggcttctgctggtgtgtggataagtatgggcagcctctcccaggctacaccaccaaggggaaggaggacgtgcactgctacagcatgcagagcaagtagacgcctgccgcaaggttaatgtggagctcaaatatgccttattttgcacaaaagactgccaaggacatgaccagcagctggctacagcctcgatttatatttctgtttgtggtgaactgattttttttaaaccaaagtttagaaagaggtttttgaaatgcctatggtttctttgaatggtaaacttgagcatcttttcactttccagtagtcagcaaagagcagtttgaattttcttgtcgcttcctatcaaaatattcagagactcgagcacagcacccagacttcatgcgcccgtggaatgctcaccacatgttggtcgaagcggccgaccactgactttgtgacttaggcggctgtgttgcctatgtagagaacacgcttcacccccactccccgtatttagagccccctgtaaagctaacttagcattacccttttaagttaaagattaagagaaccacccca

SEQ ID NO: 345945 - DNA, 738 bp, Homo sapiens
  misc_feature (28)..(28): n is a, c, g, or t
aaggctaggtacgaggctggtgttcatnggccgagggtgcctggattccacagcttcgcgccgtgtactgtcgccccatccctgcgcgcccagcctgccaagcagcgtgccccggttgcaggcgtcatgcagcgggcgcgacccacgctctgggccgctgcgctgactctgctggtgctgctccgcgggccgccggtggcgcgggctggcgcgagctctgtgggtggcttgtgtgtccctgtgtgtgctgcttgctgatgcctgtgctgactgctgctagtgcacttgtgcccatgttgctgctgcacatcctgccctagactgattgttgctgctgtgatgcttgtgttgctgctgatgcctggtgcttgctgtgcttgcttgccatgactgttgctgcaacttgatgctgatgtgtgtccatgcctggtgctgtgcattcttagcacctgatgctgcttgttgtgctcctgtgcccttctgcttgccatgcctgtctgccctgactgatggctgctgacctgcttgcatgtgctgtcttgcttgtgactgtgcctgctgtgtgctccttgcctgtcaagcggctatgttgccctgtcagcctgccttgctgctggcctaccttgcttgccatgctgccatgccagcttccatgtgaaactgcttaggtgaggtctggagtgaatgacctgcatgctgcctggcatgtgttgtgagagccctgtcctgtcttccatg

SEQ ID NO: 345946 - DNA, 474 bp, Homo sapiens
aaccacccaggctgaataggtcttttttgtgaaaccttcgttagtgcaaatggtacagtaggtaaaaatggaacttcatacccaggtcttgttttaaatatgattgccatatgtacttgtgagtcatacgttatgtttctaggcagtcctgccagcaacaatgccagattaaggaaggtctccaacctgaggcattaactagagaaaataatttcttccttcagttctgtcctcacagagtactatattttgaaaataaaaacaacccatatgcccatgtggatcacacagcagtgtgcattgctacaaaagcaaatgttcccaaaaacttatagaccatatttgaaggcagtcttcctgatctcctgatggttgctctaaataatataattggaccatcactaatgccatttgatttaagcaaaactaatccttgaaatccaaaaagatttctgaagttccctttttagagac

SEQ ID NO: 345947 - DNA, 224 bp, Homo sapiens
tttaataaaaaaaaaaaaaaaatttaagaagagttgcaaagagcataaagaattcccctctactcctcattaaatttccactattgttaacattaccaagaagttgacattggtgcattgttattaactatattcattgaaattttagcaatttaccaatggtcagatgttacatttgcaaaacagatttaaaattaagaagagagaaaagaaaaggggttggc

SEQ ID NO: 345948 - DNA, 424 bp, Homo sapiens
cttttttaggttcccatgcagctgtgtccatctggggtctggtcacctctgggaggctcctgtcagagacctacaatatggagaagggaggagccctgtttcctggaggaggaagggcccccaggcctgtccctctcagcctggctgctgtgagaatcccccagagacttaaaaaaataacctgtctgggccccaccgtaggccaaatgaaattggaatctctggggatagagcctggtaataggtatgtatttcaactttctagattattttaaatgcagccaggattcacatcaagtgtcctaggacaaaggcctcctgggagaaaacacatgtccttcttctcctcccaaaggcagccagaaaggataaagaaatgagcaaacaaggcactaatttcttcatttctcaatgtctaagcctg

SEQ ID NO: 345949 - DNA, 1198 bp, Homo sapiens
caatgcaccgctcacggcgtcggttgcccgggcaatgggccgcacgctacgaggcccacacacccagaaggtggagccccggccgggttacgaggaccacccagctgtctggagagatgaagaaaatgaggttcaaagagatgaagtctcttgcctaaagtcagtgacagaaagtgacagagctgggatgtgaatcctggtctgactctacagtcccacatggtagatggaacctccgagcaacacctaaacaaagggagttgatgcctccgaacagagtaatgtcgctggagacactaagcatcgtcggcccctggcaggagctccctaaatatgtgttggatggatggaagaaaggatggatagttcagagtacttcagccttgattcctccgcaacagacacctgaaacttgaccctacattggttcttggccatcgtgatcttccttggacagaatcacctttcagctccggtcatcagactttcccagggccctcagaaagcccttcagagttgttactcacaggcaggctgagggattccttacggggtctgcagctctcctcacctcatccacaagtaggaccgtggcctgttcctcactactgccccaggatcactctgttcccagcccagtccagcaatcacttgtctagctttctggaaccttgagtactttcttgaaccatgagtcctgtgaccaccctagcagctctaaccctcccttatctgaaaggaagtgtgaggtgaccttgcaggtcccagagttgattgaagaccccatccagaaagaaggcaccctgtgggagagattgcaaggcctaggtctgaatccggaagcttccaccccatggagaagggctggcagtggagctgagctttggagccaaggactgtactgcagtgcagggagagtgaggccagaaaggctgagacaactcagggaaagaaaacctcccttctggctaatagtcaagcaccgcctgagtagaccaacactctcctgtccacaggggcagcagatgaagacacaaccagagaggactaacaggccccctcagctctcagtcagagggcagagcaacacagaatagacattaaaggaacagactttgaggccaggcagccttgggtgtgcatctgtccctactaagccatgtgacattaaacaagtgagtccacctcaaaaaactca

SEQ ID NO: 345950 - DNA, 824 bp, Homo sapiens
catagcaaaagcacacaagcttgtgggaaaataatttggcaataagcagcgagaaccatacaaataccatgttctctagctcaagactctgattgctgggaatttaccctgatgaaataacccgaaagaaggggaaaaccactcagggcaagggtgtggctctggagttacgtgctttgccttgacggcactagaaagcaaagttccgaggactgtgttgcaacttggaagcccgcgcaagcagctggaaggggtgctgtgattacagccgcgtgaaggcatgcgcgctggggcctggccagcggggtgcctggagaggtacctggtccatccctccaggccccttagagagaggactcagagaagagactgagggagatgggatgtgccagggtttcctgctaggagcctcatctttctaccccttctctgttcccgagaacacagtggtcatcccctctggaagatgaagtaacagggcaccatcttggaagcaaagagagcagccctcgccagactccaagtctgctggagccttaatcttggacttcccaacctctagagttgtgagaaaataaatttctatttataatttacccagtccatggagttgtgttacagcagcacaagtggactaagacgctgtcaacacttaatttctgttgttatgccatcgtagtggttgtaaactgatatcacgttgtgattttgatttgcatttccctgatgattagtgatgttgagcatctatctgttcatgtgcttgttggccctttgtgtatcttctttgaataaatgtctattcaagttctttgtccattttt

SEQ ID NO: 345951 - DNA, 566 bp, Homo sapiens
  misc_feature (45)..(45): n is a, c, g, or t
ggttggattaattgtaattttaatgtcacataatgatcctatggnaaagggccttagagtgcctcggtacctaccctcttagccccttagagagaggactcagagaagagactgagggagatgggatgtgccagggtttcctgctaggagcctcatctttctaccccttctctgttcccgagaacacagtggtcatcccctctggaagatgaagtaacagggcaccatcttggaagcaaagagagcagccctcgccagactccaagtctgctggagccttaatcttggacttcccaacctctagagttgtgagaaaataaatttctatttataatttacccagtccatggagttgtgttacagcagcacaagtggactaagacgctgtcaacacttaatttctgttgttatgccatcgtagtggttgtaaactgatatcacgttgtgattttgatttgcatttccctgatgattagtgatgttgagcatctatctgttcatgtgcttgttggccctttgtgtatcttctttgaataaatgtctattcaagttctttgtccattttt

SEQ ID NO: 345952 - DNA, 618 bp, Homo sapiens
ctttcctgtgtttacacccacctgcagcgtggataaagagtttctggccgggcgaggtggctcacgtctgtaatcccagcactttgggaggctgaggcgggcggatcacgaggtacctggtccatccctccaggccccttagagagaggactcagagaagagactgagggagatgggatgtgccagggtttcctgctaggagcctcatctttctaccccttctctgttcccgagaacacagtggtcatcccctctggaagatgaagtaacagggcaccatcttggaagcaaagagagcagccctcgccagactccaagtctgctggagccttaatcttggacttcccaacctctagagttgtgagaaaataaatttctatttataatttacccagtccatggagttgtgttacagcagcacaagtggactaagacgctgtcaacacttaatttctgttgttatgccatcgtagtggttgtaaactgatatcacgttgtgattttgatttgcatttccctgatgattagtgatgttgagcatctatctgttcatgtgcttgttggccctttgtgtatcttctttgaataaatgtctattcaagttctttgtccattttt

SEQ ID NO: 345953 - DNA, 558 bp, Homo sapiens
tcaactgcgagatcctctatctagaatatttaatataaaaaaaaacccttgagtacctggtccatccctccaggccccttagagagaggactcagagaagagactgagggagatgggatgtgccagggtttcctgctaggagcctcatctttctaccccttctctgttcccgagaacacagtggtcatcccctctggaagatgaagtaacagggcaccatcttggaagcaaagagagcagccctcgccagactccaagtctgctggagccttaatcttggacttcccaacctctagagttgtgagaaaataaatttctatttataatttacccagtccatggagttgtgttacagcagcacaagtggactaagacgctgtcaacacttaatttctgttgttatgccatcgtagtggttgtaaactgatatcacgttgtgattttgatttgcatttccctgatgattagtgatgttgagcatctatctgttcatgtgcttgttggccctttgtgtatcttctttgaataaatgtctattcaagttctttgtccattttt

SEQ ID NO: 345954 - DNA, 1895 bp, Homo sapiens
  misc_feature (1892)..(1892): n is a, c, g, or t
  misc_feature (1894)..(1895): n is a, c, g, or t
cggatttttatgagatataattacattgacatgacgcctcatgatttacccatgactcggggggtttccaaactccaaacacctccagactggagcccgtcaatcagcttcctcttgcttttcgtggactcccactgtggaaacctgctggtgttttgctgcggtttcatttccctctgcggaggagccagggcaaccttggccagacaggcacctagctgtgcccttctttccagggcctcttctccactcagctgactcccctggcctgcctaacgctcctgactgagacggttttccggcttcctctaacaggttggcgggaagttgatctgcaaacgcgaggcaaagcaggagtgtccttattcggtaggcctctgatgggccaccagagccgtccgaaagtcctagcggagtgattgacagtggccatttcaaagcctgagttcaccttctttgcaaccacaatcacgacccagaataaactgcttcctggaagccggctagttgcacctggcctgaagtcagtctcgggactgcctctcaggaccccagacagggtttcgggttcccgcctgggtcacgtgtacggaggctgccagtgcgcactcagcccggcccgccggtcgccacagcaacaccaatcccgggttcaagcccgcctaggaagtgcggtccccgcctgaccgccccgggcttaagggagcctggctaggccggcagccggatggtcccgcagctcggggccggccatgcttcgcggtccgtggcgccagctttggctctttctcctgctgctgctcccgggcgcgcctgagccccgcggcgcctccaggccgtgggagggaaccgacgagccgggctcggcctgggcctggccgggcttccagcgcctgcaggagcagctcagggcggcgggtgccctctccaagcggtactggacgctcttcagctgccaggtgtggcccgacgactgtgacgaggacgaggaggcagccacggggcccctgggctggcgccttcctctgttgggccagcggtacctggacctcctgaccacgtggtactgcagcttcaaagactgctgccctagaggggattgcagaatctccaacaactttacaggcttagagtgggacctgaatgtgcggctgcatggccagcatttggtccagcagctggtcctaagaacagtgaggggctacttagagacgccccagccagaaaaggcccttgctctgtcgttccacggctggtctggcacaggcaagaacttcgtggcacggatgctggtggagaacctgtatcgggacgggctgatgagtgactgtgtcaggatgttcatcgccacgttccactttcctcaccccaaatatgtggacctgtacaaggagcagctgatgagccagatccgggagacgcagcagctctgccaccagaccctgttcatcttcgatgaagcggagaagctgcacccagggctgctggaggtccttgggccacacttagaacgccgggcccctgagggccacagggctgagtctccatggactatctttctgtttctcagtaatctcaggggcgatataatcaatgaggtggtcctaaagttgctcaaggctggatggtcccgggaagaaattacgatggaacacctggagccccacctccaggcggagattgtggagaccataggtttttcatttctaacaaccagatggccccacctggacctgccaaccagttctgtggcccccacctaggaactgactcagcagaagagaacagcttcgattccccatgcttttactcaccaaattatccttaaaaactctgatccccaagttttctgagactgatttgagtaataataaaactccggtctcccgcanann

SEQ ID NO: 345955 - DNA, 2853 bp, Homo sapiens
cggatttttatgagatataattacattgacatgacgcctcatgatttacccatgactcggggggtttccaaactccaaacacctccagactggagcccgtcaatcagcttcctcttgcttttcgtggactcccactgtggaaacctgctggtgttttgctgcggtttcatttccctctgcggaggagccagggcaaccttggccagacaggcacctagctgtgcccttctttccagggcctcttctccactcagctgactcccctggcctgcctaacgctcctgactgagacggttttccggcttcctctaacaggttggcgggaagttgatctgcaaacgcgaggcaaagcaggagtgtccttattcggtaggcctctgatgggccaccagagccgtccgaaagtcctagcggagtgattgacagtggccatttcaaagcctgagttcaccttctttgcaaccacaatcacgacccagaataaactgcttcctggaagccggctagttgcacctggcctgaagtcagtctcgggactgcctctcaggaccccagacagggtttcgggttcccgcctgggtcacgtgtacggaggctgccagtgcgcactcagcccggcccgccggtcgccacagcaacaccaatcccgggttcaagcccgcctaggaagtgcggtccccgcctgaccgccccgggcttaagggagcctggctaggccggcagccggatggtcccgcagctcggggccggccatgcttcgcggtccgtggcgccagctttggctctttctcctgctgctgctcccgggcgcgcctgagccccgcggcgcctccaggccgtgggagggaaccgacgagccgggctcggcctgggcctggccgggcttccagcgcctgcaggagcagctcagggcggcgggtgccctctccaagcggtactggacgctcttcagctgccaggtgtggcccgacgactgtgacgaggacgaggaggcagccacggggcccctgggctggcgccttcctctgttgggccagcggtacctggacctcctgaccacgtggtactgcagcttcaaagactgctgccctagaggggattgcagaatctccaacaactttacaggcttagagtgggacctgaatgtgcggctgcatggccagcatttggtccagcagctggtcctaagaacagtgaggggctacttagagacgccccagccagaaaaggcccttgctctgtcgttccacggctggtctggcacaggcaagaacttcgtggcacggatgctggtggagaacctgtatcgggacgggctgatgagtgactgtgtcaggatgttcatcgccacgttccactttcctcaccccaaatatgtggacctgtacaaggagcagctgatgagccagatccgggagacgcagcagctctgccaccagaccctgttcatcttcgatgaagcggagaagctgcacccagggctgctggaggtccttgggccacacttagaacgccgggcccctgagggccacagggctgagtctccatggactatctttctgtttctcagcaccttacagaatggagaaggccctggagtccatgcccctaggatggggtgagggagtatcactctgtggggtttcacagcaccctggatcctgccttccagcccctgccaagtaatctcaggggcgatataatcaatgaggtggtcctaaagttgctcaaggctggatggtcccgggaagaaattacgatggaacacctggagccccacctccaggcggagattgtggagaccatagacaatggctttggccacagccgtcttgtgaaggaaaacctgattgactacttcatccccttcctgcctttggagtaccgtcacgtgaggctgtgtgcacgggatgccttcctgagccaggagctcctgtataaagaagagacactggatgaaatagcccagatgatggtgtatgtccccaaggaggaacaactcttttcttcccagggctgcaagtctatttcccagaggattaactacttcctgtcatgaaggctagaggaagacttcctggaactgcctttcttccactaacaggaccctgggacctgtaggagcaccccgtttgggactgtgaggtgtttgagggtgtggactggcatccagcagccactaacaaacacacaactggtgtgtaaaaggcaggccttacattagaagccaagccaatcctttttcttttttttggaggtcccaccgagatagataggaacttggattgctgaattcaaaaacagagcccattcttaagatcacttggtgccttaaagacacgcattccaaagtggaatgtggttgaagaaagtgggccaggtggttgaagaaagccatgtgggagctcagcaaatcccaagggcttattatgacactccagatggtctccttagcatctcagctcttctgcaaggaagagcttgggtgttaggcctcagaggctgtagggtccttgggttacagagccggggagaacgaagttctgtgacccaggggtggagaatacactctaggtttgcgggctggtgggctttcaaattggtacttccagaggaaagccaagctgcttctgttgtgagcgaatcagccaagagcctgaggctgaagggaaaagtacacagaggaagatattttacaaaccaggtcagtgtaggccaagacttatggtctacagattttggcgggggaggggggaccttttcaaagacaatagggggtcttgacatgtttgttgtatgtaaagatgataagattaaaatttttgattttcctaaaatccttggcgtactttc

SEQ ID NO: 345956 - DNA, 2718 bp, Homo sapiens
cggatttttatgagatataattacattgacatgacgcctcatgatttacccatgactcggggggtttccaaactccaaacacctccagactggagcccgtcaatcagcttcctcttgcttttcgtggactcccactgtggaaacctgctggtgttttgctgcggtttcatttccctctgcggaggagccagggcaaccttggccagacaggcacctagctgtgcccttctttccagggcctcttctccactcagctgactcccctggcctgcctaacgctcctgactgagacggttttccggcttcctctaacaggttggcgggaagttgatctgcaaacgcgaggcaaagcaggagtgtccttattcggtaggcctctgatgggccaccagagccgtccgaaagtcctagcggagtgattgacagtggccatttcaaagcctgagttcaccttctttgcaaccacaatcacgacccagaataaactgcttcctggaagccggctagttgcacctggcctgaagtcagtctcgggactgcctctcaggaccccagacagggtttcgggttcccgcctgggtcacgtgtacggaggctgccagtgcgcactcagcccggcccgccggtcgccacagcaacaccaatcccgggttcaagcccgcctaggaagtgcggtccccgcctgaccgccccgggcttaagggagcctggctaggccggcagccggatggtcccgcagctcggggccggccatgcttcgcggtccgtggcgccagctttggctctttctcctgctgctgctcccgggcgcgcctgagccccgcggcgcctccaggccgtgggagggaaccgacgagccgggctcggcctgggcctggccgggcttccagcgcctgcaggagcagctcagggcggcgggtgccctctccaagcggtactggacgctcttcagctgccaggtgtggcccgacgactgtgacgaggacgaggaggcagccacggggcccctgggctggcgccttcctctgttgggccagcggtacctggacctcctgaccacgtggtactgcagcttcaaagactgctgccctagaggggattgcagaatctccaacaactttacaggcttagagtgggacctgaatgtgcggctgcatggccagcatttggtccagcagctggtcctaagaacagtgaggggctacttagagacgccccagccagaaaaggcccttgctctgtcgttccacggctggtctggcacaggcaagaacttcgtggcacggatgctggtggagaacctgtatcgggacgggctgatgagtgactgtgtcaggatgttcatcgccacgttccactttcctcaccccaaatatgtggacctgtacaaggagcagctgatgagccagatccgggagacgcagcagctctgccaccagaccctgttcatcttcgatgaagcggagaagctgcacccagggctgctggaggtccttgggccacacttagaacgccgggcccctgagggccacagggctgagtctccatggactatctttctgtttctcagtaatctcaggggcgatataatcaatgaggtggtcctaaagttgctcaaggctggatggtcccgggaagaaattacgatggaacacctggagccccacctccaggcggagattgtggagaccatagacaatggctttggccacagccgtcttgtgaaggaaaacctgattgactacttcatccccttcctgcctttggagtaccgtcacgtgaggctgtgtgcacgggatgccttcctgagccaggagctcctgtataaagaagagacactggatgaaatagcccagatgatggtgtatgtccccaaggaggaacaactcttttcttcccagggctgcaagtctatttcccagaggattaactacttcctgtcatgaaggctagaggaagacttcctggaactgcctttcttccactaacaggaccctgggacctgtaggagcaccccgtttgggactgtgaggtgtttgagggtgtggactggcatccagcagccactaacaaacacacaactggtgtgtaaaaggcaggccttacattagaagccaagccaatcctttttcttttttttggaggtcccaccgagatagataggaacttggattgctgaattcaaaaacagagcccattcttaagatcacttggtgccttaaagacacgcattccaaagtggaatgtggttgaagaaagccatgtgggagctcagcaaatcccaagggcttattatgacactccagatggtctccttagcatctcagctcttctgcaaggaagagcttgggtgttaggcctcagaggctgtagggtccttgggttacagagccggggagaacgaagttctgtgacccaggggtggagaatacactctaggtttgcgggctggtgggctttcaaattggtacttccagaggaaagccaagctgcttctgttgtgagcgaatcagccaagagcctgaggctgaagggaaaagtacacagaggaagatattttacaaaccaggtcagtgtaggccaagacttatggtctacagattttggcgggggaggggggaccttttcaaagacaatagggggtcttgacatgtttgttgtatgtaaagatgataagattaaaatttttgattttcctaaaatccttggcgtactttc

SEQ ID NO: 345957 - DNA, 2895 bp, Homo sapiens
cggatttttatgagatataattacattgacatgacgcctcatgatttacccatgactcggggggtttccaaactccaaacacctccagactggagcccgtcaatcagcttcctcttgcttttcgtggactcccactgtggaaacctgctggtgttttgctgcggtttcatttccctctgcggaggagccagggcaaccttggccagacaggcacctagctgtgcccttctttccagggcctcttctccactcagctgactcccctggcctgcctaacgctcctgactgagacggttttccggcttcctctaacaggttggcgggaagttgatctgcaaacgcgaggcaaagcaggagtgtccttattcggtaggcctctgatgggccaccagagccgtccgaaagtcctagcggagtgattgacagtggccatttcaaagcctgagttcaccttctttgcaaccacaatcacgacccagaataaactgcttcctggaagccggctagttgcacctggcctgaagtcagtctcgggactgcctctcaggaccccagacagggtttcgggttcccgcctgggtcacgtgtacggaggctgccagtgcgcactcagcccggcccgccggtcgccacagcaacaccaatcccgggttcaagcccgcctaggaagtgcggtccccgcctgaccgccccgggcttaagggagcctggctaggccggcagccggatggtcccgcagctcggggccggccatgcttcgcggtccgtggcgccagctttggctctttctcctgctgctgctcccgggcgcgcctgagccccgcggcgcctccaggccgtgggagggaaccgacgagccgggctcggcctgggcctggccgggcttccagcgcctgcaggagcagctcagggcggcgggtgccctctccaagcggtactggacgctcttcagctgccaggtgtggcccgacgactgtgacgaggacgaggaggcagccacggggcccctggggcttgaggaccgacagtgggccgagtcggggctgggagttagaatctgagttctgggtgtccctctgtccctgacaagttgtgtggcaaggttgccgcatcactgtagagcaccggatggtctcctctcggtctcacagctcctccttttccaggctggcgccttcctctgttgggccagcggtacctggacctcctgaccacgtggtactgcagcttcaaagactgctgccctagaggggattgcagaatctccaacaactttacaggcttagagtgggacctgaatgtgcggctgcatggccagcatttggtccagcagctggtcctaagaacagtgaggggctacttagagacgccccagccagaaaaggcccttgctctgtcgttccacggctggtctggcacaggcaagaacttcgtggcacggatgctggtggagaacctgtatcgggacgggctgatgagtgactgtgtcaggatgttcatcgccacgttccactttcctcaccccaaatatgtggacctgtacaaggagcagctgatgagccagatccgggagacgcagcagctctgccaccagaccctgttcatcttcgatgaagcggagaagctgcacccagggctgctggaggtccttgggccacacttagaacgccgggcccctgagggccacagggctgagtctccatggactatctttctgtttctcagtaatctcaggggcgatataatcaatgaggtggtcctaaagttgctcaaggctggatggtcccgggaagaaattacgatggaacacctggagccccacctccaggcggagattgtggagaccatagacaatggctttggccacagccgtcttgtgaaggaaaacctgattgactacttcatccccttcctgcctttggagtaccgtcacgtgaggctgtgtgcacgggatgccttcctgagccaggagctcctgtataaagaagagacactggatgaaatagcccagatgatggtgtatgtccccaaggaggaacaactcttttcttcccagggctgcaagtctatttcccagaggattaactacttcctgtcatgaaggctagaggaagacttcctggaactgcctttcttccactaacaggaccctgggacctgtaggagcaccccgtttgggactgtgaggtgtttgagggtgtggactggcatccagcagccactaacaaacacacaactggtgtgtaaaaggcaggccttacattagaagccaagccaatcctttttcttttttttggaggtcccaccgagatagataggaacttggattgctgaattcaaaaacagagcccattcttaagatcacttggtgccttaaagacacgcattccaaagtggaatgtggttgaagaaagtgggccaggtggttgaagaaagccatgtgggagctcagcaaatcccaagggcttattatgacactccagatggtctccttagcatctcagctcttctgcaaggaagagcttgggtgttaggcctcagaggctgtagggtccttgggttacagagccggggagaacgaagttctgtgacccaggggtggagaatacactctaggtttgcgggctggtgggctttcaaattggtacttccagaggaaagccaagctgcttctgttgtgagcgaatcagccaagagcctgaggctgaagggaaaagtacacagaggaagatattttacaaaccaggtcagtgtaggccaagacttatggtctacagattttggcgggggaggggggaccttttcaaagacaatagggggtcttgacatgtttgttgtatgtaaagatgataagattaaaatttttgattttcctaaaatccttggcgtactttc

SEQ ID NO: 345958 - DNA, 2360 bp, Homo sapiens
cggatttttatgagatataattacattgacatgacgcctcatgatttacccatgactcggggggtttccaaactccaaacacctccagactggagcccgtcaatcagcttcctcttgcttttcgtggactcccactgtggaaacctgctggtgttttgctgcggtttcatttccctctgcggaggagccagggcaaccttggccagacaggcacctagctgtgcccttctttccagggcctcttctccactcagctgactcccctggcctgcctaacgctcctgactgagacggttttccggcttcctctaacaggttggcgggaagttgatctgcaaacgcgaggcaaagcaggagtgtccttattcggtaggcctctgatgggccaccagagccgtccgaaagtcctagcggagtgattgacagtggccatttcaaagcctgagttcaccttctttgcaaccacaatcacgacccagaataaactgcttcctggaagccggctagttgcacctggcctgaagtcagtctcgggactgcctctcaggaccccagacagggtttcgggttcccgcctgggtcacgtgtacggaggctgccagtgcgcactcagcccggcccgccggtcgccacagcaacaccaatcccgggttcaagcccgcctaggaagtgcggtccccgcctgaccgccccgggcttaagggagcctggctaggccggcagccggatggtcccgcagctcggggccggccatgcttcgcggtccgtggcgccagctttggctctttctcctgctgctgctcccgggcgcgcctgagccccgcggcgcctccaggccgtgggagggaaccgacgagccgggctcggcctgggcctggccgggcttccagcgcctgcaggagcagctcagggcggcgggtgccctctccaagcggtactggacgctcttcagctgccaggtgtggcccgacgactgtgacgaggacgaggaggcagccacggggcccctgggagcagctgatgagccagatccgggagacgcagcagctctgccaccagaccctgttcatcttcgatgaagcggagaagctgcacccagggctgctggaggtccttgggccacacttagaacgccgggcccctgagggccacagggctgagtctccatggactatctttctgtttctcagtaatctcaggggcgatataatcaatgaggtggtcctaaagttgctcaaggctggatggtcccgggaagaaattacgatggaacacctggagccccacctccaggcggagattgtggagaccatagacaatggctttggccacagccgtcttgtgaaggaaaacctgattgactacttcatccccttcctgcctttggagtaccgtcacgtgaggctgtgtgcacgggatgccttcctgagccaggagctcctgtataaagaagagacactggatgaaatagcccagatgatggtgtatgtccccaaggaggaacaactcttttcttcccagggctgcaagtctatttcccagaggattaactacttcctgtcatgaaggctagaggaagacttcctggaactgcctttcttccactaacaggaccctgggacctgtaggagcaccccgtttgggactgtgaggtgtttgagggtgtggactggcatccagcagccactaacaaacacacaactggtgtgtaaaaggcaggccttacattagaagccaagccaatcctttttcttttttttggaggtcccaccgagatagataggaacttggattgctgaattcaaaaacagagcccattcttaagatcacttggtgccttaaagacacgcattccaaagtggaatgtggttgaagaaagtgggccaggtggttgaagaaagccatgtgggagctcagcaaatcccaagggcttattatgacactccagatggtctccttagcatctcagctcttctgcaaggaagagcttgggtgttaggcctcagaggctgtagggtccttgggttacagagccggggagaacgaagttctgtgacccaggggtggagaatacactctaggtttgcgggctggtgggctttcaaattggtacttccagaggaaagccaagctgcttctgttgtgagcgaatcagccaagagcctgaggctgaagggaaaagtacacagaggaagatattttacaaaccaggtcagtgtaggccaagacttatggtctacagattttggcgggggaggggggaccttttcaaagacaatagggggtcttgacatgtttgttgtatgtaaagatgataagattaaaatttttgattttcctaaaatccttggcgtactttc

SEQ ID NO: 345959 - DNA, 2080 bp, Homo sapiens
cggatttttatgagatataattacattgacatgacgcctcatgatttacccatgactcggggggtttccaaactccaaacacctccagactggagcccgtcaatcagcttcctcttgcttttcgtggactcccactgtggaaacctgctggtgttttgctgcggtttcatttccctctgcggaggagccagggcaaccttggccagacaggcacctagctgtgcccttctttccagggcctcttctccactcagctgactcccctggcctgcctaacgctcctgactgagacggttttccggcttcctctaacaggttggcgggaagttgatctgcaaacgcgaggcaaagcaggagtgtccttattcggtaggcctctgatgggccaccagagccgtccgaaagtcctagcggagtgattgacagtggccatttcaaagcctgagttcaccttctttgcaaccacaatcacgacccagaataaactgcttcctggaagccggctagttgcacctggcctgaagtcagtctcgggactgcctctcaggaccccagacagggtttcgggttcccgcctgggtcacgtgtacggaggctgccagtgcgcactcagcccggcccgccggtcgccacagcaacaccaatcccgggttcaagcccgcctaggaagtgcggtccccgcctgaccgccccgggcttaagggagcctggctaggccggcagccggatggtcccgcagctcggggccggccatgcttcgcggtccgtggcgccagctttggctctttctcctgctgctgctcccgggcgcgcctgagccccgcggcgcctccaggccgtgggagggaaccgacgagccgggctcggcctgggcctggccgggcttccagcgcctgcaggagcagctcagggcggcgggtgccctctccaagcggtactggacgctcttcagctgccaggtgtggcccgacgactgtgacgaggacgaggaggcagccacggggcccctgggctggcgccttcctctgttgggccagcggtacctggacctcctgaccacgtggtactgcagcttcaaagactgctgccctagaggggattgcagaatctccaacaactttacaggcttagagtgggacctgaatgtgcggctgcatggccagcatttggtccagcagctggtcctaagaacagtgaggggctacttagagacgccccagccagaaaaggcccttgctctgtcgttccacggctggtctggcacaggcaagaacttcgtggcacggatgctggtggagaacctgtatcgggacgggctgatgagtgactgtgtcaggatgttcatcgccacgttccactttcctcaccccaaatatgtggacctgtacaaggagcagctgatgagccagatccgggagacgcagcagctctgccaccagaccctgttcatcttcgatgaagcggagaagctgcacccagggctgctggaggtccttgggccacacttagaacgccgggcccctgagggccacagggctgagtctccatggactatctttctgtttctcaggtgggttctggggaacaatagtcaggagggctgggggaggggaagatactagctggcagtggaggcttccacacgcccccaggttcagaacctttcctcaagaaaaaacagcacaaactctggtacagaaagcagcagccagctgtggtagctcacgcctgtaatcccagcactttgggaggccaaggcggccgggtcccttgagtccaggagttcaagaccagcctgggcaacatagtgaaaccccatctctacaaaaaatataaaaattagctgggcgtggtgacatgtgcctgtagtcccagctactcgggaggctgaggtgggagaatcgcttgaacccaggaggtgggggttgcagtgagctgagatcgggccactgcactccaatctgggtgagcattttggacttcccaggcagctgtttgcggtagttcccttaagtcacaggcattttactacactggagcgtgttttcgcgtatagatccctgggtacaccgtcttggtc

SEQ ID NO: 345960 - DNA, 1832 bp, Homo sapiens
cggatttttatgagatataattacattgacatgacgcctcatgatttacccatgactcggggggtttccaaactccaaacacctccagactggagcccgtcaatcagcttcctcttgcttttcgtggactcccactgtggaaacctgctggtgttttgctgcggtttcatttccctctgcggaggagccagggcaaccttggccagacaggcacctagctgtgcccttctttccagggcctcttctccactcagctgactcccctggcctgcctaacgctcctgactgagacggttttccggcttcctctaacaggttggcgggaagttgatctgcaaacgcgaggcaaagcaggagtgtccttattcggtaggcctctgatgggccaccagagccgtccgaaagtcctagcggagtgattgacagtggccatttcaaagcctgagttcaccttctttgcaaccacaatcacgacccagaataaactgcttcctggaagccggctagttgcacctggcctgaagtcagtctcgggactgcctctcaggaccccagacagggtttcgggttcccgcctgggtcacgtgtacggaggctgccagtgcgcactcagcccggcccgccggtcgccacagcaacaccaatcccgggttcaagcccgcctaggaagtgcggtccccgcctgaccgccccgggcttaagggagcctggctaggccggcagccggatggtcccgcagctcggggccggccatgcttcgcggtccgtggcgccagctttggctctttctcctgctgctgctcccgggcgcgcctgagccccgcggcgcctccaggccgtgggagggaaccgacgagccgggctcggcctgggcctggccgggcttccagcgcctgcaggagcagctcagggcggcgggtgccctctccaagcggtactggacgctcttcagctgccaggtgtggcccgacgactgtgacgaggacgaggaggcagccacggggcccctgggctggcgccttcctctgttgggccagcggtacctggacctcctgaccacgtggtactgcagcttcaaagactgctgccctagaggggattgcagaatctccaacaactttacaggcttagagtgggacctgaatgtgcggctgcatggccagcatttggtccagcagctggtcctaagaacagtgaggggctacttagagacgccccagccagaaaaggcccttgctctgtcgttccacggctggtctggcacaggcaagaacttcgtggcacggatgctggtggagaacctgtatcgggacgggctgatgagtgactgtgtcaggatgttcatcgccacgttccactttcctcaccccaaatatgtggacctgtacaaggagcagctgatgagccagatccgggagacgcagcagctctgccaccagaccctgttcatcttcgatgaagcggagaagctgcacccagggctgctggaggtccttgggccacacttagaacgccgggcccctgagggccacagggctgagtctccatggactatctttctgtttctcagtaactctcaggggcgaataaatttttaaacaaacacaccccaaccaacacaccccgcccttttttttaccccccacggaaacacaccgcaccacaacaccacccccccccatctaggcggcggggcgccaaacaaacctcacgcacacgggacccccgggggggcgcgcccaccgtcttctcccgccacgcgggcggggagcacgccccaccgcgggcgccacccccacccactttctcccccccccaccccacccccaggg

SEQ ID NO: 345961 - DNA, 390 bp, Homo sapiens
ccactgcactccaatctgggtgacagattttttgaaacaaattcccaaggcaagcctggttagagaacggcatagtctcccatcaagtccaacacggccatttcttccttcagccttggaagtctgtttcttctccgattatgagaagtcatcactggcttaaaatccagggtatacgggttgagaaacccatgcttcctctgagtacctgtagttcagttgtgacgctaccatgcgggacccagtcactgaatcactgcactgaggttcctgtgctttcactgacatctttgcgtgaagccaacttagaaataacttgtccaacctcatctttttgcggaggctccaactgggggagtcctgtgtctgttacaagtcaagtttgggccc

SEQ ID NO: 345962 - DNA, 2740 bp, Homo sapiens
cggatttttatgagatataattacattgacatgacgcctcatgatttacccatgactcggggggtttccaaactccaaacacctccagactggagcccgtcaatcagcttcctcttgcttttcgtggactcccactgtggaaacctgctggtgttttgctgcggtttcatttccctctgcggaggagccagggcaaccttggccagacaggcacctagctgtgcccttctttccagggcctcttctccactcagctgactcccctggcctgcctaacgctcctgactgagacggttttccggcttcctctaacaggttggcgggaagttgatctgcaaacgcgaggcaaagcaggagtgtccttattcggtaggcctctgatgggccaccagagccgtccgaaagtcctagcggagtgattgacagtggccatttcaaagcctgagttcaccttctttgcaaccacaatcacgacccagaataaactgcttcctggaagccggctagttgcacctggcctgaagtcagtctcgggactgcctctcaggaccccagacagggtttcgggttcccgcctgggtcacgtgtacggaggctgccagtgcgcactcagcccggcccgccggtcgccacagcaacaccaatcccgggttcaagcccgcctaggaagtgcggtccccgcctgaccgccccgggcttaagggagcctggctaggccggcagccggatggtcccgcagctcggggccggccatgcttcgcggtccgtggcgccagctttggctctttctcctgctgctgctcccgggcgcgcctgagccccgcggcgcctccaggccgtgggagggaaccgacgagccgggctcggcctgggcctggccgggcttccagcgcctgcaggagcagctcagggcggcgggtgccctctccaagcggtactggacgctcttcagctgccaggtgtggcccgacgactgtgacgaggacgaggaggcagccacggggcccctgggctggcgccttcctctgttgggccagcggtacctggacctcctgaccacgtggtactgcagcttcaaagactgctgccctagaggggattgcagaatctccaacaactttacaggcttagagtgggacctgaatgtgcggctgcatggccagcatttggtccagcagctggtcctaagaacagtgaggggctacttagagacgccccagccagaaaaggcccttgctctgtcgttccacggctggtctggcacaggcaagaacttcgtggcacggatgctggtggagaacctgtatcgggacgggctgatgagtgactgtgtcaggatgttcatcgccacgttccactttcctcaccccaaatatgtggacctgtacaaggagcagctgatgagccagatccgggagacgcagcagctctgccaccagaccctgttcatcttcgatgaagcggagaagctgcacccagggctgctggaggtccttgggccacacttagaacgccgggcccctgagggccacagggctgagtctccatggactatctttctgtttctcagtaatctcaggggcgatataatcaatgaggtggtcctaaagttgctcaaggctggatggtcccgggaagaaattacgatggaacacctggagccccacctccaggcggagattgtggagaccatagacaatggctttggccacagccgtcttgtgaaggaaaacctgattgactacttcatccccttcctgcctttggagtaccgtcacgtgaggctgtgtgcacgggatgccttcctgagccaggagctcctgtataaagaagagacactggatgaaatagcccagatgatggtgtatgtccccaaggaggaacaactcttttcttcccagggctgcaagtctatttcccagaggattaactacttcctgtcatgaaggctagaggaagacttcctggaactgcctttcttccactaacaggaccctgggacctgtaggagcaccccgtttgggactgtgaggtgtttgagggtgtggactggcatccagcagccactaacaaacacacaactggtgtgtaaaaggcaggccttacattagaagccaagccaatcctttttcttttttttggaggtcccaccgagatagataggaacttggattgctgaattcaaaaacagagcccattcttaagatcacttggtgccttaaagacacgcattccaaagtggaatgtggttgaagaaagtgggccaggtggttgaagaaagccatgtgggagctcagcaaatcccaagggcttattatgacactccagatggtctccttagcatctcagctcttctgcaaggaagagcttgggtgttaggcctcagaggctgtagggtccttgggttacagagccggggagaacgaagttctgtgacccaggggtggagaatacactctaggtttgcgggctggtgggctttcaaattggtacttccagaggaaagccaagctgcttctgttgtgagcgaatcagccaagagcctgaggctgaagggaaaagtacacagaggaagatattttacaaaccaggtcagtgtaggccaagacttatggtctacagattttggcgggggaggggggaccttttcaaagacaatagggggtcttgacatgtttgttgtatgtaaagatgataagattaaaatttttgattttcctaaaatccttggcgtactttc

SEQ ID NO: 345963 - DNA, 2659 bp, Homo sapiens
cggatttttatgagatataattacattgacatgacgcctcatgatttacccatgactcggggggtttccaaactccaaacacctccagactggagcccgtcaatcagcttcctcttgcttttcgtggactcccactgtggaaacctgctggtgttttgctgcggtttcatttccctctgcggaggagccagggcaaccttggccagacaggcacctagctgtgcccttctttccagggcctcttctccactcagctgactcccctggcctgcctaacgctcctgactgagacggttttccggcttcctctaacaggttggcgggaagttgatctgcaaacgcgaggcaaagcaggagtgtccttattcggtaggcctctgatgggccaccagagccgtccgaaagtcctagcggagtgattgacagtggccatttcaaagcctgagttcaccttctttgcaaccacaatcacgacccagaataaactgcttcctggaagccggctagttgcacctggcctgaagtcagtctcgggactgcctctcaggaccccagacagggtttcgggttcccgcctgggtcacgtgtacggaggctgccagtgcgcactcagcccggcccgccggtcgccacagcaacaccaatcccgggttcaagcccgcctaggaagtgcggtccccgcctgaccgccccgggcttaagggagcctggctaggccggcagccggatggtcccgcagctcggggccggccatgcttcgcggtccgtggcgccagctttggctctttctcctgctgctgctcccgggcgcgcctgagccccgcggcgcctccaggccgtgggagggaaccgacgagccgggctcggcctgggcctggccgggcttccagcgcctgcaggagcagctcagggcggcgggtgccctctccaagcggtactggacgctcttcagctgccaggtgtggcccgacgactgtgacgaggacgaggaggcagccacggggcccctgggctggcgccttcctctgttgggccagcggtacctggacctcctgaccacgtggtactgcagcttcaaagactgctgccctagaggggattgcagaatctccaacaactttacaggcttagagtgggacctgaatgtgcggctgcatggccagcatttggtccagcagctggtcctaagaacagtgaggggctacttagagacgccccagccagaaaaggcccttgctctgtcgttccacggctggtctggcacaggcaagaacttcgtggcacggatgctggtggagaacctgtatcgggacgggctgatgagtgactgtgtcaggatgttcatcgccacgttccactttcctcaccccaaatatgtggacctgtacaaggagcagctgatgagccagatccgggagacgcagcagctctgccaccagaccctgttcatcttcgatgaagcggagaagctgcacccagggctgctggaggtccttgggccacacttagaacgccgggcccctgagggccacagggctgagtctccatggactatctttctgtttctcagtaatctcaggggcgatataatcaatgaggtggtcctaaagttgctcaaggctggatggtcccgggaagaaattacgatggaacacctggagccccacctccaggcggagattgtggagaccatagacaatggctttggccacagccgtcttgtgaaggaaaacctgattgactacttcatccccttcctgcctttggagtaccgtcacgtgaggctgtgtgcacgggatgccttcctgagccaggagctcctgtataaagaagagacactggatgaaatagcccagatgatggtgtatgtccccaaggaggaacaactcttttcttcccagggctgcaagtctatttcccagaggattaactacttcctgtcatgaaggctagaggaagacttcctggaactgcctttcttccactaacaggaccctgggacctgtaggagcaccccgtttgggactgtgaggtgtttgagggtgtggactggcatccagcagccactaacaaacacacaactggtgtgtaaaaggcaggccttacattagaagccaagccaatcctttttcttttttttggaggtcccaccgagatagataggaacttggattgctgaattcaaaaacagagcccattcttaagatcacttggtgccttaaagacacgcattccaaagtggaatgtggttgaagaaagtgggccaggtggttgaagaaagccatgtgggagctcagcaaatcccaagggcttattatgacactccagatggtctccttagcatctcagctcttctgcaaggaagagcttgggtgttaggcctcagaggctgtagggtccttgggttacagagccggggagaacgaagttctgtgacccaggggtggagaatacactctaggtttgcgggctggtgggctttcaaattggtacttccagaggaaagccaagctgcttctgttgtgagcgaatcagccaagagcctgaggctgaagggaaaagtacacagaggaagatattttacaaaccaggtcagtgtaggccaagacttatggtctacagattttgcagggttaaggcccccgggggatcctctacg

SEQ ID NO: 345964 - DNA, 2694 bp, Homo sapiens
cggatttttatgagatataattacattgacatgacgcctcatgatttacccatgactcggggggtttccaaactccaaacacctccagactggagcccgtcaatcagcttcctcttgcttttcgtggactcccactgtggaaacctgctggtgttttgctgcggtttcatttccctctgcggaggagccagggcaaccttggccagacaggcacctagctgtgcccttctttccagggcctcttctccactcagctgactcccctggcctgcctaacgctcctgactgagacggttttccggcttcctctaacaggttggcgggaagttgatctgcaaacgcgaggcaaagcaggagtgtccttattcggtaggcctctgatgggccaccagagccgtccgaaagtcctagcggagtgattgacagtggccatttcaaagcctgagttcaccttctttgcaaccacaatcacgacccagaataaactgcttcctggaagccggctagttgcacctggcctgaagtcagtctcgggactgcctctcaggaccccagacagggtttcgggttcccgcctgggtcacgtgtacggaggctgccagtgcgcactcagcccggcccgccggtcgccacagcaacaccaatcccgggttcaagcccgcctaggaagtgcggtccccgcctgaccgccccgggcttaagggagcctggctaggccggcagccggatggtcccgcagctcggggccggccatgcttcgcggtccgtggcgccagctttggctctttctcctgctgctgctcccgggcgcgcctgagccccgcggcgcctccaggccgtgggagggaaccgacgagccgggctcggcctgggcctggccgggcttccagcgcctgcaggagcagctcagggcggcgggtgccctctccaagcggtactggacgctcttcagctgccaggtgtggcccgacgactgtgacgaggacgaggaggcagccacggggcccctgggctggcgccttcctctgttgggccagcggtacctggacctcctgaccacgtggtactgcagcttcaaagactgctgccctagaggggattgcagaatctccaacaactttacaggcttagagtgggacctgaatgtgcggctgcatggccagcatttggtccagcagctggtcctaagaacagtgaggggctacttagagacgccccagccagaaaaggcccttgctctgtcgttccacggctggtctggcacaggcaagaacttcgtggcacggatgctggtggagaacctgtatcgggacgggctgatgagtgactgtgtcaggatgttcatcgccacgttccactttcctcaccccaaatatgtggacctgtacaaggagcagctgatgagccagatccgggagacgcagcagctctgccaccagaccctgttcatcttcgatgaagcggagaagctgcacccagggctgctggaggtccttgggccacacttagaacgccgggcccctgagggccacagggctgagtctccatggactatctttctgtttctcagtaatctcaggggcgatataatcaatgaggtggtcctaaagttgctcaaggctggatggtcccgggaagaaattacgatggaacacctggagccccacctccaggcggagattgtggagaccatagacaatggctttggccacagccgtcttgtgaaggaaaacctgattgactacttcatccccttcctgcctttggagtaccgtcacgtgaggctgtgtgcacgggatgccttcctgagccaggagctcctgtataaagaagagacactggatgaaatagcccagatgatggtgtatgtccccaaggaggaacaactcttttcttcccagggctgcaagtctatttcccagaggattaactacttcctgtcatgaaggctagaggaagacttcctggaactgcctttcttccactaacaggaccctgggacctgtaggagcaccccgtttgggactgtgaggtgtttgagggtgtggactggcatccagcagccactaacaaacacacaactggtgtgtaaaaggcaggccttacattagaagccaagccaatcctttttcttttttttggaggtcccaccgagatagataggaacttggattgctgaattcaaaaacagagcccattcttaagatcacttggtgccttaaagacacgcattccaaagtggaatgtggttgaagaaagtgggccaggtggttgaagaaagccatgtgggagctcagcaaatcccaagggcttattatgacactccagatggtctccttagcatctcagctcttctgcaaggaagagcttgggtgttaggcctcagaggctgtagggtccttgggttacagagccggggagaacgaagttctgtgacccaggggtggagaatacactctaggtttgcgggctggtgggctttcaaattggtacttccagaggaaagccaagctgcttctgttgtgagcgaatcagccaagagcctgagtgaggaaagtcccgcggagatttttcaaccagttatgtagcagatttgctcgattgcgggggggggctttccaaaccaacgggttgcctgttgggtttaacgtacataccttgtttcccaagaaaaaaaaaacaaacaccaacgag

SEQ ID NO: 345965 - DNA, 2474 bp, Homo sapiens
cggatttttatgagatataattacattgacatgacgcctcatgatttacccatgactcggggggtttccaaactccaaacacctccagactggagcccgtcaatcagcttcctcttgcttttcgtggactcccactgtggaaacctgctggtgttttgctgcggtttcatttccctctgcggaggagccagggcaaccttggccagacaggcacctagctgtgcccttctttccagggcctcttctccactcagctgactcccctggcctgcctaacgctcctgactgagacggttttccggcttcctctaacaggttggcgggaagttgatctgcaaacgcgaggcaaagcaggagtgtccttattcggtaggcctctgatgggccaccagagccgtccgaaagtcctagcggagtgattgacagtggccatttcaaagcctgagttcaccttctttgcaaccacaatcacgacccagaataaactgcttcctggaagccggctagttgcacctggcctgaagtcagtctcgggactgcctctcaggaccccagacagggtttcgggttcccgcctgggtcacgtgtacggaggctgccagtgcgcactcagcccggcccgccggtcgccacagcaacaccaatcccgggttcaagcccgcctaggaagtgcggtccccgcctgaccgccccgggcttaagggagcctggctaggccggcagccggatggtcccgcagctcggggccggccatgcttcgcggtccgtggcgccagctttggctctttctcctgctgctgctcccgggcgcgcctgagccccgcggcgcctccaggccgtgggagggaaccgacgagccgggctcggcctgggcctggccgggcttccagcgcctgcaggagcagctcagggcggcgggtgccctctccaagcggtactggacgctcttcagctgccaggtgtggcccgacgactgtgacgaggacgaggaggcagccacggggcccctgggctggcgccttcctctgttgggccagcggtacctggacctcctgaccacgtggtactgcagcttcaaagactgctgccctagaggggattgcagaatctccaacaactttacaggagcagctgatgagccagatccgggagacgcagcagctctgccaccagaccctgttcatcttcgatgaagcggagaagctgcacccagggctgctggaggtccttgggccacacttagaacgccgggcccctgagggccacagggctgagtctccatggactatctttctgtttctcagtaatctcaggggcgatataatcaatgaggtggtcctaaagttgctcaaggctggatggtcccgggaagaaattacgatggaacacctggagccccacctccaggcggagattgtggagaccatagacaatggctttggccacagccgtcttgtgaaggaaaacctgattgactacttcatccccttcctgcctttggagtaccgtcacgtgaggctgtgtgcacgggatgccttcctgagccaggagctcctgtataaagaagagacactggatgaaatagcccagatgatggtgtatgtccccaaggaggaacaactcttttcttcccagggctgcaagtctatttcccagaggattaactacttcctgtcatgaaggctagaggaagacttcctggaactgcctttcttccactaacaggaccctgggacctgtaggagcaccccgtttgggactgtgaggtgtttgagggtgtggactggcatccagcagccactaacaaacacacaactggtgtgtaaaaggcaggccttacattagaagccaagccaatcctttttcttttttttggaggtcccaccgagatagataggaacttggattgctgaattcaaaaacagagcccattcttaagatcacttggtgccttaaagacacgcattccaaagtggaatgtggttgaagaaagtgggccaggtggttgaagaaagccatgtgggagctcagcaaatcccaagggcttattatgacactccagatggtctccttagcatctcagctcttctgcaaggaagagcttgggtgttaggcctcagaggctgtagggtccttgggttacagagccggggagaacgaagttctgtgacccaggggtggagaatacactctaggtttgcgggctggtgggctttcaaattggtacttccagaggaaagccaagctgcttctgttgtgagcgaatcagccaagagcctgaggctgaagggaaaagtacacagaggaagatattttacaaaccaggtcagtgtaggccaagacttatggtctacagattttggcgggggaggggggaccttttcaaagacaatagggggtcttgacatgtttgttgtatgtaaagatgataagattaaaatttttgattttcctaaaatccttggcgtactttc

SEQ ID NO: 345966 - DNA, 2587 bp, Homo sapiens
cggatttttatgagatataattacattgacatgacgcctcatgatttacccatgactcggggggtttccaaactccaaacacctccagactggagcccgtcaatcagcttcctcttgcttttcgtggactcccactgtggaaacctgctggtgttttgctgcggtttcatttccctctgcggaggagccagggcaaccttggccagacaggcacctagctgtgcccttctttccagggcctcttctccactcagctgactcccctggcctgcctaacgctcctgactgagacggttttccggcttcctctaacaggttggcgggaagttgatctgcaaacgcgaggcaaagcaggagtgtccttattcggtaggcctctgatgggccaccagagccgtccgaaagtcctagcggagtgattgacagtggccatttcaaagcctgagttcaccttctttgcaaccacaatcacgacccagaataaactgcttcctggaagccggctagttgcacctggcctgaagtcagtctcgggactgcctctcaggaccccagacagggtttcgggttcccgcctgggtcacgtgtacggaggctgccagtgcgcactcagcccggcccgccggtcgccacagcaacaccaatcccgggttcaagcccgcctaggaagtgcggtccccgcctgaccgccccgggcttaagggagcctggctaggccggcagccggatggtcccgcagctcggggccggccatgcttcgcggtccgtggcgccagctttggctctttctcctgctgctgctcccgggcgcgcctgagccccgcggcgcctccaggccgtgggagggaaccgacgagccgggctcggcctgggcctggccgggcttccagcgcctgcaggagcagctcagggcggcgggtgccctctccaagcggtactggacgctcttcagctgccaggtgtggcccgacgactgtgacgaggacgaggaggcagccacggggcccctgggctggcgccttcctctgttgggccagcggtacctggacctcctgaccacgtggtactgcagcttcaaagactgctgccctagaggggattgcagaatctccaacaactttacaggagcagctgatgagccagatccgggagacgcagcagctctgccaccagaccctgttcatcttcgatgaagcggagaagctgcacccagggctgctggaggtccttgggccacacttagaacgccgggcccctgagggccacagggctgagtctccatggactatctttctgtttctcagcaccttacagaatggagaaggccctggagtccatgcccctaggatggggtgagggagtatcactctgtggggtttcacagcaccctggatcctgccttccagcccctgccaagtaatctcaggggcgatataatcaatgaggtggtcctaaagttgctcaaggctggatggtcccgggaagaaattacgatggaacacctggagccccacctccaggcggagattgtggagaccatagacaatggctttggccacagccgtcttgtgaaggaaaacctgattgactacttcatccccttcctgcctttggagtaccgtcacgtgaggctgtgtgcacgggatgccttcctgagccaggagctcctgtataaagaagagacactggatgaaatagcccagatgatggtgtatgtccccaaggaggaacaactcttttcttcccagggctgcaagtctatttcccagaggattaactacttcctgtcatgaaggctagaggaagacttcctggaactgcctttcttccactaacaggaccctgggacctgtaggagcaccccgtttgggactgtgaggtgtttgagggtgtggactggcatccagcagccactaacaaacacacaactggtgtgtaaaaggcaggccttacattagaagccaagccaatcctttttcttttttttggaggtcccaccgagatagataggaacttggattgctgaattcaaaaacagagcccattcttaagatcacttggtgccttaaagacacgcattccaaagtggaatgtggttgaagaaagtgggccaggtggttgaagaaagccatgtgggagctcagcaaatcccaagggcttattatgacactccagatggtctccttagcatctcagctcttctgcaaggaagagcttgggtgttaggcctcagaggctgtagggtccttgggttacagagccggggagaacgaagttctgtgacccaggggtggagaatacactctaggtttgcgggctggtgggctttcaaattggtacttccagaggaaagccaagctgcttctgttgtgagcgaatcagccaagagcctgaggctgaagggaaaagtacacagaggaagatattttacaaaccaggtcagtgtaggccaagacttatggtctacagattttggcgggggaggggggaccttttcaaagacaatagggggtcttgacatgtttgttgtatgtaaagatgataagattaaaatttttgattttcctaaaatccttggcgtactttc

SEQ ID NO: 345967 - DNA, 401 bp, Homo sapiens
agttttgggggagccaaaagttaaaaagtagattttcaactggggcattggtgtccctaaatcctaagttattcaaaggtcaactatagttggaataatatattatgtagctttttcagactggtttatttcactcagcaatatgcctttatggttcctttatgtcctttcatggtttgataactcttttcttttcattgctaaataacatcccattgtatagatgtagtacagtttatctatccattcaactactaaaggacattttggttgcttccaagtcttggcaattatgaacaaaggtgttttaatattcatgtgcagatgtttgtgtgaatatgtcttaaactaatttgggtaaataccaaagagcgtgattgttgagtcataagactatgttt

SEQ ID NO: 345968 - DNA, 92 bp, Homo sapiens
ttgcttgatgggagaggaaggtttagggtgcttagctgcttcttaactctttcaacccaggcttcctatttggatgtccgttttcacccctc

SEQ ID NO: 345969 - DNA, 805 bp, Homo sapiens
ccctgctgaccttatacccacgatcaccctgttgccctgccacactcccctcgccaagatagtaaaaatagtgatcaataaatactaagggaaatcagagaccagcgctggtgtgggtcctcacacgttgagcgccggtctcctgggcccactgttctttctctgtactttgtgtctgtgtcttatttcttttctcagtctctcgtctccacctgacgagaaatacccacaggtatggaggggcaggcccccttcatctaaaaggtgttgaaagccttggactatgtgaattaacttagactgcttattggttatcctggaaatcggtaacagcagataaaattaggaaaggagatgattctgcttttaaagtagtgagtggcatgtcttaaccacagagtgcagtgattataaaattccatttgattctttgtttttctcaaattgcataagcagtgagtaggaagaagatgatgaaccacaggaggagtagtcagaaggggagaagaacgagaaaagtaatgtcacagactgtgagggaaaattatccacaaagatgggatgttacagtgtcagatgctgcagaggaggataggtgaagaaagtagaacaaaatactgatggttgttgaagctgtgctgttaggtacatgggagtttattgtattagtctatctgcatttgtcatctatgggttgttttttttttgttttgtttttttgtttttttagatggagattcactctttcacccaagctgagatcgtgccactgtactcagagtgatgacagttagaccctgtgtca

SEQ ID NO: 345970 - DNA, 310 bp, Homo sapiens
tggggccggtcatggtagctcacacctgtaatcccagcattttgggaggccaagacaggaggatcacttgagcctaggagtttgagaccagcctgggcaattgagtgagacctcatctctacagaaaacaaaacaaaacagaaaaattaaaattaaaaaacggtagttaggcctggtggcacgtgcctgtagtcccagctgttggagtggggagggtgcccaaagtgggaggatcacttgagctggggagatcagtgagctgagatcgtgccactgtactcagagtgatgacagttagaccctgtgtcaa

SEQ ID NO: 345971 - DNA, 473 bp, Homo sapiens
taaggtctaggtagcaatctgtcagtgcatttacttaaaacttgtattaagcattttaaatataatttttcaaactccaaaatattccctgttaagaaacacaaaagtagaaaaacatggataaattttttttctaaatttgtatatttattacaggcattaacatgtccactccactttacaagatcttcggagaaaagtgctattccaagctccattatgctacttgacaaacagcacactatgtatatgtaaacaaccaaatatttaagccatttttcagtggtttctccctagccacagacataaagatatgtgcttgtctttagtccaacattatttccagagaaaagtaaaacaggctgggcatggtggttcacacttgtaatcccagcactttacaaggttgaggtgggaggacttcttgaagccagaagtacaagaccatcctgggcaacactgcaagacgcagt

SEQ ID NO: 345972 - DNA, 686 bp, Homo sapiens
gcgaatgtttatacgatgctgagcacatgtacagggctgacacacaggaagcccaaagtggtaaacaatactaaaataattaacaccgaccctttgaaactgactaaaggaactgctgaaggtcaaagagccagaagtaccaggatgtggatctgaatccaggtcagtctctctccaaagtcctttccaccacctgctgcccacattcttgctcaaaggtgtgatggtcccttaaaacgtgcttaatactcagcagctgagtggccacccactataccgaactgggccagctgtggggcttatccagaagctcctcaagttctttgaacttctccctttcctcagtcccagactactcttcatgactattcagagggtccagaaatcactggaagtgtttcagaatttcagggttagaaaaagttttcaaagacccttgaaatgaacttccttctaatgcctgagtctctgctgagaccacgtgtctgggcaagaggctgtcctatctgtgtgaacatcttcaatggcaaagaacttggcacctctaagtgcagcccatttccgtgcagcaggacccactgctagtaagttcttcatcatgaaatagaatctgttctctgtatttttcagtcattggtcctgattctacctgccatgtcatttttggtcttttcacctccagccta

SEQ ID NO: 345973 - DNA, 350 bp, Homo sapiens
tcacgaaggccgtggcagaggaaaaaaaaaaaaaaataacatgagttctggttctggaaaagtatccctatcgagaaagctgtacctttttaatatgatctcagtggcatctttctttcagtgtctttcctatgcaataaatatcttgcctttttcatatgtaaatggcacaaccctcgggtcaaggacaaaagtgtgcatttcttttttcctccagagttgctgggttgttttgtccaatggtaccttctacagcatttctccaagcagcttggcaccgttagtaccaagctctcatctgtgtgcttaaaaaaaggtggggggagcctatgtgatttaggttttttgtt

SEQ ID NO: 345974 - DNA, 5249 bp, Homo sapiens
tgttcctcttctttcgtgttgtgtcagaagccatgatttccagtcttctcatctggaagatgaaggaaaagatagacccgaccccacagggttctgaggctcaaactgaaagcctggtggtggggcacctgtgacaggtcccatctgatgccgaggctgaaggagtctcgctcccacgagtccctgctcagccccagcagtgcggtggaggcgctggacctcagcatggaggaagaggtggtcatcaagcccgtgcacagcagcatccttggccaggactactgcttcgaggtgacgacgtcatcaggaagcaagtgcttttcctgccggtctgcagctgagcgggataagtggatggagaacctccggcgagcggtgcatcccaacaaggacaacagccggcgtgtggagcacatcctgaagctgtgggtgatcgaggccaaggacctgccagccaagaagaagtacctgtgcgagctgtgcctggacgatgtgctctatgcccgcaccacgggcaagctcaagacggacaatgttttctggggcgagcacttcgagttccacaacttgccgcctctgcgcacggtcactgtccacctgtaccgggagaccgacaagaagaagaagaaggagcgcaacagttacctgggcctggtgagcctacctgctgcctcggtggccgggcggcagttcgtggagaagtggtacccggtggtgacgcccaaccccaagggcggcaagggccctggacccatgatccgcatcaaggcgcgctaccaaaccatcaccatcctgcccatggagatgtacaaagagttcgctgagcacatcaccaaccactacctggggctgtgtgcagccctcgagcccatcctcagtgccaagaccaaggaggagatggcatctgccctggtgcacatcctgcagagcacgggcaaggtgaaggacttcctgacagacctgatgatgtcagaggtggaccgctgcggggacaacgagcacctcatcttccgggagaacacactggccaccaaggccattgaggagtacctcaagctagtgggccagaagtacctgcaggacgccctaggtgagttcatcaaagcgctgtatgagtcagatgagaactgcgaagtggatcccagcaagtgctcggccgctgacctcccagagcaccagggcaacctcaagatgtgctgcgagctggccttctgcaagatcatcaactcctactgtgtcttcccacgggagttgaaagaggtgtttgcctcgtggaggcaggagtgcagcagtcgcggccgcccggacatcagtgagcggctcatcagcgcctccctcttcctgcgcttcctctgcccagccatcatgtcgccctcactcttcaacctgctgcaggagtaccctgatgaccgcactgcccgcaccctcaccctcatcgccaaggtcacccagaacctggccaactttgccaaatttggcagcaaggaggaatacatgtccttcatgaaccagttcctagagcatgagtggaccaacatgcagcgcttcctgctggagatctccaaccccgagaccctctccaatacagccggcttcgagggctacatcgacctgggccgcgagctctccagcctgcactcactgctctgggaggccgtcagccagctggagcagagcatagtatccaaactgggacccctgcctcggatcctgagggacgtccacacagcactgagcaccccaggtagcgggcagctcccagggaccaatgacctggcctccacaccgggctctggcagcagcagcatctcagctgggctgcagaagatggtgattgagaacgatctttccggtctgatagatttcacccggttaccgtctccaacccccgaaaacaaggacttgttttttgtcacaaggtcctccggggtccagccctcacctgcccgcagctcgagttactcggaagccaacgagcctgatcttcagatggccaacggtggcaagagcctctccatggtggacctccaggacgcccgcacgctggatggggaggcaggctccccggcgggccccgacgtcctccccacagatgggcaggccgctgcagctcagctggtggccgggtggccggcccgggcaaccccagtgaacctggcagggctggccacggtgcggcgggcaggccagacaccaaccacaccaggcacctccgagggcgcgccaggccggccccagctgttggcaccgctctccttccagaaccctgtgtaccagatggcggctggcctgccgctgtcaccccgtggccttggcgactcaggctctgagggccacagctccctgagctcacacagcaacagcgaggagttggcggctgctgccaagctgggaagtttcagcactgccgcggaggagctggctcggcggcccggtgagctggcacggcgacagatgtcactgactgaaaaaggcgggcagcccacggtgccacggcagaacagtgctggcccccagaggaggatcgaccagcctccgcccccacccccgccgccacctcctgccccccgcggccggacgccccccaacctgctgagcaccctgcagtacccaagaccctcaagcggaaccctggcgtcggcctcacctgattgggtgggccccagtacccgcctgaggcagcagtcctcttcctccaagggggacagcccagaactgaagccacgggcagtgcacaagcagggcccttcacctgtgagccccaatgccctggaccgcacagccgcttggctcttgaccatgaacgcgcagttgttagaagacgagggcctgggcccagaccccccccacagggataggctaaggagtaaggacgagctcagccaagcagaaaaggacctggcggtgctgcaggacaagctgcgaatctccaccaagaagctggaggagtatgagaccctgttcaagtgccaggaggagacgacgcagaagctggtgctggagtaccaggcacggctggaggagggcgaggagcggctgcggcggcagcaggaggacaaggacatccagatgaagggcatcatcagcaggttgatgtccgtggaggaagaactgaagaaggaccacgcagagatgcaagcggctgtggactccaaacagaagatcattgatgcccaggagaagcgcattgcctcgttggatgccgccaatgcccgcctcatgagtgccctgacccagctgaaagagagtatgcattagaaacaaaagcccgcttgctcgcttgctggaacacaggggccttttaagttgagcgtgcgcactgcatgggaaatagcggccctggaggatgttagacttgctccctctccaagacagcagcagcctgcacctgccccgtgtgtgtggccggcctcctcctcacccttcccggcccccggccaaggacccaggcgctgcatacaggggaggggcgcaccccacagctggggccggttttcctcagctctaggctgttctgtagcttatctgcccctcccccactttcaagacagatgagcaggagcttgggtctctctcggcccctgtctgttcccagcccctgcagattctgagcaaaggccctgggtaagaagggtgggagtggggcctttgccagcagagccagggcagggcgagctgcaggaatcacccctctgcccctgcagctggaatgtgccacagaggccccacctgaagggtggatgtgctggaggggtggcccagagccatactgcgtccaccctgagctcggggacaggtgacagtggctgctctgggaaggggcttttagatgtaacctacaattcagttaggctagagacagatgctggtggaggaagggctgggccaccagggatcacagaccacaggaagatgggaggtggaagcagaggccctgcccccaccccttcctgtctcactcttctgtcttgtccccacccatgcgccttcgtgcctgagaccagggtggccacacaggcagggcctggctccagtctcatcctcccattgcccagtgagccctgctcttctctccccagccccctcccaccgctgcctcgtagagtgacctcggacagagcccccctagcaatacagggaggctcccggggcctggacaggcgggctcggaggctacccgctgtggccggtgccagctgcccttgcagggtgggtgagctctcaggccgagagccttatttacctagtgcaaaaactgtaaaagtgtacagactcttcacagatttttatcttaattgcaagtctgccgattttgtaaatgttcttggtgtttgactgtaatgtaactatctcacctaatggttgtacatatcctttggtcctggtgctgccgagggctggccgggactgctgctctcccaagggttttattttatttctgaatctagagaacagtattgggcaggaggaaaaggcttggtgtctgcggggggtgtcttccctgcctgtggcatttgtgtgttggctttgcagctgctgtctgagtagtggccactggggtgccttcactgggccagtcaacggggggctcctgcccaggccacagagaacctgagttcccgggagctgggccctgcctgcagccagggctggggttgccagaggccctggagggaaggacagtccctgctggggaagaacagccccggggccccctggtcaccgagactcagcctctgctggagaaagccacgccctccctgctagcacagaggcctgactgacttttttgcttaacttccatgttctgggtgatggaaactgccaaacctcctgtcagtgaggactctttccgactgcccagaaagtgggggtggaggaccgaggctacagctccacacgccccggtcccccagagcatctgccccaggtacacctccccctgcgccccgcacgactgcgggagccagactgtccagggaaacagcctctctcttttctacacactcagccacaaagccccccagctcccacaccgcgtcccagctcccctcttttgtaagtatgtgaaaaggaaaaaatgcaaacgttggagtttgggctggagctcctccctccagctgcgacttttaactatgtaataatgtacagaggaagctgttggtgttctaagactctgtgtggctgtgcaatttctgtacatttgcaattagaaatattaaagatttatttagctattttaagcccga

SEQ ID NO: 345975 - DNA, 6126 bp, Homo sapiens
tgttcctcttctttcgtgttgtgtcagaagccatgatttccagtcttctcatctggaagatgaaggaaaagatagacccgaccccacagggttctgaggctcaaactgaaagcctggtggtggggcacctgtgacaggtcccatctgatgccgaggctgaaggagtctcgctcccacgagtccctgctcagccccagcagtgcggtggaggcgctggacctcagcatggaggaagaggtggtcatcaagcccgtgcacagcagcatccttggccaggactactgcttcgaggtgacgacgtcatcaggaagcaagtgcttttcctgccggtctgcagctgagcgggataagtggatggagaacctccggcgagcggtgcatcccaacaaggacaacagccggcgtgtggagcacatcctgaagctgtgggtgatcgaggccaaggacctgccagccaagaagaagtacctgtgcgagctgtgcctggacgatgtgctctatgcccgcaccacgggcaagctcaagacggacaatgttttctggggcgagcacttcgagttccacaacttgccgcctctgcgcacggtcactgtccacctgtaccgggagaccgacaagaagaagaagaaggagcgcaacagttacctgggcctggtgagcctacctgctgcctcggtggccgggcggcagttcgtggagaagtggtacccggtggtgacgcccaaccccaagggcggcaagggccctggacccatgatccgcatcaaggcgcgctaccaaaccatcaccatcctgcccatggagatgtacaaagagttcgctgagcacatcaccaaccactacctggggctgtgtgcagccctcgagcccatcctcagtgccaagaccaaggaggagatggcatctgccctggtgcacatcctgcagagcacgggcaaggtgaaggacttcctgacagacctgatgatgtcagaggtggaccgctgcggggacaacgagcacctcatcttccgggagaacacactggccaccaaggccattgaggagtacctcaagctagtgggccagaagtacctgcaggacgccctaggtgagttcatcaaagcgctgtatgagtcagatgagaactgcgaagtggatcccagcaagtgctcggccgctgacctcccagagcaccagggcaacctcaagatgtgctgcgagctggccttctgcaagatcatcaactcctactgtgtcttcccacgggagttgaaagaggtgtttgcctcgtggaggcaggagtgcagcagtcgcggccgcccggacatcagtgagcggctcatcagcgcctccctcttcctgcgcttcctctgcccagccatcatgtcgccctcactcttcaacctgctgcaggagtaccctgatgaccgcactgcccgcaccctcaccctcatcgccaaggtcacccagaacctggccaactttgccaaatttggcagcaaggaggaatacatgtccttcatgaaccagttcctagagcatgagtggaccaacatgcagcgcttcctgctggagatctccaaccccgagaccctctccaatacagccggcttcgagggctacatcgacctgggccgcgagctctccagcctgcactcactgctctgggaggccgtcagccagctggagcagagcatagtatccaaactgggacccctgcctcggatcctgagggacgtccacacagcactgagcaccccaggtagcgggcagctcccagggaccaatgacctggcctccacaccgggctctggcagcagcagcatctcagctgggctgcagaagatggtgattgagaacgatctttccggtctgatagatttcacccggttaccgtctccaacccccgaaaacaaggacttgttttttgtcacaaggtcctccggggtccagccctcacctgcccgcagctcgagttactcggaagccaacgagcctgatcttcagatggccaacggtggcaagagcctctccatggtggacctccaggacgcccgcacgctggatggggaggcaggctccccggcgggccccgacgtcctccccacagatgggcaggccgctgcagctcagctggtggccgggtggccggcccgggcaaccccagtgaacctggcagggctggccacggtgcggcgggcaggccagacaccaaccacaccaggcacctccgagggcgcgccaggccggccccagctgttggcaccgctctccttccagaaccctgtgtaccagatggcggctggcctgccgctgtcaccccgtggccttggcgactcaggctctgagggccacagctccctgagctcacacagcaacagcgaggagttggcggctgctgccaagctgggaagtttcagcactgccgcggaggagctggctcggcggcccggtgagctggcacggcgacagatgtcactgactgaaaaaggcgggcagcccacggtgccacggcagaacagtgctggcccccagaggaggatcgaccagcctccgcccccacccccgccgccacctcctgccccccgcggccggacgccccccaacctgctgagcaccctgcagtacccaagaccctcaagcggaaccctggcgtcggcctcacctgattgggtgggccccagtacccgcctgaggcagcagtcctcttcctccaagggggacagcccagaactgaagccacgggcagtgcacaagcagggcccttcacctgtgagccccaatgccctggaccgcacagccgcttggctcttgaccatgaacgcgcagttgttagaagacgagggcctgggcccagaccccccccacagggataggctaaggagtaaggacgagctcagccaagcagaaaaggacctggcggtgctgcaggacaagctgcgaatctccaccaagaagctggaggagtatgagaccctgttcaagtgccaggaggagacgacgcagaagctggtgctggagtaccaggcacggctggaggagggcgaggagcggctgcggcggcagcaggaggacaaggacatccagatgaagggcatcatcagcaggttgatgtccgtggaggaagaactgaagaaggaccacgcagagatgcaagcggctgtggactccaaacagaagatcattgatgcccaggagaagcgcattgcctcgttggatgccgccaatgcccgcctcatgagtgccctgacccagctgaaagagaggtacagcatgcaagcccgtaacggcatctcccccaccaaccccaccaaattgcagattactgagaacggcgagttcagaaacagcagcaattgttaacctgcctgaggagggaggaagctacccaaggagagggggactatggtggccaagggcagggtctcggcctggggaggcacccacggttgcagccccagcgcgggtgtcaggaggccgagcctcccctccctgccgctgtccaggaggcggccgcagagggagccaccagagactgaagcagcgtgaggcgaggtcaccagccgctccctgtggggtgcgggcagaagagactgcacgctggggagtggggacagcctgatggggcagggggcctgccaaaaatatgtctgttggttcctgaatgtggtgtgtccttgtcctcctggatctggccgagtgcatgtgtccccccacacctgtgccagggagggggcttcctggaggggggattcaagggctaggggcctacacctgtggcttcccctcgcctccttggggggcccgggactccctggcagccaggccctgtcatgtgggacctggcacttggcagatcagttggcaggcaggaagataggaggacacagagcaggaggtcagtgtcccctgcctgtctccatccgaagcacctgccactgcatgcagcctgttgggaccttcctggctgtgaggaactgaggattcctacccacccaccccctctgaacctgtccccagagcaccacctgctaccttcttccctgccttagttgtattgccagatagacccagtgagggccatggctttttcttgtgagctcttgtccctgtggggaggacccacagcttcccacacctcccacacaggcccaggctgatgctctagggctcccagaagccagagatctgggcggatctggccagatggctctgagcactgtatctgccttctcctggggcccagcacacccagggcacagtggtcctgtagggagtgccacctggtgctcaccctgaaagaaaaggtgatccttcctctgagtgatggtttaaaaaaagattctaacgcctgcaggccctgagaaggtggataactgtgattttttttcctttcacagtatgcattagaaacaaaagcccgcttgctcgcttgctggaacacaggggccttttaagttgagcgtgcgcactgcatgggaaatagcggccctggaggatgttagacttgctccctctccaagacagcagcagcctgcacctgccccgtgtgtgtggccggcctcctcctcacccttcccggcccccggccaaggacccaggcgctgcatacaggggaggggcgcaccccacagctggggccggttttcctcagctctaggctgttctgtagcttatctgcccctcccccactttcaagacagatgagcaggagcttgggtctctctcggcccctgtctgttcccagcccctgcagattctgagcaaaggccctgggtaagaagggtgggagtggggcctttgccagcagagccagggcagggcgagctgcaggaatcacccctctgcccctgcagctggaatgtgccacagaggccccacctgaagggtggatgtgctggaggggtggcccagagccatactgcgtccaccctgagctcggggacaggtgacagtggctgctctgggaaggggcttttagatgtaacctacaattcagttaggctagagacagatgctggtggaggaagggctgggccaccagggatcacagaccacaggaagatgggaggtggaagcagaggccctgcccccaccccttcctgtctcactcttctgtcttgtccccacccatgcgccttcgtgcctgagaccagggtggccacacaggcagggcctggctccagtctcatcctcccattgcccagtgagccctgctcttctctccccagccccctcccaccgctgcctcgtagagtgacctcggacagagcccccctagcaatacagggaggctcccggggcctggacaggcgggctcggaggctacccgctgtggccggtgccagctgcccttgcagggtgggtgagctctcaggccgagagccttatttacctagtgcaaaaactgtaaaagtgtacagactcttcacagatttttatcttaattgcaagtctgccgattttgtaaatgttcttggtgtttgactgtaatgtaactatctcacctaatggttgtacatatcctttggtcctggtgctgccgagggctggccgggactgctgctctcccaagggttttattttatttctgaatctagagaacagtattgggcaggaggaaaaggcttggtgtctgcggggggtgtcttccctgcctgtggcatttgtgtgttggctttgcagctgctgtctgagtagtggccactggggtgccttcactgggccagtcaacggggggctcctgcccaggccacagagaacctgagttcccgggagctgggccctgcctgcagccagggctggggttgccagaggccctggagggaaggacagtccctggccccgcacgactgcgggagccagactgtccagggaaacagcctctctcttttctacacactcagccacaaagccccccagctcccacaccgcgtcccagctcccctcttttgtaagtatgtgaaaaggaaaaaatgcaaacgttggagtttgggctggagctcctccctccagctgcgacttttaactatgtaataatgtacagaggaagctgttggtgttctaagactctgtgtggctgtgcaatttctgtacatttgcaattagaaatattaaagatttatttagctattttaagcccga

SEQ ID NO: 345976 - DNA, 6059 bp, Homo sapiens
tgttcctcttctttcgtgttgtgtcagaagccatgatttccagtcttctcatctggaagatgaaggaaaagatagacccgaccccacagggttctgaggctcaaactgaaagcctggtggtggggcacctgtgacaggtcccatctgatgccgaggctgaaggagtctcgctcccacgagtccctgctcagccccagcagtgcggtggaggcgctggacctcagcatggaggaagaggtggtcatcaagcccgtgcacagcagcatccttggccaggactactgcttcgaggtgacgacgtcatcaggaagcaagtgcttttcctgccggtctgcagctgagcgggataagtggatggagaacctccggcgagcggtgcatcccaacaaggacaacagccggcgtgtggagcacatcctgaagctgtgggtgatcgaggccaaggacctgccagccaagaagaagtacctgtgcgagctgtgcctggacgatgtgctctatgcccgcaccacgggcaagctcaagacggacaatgttttctggggcgagcacttcgagttccacaacttgccgcctctgcgcacggtcactgtccacctgtaccgggagaccgacaagaagaagaagaaggagcgcaacagttacctgggcctggtgagcctacctgctgcctcggtggccgggcggcagttcgtggagaagtggtacccggtggtgacgcccaaccccaagggcggcaagggccctggacccatgatccgcatcaaggcgcgctaccaaaccatcaccatcctgcccatggagatgtacaaagagttcgctgagcacatcaccaaccactacctggggctgtgtgcagccctcgagcccatcctcagtgccaagaccaaggaggagatggcatctgccctggtgcacatcctgcagagcacgggcaaggtgaaggacttcctgacagacctgatgatgtcagaggtggaccgctgcggggacaacgagcacctcatcttccgggagaacacactggccaccaaggccattgaggagtacctcaagctagtgggccagaagtacctgcaggacgccctaggtgagttcatcaaagcgctgtatgagtcagatgagaactgcgaagtggatcccagcaagtgctcggccgctgacctcccagagcaccagggcaacctcaagatgtgctgcgagctggccttctgcaagatcatcaactcctactgtgtcttcccacgggagttgaaagaggtgtttgcctcgtggaggcaggagtgcagcagtcgcggccgcccggacatcagtgagcggctcatcagcgcctccctcttcctgcgcttcctctgcccagccatcatgtcgccctcactcttcaacctgctgcaggagtaccctgatgaccgcactgcccgcaccctcaccctcatcgccaaggtcacccagaacctggccaactttgccaaatttggcagcaaggaggaatacatgtccttcatgaaccagttcctagagcatgagtggaccaacatgcagcgcttcctgctggagatctccaaccccgagaccctctccaatacagccggcttcgagggctacatcgacctgggccgcgagctctccagcctgcactcactgctctgggaggccgtcagccagctggagcagagcatagtatccaaactgggacccctgcctcggatcctgagggacgtccacacagcactgagcaccccaggtagcgggcagctcccagggaccaatgacctggcctccacaccgggctctggcagcagcagcatctcagctgggctgcagaagatggtgattgagaacgatctttccggtctgatagatttcacccggttaccgtctccaacccccgaaaacaaggacttgttttttgtcacaaggtcctccggggtccagccctcacctgcccgcagctcgagttactcggaagccaacgagcctgatcttcagatggccaacggtggcaagagcctctccatggtggacctccaggacgcccgcacgctggatggggaggcaggctccccggcgggccccgacgtcctccccacagatgggcaggccgctgcagctcagctggtggccgggtggccggcccgggcaaccccagtgaacctggcagggctggccacggtgcggcgggcaggccagacaccaaccacaccaggcacctccgagggcgcgccaggccggccccagctgttggcaccgctctccttccagaaccctgtgtaccagatggcggctggcctgccgctgtcaccccgtggccttggcgactcaggctctgagggccacagctccctgagctcacacagcaacagcgaggagttggcggctgctgccaagctgggaagtttcagcactgccgcggaggagctggctcggcggcccggtgagctggcacggcgacagatgtcactgactgaaaaaggcgggcagcccacggtgccacggcagaacagtgctggcccccagaggaggatcgaccagcctccgcccccacccccgccgccacctcctgccccccgcggccggacgccccccaacctgctgagcaccctgcagtacccaagaccctcaagcggaaccctggcgtcggcctcacctgattgggtgggccccagtacccgcctgaggcagcagtcctcttcctccaagggggacagcccagaactgaagccacgggcagtgcacaagcagggcccttcacctgtgagccccaatgccctggaccgcacagccgcttggctcttgaccatgaacgcgcagttgttagaagacgagggcctgggcccagaccccccccacagggataggctaaggagtaaggacgagctcagccaagcagaaaaggacctggcggtgctgcaggacaagctgcgaatctccaccaagaagctggaggagtatgagaccctgttcaagtgccaggaggagacgacgcagaagctggtgctggagtaccaggcacggctggaggagggcgaggagcggctgcggcggcagcaggaggacaaggacatccagatgaagggcatcatcagcaggttgatgtccgtggaggaagaactgaagaaggaccacgcagagatgcaagcggctgtggactccaaacagaagatcattgatgcccaggagaagcgcattgcctcgttggatgccgccaatgcccgcctcatgagtgccctgacccagctgaaagagaggtacagcatgcaagcccgtaacggcatctcccccaccaaccccaccaaattgcagattactgagaacggcgagttcagaaacagcagcaattgttaacctgcctgaggagggaggaagctacccaaggagagggggactatggtggccaagggcagggtctcggcctggggaggcacccacggttgcagccccagcgcgggtgtcaggaggccgagcctcccctccctgccgctgtccaggaggcggccgcagagggagccaccagagactgaagcagcgtgaggcgaggtcaccagccgctccctgtggggtgcgggcagaagagactgcacgctggggagtggggacagcctgatggggcagggggcctgccaaaaatatgtctgttggttcctgaatgtggtgtgtccttgtcctcctggatctggccgagtgcatgtgtccccccacacctgtgccagggagggggcttcctggaggggggattcaagggctaggggcctacacctgtggcttcccctcgcctccttggggggcccgggactccctggcagccaggccctgtcatgtgggacctggcacttggcagatcagttggcaggcaggaagataggaggacacagagcaggaggtcagtgtcccctgcctgtctccatccgaagcacctgccactgcatgcagcctgttgggaccttcctggctgtgaggaactgaggattcctacccacccaccccctctgaacctgtccccagagcaccacctgctaccttcttccctgccttagttgtattgccagatagacccagtgagggccatggctttttcttgtgagctcttgtccctgtggggaggacccacagcttcccacacctcccacacaggcccaggctgatgctctagggctcccagaagccagagatctgggcggatctggccagatggctctgagcactgtatctgccttctcctggggcccagcacacccagggcacagtggtcctgtagggagtgccacctggtgctcaccctgaaagaaaaggtgatccttcctctgagtgatggtttaaaaaaagattctaacgcctgcaggccctgagaaggtggataactgtgattttttttcctttcacagtatgcattagaaacaaaagcccgcttgctcgcttgctggaacacaggggccttttaagttgagcgtgcgcactgcatgggaaatagcggccctggaggatgttagacttgctccctctccaagacagcagcagcctgcacctgccccgtgtgtgtggccggcctcctcctcacccttcccggcccccggccaaggacccaggcgctgcatacaggggaggggcgcaccccacagctggggccggttttcctcagctctaggctgttctgtagcttatctgcccctcccccactttcaagacagatgagcaggagcttgggtctctctcggcccctgtctgttcccagcccctgcagattctgagcaaaggccctgggtaagaagggtgggagtggggcctttgccagcagagccagggcagggcgagctgcaggaatcacccctctgcccctgcagctggaatgtgccacagaggccccacctgaagggtggatgtgctggaggggtggcccagagccatactgcgtccaccctgagctcggggacaggtgacagtggctgctctgggaaggggcttttagatgtaacctacaattcagttaggctagagacagatgctggtggaggaagggctgggccaccagggatcacagaccacaggaagatgggaggtggaagcagaggccctgcccccaccccttcctgtctcactcttctgtcttgtccccacccatgcgccttcgtgcctgagaccagggtggccacacaggcagggcctggctccagtctcatcctcccattgcccagtgagccctgctcttctctccccagccccctcccaccgctgcctcgtagagtgacctcggacagagcccccctagcaatacagggaggctcccggggcctggacaggcgggctcggaggctacccgctgtggccggtgccagctgcccttgcagggtgggtgagctctcaggccgagagccttatttacctagtgcaaaaactgtaaaagtgtacagactcttcacagatttttatcttaattgcaagtctgccgattttgtaaatgttcttggtgtttgactgtaatgtaactatctcacctaatggttgtacatatcctttggtcctggtgctgccgagggctggccgggactgctgctctcccaagggttttattttatttctgaatctagagaacagtattgggcaggaggaaaaggcttggtgtctgcggggggtgtcttccctgcctgtggcatttgtgtgttggctttgcagctgctgtctgagtagtggccactggggtgccttcactgggccagtcaacggggggctcctgcccaggccacagagaacctgagttcccgggagctgggccctgcctgcaccagactgtccagggaaacagcctctctcttttctacacactcagccacaaagccccccagctcccacaccgcgtcccagctcccctcttttgtaagtatgtgaaaaggaaaaaatgcaaacgttggagtttgggctggagctcctccctccagctgcgacttttaactatgtaataatgtacagaggaagctgttggtgttctaagactctgtgtggctgtgcaatttctgtacatttgcaattagaaatattaaagatttatttagctattttaagcccga

SEQ ID NO: 345977 - DNA, 5891 bp, Homo sapiens
tgttcctcttctttcgtgttgtgtcagaagccatgatttccagtcttctcatctggaagatgaaggaaaagatagacccgaccccacagggttctgaggctcaaactgaaagcctggtggtggggcacctgtgacaggtcccatctgatgccgaggctgaaggagtctcgctcccacgagtccctgctcagccccagcagtgcggtggaggcgctggacctcagcatggaggaagaggtggtcatcaagcccgtgcacagcagcatccttggccaggactactgcttcgaggtgacgacgtcatcaggaagcaagtgcttttcctgccggtctgcagctgagcgggataagtggatggagaacctccggcgagcggtgcatcccaacaaggacaacagccggcgtgtggagcacatcctgaagctgtgggtgatcgaggccaaggacctgccagccaagaagaagtacctgtgcgagctgtgcctggacgatgtgctctatgcccgcaccacgggcaagctcaagacggacaatgttttctggggcgagcacttcgagttccacaacttgccgcctctgcgcacggtcactgtccacctgtaccgggagaccgacaagaagaagaagaaggagcgcaacagttacctgggcctggtgagcctacctgctgcctcggtggccgggcggcagttcgtggagaagtggtacccggtggtgacgcccaaccccaagggcggcaagggccctggacccatgatccgcatcaaggcgcgctaccaaaccatcaccatcctgcccatggagatgtacaaagagttcgctgagcacatcaccaaccactacctggggctgtgtgcagccctcgagcccatcctcagtgccaagaccaaggaggagatggcatctgccctggtgcacatcctgcagagcacgggcaaggtgaaggacttcctgacagacctgatgatgtcagaggtggaccgctgcggggacaacgagcacctcatcttccgggagaacacactggccaccaaggccattgaggagtacctcaagctagtgggccagaagtacctgcaggacgccctaggtgagttcatcaaagcgctgtatgagtcagatgagaactgcgaagtggatcccagcaagtgctcggccgctgacctcccagagcaccagggcaacctcaagatgtgctgcgagctggccttctgcaagatcatcaactcctactgtgtcttcccacgggagttgaaagaggtgtttgcctcgtggaggcaggagtgcagcagtcgcggccgcccggacatcagtgagcggctcatcagcgcctccctcttcctgcgcttcctctgcccagccatcatgtcgccctcactcttcaacctgctgcaggagtaccctgatgaccgcactgcccgcaccctcaccctcatcgccaaggtcacccagaacctggccaactttgccaaatttggcagcaaggaggaatacatgtccttcatgaaccagttcctagagcatgagtggaccaacatgcagcgcttcctgctggagatctccaaccccgagaccctctccaatacagccggcttcgagggctacatcgacctgggccgcgagctctccagcctgcactcactgctctgggaggccgtcagccagctggagcagagcatagtatccaaactgggacccctgcctcggatcctgagggacgtccacacagcactgagcaccccaggtagcgggcagctcccagggaccaatgacctggcctccacaccgggctctggcagcagcagcatctcagctgggctgcagaagatggtgattgagaacgatctttccggtctgatagatttcacccggttaccgtctccaacccccgaaaacaaggacttgttttttgtcacaaggtcctccggggtccagccctcacctgcccgcagctcgagttactcggaagccaacgagcctgatcttcagatggccaacggtggcaagagcctctccatggtggacctccaggacgcccgcacgctggatggggaggcaggctccccggcgggccccgacgtcctccccacagatgggcaggccgctgcagctcagctggtggccgggtggccggcccgggcaaccccagtgaacctggcagggctggccacggtgcggcgggcaggccagacaccaaccacaccaggcacctccgagggcgcgccaggccggccccagctgttggcaccgctctccttccagaaccctgtgtaccagatggcggctggcctgccgctgtcaccccgtggccttggcgactcaggctctgagggccacagctccctgagctcacacagcaacagcgaggagttggcggctgctgccaagctgggaagtttcagcactgccgcggaggagctggctcggcggcccggtgagctggcacggcgacagatgtcactgactgaaaaaggcgggcagcccacggtgccacggcagaacagtgctggcccccagaggaggatcgaccagcctccgcccccacccccgccgccacctcctgccccccgcggccggacgccccccaacctgctgagcaccctgcagtacccaagaccctcaagcggaaccctggcgtcggcctcacctgattgggtgggccccagtacccgcctgaggcagcagtcctcttcctccaagggggacagcccagaactgaagccacgggcagtgcacaagcagggcccttcacctgtgagccccaatgccctggaccgcacagccgcttggctcttgaccatgaacgcgcagttgttagaagacgagggcctgggcccagaccccccccacagggataggctaaggagtaaggacgagctcagccaagcagaaaaggacctggcggtgctgcaggacaagctgcgaatctccaccaagaagctggaggagtatgagaccctgttcaagtgccaggaggagacgacgcagaagctggtgctggagtaccaggcacggctggaggagggcgaggagcggctgcggcggcagcaggaggacaaggacatccagatgaagggcatcatcagcaggttgatgtccgtggaggaagaactgaagaaggaccacgcagagatgcaagcggctgtggactccaaacagaagatcattgatgcccaggagaagcgcattgcctcgttggatgccgccaatgcccgcctcatgagtgccctgacccagctgaaagagaggtacagcatgcaagcccgtaacggcatctcccccaccaaccccaccaaattgcagattactgagaacggcgagttcagaaacagcagcaattgttaacctgcctgaggagggaggaagctacccaaggagagggggactatggtggccaagggcagggtctcggcctggggaggcacccacggttgcagccccagcgcgggtgtcaggaggccgagcctcccctccctgccgctgtccaggaggcggccgcagagggagccaccagagactgaagcagcgtgaggcgaggtcaccagccgctccctgtggggtgcgggcagaagagactgcacgctggggagtggggacagcctgatggggcagggggcctgccaaaaatatgtctgttggttcctgaatgtggtgtgtccttgtcctcctggatctggccgagtgcatgtgtccccccacacctgtgccagggagggggcttcctggaggggggattcaagggctaggggcctacacctgtggcttcccctcgcctccttggggggcccgggactccctggcagccaggccctgtcatgtgggacctggcacttggcagatcagttggcaggcaggaagataggaggacacagagcaggaggtcagtgtcccctgcctgtctccatccgaagcacctgccactgcatgcagcctgttgggaccttcctggctgtgaggaactgaggattcctacccacccaccccctctgaacctgtccccagagcaccacctgctaccttcttccctgccttagttgtattgccagatagacccagtgagggccatggctttttcttgtgagctcttgtccctgtggggaggacccacagcttcccacacctcccacacaggcccaggctgatgctctagggctcccagaagccagagatctgggcggatctggccagatggctctgagcactgtatctgccttctcctggggcccagcacacccagggcacagtggtcctgtagggagtgccacctggtgctcaccctgaaagaaaaggtgatccttcctctgagtgatggtttaaaaaaagattctaacgcctgcaggccctgagaaggtggataactgtgattttttttcctttcacagtatgcattagaaacaaaagcccgcttgctcgcttgctggaacacaggggccttttaagttgagcgtgcgcactgcatgggaaatagcggccctggaggatgttagacttgctccctctccaagacagcagcagcctgcacctgccccgtgtgtgtggccggcctcctcctcacccttcccggcccccggccaaggacccaggcgctgcatacaggggaggggcgcaccccacagctggggccggttttcctcagctctaggctgttctgtagcttatctgcccctcccccactttcaagacagatgagcaggagcttgggtctctctcggcccctgtctgttcccagcccctgcagattctgagcaaaggccctgggtaagaagggtgggagtggggcctttgccagcagagccagggcagggcgagctgcaggaatcacccctctgcccctgcagctggaatgtgccacagaggccccacctgaagggtggatgtgctggaggggtggcccagagccatactgcgtccaccctgagctcggggacaggtgacagtggctgctctgggaaggggcttttagatgtaacctacaattcagttaggctagagacagatgctggtggaggaagggctgggccaccagggatcacagaccacaggaagatgggaggtggaagcagaggccctgcccccaccccttcctgtctcactcttctgtcttgtccccacccatgcgccttcgtgcctgagaccagggtggccacacaggcagggcctggctccagtctcatcctcccattgcccagtgagccctgctcttctctccccagccccctcccaccgctgcctcgtagagtgacctcggacagagcccccctagcaatacagggaggctcccggggcctggacaggcgggctcggaggctacccgctgtggccggtgccagctgcccttgcagggtgggtgagctctcaggccgagagccttatttacctagtgcaaaaactgtaaaagtgtacagactcttcacagatttttatcttaattgcaagtctgccgattttgtaaatgttcttggtgtttgactgtaatgtaactatctcacctaatggttgtacatatcctttggtcctggtgctgccgagggctggccgggactgctgctctcccaagggttttattttatttctgaatctagagaacagtattgggcaggaggaaaaggcttggtgtctgcggggggtgtcttccctgcctgtggcatttgtgtgttggctttgcagctgctgtctgagtagtggccactggggtgccttcactgggccagtcaacggggggctcctgcccaggccacagagaacctgactcctccctccagctgcgacttttaactatgtaataatgtacagaggaagctgttggtgttctaagactctgtgtggctgtgcaatttctgtacatttgcaattagaaatattaaagatttatttagctattttaagcccga

SEQ ID NO: 345978 - DNA, 1312 bp, Homo sapiens
tgttcctcttctttcgtgttgtgtcagaagccatgatttccagtcttctcatctggaagatgaaggaaaagatagacccgaccccacagggttctgaggctcaaactgaaagcctggtggtggggcacctgtgacaggtcccatctgatgccgaggctgaaggagtctcgctcccacgagtccctgctcagccccagcagtgcggtggaggcgctggacctcagcatggaggaagaggtggtcatcaagcccgtgcacagcagcatccttggccaggactactgcttcgaggtgacgacgtcatcaggaagcaagtgcttttcctgccggtctgcagctgagcgggataagtggatggagaacctccggcgagcggtgcatcccaacaaggacaacagccggcgtgtggagcacatcctgaagctgtgggtgatcgaggccaaggacctgccagccaagaagaagtacctgtgcgagctgtgcctggacgatgtgctctatgcccgcaccacgggcaagctcaagacggacaatgttttctggggcgagcacttcgagttccacaacttgccgcctctgcgcacggtcactgtccacctgtaccgggagaccgacaagaagaagaagaaggagcgcaacagttacctgggcctggtgagcctacctgctgcctcggtggccgggcggcagttcgtggagaagtggtacccggtggtgacgcccaaccccaagggcggcaagggccctggacccatgatccgcatcaaggcgcgctaccaaaccatcaccatcctgcccatggagatgtacaaagagttcgctgagcacatcaccaaccactacctggggctgtgtgcagccctcgagcccatcctcagtgccaagaccaaggaggagatggcatctgccctggtgcacatcctgcagagcacgggcaaggtgaaggacttcctgacagacctgatgatgtcagaggtggaccgctgcggggacaacgagcacctcatcttccgggagaacacactggccaccaaggccattgaggagtacctcaagctagtgggccagaagtacctgcaggacgccctaggtgagttcatcaaagcgctgtatgagtcagatgagaactgcgaagtggatcccagcaagtgctctgcaggatgtgcaccagggcagatgccatctcctccttggtcttggcaccgaggatgggctcgagggctgcacacagccccaggtagtggttggtgatgtgctcagcgaactctttgtacatctccatgggcaggatggtgatggtttggtaacgcac

SEQ ID NO: 345979 - DNA, 6383 bp, Homo sapiens
tgttcctcttctttcgtgttgtgtcagaagccatgatttccagtcttctcatctggaagatgaaggaaaagatagacccgaccccacagggttctgaggctcaaactgaaagcctggtggtggggcacctgtgacaggtcccatctgatgccgaggctgaaggagtctcgctcccacgagtccctgctcagccccagcagtgcggtggaggcgctggacctcagcatggaggaagaggtggtcatcaagcccgtgcacagcagcatccttggccaggactactgcttcgaggtgacgacgtcatcaggaagcaagtgcttttcctgccggtctgcagctgagcgggataagtggatggagaacctccggcgagcggtgcatcccaacaaggacaacagccggcgtgtggagcacatcctgaagctgtgggtgatcgaggccaaggacctgccagccaagaagaagtacctgtgcgagctgtgcctggacgatgtgctctatgcccgcaccacgggcaagctcaagacggacaatgttttctggggcgagcacttcgagttccacaacttgccgcctctgcgcacggtcactgtccacctgtaccgggagaccgacaagaagaagaagaaggagcgcaacagttacctgggcctggtgagcctacctgctgcctcggtggccgggcggcagttcgtggagaagtggtacccggtggtgacgcccaaccccaagggcggcaagggccctggacccatgatccgcatcaaggcgcgctaccaaaccatcaccatcctgcccatggagatgtacaaagagttcgctgagcacatcaccaaccactacctggggctgtgtgcagccctcgagcccatcctcagtgccaagaccaaggaggagatggcatctgccctggtgcacatcctgcagagcacgggcaaggtgaaggacttcctgacagacctgatgatgtcagaggtggaccgctgcggggacaacgagcacctcatcttccgggagaacacactggccaccaaggccattgaggagtacctcaagctagtgggccagaagtacctgcaggacgccctaggtgagttcatcaaagcgctgtatgagtcagatgagaactgcgaagtggatcccagcaagtgctcggccgctgacctcccagagcaccagggcaacctcaagatgtgctgcgagctggccttctgcaagatcatcaactcctactgtgtcttcccacgggagttgaaagaggtgtttgcctcgtggaggcaggagtgcagcagtcgcggccgcccggacatcagtgagcggctcatcagcgcctccctcttcctgcgcttcctctgcccagccatcatgtcgccctcactcttcaacctgctgcaggagtaccctgatgaccgcactgcccgcaccctcaccctcatcgccaaggtcacccagaacctggccaactttgccaaatttggcagcaaggaggaatacatgtccttcatgaaccagttcctagagcatgagtggaccaacatgcagcgcttcctgctggagatctccaaccccgagaccctctccaatacagccggcttcgagggctacatcgacctgggccgcgagctctccagcctgcactcactgctctgggaggccgtcagccagctggagcagagcatagtatccaaactgggacccctgcctcggatcctgagggacgtccacacagcactgagcaccccaggtagcgggcagctcccagggaccaatgacctggcctccacaccgggctctggcagcagcagcatctcagctgggctgcagaagatggtgattgagaacgatctttccggtctgatagatttcacccggttaccgtctccaacccccgaaaacaaggacttgttttttgtcacaaggtcctccggggtccagccctcacctgcccgcagctcgagttactcggaagccaacgagcctgatcttcagatggccaacggtggcaagagcctctccatggtggacctccaggacgcccgcacgctggatggggaggcaggctccccggcgggccccgacgtcctccccacagatgggcaggccgctgcagctcagctggtggccgggtggccggcccgggcaaccccagtgaacctggcagggctggccacggtgcggcgggcaggccagacaccaaccacaccaggcacctccgagggcgcgccaggccggccccagctgttggcaccgctctccttccagaaccctgtgtaccagatggcggctggcctgccgctgtcaccccgtggccttggcgactcaggctctgagggccacagctccctgagctcacacagcaacagcgaggagttggcggctgctgccaagctgggaagtttcagcactgccgcggaggagctggctcggcggcccggtgagctggcacggcgacagatgtcactgactgaaaaaggcgggcagcccacggtgccacggcagaacagtgctggcccccagaggaggatcgaccagcctccgcccccacccccgccgccacctcctgccccccgcggccggacgccccccaacctgctgagcaccctgcagtacccaagaccctcaagcggaaccctggcgtcggcctcacctgattgggtgggccccagtacccgcctgaggcagcagtcctcttcctccaagggggacagcccagaactgaagccacgggcagtgcacaagcagggcccttcacctgtgagccccaatgccctggaccgcacagccgcttggctcttgaccatgaacgcgcagttgttagaagacgagggcctgggcccagaccccccccacagggataggctaaggagtaaggacgagctcagccaagcagaaaaggacctggcggtgctgcaggacaagctgcgaatctccaccaagaagctggaggagtatgagaccctgttcaagtgccaggaggagacgacgcagaagctggtgctggagtaccaggcacggctggaggagggcgaggagcggctgcggcggcagcaggaggacaaggacatccagatgaagggcatcatcagcaggttgatgtccgtggaggaagaactgaagaaggaccacgcagagatgcaagcggctgtggactccaaacagaagatcattgatgcccaggagaagcgcattgcctcgttggatgccgccaatgcccgcctcatgagtgccctgacccagctgaaagagaggtacagcatgcaagcccgtaacggcatctcccccaccaaccccaccaaattgcagattactgagaacggcgagttcagaaacagcagcaattgttaacctgcctgaggagggaggaagctacccaaggagagggggactatggtggccaagggcagggtctcggcctggggaggcacccacggttgcagccccagcgcgggtgtcaggaggccgagcctcccctccctgccgctgtccaggaggcggccgcagagggagccaccagagactgaagcagcgtgaggcgaggtcaccagccgctccctgtggggtgcgggcagaagagactgcacgctggggagtggggacagcctgatggggcagggggcctgccaaaaatatgtctgttggttcctgaatgtggtgtgtccttgtcctcctggatctggccgagtgcatgtgtccccccacacctgtgccagggagggggcttcctggaggggggattcaagggctaggggcctacacctgtggcttcccctcgcctccttggggggcccgggactccctggcagccaggccctgtcatgtgggacctggcacttggcagatcagttggcaggcaggaagataggaggacacagagcaggaggtcagtgtcccctgcctgtctccatccgaagcacctgccactgcatgcagcctgttgggaccttcctggctgtgaggaactgaggattcctacccacccaccccctctgaacctgtccccagagcaccacctgctaccttcttccctgccttagttgtattgccagatagacccagtgagggccatggctttttcttgtgagctcttgtccctgtggggaggacccacagcttcccacacctcccacacaggcccaggctgatgctctagggctcccagaagccagagatctgggcggatctggccagatggctctgagcactgtatctgccttctcctggggcccagcacacccagggcacagtggtcctgtagggagtgccacctggtgctcaccctgaaagaaaaggtgatccttcctctgagtgatggtttaaaaaaagattctaacgcctgcaggccctgagaaggtggataactgtgattttttttcctttcacagtatgcattagaaacaaaagcccgcttgctcgcttgctggaacacaggggccttttaagttgagcgtgcgcactgcatgggaaatagcggccctggaggatgttagacttgctccctctccaagacagcagcagcctgcacctgccccgtgtgtgtggccggcctcctcctcacccttcccggcccccggccaaggacccaggcgctgcatacaggggaggggcgcaccccacagctggggccggttttcctcagctctaggctgttctgtagcttatctgcccctcccccactttcaagacagatgagcaggagcttgggtctctctcggcccctgtctgttcccagcccctgcagattctgagcaaaggccctgggtaagaagggtgggagtggggcctttgccagcagagccagggcagggcgagctgcaggaatcacccctctgcccctgcagctggaatgtgccacagaggccccacctgaagggtggatgtgctggaggggtggcccagagccatactgcgtccaccctgagctcggggacaggtgacagtggctgctctgggaaggggcttttagatgtaacctacaattcagttaggctagagacagatgctggtggaggaagggctgggccaccagggatcacagaccacaggaagatgggaggtggaagcagaggccctgcccccaccccttcctgtctcactcttctgtcttgtccccacccatgcgccttcgtgcctgagaccagggtggccacacaggcagggcctggctccagtctcatcctcccattgcccagtgagccctgctcttctctccccagccccctcccaccgctgcctcgtagagtgacctcggacagagcccccctagcaatacagggaggctcccggggcctggacaggcgggctcggaggctacccgctgtggccggtgccagctgcccttgcagggtgggtgagctctcaggccgagagccttatttacctagtgcaaaaactgtaaaagtgtacagactcttcacagatttttatcttaattgcaagtctgccgattttgtaaatgttcttggtgtttgactgtaatgtaactatctcacctaatggttgtacatatcctttggtcctggtgctgccgagggctggccgggactgctgctctcccaagggttttattttatttctgaatctagagaacagtattgggcaggaggaaaaggcttggtgtctgcggggggtgtcttccctgcctgtggcatttgtgtgttggctttgcagctgctgtctgagtagtggccactggggtgccttcactgggccagtcaacggggggctcctgcccaggccacagagaacctgagttcccgggagctgggccctgcctgcagccagggctggggttgccagaggccctggagggaaggacagtccctgctggggaagaacagccccggggccccctggtcaccgagactcagcctctgctggagaaagccacgccctccctgctagcacagaggcctgactgacttttttgcttaacttccatgttctgggtgatggaaactgccaaacctcctgtcagtgaggactctttccgactgcccagaaagtgggggtggaggaccgaggctacagctccacacgccccggtcccccagagcatctgccccaggtacacctccccctgcgccccgcacgactgcgggagccagactgtccagggaaacagcctctctcttttctacacactcagccacaaagccccccagctcccacaccgcgtcccagctcccctcttttgtaagtatgtgaaaaggaaaaaatgcaaacgttggagtttgggctggagctcctccctccagctgcgacttttaactatgtaataatgtacagaggaagctgttggtgttctaagactctgtgtggctgtgcaatttctgtacatttgcaattagaaatattaaagatttatttagctattttaagcccga

SEQ ID NO: 345980 - DNA, 6146 bp, Homo sapiens
tgttcctcttctttcgtgttgtgtcagaagccatgatttccagtcttctcatctggaagatgaaggaaaagatagacccgaccccacagggttctgaggctcaaactgaaagcctggtggtggggcacctgtgacaggtcccatctgatgccgaggctgaaggagtctcgctcccacgagtccctgctcagccccagcagtgcggtggaggcgctggacctcagcatggaggaagaggtggtcatcaagcccgtgcacagcagcatccttggccaggactactgcttcgaggtgacgacgtcatcaggaagcaagtgcttttcctgccggtctgcagctgagcgggataagtggatggagaacctccggcgagcggtgcatcccaacaaggacaacagccggcgtgtggagcacatcctgaagctgtgggtgatcgaggccaaggacctgccagccaagaagaagtacctgtgcgagctgtgcctggacgatgtgctctatgcccgcaccacgggcaagctcaagacggacaatgttttctggggcgagcacttcgagttccacaacttgccgcctctgcgcacggtcactgtccacctgtaccgggagaccgacaagaagaagaagaaggagcgcaacagttacctgggcctggtgagcctacctgctgcctcggtggccgggcggcagttcgtggagaagtggtacccggtggtgacgcccaaccccaagggcggcaagggccctggacccatgatccgcatcaaggcgcgctaccaaaccatcaccatcctgcccatggagatgtacaaagagttcgctgagcacatcaccaaccactacctggggctgtgtgcagccctcgagcccatcctcagtgccaagaccaaggaggagatggcatctgccctggtgcacatcctgcagagcacgggcaaggtgaaggacttcctgacagacctgatgatgtcagaggtggaccgctgcggggacaacgagcacctcatcttccgggagaacacactggccaccaaggccattgaggagtacctcaagctagtgggccagaagtacctgcaggacgccctaggtgagttcatcaaagcgctgtatgagtcagatgagaactgcgaagtggatcccagcaagtgctcggccgctgacctcccagagcaccagggcaacctcaagatgtgctgcgagctggccttctgcaagatcatcaactcctactgatttggcagcaaggaggaatacatgtccttcatgaaccagttcctagagcatgagtggaccaacatgcagcgcttcctgctggagatctccaaccccgagaccctctccaatacagccggcttcgagggctacatcgacctgggccgcgagctctccagcctgcactcactgctctgggaggccgtcagccagctggagcagagcatagtatccaaactgggacccctgcctcggatcctgagggacgtccacacagcactgagcaccccaggtagcgggcagctcccagggaccaatgacctggcctccacaccgggctctggcagcagcagcatctcagctgggctgcagaagatggtgattgagaacgatctttccggtctgatagatttcacccggttaccgtctccaacccccgaaaacaaggacttgttttttgtcacaaggtcctccggggtccagccctcacctgcccgcagctcgagttactcggaagccaacgagcctgatcttcagatggccaacggtggcaagagcctctccatggtggacctccaggacgcccgcacgctggatggggaggcaggctccccggcgggccccgacgtcctccccacagatgggcaggccgctgcagctcagctggtggccgggtggccggcccgggcaaccccagtgaacctggcagggctggccacggtgcggcgggcaggccagacaccaaccacaccaggcacctccgagggcgcgccaggccggccccagctgttggcaccgctctccttccagaaccctgtgtaccagatggcggctggcctgccgctgtcaccccgtggccttggcgactcaggctctgagggccacagctccctgagctcacacagcaacagcgaggagttggcggctgctgccaagctgggaagtttcagcactgccgcggaggagctggctcggcggcccggtgagctggcacggcgacagatgtcactgactgaaaaaggcgggcagcccacggtgccacggcagaacagtgctggcccccagaggaggatcgaccagcctccgcccccacccccgccgccacctcctgccccccgcggccggacgccccccaacctgctgagcaccctgcagtacccaagaccctcaagcggaaccctggcgtcggcctcacctgattgggtgggccccagtacccgcctgaggcagcagtcctcttcctccaagggggacagcccagaactgaagccacgggcagtgcacaagcagggcccttcacctgtgagccccaatgccctggaccgcacagccgcttggctcttgaccatgaacgcgcagttgttagaagacgagggcctgggcccagaccccccccacagggataggctaaggagtaaggacgagctcagccaagcagaaaaggacctggcggtgctgcaggacaagctgcgaatctccaccaagaagctggaggagtatgagaccctgttcaagtgccaggaggagacgacgcagaagctggtgctggagtaccaggcacggctggaggagggcgaggagcggctgcggcggcagcaggaggacaaggacatccagatgaagggcatcatcagcaggttgatgtccgtggaggaagaactgaagaaggaccacgcagagatgcaagcggctgtggactccaaacagaagatcattgatgcccaggagaagcgcattgcctcgttggatgccgccaatgcccgcctcatgagtgccctgacccagctgaaagagaggtacagcatgcaagcccgtaacggcatctcccccaccaaccccaccaaattgcagattactgagaacggcgagttcagaaacagcagcaattgttaacctgcctgaggagggaggaagctacccaaggagagggggactatggtggccaagggcagggtctcggcctggggaggcacccacggttgcagccccagcgcgggtgtcaggaggccgagcctcccctccctgccgctgtccaggaggcggccgcagagggagccaccagagactgaagcagcgtgaggcgaggtcaccagccgctccctgtggggtgcgggcagaagagactgcacgctggggagtggggacagcctgatggggcagggggcctgccaaaaatatgtctgttggttcctgaatgtggtgtgtccttgtcctcctggatctggccgagtgcatgtgtccccccacacctgtgccagggagggggcttcctggaggggggattcaagggctaggggcctacacctgtggcttcccctcgcctccttggggggcccgggactccctggcagccaggccctgtcatgtgggacctggcacttggcagatcagttggcaggcaggaagataggaggacacagagcaggaggtcagtgtcccctgcctgtctccatccgaagcacctgccactgcatgcagcctgttgggaccttcctggctgtgaggaactgaggattcctacccacccaccccctctgaacctgtccccagagcaccacctgctaccttcttccctgccttagttgtattgccagatagacccagtgagggccatggctttttcttgtgagctcttgtccctgtggggaggacccacagcttcccacacctcccacacaggcccaggctgatgctctagggctcccagaagccagagatctgggcggatctggccagatggctctgagcactgtatctgccttctcctggggcccagcacacccagggcacagtggtcctgtagggagtgccacctggtgctcaccctgaaagaaaaggtgatccttcctctgagtgatggtttaaaaaaagattctaacgcctgcaggccctgagaaggtggataactgtgattttttttcctttcacagtatgcattagaaacaaaagcccgcttgctcgcttgctggaacacaggggccttttaagttgagcgtgcgcactgcatgggaaatagcggccctggaggatgttagacttgctccctctccaagacagcagcagcctgcacctgccccgtgtgtgtggccggcctcctcctcacccttcccggcccccggccaaggacccaggcgctgcatacaggggaggggcgcaccccacagctggggccggttttcctcagctctaggctgttctgtagcttatctgcccctcccccactttcaagacagatgagcaggagcttgggtctctctcggcccctgtctgttcccagcccctgcagattctgagcaaaggccctgggtaagaagggtgggagtggggcctttgccagcagagccagggcagggcgagctgcaggaatcacccctctgcccctgcagctggaatgtgccacagaggccccacctgaagggtggatgtgctggaggggtggcccagagccatactgcgtccaccctgagctcggggacaggtgacagtggctgctctgggaaggggcttttagatgtaacctacaattcagttaggctagagacagatgctggtggaggaagggctgggccaccagggatcacagaccacaggaagatgggaggtggaagcagaggccctgcccccaccccttcctgtctcactcttctgtcttgtccccacccatgcgccttcgtgcctgagaccagggtggccacacaggcagggcctggctccagtctcatcctcccattgcccagtgagccctgctcttctctccccagccccctcccaccgctgcctcgtagagtgacctcggacagagcccccctagcaatacagggaggctcccggggcctggacaggcgggctcggaggctacccgctgtggccggtgccagctgcccttgcagggtgggtgagctctcaggccgagagccttatttacctagtgcaaaaactgtaaaagtgtacagactcttcacagatttttatcttaattgcaagtctgccgattttgtaaatgttcttggtgtttgactgtaatgtaactatctcacctaatggttgtacatatcctttggtcctggtgctgccgagggctggccgggactgctgctctcccaagggttttattttatttctgaatctagagaacagtattgggcaggaggaaaaggcttggtgtctgcggggggtgtcttccctgcctgtggcatttgtgtgttggctttgcagctgctgtctgagtagtggccactggggtgccttcactgggccagtcaacggggggctcctgcccaggccacagagaacctgagttcccgggagctgggccctgcctgcagccagggctggggttgccagaggccctggagggaaggacagtccctgctggggaagaacagccccggggccccctggtcaccgagactcagcctctgctggagaaagccacgccctccctgctagcacagaggcctgactgacttttttgcttaacttccatgttctgggtgatggaaactgccaaacctcctgtcagtgaggactctttccgactgcccagaaagtgggggtggaggaccgaggctacagctccacacgccccggtcccccagagcatctgccccaggtacacctccccctgcgccccgcacgactgcgggagccagactgtccagggaaacagcctctctcttttctacacactcagccacaaagccccccagctcccacaccgcgtcccagctcccctcttttgtaagtatgtgaaaaggaaaaaatgcaaacgttggagtttgggctggagctcctccctccagctgcgacttttaactatgtaataatgtacagaggaagctgttggtgttctaagactctgtgtggctgtgcaatttctgtacatttgcaattagaaatattaaagatttatttagctattttaagcccga

SEQ ID NO: 345981 - DNA, 6341 bp, Homo sapiens
tgttcctcttctttcgtgttgtgtcagaagccatgatttccagtcttctcatctggaagatgaaggaaaagatagacccgaccccacagggttctgaggctcaaactgaaagcctggtggtggggcacctgtgacaggtcccatctgatgccgaggctgaaggagtctcgctcccacgagtccctgctcagccccagcagtgcggtggaggcgctggacctcagcatggaggaagaggtggtcatcaagcccgtgcacagcagcatccttggccaggactactgcttcgaggtgacgacgtcatcaggaagcaagtgcttttcctgccggtctgcagctgagcgggataagtggatggagaacctccggcgagcggtgcatcccaacaaggacaacagccggcgtgtggagcacatcctgaagctgtgggtgatcgaggccaaggacctgccagccaagaagaagtacctgtgcgagctgtgcctggacgatgtgctctatgcccgcaccacgggcaagctcaagacggacaatgttttctggggcgagcacttcgagttccacaacttgccgcctctgcgcacggtcactgtccacctgtaccgggagaccgacaagaagaagaagaaggagcgcaacagttacctgggcctggtgagcctacctgctgcctcggtggccgggcggcagttcgtggagaagtggtacccggtggtgacgcccaaccccaagggcggcaagggccctggacccatgatccgcatcaaggcgcgctaccaaaccatcaccatcctgcccatggagatgtacaaagagttcgctgagcacatcaccaaccactacctggggctgtgtgcagccctcgagcccatcctcagtgccaagaccaaggaggagatggcatctgccctggtgcacatcctgcagagcacgggcaaggtgaaggacttcctgacagacctgatgatgtcagaggtggaccgctgcggggacaacgagcacctcatcttccgggagaacacactggccaccaaggccattgaggagtacctcaagctagtgggccagaagtacctgcaggacgccctaggtgagttcatcaaagcgctgtatgagtcagatgagaactgcgaagtggatcccagcaagtgctcggccgctgacctcccagagcaccagggcaacctcaagatgtgctgcgagctggccttctgcaagatcatcaactcctactgtgtcttcccacgggagttgaaagaggtgtttgcctcgtggaggcaggagtgcagcagtcgcggccgcccggacatcagtgagcggctcatcagcgcctccctcttcctgcgcttcctctgcccagccatcatgtcgccctcactcttcaacctgctgcaggagtaccctgatgaccgcactgcccgcaccctcaccctcatcgccaaggtcacccagaacctggccaactttgccaaatttggcagcaaggaggaatacatgtccttcatgaaccagttcctagagcatgagtggaccaacatgcagcgcttcctgctggagatctccaaccccgagaccctctccaatacagccggcttcgagggctacatcgacctgggccgcgagctctccagcctgcactcactgctctgggaggccgtcagccagctggagcagagcatagtatccaaactgggacccctgcctcggatcctgagggacgtccacacagcactgagcaccccaggtagcgggcagctcccagggaccaatgacctggcctccacaccgggctctggcagcagcagcatctcagctgggctgcagaagatggtgattgagaacgatctttccggtctgatagatttcacccggttaccgtctccaacccccgaaaacaaggacttgttttttgtcacaaggtcctccggggtccagccctcacctgcccgcagctcgagttactcggaagccaacgagcctgatcttcagatggccaacggtggcaagagcctctccatggtggacctccaggacgcccgcacgctggatggggaggcaggctccccggcgggccccgacgtcctccccacagatgggcaggccgctgcagctcagctggtggccgggtggccggcccgggcaaccccagtgaacctggcagggctggccacggtgcggcgggcaggccagacaccaaccacaccaggcacctccgagggcgcgccaggccggccccagctgttggcaccgctctccttccagaaccctgtgtaccagatggcggctggcctgccgctgtcaccccgtggccttggcgactcaggctctgagggccacagctccctgagctcacacagcaacagcgaggagttggcggctgctgccaagctgggaagtttcagcactgccgcggaggagctggctcggcggcccggtgagctggcacggcgacagatgtcactgactgaaaaaggcgggcagcccacggtgccacggcagaacagtgctggcccccagaggaggatcgaccagcctccgcccccacccccgccgccacctcctgccccccgcggccggacgccccccaacctgctgagcaccctgcagtacccaagaccctcaagcggaaccctggcgtcggcctcacctgattgggtgggccccagtacccgcctgaggcagcagtcctcttcctccaagggggacagcccagaactgaagccacgggcagtgcacaagcagggcccttcacctgtgagccccaatgccctggaccgcacagccgcttggctcttgaccatgaacgcgcagttgttagaagacgagggcctgggcccagaccccccccacagggataggctaaggagtaaggacgagctcagccaagcagaaaaggacctggcggtgctgcaggacaagctgcgaatctccaccaagaagctggaggagtatgagaccctgttcaagtgccaggaggagacgacgcagaagctggtgctggagtaccaggcacggctggaggagggcgaggagcggctgcggcggcagcaggaggacaaggacatccagatgaagggcatcatcagcaggttgatgtccgtggaggaagaactgaagaaggaccacgcagagatgcaagcggctgtggactccaaacagaagatcattgatgcccaggagaagcgcattgcctcgttggatgccgccaatgcccgcctcatgagtgccctgacccagctgaaagagaggtacagcatgcaagcccgtaacggcatctcccccaccaaccccaccaaattgcagattactgagaacggcgagttcagaaacagcagcaattgttaacctgcctgaggagggaggaagctacccaaggagagggggactatggtggccaagggcagggtctcggcctggggaggcacccacggttgcagccccagcgcgggtgtcaggaggccgagcctcccctccctgccgctgtccaggaggcggccgcagagggagccaccagagactgaagcagcgtgaggcgaggtcaccagccgctccctgtggggtgcgggcagaagagactgcacgctggggagtggggacagcctgatggggcagggggcctgccaaaaatatgtctgttggttcctgaatgtggtgtgtccttgtcctcctggatctggccgagtgcatgtgtccccccacacctgtgccagggagggggcttcctggaggggggattcaagggctaggggcctacacctgtggcttcccctcgcctccttggggggcccgggactccctggcagccaggccctgtcatgtgggacctggcacttggcagatcagttggcaggcaggaagataggaggacacagagcaggaggtcagtgtcccctgcctgtctccatccgaagcacctgccactgcatgcagcctgttgggaccttcctggctgtgaggaactgaggattcctacccacccaccccctctgaacctgtccccagagcaccacctgctaccttcttccctgccttagttgtattgccagatagacccagtgagggccatggctttttcttgtgagctcttgtccctgtggggaggacccacagcttcccacacctcccacacaggcccaggctgatgctctagggctcccagaagccagagatctgggcggatctggccagatggctctgagcactgtatctgccttctcctggggcccagcacacccagggcacagtggtcctgtagggagtgccacctggtgctcaccctgaaagaaaaggtgatccttcctctgagtgatggtttaaaaaaagattctaacgcctgcaggccctgagaaggtggataactgtgattttttttcctttcacagtatgcattagaaacaaaagcccgcttgctcgcttgctggaacacaggggccttttaagttgagcgtgcgcactgcatgggaaatagcggccctggaggatgttagacttgctccctctccaagacagcagcagcctgcacctgccccgtgtgtgtggccggcctcctcctcacccttcccggcccccggccaaggacccaggcgctgcatacaggggaggggcgcaccccacagctggggccggttttcctcagctctaggctgttctgtagcttatctgcccctcccccactttcaagacagatgagcaggagcttgggtctctctcggcccctgtctgttcccagcccctgcagattctgagcaaaggccctgggtaagaagggtgggagtggggcctttgccagcagagccagggcagggcgagctgcaggaatcacccctctgcccctgcagctggaatgtgccacagaggccccacctgaagggtggatgtgctggaggggtggcccagagccatactgcgtccaccctgagctcggggacaggtgacagtggctgctctgggaaggggcttttagatgtaacctacaattcagttaggctagagacagatgctggtggaggaagggctgggccaccagggatcacagaccacaggaagatgggaggtggaagcagaggccctgcccccaccccttcctgtctcactcttctgtcttgtccccacccatgcgccttcgtgcctgagaccagggtggccacacaggcagggcctggctccagtctcatcctcccattgcccagtgagccctgctcttctctccccagccccctcccaccgctgcctcgtagagtgacctcggacagagcccccctagcaatacagggaggctcccggggcctggacaggcgggctcggaggctacccgctgtggccggtgccagctgcccttgcagggtgggtgagctctcaggccgagagccttatttacctagtgcaaaaactgtaaaagtgtacagactcttcacagatttttatcttaattgcaagtctgccgattttgtaaatgttcttggtgtttgactgtaatgtaactatctcacctaatggttgtacatatcctttggtcctggtgctgccgagggctggccgggactgctgctctcccaagggttttattttatttctgaatctagagaacagtattgggcaggaggaaaaggcttggtgtctgcggggggtgtcttccctgcctgtggcatttgtgtgttggctttgcagctgctgtctgagtagtggccactggggtgccttcactgggccagtcaacggggggctcctgcccaggccacagagaacctgagttcccgggagctgggccctgcctgcagccagggctggggttgccagaggccctggagggaaggacagtccctgctggggaagaacagccccggggccccctggtcaccgagactcagcctctgctggagaaagccacgccctccctgctagcacagaggcctgactgacttttttgcttaacttccatgttctgggtgatggaaactgccaaacctcctgtcagtgaggactctttccgactgcccagaaagtgggggtggaggaccgaggctacagctccacacgccccggtcccccagagcatctgccccaggtacacctccccctgcgccccgcacgactgcgggagccagactgtccagggaaacagcctctctcttttctacacactcagccacaaagcccccctgcccagccctctgcagtttctaaaagaggttcatccataccaattctcagcatcattctcccattaggctccccccctaacccattctttcttatgaccgattagtaatttgcaagagaattcttcctcttactcataccatccactcagacatctccaatcccgggatcctctagatcga

SEQ ID NO: 345982 - DNA, 1867 bp, Homo sapiens
tgttcctcttctttcgtgttgtgtcagaagccatgatttccagtcttctcatctggaagatgaaggaaaagatagacccgaccccacagggttctgaggctcaaactgaaagcctggtggtggggcacctgtgacaggtcccatctgatgccgaggctgaaggagtctcgctcccacgagtccctgctcagccccagcagtgcggtggaggcgctggacctcagcatggaggaagaggtggtcatcaagcccgtgcacagcagcatccttggccaggactactgcttcgaggtgacgacgtcatcaggaagcaagtgcttttcctgccggtctgcagctgagcgggataagtggatggagaacctccggcgagcggtgcatcccaacaaggacaacagccggcgtgtggagcacatcctgaagctgtgggtgatcgaggccaaggacctgccagccaagaagaagtacctgtgcgagctgtgcctggacgatgtgctctatgcccgcaccacgggcaagctcaagacggacaatgttttctggggcgagcacttcgagttccacaacttgccgcctctgcgcacggtcactgtccacctgtaccgggagaccgacaagaagaagaagaaggagcgcaacagttacctgggcctggtgagcctacctgctgcctcggtggccgggcggcagttcgtggagaagtggtacccggtggtgacgcccaaccccaagggcggcaagggccctggacccatgatccgcatcaaggcgcgctaccaaaccatcaccatcctgcccatggagatgtacaaagagttcgctgagcacatcaccaaccactacctggggctgtgtgcagccctcgagcccatcctcagtgccaagaccaaggaggagatggcatctgccctggtgcacatcctgcagagcacgggcaaggtgaaggacttcctgacagacctgatgatgtcagaggtggaccgctgcggggacaacgagcacctcatcttccgggagaacacactggccaccaaggccattgaggagtacctcaagctagtgggccagaagtacctgcaggacgccctaggtgagttcatcaaagcgctgtatgagtcagatgagaactgcgaagtggatcccagcaagtgctcggccgctgacctcccagagcaccagggcaacctcaagatgtgctgcgagctggccttctgcaagatcatcaactcctactgtgtcttcccacgggagttgaaagaggtgtttgcctcgtggaggcaggagtgcagcagtcgcggccgcccggacatcagtgagcggctcatcagcgcctccctcttcctgcgcttcctctgcccagccatcatgtcgcccctccctgctagcacagaggcctgactgacttttttgcttaacttccatgttctgggtgatggaaactgccaaacctcctgtcagtgaggactctttccgactgcccagaaagtgggggtggaggaccgaggctacagctccacacgccccggtcccccagagcatctgccccaggtacacctccccctgcgccccgcacgactgcgggagccagactgtccagggaaacagcctctctcttttctacacactcagccacaaagccccccagctcccacaccgcgtcccagctcccctcttttgtaagtatgtgaaaaggaaaaaatgcaaacgttggagtttgggctggagctcctccctccagctgcgacttttaactatgtaataatgtacagaggaagctgttggtgttctaagactctgtgtggctgtgcaatttctgtacatttgcaattagaaatattaaagatttatttagctattttaagcccga

SEQ ID NO: 345983 - DNA, 368 bp, Homo sapiens
aaggagcctgtcccatgacccccgctcacatccccattgtccacaggagaagcgcattgcctcgttggatgccgccaatgcccgcctcatgagtgccctgacccagctgaaagagaggtacagcatgcaagcccgtaacggcatctcccccaccaaccccaccaaattgcagattactgagaacggcgagttcagaaacagcagcaattgttaacctgcctgaggagggaggaagctacccaaggagagggggactatggtggccaagggcagggtctcggcctggggaggcacccacggttgcagccccagcgcgggtgtcaggaggccgagcctcccctccctgccgctgtccaggaggcggccgc

SEQ ID NO: 345984 - DNA, 2536 bp, Homo sapiens
  misc_feature (970)..(970): n is a, c, g, or t
  misc_feature (1664)..(1664): n is a, c, g, or t
gtcatggactggaagttaagaacttccacacaataacaaaaattatgggccagacacagtggctcacacttgtaatcctagaactttgggaggccaaggtgggaagatcacttgagcccaagagttcaaggctgcagtgagtggtgatggagccatgcactcagcctgggcgacagggtaagaccctgtctcagaattaaaaaaaacaacaacaaaacaacatacataaatacctgatttgtgtactactgagaaaagttcagttcttggggagagtttcagtttttcccatcaagaactgcgtggtattttttgttatttgtgtgtgtgtgcgcgtgtgagacagagtcttgctctgtcatccaggctggagtgcagtgatgtgatcttggctcactgcagccttcaactcctgggttcaagcgattctcgtgcctcagccacctgggtagctgggattacagacgcacaccaccacacccagctaatttttgtatttttagtagagatggggttttccatgttggccaggctggtcccgaactcccgacttttcaagtgatccacccaccttggcttcccaaagtactgggattacaggtgtgagccaccactaccagctgagaactgtgtgttcttatgctccgtgtgctacttatatctcagacaacgaccagattttttaccataccaagtaaaatagtaaggagaagggaaactgtacatatatctttttgtcttttaggaaacttttacaaatgtgattcagagattgggcatttcacaggcacacttttttctccctagtttctgctagctggaaattttctttctagcaatgtctttttttttttttttttttttttttttgagacagagtcttgctctgtcacccgggctggagtgcagtggcacaatctcggctcactgcagcctctgcctcctggattcaagtgattctcctgcctcnttcccattttacagatgaagaaaacttgttcaaggtcttgtacccaggtctctctgacagcagtctcttgctattatttataaatgtctattgctgtaaatgccaccatttagattttagtgtcaaaacagaaccatagcagttcacatcttaatcagacattgtctgttagctgcatgagtggtggcctcattcagaaaagaaagaatgtgttattattgacctagttggactcagaggaagagattgggtctttagccaactggagtaatccttttcctctcttagagagaagcttggtcagagcaagactagcatttttggcattgttgaggttttctgaaaatcctatactaatgggaatctttatttgttgttaacattataatttctaaagtggagaagaagtaggaaactctgcaaatattttagagggggtaaagttcccatgacagtacattttagcatctgtttgaaaggaacctaaaacaacaaagtataattggctggctgacagcgaatttctgtgacctaacagtttagatgtaataattgtgaaataactgctctattagaatctttagagagagatttcaagaatcatagtaaacaggttataaaggctatgtcctaagtaatggtactgaaagaatttttcattagaaccataggcataatttaagacaaaagaganggtaatggtagaaaagagataaaagaattgaaaattgtgactgatgttagcagccttgaatgtaccaaatgaccaagggtatcagaagagagattggtaaaaataataggttctaagaaattgattataaaataggatcctaagcagaaaaaatgcatcctgagaatctctagtaccccattatgttcttcacttagtagtatgccatttctcctcttttcactaattcttttcccccttttttcccctacagacattccatacaccaagcttgggtgatgaggaatttgaaatcccacctatctccttggattctgatccctcattggctgtctcagatgtggttggccactttgatgacctggcagacccttcctcttcacaggatggcagtttttcagcccagtatggggtccagacattggacatgcctgtgggcatgacccatggcttgatggagcagggcggggggctcctgagtgggggcttgaccatggtaaggggcaagacattgtcaggcttaccccagctaatgggcatggcattaggggagacaaagttactctattccctgctacacttgggtattacttgtttctcttcttgtggctaaaggctcaccaacaaagacttaatttcacctgaataaatgaaatttaccatgtaggtagattttacttgaaaaataatttaaaattgtacaatgtctggtttgaaaattatttattgtggtttttgggaaaaagtgttttctgcttttattatggccttcacatcctaggattcaaatttgaatgtgatagctggcacacggagggatttattcaaaaatggcctgaatcacgttgagcagccagcagaacagagcttaa

SEQ ID NO: 345985 - DNA, 797 bp, Homo sapiens
agcagagagaacacacgtccttgcggaagtgacggcagttccgagtccagtgggggcggtgggagcgatgagggtctgagacggtgggagcggttgtgtgaagatggagtttcccggaggaaatgacaattacctgacgatcacagggccttcgcaccccttcctgtcaggggccgagacattccatacaccaagcttgggtgatgaggaatttgaaatcccacctatctccttggattctgatccctcattggctgtctcagatgtggttggccactttgatgacctggcagacccttcctcttcacaggatggcagtttttcagcccagtatggggtccagacattggacatgcctgtgggcatgacccatggcttgatggagcagggcggggggctcctgagtgggggcttgaccatggtaaggggcaagacattgtcaggcttaccccagctaatgggcatggcattaggggagacaaagttactctattccctgctacacttgggtattacttgtttctcttcttgtggctaaaggctcaccaacaaagacttaatttcacctgaataaatgaaatttaccatgtaggtagattttacttgaaaaataatttaaaattgtacaatgtctggtttgaaaattatttattgtggtttttgggaaaaagtgttttctgcttttattatggccttcacatcctaggattcaaatttgaatgtgatagctggcacacggagggatttattcaaaaatggcctgaatcacgttgagcagccagcagaacagagcttaa

SEQ ID NO: 345986 - DNA, 6090 bp, Homo sapiens
  misc_feature (970)..(970): n is a, c, g, or t
  misc_feature (1664)..(1664): n is a, c, g, or t
gtcatggactggaagttaagaacttccacacaataacaaaaattatgggccagacacagtggctcacacttgtaatcctagaactttgggaggccaaggtgggaagatcacttgagcccaagagttcaaggctgcagtgagtggtgatggagccatgcactcagcctgggcgacagggtaagaccctgtctcagaattaaaaaaaacaacaacaaaacaacatacataaatacctgatttgtgtactactgagaaaagttcagttcttggggagagtttcagtttttcccatcaagaactgcgtggtattttttgttatttgtgtgtgtgtgcgcgtgtgagacagagtcttgctctgtcatccaggctggagtgcagtgatgtgatcttggctcactgcagccttcaactcctgggttcaagcgattctcgtgcctcagccacctgggtagctgggattacagacgcacaccaccacacccagctaatttttgtatttttagtagagatggggttttccatgttggccaggctggtcccgaactcccgacttttcaagtgatccacccaccttggcttcccaaagtactgggattacaggtgtgagccaccactaccagctgagaactgtgtgttcttatgctccgtgtgctacttatatctcagacaacgaccagattttttaccataccaagtaaaatagtaaggagaagggaaactgtacatatatctttttgtcttttaggaaacttttacaaatgtgattcagagattgggcatttcacaggcacacttttttctccctagtttctgctagctggaaattttctttctagcaatgtctttttttttttttttttttttttttttgagacagagtcttgctctgtcacccgggctggagtgcagtggcacaatctcggctcactgcagcctctgcctcctggattcaagtgattctcctgcctcnttcccattttacagatgaagaaaacttgttcaaggtcttgtacccaggtctctctgacagcagtctcttgctattatttataaatgtctattgctgtaaatgccaccatttagattttagtgtcaaaacagaaccatagcagttcacatcttaatcagacattgtctgttagctgcatgagtggtggcctcattcagaaaagaaagaatgtgttattattgacctagttggactcagaggaagagattgggtctttagccaactggagtaatccttttcctctcttagagagaagcttggtcagagcaagactagcatttttggcattgttgaggttttctgaaaatcctatactaatgggaatctttatttgttgttaacattataatttctaaagtggagaagaagtaggaaactctgcaaatattttagagggggtaaagttcccatgacagtacattttagcatctgtttgaaaggaacctaaaacaacaaagtataattggctggctgacagcgaatttctgtgacctaacagtttagatgtaataattgtgaaataactgctctattagaatctttagagagagatttcaagaatcatagtaaacaggttataaaggctatgtcctaagtaatggtactgaaagaatttttcattagaaccataggcataatttaagacaaaagaganggtaatggtagaaaagagataaaagaattgaaaattgtgactgatgttagcagccttgaatgtaccaaatgaccaagggtatcagaagagagattggtaaaaataataggttctaagaaattgattataaaataggatcctaagcagaaaaaatgcatcctgagaatctctagtaccccattatgttcttcacttagtagtatgccatttctcctcttttcactaattcttttcccccttttttcccctacagacattccatacaccaagcttgggtgatgaggaatttgaaatcccacctatctccttggattctgatccctcattggctgtctcagatgtggttggccactttgatgacctggcagacccttcctcttcacaggatggcagtttttcagcccagtatggggtccagacattggacatgcctgtgggcatgacccatggcttgatggagcagggcggggggctcctgagtgggggcttgaccatggacttggaccactctataggaactcagtatagtgccaacccacctgttacaattgatgtaccaatgacagacatgacatctggcttgatggggcatagccagttgaccaccattgatcagtcagaactgagttcccagctgggtttgagcctagggggtggcaccatcctgccacctgcccagtcacctgaagatcgtctttcaaccaccccttcacctactagttcacttcacgaggatggtgttgaggatttccggaggcaacttcccagccagaagacagtcgtggtggaagcagggaaaaagcagaaggccccaaagaagagaaaaaagaaagatcctaatgaacctcagaaaccagtttcagcatatgctttattctttcgtgatacacaggctgccatcaagggacagaatcctaatgccacttttggtgaggtttcaaaaattgtggcctccatgtgggatagtcttggagaggagcaaaaacaggtatataagaggaaaactgaggctgccaagaaagagtatctgaaggcactggctgcttacaaagacaaccaggagtgtcaggccactgtggaaacagtggaattggatccagcaccaccatcacaaactccttctccacctcctatggctactgttgacccagcatctccagcaccagcttcaatagagccccctgccctgtccccatccattgttgttaactccaccctttcatcctatgtggcaaaccaggcatcttctggagctgggggtcagcccaatatcaccaagttgattattaccaaacaaatgttgccctcttctattactatgtctcaaggagggatggttactgttatcccagccacagtggtgacctcccgagggctccaactaggccaaaccagtacagctactatccagcccagtcaacaagcccagattgtcactcggtcagtgttgcaggcagcagcagctgctgctgctgctgcttctatgcaactgcctccaccccgactacagccccctccattacaacagatgccacagcccccgactcagcagcaagttaccattctgcagcagcctcctccactccaggccatgcaacagcctccacctcagaaagttcgaatcaatttacagcaacagcctcctcctctgcagatcaagagtgtgcctctacccactttgaaaatgcagactaccttagtcccaccaactgtggaaagtagtcctgagcggcctatgaacaacagccctgaggcccatacagtggaggcaccttctcctgagactatctgtgagatgatcacagatgtagttcctgaggttgagtctccttctcagatggatgttgaattggtgagtgggtctcctgtggcactctcaccccagcctcgatgtgtgaggtctggttgtgagaaccctcccattgtgagtaaggactgggacaatgaatactgcagcaatgagtgtgtggtgaagcactgcagggatgtattcttggcctgggtagcctctagaaattcaaacacagtggtgtttgtgaaatagtccttcctgttctccaagccagtgaagagttatctgctgggaaagtgtccaagagcctgtttttgaaacacaagctgggcttctggtagtgcctcatcacaacccatgatggctgttcatgtttcaccccttttcttccttcagcagaggccaggctatggagcagggccactgaatttgctgtaatctggagatgctttttactttcaaccataagcggtaatagcagaggaaagggtgaagggagtctgggcaagcaaagcatagagatggtggggtggtggtggggttgaagaaacttgttggtataattgtcataggacttgcctaaaatattattaaaattacgggagtgtactcagctttgagcctaggagaaaatgccactgtgtgcatccattttaaagggttccctcataaaaaaatgttattccccattatcacatcagtacactgctttgaaaacaaaacttttcaacatgggcatactgggctacatggaaaatgacatcacccaggagtgatttctctttatatatattatttctgcagttaccatccttatctgagttatcacagttcatgaatctaagaggcggaactctacatcattagtaagaggttccaccaaagtctaaagttgtattcacttgtgtttgatgaactatctttaaaagaccataggtctatcattatttcttagacataatctaaagaaaaacagactagagaagccacctggttgtaacagaataagcagaagtttacagcatgatagtccaagtggtgataactttaaataaaactcaaatttttactgtttgtagacaggaatgctgtcctagagaacctcctcctcaaccagctacgtacatagttttatcctatgcattcctgttttctgtgttttttgttttttttttttgagacagagtctcgctctgtcacccaggctggagtgcagtggtgcgacctcagctcactgaaacctctgcctcccgggttcaagcgattctcctgcatcagcctcccgagtagctaggattacaggcgcccgccactacgcccagctaatttgtggtatttttagtagagacagggtttcaccatgttggccaggctggtctcgaactcctgacctcatgatccgcccgccttgacctcccaaagtgctgggattacaggcatgagccaccgcacccagcctgcattcctgtttttttaatggttttggagggtagcagtagagatggggtctcactatgttgcccagtctagtcttgaactcctgggctacagttaccctcctacctcggcttcccaaagtgctcggattacaggtgtgagccactgtgcctagcctataatgatcattttaatgtttcccatgcactcatttagtttgaaccttcacagcaacccaatgaggtaatactcccatttcacatataatactgagagatgagttgcacaagattatacactgttaagtagcagagccagaatggacttcagaatcccaactacaatacaaatgtttatttaaataaagaagaaagctattgtacaaatatcactcttcaggtttagcttacagagccatggctatggattcttagctctgtaaggaagtgcttctataaattcttaggtttagagatgataccatctgggtacctttgcttgaaccgtgcaaccacatctgggtctagtaggtggatcccatccagttggtttccaagggtgatcctgaaacagtgtaaaaggaggggcaaaccagaaatcctggaattagagggtttaatattgttaaaaaatgcataccaaatgaagactgcctatcatcatatcaaatatgccaattctaaaaagagcttaacattagaatagtatatggtagaattactagttcagaattggcatagattctggtgttaaaatagactggatctgtattatctgagggttagtaactaatgcttagccaggcctgcttcacagagttgctaccagggagtattctttggataagcaaaatgctagcagcatgtgttttaagctctgttaaggggtgaaagatgtaattattgacagattaaatagataacttcgtaaccaccagggggcagattcaatacatcacagaatggctgaggaagatccttgggttgtgaagagagtagaaaccctagggagcagtgcttttgggtcctagaacctgttgagtttctaatgaatatttgtagaatctcataaaacagtttaaatacaagcttaagtggcttatgaatcctgtgaagctcatttatggactagtgtaaaacaatgtgaagctctactaagttctgtccctaatcataaataatagccccttgaggacta

SEQ ID NO: 345987 - DNA, 1915 bp, Homo sapiens
agcagagagaacacacgtccttgcggaagtgacggcagttccgagtccagtgggggcggtgggagcgatgagggtctgagacggtgggagcggttgtgtgaagatggagtttcccggaggaaatgacaattacctgacgatcacagggccttcgcaccccttcctgtcaggggccgagacattccatacaccaagcttgggtgatgaggaatttgaaatcccacctatctccttggattctgatccctcattggctgtctcagatgtggttggccactttgatgacctggcagacccttcctcttcacaggatggcagtttttcagcccagtatggggtccagacattggacatgcctgtgggcatgacccatggcttgatggagcagggcggggggctcctgagtgggggcttgaccatggacttggaccactctataggaactcagtatagtgccaacccacctgttacaattgatgtaccaatgacagacatgacatctggcttgatggggcatagccagttgaccaccattgatcagtcagaactgagttcccagctgggtttgagcctagggggtggcaccatcctgccacctgcccagtcacctgaagatcgtctttcaaccaccccttcacctactagttcacttcacgaggatggtgttgaggatttccggaggcaacttcccagccagaagacagtcgtggtggaagcagggaaaaagcagaaggccccaaagaagagaaaaaagaaagatcctaatgaacctcagaaaccagtttcagcatatgctttattctttcgtgatacacaggctgccatcaagggacagaatcctaatgccacttttggtgaggtttcaaaaattgtggcctccatgtgggatagtcttggagaggagcaaaaacaggtatataagaggaaaactgaggctgccaagaaagagtatctgaaggcactggctgcttacaaagacaaccaggagtgtcaggccactgtggaaacagtggaattggatccagcaccaccatcacaaactccttctccacctcctatggctactgttgacccagcatctccagcaccagcttcaatagagccccctgccctgtccccatccattgttgttaactccaccctttcatcctatgtggcaaaccaggcatcttctggagctgggggtcagcccaatatcaccaagttgattattaccaaacaaatgttgccctcttctattactatgtctcaaggagggatggttactgttatcccagccacagtggtgacctcccgagggctccaactaggccaaaccagtacagctactatccagcccagtcaacaagcccagattgtcactcggtcagtgttgcaggcagcagcagctgctgctgctgctgcttctatgcaactgcctccaccccgactacagccccctccattacaacagatgccacagcccccgactcagcagcaagttaccattctgcagcagcctcctccactccaggccatgcaacagcctccacctcagaaagttcgaatcaatttacagcaacagcctcctcctctgcagatcaagagtgtgcctctacccactttgaaaatgcagactaccttagtcccaccaactgtggaaagtagtcctgagcggcctatgaacaacagccctgaggcccatacagtggaggaacaggtcaccaggaaagaatatgagaaaggattagagatctgagttcctgacgaggagtggcgtataagacggatgttgaatcgatgccaggatttctaggggcactctacacaaagacttgatgtgtcagctcagagagtgataaccggcaccttgtgagataggagggcaacaatgcatggagaagcaatcagtcagcagagaagcacgacaggcaga

SEQ ID NO: 345988 - DNA, 1174 bp, Homo sapiens
agcagagagaacacacgtccttgcggaagtgacggcagttccgagtccagtgggggcggtgggagcgatgagggtctgagacggtgggagcggttgtgtgaagatggagtttcccggaggaaatgacaattacctgacgatcacagggccttcgcaccccttcctgtcaggggccgagacattccatacaccaagcttgggtgatgaggaatttgaaatcccacctatctccttggattctgatccctcattggctgtctcagatgtggttggccactttgatgacctggcagacccttcctcttcacaggatggcagtttttcagcccagtatggggtccagacattggacatgcctgtgggcatgacccatggcttgatggagcagggcggggggctcctgagtgggggcttgaccatggacttggaccactctataggaactcagtatagtgccaacccacctgttacaattgatgtaccaatgacagacatgacatctggcttgatggggcatagccagttgaccaccattgatcagtcagaactgagttcccagctgggtttgagcctagggggtggcaccatcctgccacctgcccagtcacctgaagatcgtctttcaaccaccccttcacctactagttcacttcacgaggatggtgttgaggatttccggaggcaacttcccagccagaagacagtcgtggtggaagcagggaaaaagcagaaggccccaaagaagagaaaaaagaaagatcctaatgaacctcagaaaccagtttcagcatatgctttattctttcgtgatacacaggctgccatcaagggacagaatcctaatgccacttttggtgaggtttcaaaaattgtggcctccatgtgggatagtcttggagaggagcaaaaacaggtatataagaggaaaactgaggctgccaagaaagagtatctgaaggcactggctgcttacaaagacaaccaggagtgtcaggccactgtggaaacagtggaattggatccagcaccatgtcttttctacttccttgtaaataggtatgatcttagttcccactgtacagtctgttctatcctctgcctcccatcaggccctgtttctttgttcctttgttaatatcttgaatttagtccctccatcttgagcctgtgtact

SEQ ID NO: 345989 - DNA, 4351 bp, Homo sapiens
agcagagagaacacacgtccttgcggaagtgacggcagttccgagtccagtgggggcggtgggagcgatgagggtctgagacggtgggagcggttgtgtgaagatggagtttcccggaggaaatgacaattacctgacgatcacagggccttcgcaccccttcctgtcaggggccgagacattccatacaccaagcttgggtgatgaggaatttgaaatcccacctatctccttggattctgatccctcattggctgtctcagatgtggttggccactttgatgacctggcagacccttcctcttcacaggatggcagtttttcagcccagtatggggtccagacattggacatgcctgtgggcatgacccatggcttgatggagcagggcggggggctcctgagtgggggcttgaccatggacttggaccactctataggaactcagtatagtgccaacccacctgttacaattgatgtaccaatgacagacatgacatctggcttgatggggcatagccagttgaccaccattgatcagtcagaactgagttcccagctgggtttgagcctagggggtggcaccatcctgccacctgcccagtcacctgaagatcgtctttcaaccaccccttcacctactagttcacttcacgaggatggtgttgaggatttccggaggcaacttcccagccagaagacagtcgtggtggaagcagggaaaaagcagaaggccccaaagaagagaaaaaagaaagatcctaatgaacctcagaaaccagtttcagcatatgctttattctttcgtgatacacaggctgccatcaagggacagaatcctaatgccacttttggtgaggtttcaaaaattgtggcctccatgtgggatagtcttggagaggagcaaaaacaggtatataagaggaaaactgaggctgccaagaaagagtatctgaaggcactggctgcttacaaagacaaccaggagtgtcaggccactgtggaaacagtggaattggatccagcaccaccatcacaaactccttctccacctcctatggctactgttgacccagcatctccagcaccagcttcaatagagccccctgccctgtccccatccattgttgttaactccaccctttcatcctatgtggcaaaccaggcatcttctggagctgggggtcagcccaatatcaccaagttgattattaccaaacaaatgttgccctcttctattactatgtctcaaggagggatggttactgttatcccagccacagtggtgacctcccgagggctccaactaggccaaaccagtacagctactatccagcccagtcaacaagcccagattgtcactcggtcagtgttgcaggcagcagcagctgctgctgctgctgcttctatgcaactgcctccaccccgactacagccccctccattacaacagatgccacagcccccgactcagcagcaagttaccattctgcagcagcctcctccactccaggccatgcaacagcctccacctcagaaagttcgaatcaatttacagcaacagcctcctcctctgcagatcaagagtgtgcctctacccactttgaaaatgcagactaccttagtcccaccaactgtggaaagtagtcctgagcggcctatgaacaacagccctgaggcccatacagtggaggcaccttctcctgagactatctgtgagatgatcacagatgtagttcctgaggttgagtctccttctcagatggatgttgaattggtgagtgggtctcctgtggcactctcaccccagcctcgatgtgtgaggtctggttgtgagaaccctcccattgtgagtaaggactgggacaatgaatactgcagcaatgagtgtgtggtgaagcactgcagggatgtattcttggcctgggtagcctctagaaattcaaacacagtggtgtttgtgaaatagtccttcctgttctccaagccagtgaagagttatctgctgggaaagtgtccaagagcctgtttttgaaacacaagctgggcttctggtagtgcctcatcacaacccatgatggctgttcatgtttcaccccttttcttccttcagcagaggccaggctatggagcagggccactgaatttgctgtaatctggagatgctttttactttcaaccataagcggtaatagcagaggaaagggtgaagggagtctgggcaagcaaagcatagagatggtggggtggtggtggggttgaagaaacttgttggtataattgtcataggacttgcctaaaatattattaaaattacgggagtgtactcagctttgagcctaggagaaaatgccactgtgtgcatccattttaaagggttccctcataaaaaaatgttattccccattatcacatcagtacactgctttgaaaacaaaacttttcaacatgggcatactgggctacatggaaaatgacatcacccaggagtgatttctctttatatatattatttctgcagttaccatccttatctgagttatcacagttcatgaatctaagaggcggaactctacatcattagtaagaggttccaccaaagtctaaagttgtattcacttgtgtttgatgaactatctttaaaagaccataggtctatcattatttcttagacataatctaaagaaaaacagactagagaagccacctggttgtaacagaataagcagaagtttacagcatgatagtccaagtggtgataactttaaataaaactcaaatttttactgtttgtagacaggaatgctgtcctagagaacctcctcctcaaccagctacgtacatagttttatcctatgcattcctgttttctgtgttttttgttttttttttttgagacagagtctcgctctgtcacccaggctggagtgcagtggtgcgacctcagctcactgaaacctctgcctcccgggttcaagcgattctcctgcatcagcctcccgagtagctaggattacaggcgcccgccactacgcccagctaatttgtggtatttttagtagagacagggtttcaccatgttggccaggctggtctcgaactcctgacctcatgatccgcccgccttgacctcccaaagtgctgggattacaggcatgagccaccgcacccagcctgcattcctgtttttttaatggttttggagggtagcagtagagatggggtctcactatgttgcccagtctagtcttgaactcctgggctacagttaccctcctacctcggcttcccaaagtgctcggattacaggtgtgagccactgtgcctagcctataatgatcattttaatgtttcccatgcactcatttagtttgaaccttcacagcaacccaatgaggtaatactcccatttcacatataatactgagagatgagttgcacaagattatacactgttaagtagcagagccagaatggacttcagaatcccaactacaatacaaatgtttatttaaataaagaagaaagctattgtacaaatatcactcttcaggtttagcttacagagccatggctatggattcttagctctgtaaggaagtgcttctataaattcttaggtttagagatgataccatctgggtacctttgcttgaaccgtgcaaccacatctgggtctagtaggtggatcccatccagttggtttccaagggtgatcctgaaacagtgtaaaaggaggggcaaaccagaaatcctggaattagagggtttaatattgttaaaaaatgcataccaaatgaagactgcctatcatcatatcaaatatgccaattctaaaaagagcttaacattagaatagtatatggtagaattactagttcagaattggcatagattctggtgttaaaatagactggatctgtattatctgagggttagtaactaatgcttagccaggcctgcttcacagagttgctaccagggagtattctttggataagcaaaatgctagcagcatgtgttttaagctctgttaaggggtgaaagatgtaattattgacagattaaatagataacttcgtaaccaccagggggcagattcaatacatcacagaatggctgaggaagatccttgggttgtgaagagagtagaaaccctagggagcagtgcttttgggtcctagaacctgttgagtttctaatgaatatttgtagaatctcataaaacagtttaaatacaagcttaagtggcttatgaatcctgtgaagctcatttatggactagtgtaaaacaatgtgaagctctactaagttctgtccctaatcataaataatagccccttgaggacta

SEQ ID NO: 345990 - DNA, 2330 bp, Homo sapiens
agcagagagaacacacgtccttgcggaagtgacggcagttccgagtccagtgggggcggtgggagcgatgagggtctgagacggtgggagcggttgtgtgaagatggagtttcccggaggaaatgacaattacctgacgatcacagggccttcgcaccccttcctgtcaggggccgagacattccatacaccaagcttgggtgatgaggaatttgaaatcccacctatctccttggattctgatccctcattggctgtctcagatgtggttggccactttgatgacctggcagacccttcctcttcacaggatggcagtttttcagcccagtatggggtccagacattggacatgcctgtgggcatgacccatggcttgatggagcagggcggggggctcctgagtgggggcttgaccatggacttggaccactctataggaactcagtatagtgccaacccacctgttacaattgatgtaccaatgacagacatgacatctggcttgatggggcatagccagttgaccaccattgatcagtcagaactgagttcccagctgggtttgagcctagggggtggcaccatcctgccacctgcccagtcacctgaagatcgtctttcaaccaccccttcacctactagttcacttcacgaggatggtgttgaggatttccggaggcaacttcccagccagaagacagtcgtggtggaagcagggaaaaagcagaaggccccaaagaagagaaaaaagaaagatcctaatgaacctcagaaaccagtttcagcatatgctttattctttcgtgatacacaggctgccatcaagggacagaatcctaatgccacttttggtgaggtttcaaaaattgtggcctccatgtgggatagtcttggagaggagcaaaaacaggtatataagaggaaaactgaggctgccaagaaagagtatctgaaggcactggctgcttacaaagacaaccaggagtgtcaggccactgtggaaacagtggaattggatccagcaccaccatcacaaactccttctccacctcctatggctactgttgacccagcatctccagcaccagcttcaatagagccccctgccctgtccccatccattgttgttaactccaccctttcatcctatgtggcaaaccaggcatcttctggagctgggggtcagcccaatatcaccaagttgattattaccaaacaaatgttgccctcttctattactatgtctcaaggagggatggttactgttatcccagccacagtggtgacctcccgagggctccaactaggccaaaccagtacagctactatccagcccagtcaacaagcccagattgtcactcggtcagtgttgcaggcagcagcagctgctgctgctgctgcttctatgcaactgcctccaccccgactacagccccctccattacaacagatgccacagcccccgactcagcagcaagttaccattctgcagcagcctcctccactccaggccatgcaacagcctccacctcagaaagttcgaatcaatttacagcaacagcctcctcctctgcagatcaagagtgtgcctctacccactttgaaaatgcagactaccttagtcccaccaactgtggaaagtagtcctgagcggcctatgaacaacagccctgaggcccatacagtggaggcaccttctcctgagactatctgtgagatgatcacagatgtagttcctgaggttgagtctccttctcagatggatgttgaattggtgagtgggtctcctgtggcactctcaccccagcctcgatgtgtgaggtctggttgtgagaaccctcccattgtgagtaaggactgggacaatgaatactgcagcaatgagtgtgtggtgaagcactgcagggatgtattcttggcctgggtagcctctagaaattcaaacacagtggtgtttgtgaaatagtccttcctgttctccaagccagtgaagagttatctgctgggaaagtgtccaagagcctgtttttgaaacacaagctgggcttctggtagtgcctcatcacaacccatgatggctgttcatgtttcaccccttttcttccttcagcagaggccaggctatggagcagggccactgaatttgctgtaatctggagatgctttttactttcaaccataagcggtaatagcagaggaaagggtgaagggagtctgggcaagcaaagcatagagatggtggggtggtggtggggttgaagaaacttgttggtataattgtcataggacttgcctaaaatattattaaaattacgggagtgtactca

SEQ ID NO: 345991 - DNA, 2656 bp, Homo sapiens
agcagagagaacacacgtccttgcggaagtgacggcagttccgagtccagtgggggcggtgggagcgatgagggtctgagacggtgggagcggttgtgtgaagatggagtttcccggaggaaatgacaattacctgacgatcacagggccttcgcaccccttcctgtcaggggccgagacattccatacaccaagcttgggtgatgaggaatttgaaatcccacctatctccttggattctgatccctcattggctgtctcagatgtggttggccactttgatgacctggcagacccttcctcttcacaggatggcagtttttcagcccagtatggggtccagacattggacatgcctgtgggcatgacccatggcttgatggagcagggcggggggctcctgagtgggggcttgaccatggacttggaccactctataggaactcagtatagtgccaacccacctgttacaattgatgtaccaatgacagacatgacatctggcttgatggggcatagccagttgaccaccattgatcagtcagaactgagttcccagctgggtttgagcctagggggtggcaccatcctgccacctgcccagtcacctgaagatcgtctttcaaccaccccttcacctactagttcacttcacgaggatggtgttgaggatttccggaggcaacttcccagccagaagacagtcgtggtggaagcagggaaaaagcagaaggccccaaagaagagaaaaaagaaagatcctaatgaacctcagaaaccagtttcagcatatgctttattctttcgtgatacacaggctgccatcaagggacagaatcctaatgccacttttggtgaggtttcaaaaattgtggcctccatgtgggatagtcttggagaggagcaaaaacaggtatataagaggaaaactgaggctgccaagaaagagtatctgaaggcactggctgcttacaaagacaaccaggagtgtcaggccactgtggaaacagtggaattggatccagcaccaccatcacaaactccttctccacctcctatggctactgttgacccagcatctccagcaccagcttcaatagagccccctgccctgtccccatccattgttgttaactccaccctttcatcctatgtggcaaaccaggcatcttctggagctgggggtcagcccaatatcaccaagttgattattaccaaacaaatgttgccctcttctattactatgtctcaaggagggatggttactgttatcccagccacagtggtgacctcccgagggctccaactaggccaaaccagtacagctactatccagcccagtcaacaagcccagattgtcactcggtcagtgttgcaggcagcagcagctgctgctgctgctgcttctatgcaactgcctccaccccgactacagccccctccattacaacagatgccacagcccccgactcagcagcaagttaccattctgcagcagcctcctccactccaggccatgcaacagcctccacctcagaaagttcgaatcaatttacagcaacagcctcctcctctgcagatcaagagtgtgcctctacccactttgaaaatgcagactaccttagtcccaccaactgtggaaagtagtcctgagcggcctatgaacaacagccctgaggcccatacagtggaggcaccttctcctgagactatctgtgagatgatcacagatgtagttcctgaggttgagtctccttctcagatggatgttgaattggtgagtgggtctcctgtggcactctcaccccagcctcgatgtgtgaggtctggttgtgagaaccctcccattgtgagtaaggactgggacaatgaatactgcagcaatgagtgtgtggtgaagcactgcagggatgtattcttggcctgggtagcctctagaaattcaaacacagtggtgtttgtgaaatagtccttcctgttctccaagccagtgaagagttatctgctgggaaagtgtccaagagcctgtttttgaaacacaagctgggcttctggtagtgcctcatcacaacccatgatggctgttcatgtttcaccccttttcttccttcagcagaggccaggctatggagcagggccactgaatttgctgtaatctggagatgctttttactttcaaccataagcggtaatagcagaggaaagggtgaagggagtctgggcaagcaaagcatagagatggtggggtggtggtggggttgaagaaacttgttggtataattgtcataggacttgcctaaaatattattaaaattacgggagtgtactcaagaaaagaaaaaaaaaaaaaaaaaaaaaaaaaaaaatatgtaaaaaaaaaacaagaacaaaaaaaaaaaaaaaaaagaactatgggttgggggaggccgacgcgtcgacgagacgcccacaggaaggaagaaagctctaatgaaaagaaaaacaaatgctgaaagagagggcgagagcaggcgggcacccccaacgcaggaggggaagcgagagaccaaaagcagggggacgcacgcaaatcaggggtcacaccccagagaggaggcgaaaacgagcgagggcaacagcacaaaaaagggagcgagaacgcagtaggccgaaccgc

SEQ ID NO: 345992 - DNA, 4260 bp, Homo sapiens
agcagagagaacacacgtccttgcggaagtgacggcagttccgagtccagtgggggcggtgggagcgatgagggtctgagacggtgggagcggttgtgtgaagatggagtttcccggaggaaatgacaattacctgacgatcacagggccttcgcaccccttcctgtcaggggccgagacattccatacaccaagcttgggtgatgaggaatttgaaatcccacctatctccttggattctgatccctcattggctgtctcagatgtggttggccactttgatgacctggcagacccttcctcttcacaggatggcagtttttcagcccagacttggaccactctataggaactcagtatagtgccaacccacctgttacaattgatgtaccaatgacagacatgacatctggcttgatggggcatagccagttgaccaccattgatcagtcagaactgagttcccagctgggtttgagcctagggggtggcaccatcctgccacctgcccagtcacctgaagatcgtctttcaaccaccccttcacctactagttcacttcacgaggatggtgttgaggatttccggaggcaacttcccagccagaagacagtcgtggtggaagcagggaaaaagcagaaggccccaaagaagagaaaaaagaaagatcctaatgaacctcagaaaccagtttcagcatatgctttattctttcgtgatacacaggctgccatcaagggacagaatcctaatgccacttttggtgaggtttcaaaaattgtggcctccatgtgggatagtcttggagaggagcaaaaacaggtatataagaggaaaactgaggctgccaagaaagagtatctgaaggcactggctgcttacaaagacaaccaggagtgtcaggccactgtggaaacagtggaattggatccagcaccaccatcacaaactccttctccacctcctatggctactgttgacccagcatctccagcaccagcttcaatagagccccctgccctgtccccatccattgttgttaactccaccctttcatcctatgtggcaaaccaggcatcttctggagctgggggtcagcccaatatcaccaagttgattattaccaaacaaatgttgccctcttctattactatgtctcaaggagggatggttactgttatcccagccacagtggtgacctcccgagggctccaactaggccaaaccagtacagctactatccagcccagtcaacaagcccagattgtcactcggtcagtgttgcaggcagcagcagctgctgctgctgctgcttctatgcaactgcctccaccccgactacagccccctccattacaacagatgccacagcccccgactcagcagcaagttaccattctgcagcagcctcctccactccaggccatgcaacagcctccacctcagaaagttcgaatcaatttacagcaacagcctcctcctctgcagatcaagagtgtgcctctacccactttgaaaatgcagactaccttagtcccaccaactgtggaaagtagtcctgagcggcctatgaacaacagccctgaggcccatacagtggaggcaccttctcctgagactatctgtgagatgatcacagatgtagttcctgaggttgagtctccttctcagatggatgttgaattggtgagtgggtctcctgtggcactctcaccccagcctcgatgtgtgaggtctggttgtgagaaccctcccattgtgagtaaggactgggacaatgaatactgcagcaatgagtgtgtggtgaagcactgcagggatgtattcttggcctgggtagcctctagaaattcaaacacagtggtgtttgtgaaatagtccttcctgttctccaagccagtgaagagttatctgctgggaaagtgtccaagagcctgtttttgaaacacaagctgggcttctggtagtgcctcatcacaacccatgatggctgttcatgtttcaccccttttcttccttcagcagaggccaggctatggagcagggccactgaatttgctgtaatctggagatgctttttactttcaaccataagcggtaatagcagaggaaagggtgaagggagtctgggcaagcaaagcatagagatggtggggtggtggtggggttgaagaaacttgttggtataattgtcataggacttgcctaaaatattattaaaattacgggagtgtactcagctttgagcctaggagaaaatgccactgtgtgcatccattttaaagggttccctcataaaaaaatgttattccccattatcacatcagtacactgctttgaaaacaaaacttttcaacatgggcatactgggctacatggaaaatgacatcacccaggagtgatttctctttatatatattatttctgcagttaccatccttatctgagttatcacagttcatgaatctaagaggcggaactctacatcattagtaagaggttccaccaaagtctaaagttgtattcacttgtgtttgatgaactatctttaaaagaccataggtctatcattatttcttagacataatctaaagaaaaacagactagagaagccacctggttgtaacagaataagcagaagtttacagcatgatagtccaagtggtgataactttaaataaaactcaaatttttactgtttgtagacaggaatgctgtcctagagaacctcctcctcaaccagctacgtacatagttttatcctatgcattcctgttttctgtgttttttgttttttttttttgagacagagtctcgctctgtcacccaggctggagtgcagtggtgcgacctcagctcactgaaacctctgcctcccgggttcaagcgattctcctgcatcagcctcccgagtagctaggattacaggcgcccgccactacgcccagctaatttgtggtatttttagtagagacagggtttcaccatgttggccaggctggtctcgaactcctgacctcatgatccgcccgccttgacctcccaaagtgctgggattacaggcatgagccaccgcacccagcctgcattcctgtttttttaatggttttggagggtagcagtagagatggggtctcactatgttgcccagtctagtcttgaactcctgggctacagttaccctcctacctcggcttcccaaagtgctcggattacaggtgtgagccactgtgcctagcctataatgatcattttaatgtttcccatgcactcatttagtttgaaccttcacagcaacccaatgaggtaatactcccatttcacatataatactgagagatgagttgcacaagattatacactgttaagtagcagagccagaatggacttcagaatcccaactacaatacaaatgtttatttaaataaagaagaaagctattgtacaaatatcactcttcaggtttagcttacagagccatggctatggattcttagctctgtaaggaagtgcttctataaattcttaggtttagagatgataccatctgggtacctttgcttgaaccgtgcaaccacatctgggtctagtaggtggatcccatccagttggtttccaagggtgatcctgaaacagtgtaaaaggaggggcaaaccagaaatcctggaattagagggtttaatattgttaaaaaatgcataccaaatgaagactgcctatcatcatatcaaatatgccaattctaaaaagagcttaacattagaatagtatatggtagaattactagttcagaattggcatagattctggtgttaaaatagactggatctgtattatctgagggttagtaactaatgcttagccaggcctgcttcacagagttgctaccagggagtattctttggataagcaaaatgctagcagcatgtgttttaagctctgttaaggggtgaaagatgtaattattgacagattaaatagataacttcgtaaccaccagggggcagattcaatacatcacagaatggctgaggaagatccttgggttgtgaagagagtagaaaccctagggagcagtgcttttgggtcctagaacctgttgagtttctaatgaatatttgtagaatctcataaaacagtttaaatacaagcttaagtggcttatgaatcctgtgaagctcatttatggactagtgtaaaacaatgtgaagctctactaagttctgtccctaatcataaataatagccccttgaggacta

SEQ ID NO: 345993 - DNA, 4518 bp, Homo sapiens
agcagagagaacacacgtccttgcggaagtgacggcagttccgagtccagtgggggcggtgggagcgatgagggtctgagacggtgggagcggttgtgtgaagatggagtttcccggaggaaatgacaattacctgacgatcacagggccttcgcaccccttcctgtcaggggccgagacattccatacaccaagcttgggtgatgaggaatttgaaatcccacctatctccttggattctgatccctcattggctgtctcagatgtggttggccactttgatgacctggcagacccttcctcttcacaggatggcagtttttcagcccagtatggggtccagacattggacatgcctgtgggcatgacccatggcttgatggagcagggcggggggctcctgagtgggggcttgaccatggtaaggggcaagacattgtcaggcttaccccagctaatgggcatggcattaggggagacaaagttactctattccctgctacacttgggtattacttgtttctcttcttgtggctaaaggctcaccaacaaagacttaatttcacctgaataaatgaaatttaccatgacttggaccactctataggaactcagtatagtgccaacccacctgttacaattgatgtaccaatgacagacatgacatctggcttgatggggcatagccagttgaccaccattgatcagtcagaactgagttcccagctgggtttgagcctagggggtggcaccatcctgccacctgcccagtcacctgaagatcgtctttcaaccaccccttcacctactagttcacttcacgaggatggtgttgaggatttccggaggcaacttcccagccagaagacagtcgtggtggaagcagggaaaaagcagaaggccccaaagaagagaaaaaagaaagatcctaatgaacctcagaaaccagtttcagcatatgctttattctttcgtgatacacaggctgccatcaagggacagaatcctaatgccacttttggtgaggtttcaaaaattgtggcctccatgtgggatagtcttggagaggagcaaaaacaggtatataagaggaaaactgaggctgccaagaaagagtatctgaaggcactggctgcttacaaagacaaccaggagtgtcaggccactgtggaaacagtggaattggatccagcaccaccatcacaaactccttctccacctcctatggctactgttgacccagcatctccagcaccagcttcaatagagccccctgccctgtccccatccattgttgttaactccaccctttcatcctatgtggcaaaccaggcatcttctggagctgggggtcagcccaatatcaccaagttgattattaccaaacaaatgttgccctcttctattactatgtctcaaggagggatggttactgttatcccagccacagtggtgacctcccgagggctccaactaggccaaaccagtacagctactatccagcccagtcaacaagcccagattgtcactcggtcagtgttgcaggcagcagcagctgctgctgctgctgcttctatgcaactgcctccaccccgactacagccccctccattacaacagatgccacagcccccgactcagcagcaagttaccattctgcagcagcctcctccactccaggccatgcaacagcctccacctcagaaagttcgaatcaatttacagcaacagcctcctcctctgcagatcaagagtgtgcctctacccactttgaaaatgcagactaccttagtcccaccaactgtggaaagtagtcctgagcggcctatgaacaacagccctgaggcccatacagtggaggcaccttctcctgagactatctgtgagatgatcacagatgtagttcctgaggttgagtctccttctcagatggatgttgaattggtgagtgggtctcctgtggcactctcaccccagcctcgatgtgtgaggtctggttgtgagaaccctcccattgtgagtaaggactgggacaatgaatactgcagcaatgagtgtgtggtgaagcactgcagggatgtattcttggcctgggtagcctctagaaattcaaacacagtggtgtttgtgaaatagtccttcctgttctccaagccagtgaagagttatctgctgggaaagtgtccaagagcctgtttttgaaacacaagctgggcttctggtagtgcctcatcacaacccatgatggctgttcatgtttcaccccttttcttccttcagcagaggccaggctatggagcagggccactgaatttgctgtaatctggagatgctttttactttcaaccataagcggtaatagcagaggaaagggtgaagggagtctgggcaagcaaagcatagagatggtggggtggtggtggggttgaagaaacttgttggtataattgtcataggacttgcctaaaatattattaaaattacgggagtgtactcagctttgagcctaggagaaaatgccactgtgtgcatccattttaaagggttccctcataaaaaaatgttattccccattatcacatcagtacactgctttgaaaacaaaacttttcaacatgggcatactgggctacatggaaaatgacatcacccaggagtgatttctctttatatatattatttctgcagttaccatccttatctgagttatcacagttcatgaatctaagaggcggaactctacatcattagtaagaggttccaccaaagtctaaagttgtattcacttgtgtttgatgaactatctttaaaagaccataggtctatcattatttcttagacataatctaaagaaaaacagactagagaagccacctggttgtaacagaataagcagaagtttacagcatgatagtccaagtggtgataactttaaataaaactcaaatttttactgtttgtagacaggaatgctgtcctagagaacctcctcctcaaccagctacgtacatagttttatcctatgcattcctgttttctgtgttttttgttttttttttttgagacagagtctcgctctgtcacccaggctggagtgcagtggtgcgacctcagctcactgaaacctctgcctcccgggttcaagcgattctcctgcatcagcctcccgagtagctaggattacaggcgcccgccactacgcccagctaatttgtggtatttttagtagagacagggtttcaccatgttggccaggctggtctcgaactcctgacctcatgatccgcccgccttgacctcccaaagtgctgggattacaggcatgagccaccgcacccagcctgcattcctgtttttttaatggttttggagggtagcagtagagatggggtctcactatgttgcccagtctagtcttgaactcctgggctacagttaccctcctacctcggcttcccaaagtgctcggattacaggtgtgagccactgtgcctagcctataatgatcattttaatgtttcccatgcactcatttagtttgaaccttcacagcaacccaatgaggtaatactcccatttcacatataatactgagagatgagttgcacaagattatacactgttaagtagcagagccagaatggacttcagaatcccaactacaatacaaatgtttatttaaataaagaagaaagctattgtacaaatatcactcttcaggtttagcttacagagccatggctatggattcttagctctgtaaggaagtgcttctataaattcttaggtttagagatgataccatctgggtacctttgcttgaaccgtgcaaccacatctgggtctagtaggtggatcccatccagttggtttccaagggtgatcctgaaacagtgtaaaaggaggggcaaaccagaaatcctggaattagagggtttaatattgttaaaaaatgcataccaaatgaagactgcctatcatcatatcaaatatgccaattctaaaaagagcttaacattagaatagtatatggtagaattactagttcagaattggcatagattctggtgttaaaatagactggatctgtattatctgagggttagtaactaatgcttagccaggcctgcttcacagagttgctaccagggagtattctttggataagcaaaatgctagcagcatgtgttttaagctctgttaaggggtgaaagatgtaattattgacagattaaatagataacttcgtaaccaccagggggcagattcaatacatcacagaatggctgaggaagatccttgggttgtgaagagagtagaaaccctagggagcagtgcttttgggtcctagaacctgttgagtttctaatgaatatttgtagaatctcataaaacagtttaaatacaagcttaagtggcttatgaatcctgtgaagctcatttatggactagtgtaaaacaatgtgaagctctactaagttctgtccctaatcataaataatagccccttgaggacta

SEQ ID NO: 345994 - DNA, 2728 bp, Homo sapiens
agcagagagaacacacgtccttgcggaagtgacggcagttccgagtccagtgggggcggtgggagcgatgagggtctgagacggtgggagcggttgtgtgaagatggagtttcccggaggaaatgacaattacctgacgatcacagggccttcgcaccccttcctgtcaggggccgagacattccatacaccaagcttgggtgatgaggaatttgaaatcccacctatctccttggattctgatccctcattggctgtctcagatgtggttggccactttgatgacctggcagacccttcctcttcacaggatggcagtttttcagcccagtatggggtccagacattggacatgcctgtgggcatgacccatggcttgatggagcagggcggggggctcctgagtgggggcttgaccatggacttggaccactctataggaactcagtatagtgccaacccacctgttacaattgatgtaccaatgacagacatgacatctggcttgatggggcatagccagttgaccaccattgatcagtcagaactgagttcccagctgggtttgagcctagggggtggcaccatcctgccacctgcccagtcacctgaagatcgtctttcaaccaccccttcacctactagttcacttcacgaggatggtgttgaggatttccggaggcaacttcccagccagaagacagtcgtggtggaagcagggaaaaagcagaaggccccaaagaagagaaaaaagaaagatcctaatgaacctcagaaaccagtttcagcatatgctttattctttcgtgatacacaggctgccatcaagggacagaatcctaatgccacttttggtgaggtttcaaaaattgtggcctccatgtgggatagtcttggagaggagcaaaaacaggtatataagaggaaaactgaggctgccaagaaagagtatctgaaggcactggctgcttacaaagacaaccaggagtgtcaggccactgtggaaacagtggaattggatccagcaccaccatcacaaactccttctccacctcctatggctactgttgacccagcatctccagcaccagcttcaatagagccccctgccctgtccccatccattgttgttaactccaccctttcatcctatgtggcaaaccaggcatcttctggagctgggggtcagcccaatatcaccaagttgattattaccaaacaaatgttgccctcttctattactatgtctcaaggagggatggttactgttatcccagccacagtggtgacctcccgagggctccaactaggccaaaccagtacagctactatccagcccagtcaacaagcccagattgtcactcggtcagtgttgcaggcagcagcagctgctgctgctgctgcttctatgcaactgcctccaccccgactacagccccctccattacaacagatgccacagcccccgactcagcagcaagttaccattctgcagcagcctcctccactccaggccatgcaacagcctccacctcagaaagttcgaatcaatttacagcaacagcctcctcctctgcagatcaagagtgtgcctctacccactttgaaaatgcagactaccttagtcccaccaactgtggaaagtagtcctgagcggcctatgaacaacagccctgaggcccatacagtggaggcaccttctcctgagactatctgtgagatgatcacagatgtagttcctgaggttgagtctccttctcagatggatgttgaattggtgagtgggtctcctgtggcactctcaccccagcctcgatgtgtgaggtctggttgtgagaaccctcccattgtgagtaaggactgggacaatgaatactgcagcaatgagtgtgtggtgaagcactgcaggtgagcttacagttctcccttttataattcagctactggtcaattctactgggaaacataggaatcttgagcataaaatcagcatctcagtgtcaccttaccttaggtagagtaggttgctgtatctggtctactagaaaagctcccctgcttaagagcttacatttgccacataagccaaagatgatgtaatcagcagttcacatttttcagttaccacatacctctcttatgtatgctctttaaaaatataatacattaagctgttagtgtttgcaaatattagcttttcaattcttggtgcaaatcagactacttagggaactagaatttggggagaaatggtaagtggaaagtaacacataataatttgcaatttgtgaaggaaatggggagatggttggaatattttacccctctccccaaattttcctgggaatttcctatagctgtaggacaaggcatttctatttcctatttcaaaaactctgcagtaaattagcattgcctctacttctgacttttaagcccactgttcttatattttcaaggtgatactatctcaccataatgctgtaggaaattatctgggaacctatttgtttaagacagataaaaaatccagctgggccatacagtgaaaccccatctctactaaaaatacaaaaattagccgggcatggtggcaggcacctgtagtcctggctactcaggaggctgaagcaggagaatctcttgaacctgggaggtggaggttgcagtgagccaagaagatcacgccactgcactccagcctgggcaacagcgagactccatctca

SEQ ID NO: 345995 - DNA, 3616 bp, Homo sapiens
agcagagagaacacacgtccttgcggaagtgacggcagttccgagtccagtgggggcggtgggagcgatgagggtctgagacggtgggagcggttgtgtgaagatggagtttcccggaggaaatgacaattacctgacgatcacagggccttcgcaccccttcctgtcaggggccgagacattccatacaccaagcttgggtgatgaggaatttgaaatcccacctatctccttggattctgatccctcattggctgtctcagatgtggttggccactttgatgacctggcagacccttcctcttcacaggatggcagtttttcagcccagtatggggtccagacattggacatgcctgtgggcatgacccctgccctgtccccatccattgttgttaactccaccctttcatcctatgtggcaaaccaggcatcttctggagctgggggtcagcccaatatcaccaagttgattattaccaaacaaatgttgccctcttctattactatgtctcaaggagggatggttactgttatcccagccacagtggtgacctcccgagggctccaactaggccaaaccagtacagctactatccagcccagtcaacaagcccagattgtcactcggtcagtgttgcaggcagcagcagctgctgctgctgctgcttctatgcaactgcctccaccccgactacagccccctccattacaacagatgccacagcccccgactcagcagcaagttaccattctgcagcagcctcctccactccaggccatgcaacagcctccacctcagaaagttcgaatcaatttacagcaacagcctcctcctctgcagatcaagagtgtgcctctacccactttgaaaatgcagactaccttagtcccaccaactgtggaaagtagtcctgagcggcctatgaacaacagccctgaggcccatacagtggaggcaccttctcctgagactatctgtgagatgatcacagatgtagttcctgaggttgagtctccttctcagatggatgttgaattggtgagtgggtctcctgtggcactctcaccccagcctcgatgtgtgaggtctggttgtgagaaccctcccattgtgagtaaggactgggacaatgaatactgcagcaatgagtgtgtggtgaagcactgcagggatgtattcttggcctgggtagcctctagaaattcaaacacagtggtgtttgtgaaatagtccttcctgttctccaagccagtgaagagttatctgctgggaaagtgtccaagagcctgtttttgaaacacaagctgggcttctggtagtgcctcatcacaacccatgatggctgttcatgtttcaccccttttcttccttcagcagaggccaggctatggagcagggccactgaatttgctgtaatctggagatgctttttactttcaaccataagcggtaatagcagaggaaagggtgaagggagtctgggcaagcaaagcatagagatggtggggtggtggtggggttgaagaaacttgttggtataattgtcataggacttgcctaaaatattattaaaattacgggagtgtactcagctttgagcctaggagaaaatgccactgtgtgcatccattttaaagggttccctcataaaaaaatgttattccccattatcacatcagtacactgctttgaaaacaaaacttttcaacatgggcatactgggctacatggaaaatgacatcacccaggagtgatttctctttatatatattatttctgcagttaccatccttatctgagttatcacagttcatgaatctaagaggcggaactctacatcattagtaagaggttccaccaaagtctaaagttgtattcacttgtgtttgatgaactatctttaaaagaccataggtctatcattatttcttagacataatctaaagaaaaacagactagagaagccacctggttgtaacagaataagcagaagtttacagcatgatagtccaagtggtgataactttaaataaaactcaaatttttactgtttgtagacaggaatgctgtcctagagaacctcctcctcaaccagctacgtacatagttttatcctatgcattcctgttttctgtgttttttgttttttttttttgagacagagtctcgctctgtcacccaggctggagtgcagtggtgcgacctcagctcactgaaacctctgcctcccgggttcaagcgattctcctgcatcagcctcccgagtagctaggattacaggcgcccgccactacgcccagctaatttgtggtatttttagtagagacagggtttcaccatgttggccaggctggtctcgaactcctgacctcatgatccgcccgccttgacctcccaaagtgctgggattacaggcatgagccaccgcacccagcctgcattcctgtttttttaatggttttggagggtagcagtagagatggggtctcactatgttgcccagtctagtcttgaactcctgggctacagttaccctcctacctcggcttcccaaagtgctcggattacaggtgtgagccactgtgcctagcctataatgatcattttaatgtttcccatgcactcatttagtttgaaccttcacagcaacccaatgaggtaatactcccatttcacatataatactgagagatgagttgcacaagattatacactgttaagtagcagagccagaatggacttcagaatcccaactacaatacaaatgtttatttaaataaagaagaaagctattgtacaaatatcactcttcaggtttagcttacagagccatggctatggattcttagctctgtaaggaagtgcttctataaattcttaggtttagagatgataccatctgggtacctttgcttgaaccgtgcaaccacatctgggtctagtaggtggatcccatccagttggtttccaagggtgatcctgaaacagtgtaaaaggaggggcaaaccagaaatcctggaattagagggtttaatattgttaaaaaatgcataccaaatgaagactgcctatcatcatatcaaatatgccaattctaaaaagagcttaacattagaatagtatatggtagaattactagttcagaattggcatagattctggtgttaaaatagactggatctgtattatctgagggttagtaactaatgcttagccaggcctgcttcacagagttgctaccagggagtattctttggataagcaaaatgctagcagcatgtgttttaagctctgttaaggggtgaaagatgtaattattgacagattaaatagataacttcgtaaccaccagggggcagattcaatacatcacagaatggctgaggaagatccttgggttgtgaagagagtagaaaccctagggagcagtgcttttgggtcctagaacctgttgagtttctaatgaatatttgtagaatctcataaaacagtttaaatacaagcttaagtggcttatgaatcctgtgaagctcatttatggactagtgtaaaacaatgtgaagctctactaagttctgtccctaatcataaataatagccccttgaggacta

SEQ ID NO: 345996 - DNA, 1204 bp, Homo sapiens
agcagagagaacacacgtccttgcggaagtgacggcagttccgagtccagtgggggcggtgggagcgatgagggtctgagacggtgggagcggttgtgtgaagatggagtttcccggaggaaatgacaattacctgacgatcacagggccttcgcaccccttcctgtcaggggccgagacattccatacaccaagcttgggtgatgaggaatttgaaatcccacctatctccttggattctgatccctcattggctgtctcagatgtggttggccactttgatgacctggcagacccttcctcttcacaggatggcagtttttcagcccagtatggggtccagacattggacatgcctgtgggcatgacccatggcttgatggagcagggcggggggctcctgagtgggggcttgaccatggacttggaccactctataggaactcagtatagtgccaacccacctgttacaattgatgtaccaatgacagacatgacatctggcttgatggggcatagccagttgaccaccattgatcagtcagaactgagttcccagctgggtttgagcctagggggtggcaccatcctgccacctgcccagtcacctgaagatcgtctttcaaccaccccttcacctactagttcacttcacgaggatggtgttgaggatttccggaggcaacttcccagccagaagacagtcgtggtggaagcagggaaaaagcagaaggccccaaagaagagaaaaaagaaagatcctaatgaacctcagaaaccagtttcagcatatgctttattctttcgtgatacacaggctgccatcaagggacagaatcctaatgccacttttggtgaggtttcaaaaattgtggcctccatgtgggatagtcttggagaggagcaaaaacaggtatataagaggaaaactgaggctgccaagaaagagtatctgaaggcactggctgcttacaaagacaaccaggagtgtcaggccactgtggaaacagtggaattggatccagcaccaccatcacaaactccttctccacctcctatggctactgttgacccagcatctccagcaccagcttcaatagagccccctgccctgtccccatctctgctaaaattacaaaaaattacccagacatggtgccctgcactccagcctgggcgacggagcaagactgtctcaaaacaa

SEQ ID NO: 345997 - DNA, 845 bp, Homo sapiens
acaggcgtgagccaccacgctggccgataattttgatttggtatatctgccctcctcctccattgggtgaaagttttttgagagtaatatatgatgttgacatatgaagcctgcctcccaaagtgcctaggacaagtttttattcttgactgcttgtcttttatttccttattcccagtacctggtggagctcttgattcataacaagtgctatgtaaatgctaattgtatcaattaatattactgcctacttggagcttcaagtctaatttgaggaaaataaagagcaacagaaaagagaacacttggtccaacacataaaaagggtgataatattttagagagtttgggtagacttgaatattatttgtttagaacctgaatctcaagtctaagtctgtaacaagatttctcttccagatgatgaggagtctgatgaggaagctgtgaagaaaaccaacaaatgtgtactagtctgggagggtacagccaaagaccggagctttggagagatgaagtttaaacagtgtcctacagagaacatggctcgtgagcatttcaaaaagcatggggctgaacactactgggaccttgcgctgagtgaatctgtgttagagtccactgattgagactactgcaagcccttgcctctcctcccttgcctttgtctcttcagtcctctcacttattctatttcccaaccccctcccacttgtttgtgtgatctcagaactgtgccaagcagacactgggacaaagggagaatatcttgctcccctcctgagtcagcctggtgttgccctttattccccttatgtgcatatgattaaagagttatttttaaa

SEQ ID NO: 345998 - DNA, 2344 bp, Homo sapiens
gcacgagtcaggggctgaagtttgtgaggtgtagtattgagtcctgtttgagctattgttctctttttcctgaaaaatggcactgtcaaagagggagctggatgagctgaaaccatggatagagaagacagtgaagagggtcctgggtttctcagagcctacggtggtcacagcagcattgaactgtgtggggaagggcatggacaagaagaaggcagccgatcatctgaaaccttttcttgatgattctactctccgatttgtggacaaactgtttgaggctgtggaggaaggccgaagctctaggcattccaagtctagcagtgacaggagcagaaaacgagagctaaaggaggtgtttggtgatgactctgagatctctaaagaatcatcaggagtaaagaagcgacgaataccccgttttgaggaggtggaagaagagccagaggtgatccctgggcctccatcagagagccctggcatgctgactaagctccagatcaaacagatgatggaggcagcaacacgacaaatcgaggagaggaaaaaacagctgagcttcattagcccccctacacctcagccaaagactccttcttcctcccaaccagaacgacttcctattggcaacactattcagccctcccaggctgccactttcatgaatgatgccattgagaaggcaaggaaagcagctgaactgcaagctcgaatccaagcccagctggcactgaagccaggactcatcggcaatgccaacatggtgggcctggctaatctccatgccatgggcattgctcccccgaaggtggagttaaaagaccaaacgaaacctacaccactgatcctggatgagcaagggcgcactgtagatgcaacaggcaaggagattgagctgacacaccgcatgcctactctgaaagccaatattcgtgctgtgaagagggaacaattcaagcaacaactaaaggaaaagccatcagaagacatggaatccaataccttttttgacccccgagtctccattgccccttcccagcgccagagacgcacttttaaattccatgacaagggcaaatttgagaagattgctcagcgattacggacaaaggctcaactggagaagctacaggcagagatttcacaagcagctcgaaaaacaggcatccatacttcgactaggcttgccctcattgctcctaagaaggagctaaaggaaggagatattcctgaaattgagtggtgggactcttacataatccccaatggctttgatcttacagaggaaaatcccaagagagaagattattttggaatcacaaatcttgttgaacatccagcccagctcaatcctccagttgacaatgacacaccagttactctgggagtatatcttaccaagaaggaacagaaaaaacttcggagacaaacaaggagggaagcacagaaggaactacaagaaaaagtcaggctgggcctgatgcctcctccagaacccaaagtgagaatttctaatttgatgcgagtattaggaacagaagctgttcaagaccccacgaaggtagaagcccacgtcagagctcagatggcaaaaagacagaaagcgcatgaagaggccaacgctgcccgaaaactcacagcagaacagagaaaggtcaagaaaattaaaaagcttaaagaagacatttcacagggggtacacatatctgtatatagagttcgaaatttgagcaacccagccaagaagttcaagattgaagccaatgctgggcaactgtacctgacaggggtggtggtactgcacaaggatgtcaacgtggtagtagtggaagggggccccaaggcccagaagaaatttaagcgtcttatgctgcatcggataaagtgggatgaacagacatctaacacaaagggagatgatgatgaggagtctgatgaggaagctgtgaagaaaaccaacaaatgtgtactagtctgggagggtacagccaaagaccggagctttggagagatgaagtttaaacagtgtcctacagagaacatggctcgtgagcatttcaaaaagcatggggctgaacactactgggaccttgcgctgagtgaatctgtgttagagtccactgattgagactactgcaagcccttgcctctcctcccttgcctttgtctcttcagtcctctcacttattctatttcccaaccccctcccacttgtttgtgtgatctcagaactgtgccaagcagacactgggacaaagggagaatatcttgctcccctcctgagtcagcctggtgttgccctttattccccttatgtgcatatgattaaagagttatttttaaa

SEQ ID NO: 345999 - DNA, 2812 bp, Homo sapiens
gcacgagtcaggggctgaagtttgtgaggtgtagtattgagtcctgtttgagctattgttctctttttcctgaaaaatggcactgtcaaagagggagctggatgagctgaaaccatggatagagaagacagtgaagagggtcctgggtttctcagagcctacggtggtcacagcagcattgaactgtgtggggaagggcatggacaagaagaaggcagccgatcatctgaaaccttttcttgatgattctactctccgatttgtggacaaactgtttgaggctgtggaggaaggccgaagctctaggcattccaagtctagcagtgacaggagcagaaaacgagagctaaaggaggtgtttggtgatgactctgagatctctaaagaatcatcaggagtaaagaagcgacgaataccccgttttgaggaggtggaagaagagccagaggtgatccctgggcctccatcagagagccctggcatgctgactaagctccagatcaaacagatgatggaggcagcaacacgacaaatcgaggagaggaaaaaacagctgagcttcattagcccccctacacctcagccaaagactccttcttcctcccaaccagaacgacttcctattggcaacactattcagccctcccaggctgccactttcatgaatgatgccattgagaaggcaaggaaagcagctgaactgcaagctcgaatccaagcccagctggcactgaagccaggactcatcggcaatgccaacatggtgggcctggctaatctccatgccatgggcattgctcccccgaaggtggagttaaaagaccaaacgaaacctacaccactgatcctggatgagcaagggcgcactgtagatgcaacaggcaaggagattgagctgacacaccgcatgcctactctgaaagccaatattcgtgctgtgaagagggaacaattcaagcaacaactaaaggaaaagccatcagaagacatggaatccaataccttttttgacccccgagtctccattgccccttcccagcgccagagacgcacttttaaattccatgacaagggcaaatttgagaagattgctcagcgattacggacaaaggctcaactggagaagctacaggcagagatttcacaagcagctcgaaaaacaggcatccatacttcgactaggcttgccctcattgctcctaagaaggagctaaaggaaggagatattcctgaaattgagtggtgggactcttacataatccccaatggctttgatcttacagaggaaaatcccaagagagaagattattttggaatcacaaatcttgttgaacatccagcccagctcaatcctccagttgacaatgacacaccagttactctgggagtatatcttaccaagaaggaacagaaaaaacttcggagacaaacaaggagggaagcacagaaggaactacaagaaaaagtcaggctgggcctgatgcctcctccagaacccaaagtgagaatttctaatttgatgcgagtattaggaacagaagctgttcaagaccccacgaaggtagaagcccacgtcagagctcagatggcaaaaagacagaaagcgcatgaagaggccaacgctgcccgaaaactcacagcagaacagagaaaggtcaagaaaattaaaaagcttaaagaagacatttcacagggggtacacatatctgtatatagagttcgaaatttgagcaacccagccaagaagttcaagattgaagccaatgctgggcaactgtacctgacaggggtggtggtactgcacaaggatgtcaacgtggtagtagtggaagggggccccaaggcccagaagaaatttaagcgtcttatgctgcatcggataaagtgggatgaacagacatctaacacaaagggagatgatgatgaggagtctgatgaggaagctgtgaagaaaaccaacaaatgtgtactagtctgggagggtacagccaaagaccggagctttggagagatgaagtttaaacagtgtcctacagagaacatggctcgtgagcatttcaaaaagcatggggctgaacactactgggaccttgcgctgagtgaatctgtgttagagtccactgattgagactactgcaagcccttgcctctcctcccttgcctttgtctcttcagtcctctcacttattctatttcccaaccccctcccacttgtttgtgtgatctcagaactgtgccaagcagacactgggacaaagggagaatatcttgctcccctcctgagtcagcctggtgttgccctttattccccttatgtgcatatgattaaagagttatttttaaaaaaacaaaaacaccaaacacacacaccacaatacaaacaacaacacactaaaaaacaaataacatcagccactaaacaataagcgcgggccgctccataaaaatcacacccagaggggaccaacagagccgagaaagtgaccacatttactaattaataaagaagtgggccccacctagcggacgtctctctataaaagcgagagtgacgcgcccggtgtaaaaaccaacgcacggggacagcagagacaaactatgtctcctagtggtgcatcacctttgagaaggaacacacatcatacggcgtggcggagacacacatataggaaaccacccctcaacgcaggtaataagtggccaggagggaacatatacagctcgtgagaggcatattaggggagcagccgaccccgctaccctctgcccggcgtcaaaaattatccatggcggattctgtgaactcatcacg

SEQ ID NO: 346000 - DNA, 584 bp, Homo sapiens
ccgagatcgtgccactgcactccagcctgggcgacagagcgagactctgtctcagaaaaacacaaatatccaaggaaatggaggtcacaatttttttttaaccataaaatcacgttcagctgggcacatgtctcacaaatgttgctaggtcttcttataaaagaatattatctgatttaaataagaaattgaagtgtttttattatatatctcttttctagggtacagccaaagaccggagctttggagagatgaagtttaaacagtgtcctacagagaacatggctcgtgagcatttcaaaaagcatggggctgaacactactgggaccttgcgctgagtgaatctgtgttagagtccactgattgagactactgcaagcccttgcctctcctcccttgcctttgtctcttcagtcctctcacttattctatttcccaaccccctcccacttgtttgtgtgatctcagaactgtgccaagcagacactgggacaaagggagaatatcttgctcccctcctgagtcagcctggtgttgccctttattccccttatgtgcatatgattaaagagttatttttaaa

SEQ ID NO: 346001 - DNA, 844 bp, Homo sapiens
  misc_feature (575)..(575): n is a, c, g, or t
agaaggtttccggttccggtgtaacgttcgggctccgtctcaggggctgaagtttgtgaggtgtagtattgagtcctgtttgagctattgttctctttttcctgaaaaatggcactgtcaaagagggagctggatgagctgaaaccatggatagagaagacagtgaagagggtcctgggtttctcagagcctacggtggtcacagcagcattgaactgtgtggggaagggcatggacaagaagaaggcagccgatcatctgaaaccttttcttgatgattctactctccgatttgtggacaaactgtttgaggctgtggaggaaggccgaagctctaggcattccaagtctagcagtgacaggagcagaaaacgagagctaaaggaggtgtttggtgatgactctgagatctctaaagaatcatcaggagtaaagaagcgacgaataccccgttttgaggaggttgagtgagccgagatcgaccattgcactccagtctggcacagagtgggattccgtcttaaaaaaaaaaaggaaagggaaaaaaaatagcattatacctcttcctggttcangcgcatgaaaattttgaacactccaaattccgtggaataatccaaaaaaaatttttaggttttacaatattacttcttatagtaatagttacttaaaaagcctcagggtattttatttttaaagctacaattcagtggattcattaacaataggtttttgtgtgaccactaggctattcaggggtgccagggtacatggtgggaaaatttgtgaatacaggatgataacacgcttgtgtatgggagatcaaggcggttgggtggaagta

SEQ ID NO: 346002 - DNA, 2376 bp, Homo sapiens
agaaggtttccggttccggtgtaacgttcgggctccgtctcaggggctgaagtttgtgaggtgtagtattgagtcctgtttgagctattgttctctttttcctgaaaaatggcactgtcaaagagggagctggatgagctgaaaccatggatagagaagacagtgaagagggtcctgggtttctcagagcctacggtggtcacagcagcattgaactgtgtggggaagggcatggacaagaagaaggcagccgatcatctgaaaccttttcttgatgattctactctccgatttgtggacaaactgtttgaggctgtggaggaaggccgaagctctaggcattccaagtctagcagtgacaggagcagaaaacgagagctaaaggaggtgtttggtgatgactctgagatctctaaagaatcatcaggagtaaagaagcgacgaataccccgttttgaggaggtggaagaagagccagaggtgatccctgggcctccatcagagagccctggcatgctgactaagctccagatcaaacagatgatggaggcagcaacacgacaaatcgaggagaggaaaaaacagctgagcttcattagcccccctacacctcagccaaagactccttcttcctcccaaccagaacgacttcctattggcaacactattcagccctcccaggctgccactttcatgaatgatgccattgagaaggcaaggaaagcagctgaactgcaagctcgaatccaagcccagctggcactgaagccaggactcatcggcaatgccaacatggtgggcctggctaatctccatgccatgggcattgctcccccgaaggtggagttaaaagaccaaacgaaacctacaccactgatcctggatgagcaagggcgcactgtagatgcaacaggcaaggagattgagctgacacaccgcatgcctactctgaaagccaatattcgtgctgtgaagagggaacaattcaagcaacaactaaaggaaaagccatcagaagacatggaatccaataccttttttgacccccgagtctccattgccccttcccagcgccagagacgcacttttaaattccatgacaagggcaaatttgagaagattgctcagcgattacggacaaaggctcaactggagaagctacaggcagagatttcacaagcagctcgaaaaacaggcatccatacttcgactaggcttgccctcattgctcctaagaaggagctaaaggaaggagatattcctgaaattgagtggtgggactcttacataatccccaatggctttgatcttacagaggaaaatcccaagagagaagattattttggaatcacaaatcttgttgaacatccagcccagctcaatcctccagttgacaatgacacaccagttactctgggagtatatcttaccaagaaggaacagaaaaaacttcggagacaaacaaggagggaagcacagaaggaactacaagaaaaagtcaggctgggcctgatgcctcctccagaacccaaagtgagaatttctaatttgatgcgagtattaggaacagaagctgttcaagaccccacgaaggtagaagcccacgtcagagctcagatggcaaaaagacagaaagcgcatgaagaggccaacgctgcccgaaaactcacagcagaacagagaaaggtcaagaaaattaaaaagcttaaagaagacatttcacagggggtacacatatctgtatatagagttcgaaatttgagcaacccagccaagaagttcaagattgaagccaatgctgggcaactgtacctgacaggggtggtggtactgcacaaggatgtcaacgtggtagtagtggaagggggccccaaggcccagaagaaatttaagcgtcttatgctgcatcggataaagtgggatgaacagacatctaacacaaagggagatgatgatgaggagtctgatgaggaagctgtgaagaaaaccaacaaatgtgtactagtctgggagggtacagccaaagaccggagctttggagagatgaagtttaaacagtgtcctacagagaacatggctcgtgagcatttcaaaaagcatggggctgaacactactgggaccttgcgctgagtgaatctgtgttagagtccactgattgagactactgcaagcccttgcctctcctcccttgcctttgtctcttcagtcctctcacttattctatttcccaaccccctcccacttgtttgtgtgatctcagaactgtgccaagcagacactgggacaaagggagaatatcttgctcccctcctgagtcagcctggtgttgccctttattccccttatgtgcatatgattaaagagttatttttaaa

SEQ ID NO: 346003 - DNA, 2472 bp, Homo sapiens
agaaggtttccggttccggtgtaacgttcgggctccgtctcaggggctgaagtttgtgaggtgtagtattgagtcctgtttgagctattgttctctttttcctgaaaaatggcactgtcaaagagggagctggatgagctgaaaccatggatagagaagacagtgaagagggtcctgggtttctcagagcctacggtggtcacagcagcattgaactgtgtggggaagggcatggacaagaagaaggcagccgatcatctgaaaccttttcttgatgattctactctccgatttgtggacaaactgtttgaggctgtggaggaaggccgaagctctaggcattccaagtctagcagtgacaggagcagaaaacgagagctaaaggagttccaggaagcgctcgcccctggccgaggatatgtccttgcaaaacacgagccctcctagtgaagaggggatgtcacccaaagcctaccaccggaggtgtttggtgatgactctgagatctctaaagaatcatcaggagtaaagaagcgacgaataccccgttttgaggaggtggaagaagagccagaggtgatccctgggcctccatcagagagccctggcatgctgactaagctccagatcaaacagatgatggaggcagcaacacgacaaatcgaggagaggaaaaaacagctgagcttcattagcccccctacacctcagccaaagactccttcttcctcccaaccagaacgacttcctattggcaacactattcagccctcccaggctgccactttcatgaatgatgccattgagaaggcaaggaaagcagctgaactgcaagctcgaatccaagcccagctggcactgaagccaggactcatcggcaatgccaacatggtgggcctggctaatctccatgccatgggcattgctcccccgaaggtggagttaaaagaccaaacgaaacctacaccactgatcctggatgagcaagggcgcactgtagatgcaacaggcaaggagattgagctgacacaccgcatgcctactctgaaagccaatattcgtgctgtgaagagggaacaattcaagcaacaactaaaggaaaagccatcagaagacatggaatccaataccttttttgacccccgagtctccattgccccttcccagcgccagagacgcacttttaaattccatgacaagggcaaatttgagaagattgctcagcgattacggacaaaggctcaactggagaagctacaggcagagatttcacaagcagctcgaaaaacaggcatccatacttcgactaggcttgccctcattgctcctaagaaggagctaaaggaaggagatattcctgaaattgagtggtgggactcttacataatccccaatggctttgatcttacagaggaaaatcccaagagagaagattattttggaatcacaaatcttgttgaacatccagcccagctcaatcctccagttgacaatgacacaccagttactctgggagtatatcttaccaagaaggaacagaaaaaacttcggagacaaacaaggagggaagcacagaaggaactacaagaaaaagtcaggctgggcctgatgcctcctccagaacccaaagtgagaatttctaatttgatgcgagtattaggaacagaagctgttcaagaccccacgaaggtagaagcccacgtcagagctcagatggcaaaaagacagaaagcgcatgaagaggccaacgctgcccgaaaactcacagcagaacagagaaaggtcaagaaaattaaaaagcttaaagaagacatttcacagggggtacacatatctgtatatagagttcgaaatttgagcaacccagccaagaagttcaagattgaagccaatgctgggcaactgtacctgacaggggtggtggtactgcacaaggatgtcaacgtggtagtagtggaagggggccccaaggcccagaagaaatttaagcgtcttatgctgcatcggataaagtgggatgaacagacatctaacacaaagggagatgatgatgaggagtctgatgaggaagctgtgaagaaaaccaacaaatgtgtactagtctgggagggtacagccaaagaccggagctttggagagatgaagtttaaacagtgtcctacagagaacatggctcgtgagcatttcaaaaagcatggggctgaacactactgggaccttgcgctgagtgaatctgtgttagagtccactgattgagactactgcaagcccttgcctctcctcccttgcctttgtctcttcagtcctctcacttattctatttcccaaccccctcccacttgtttgtgtgatctcagaactgtgccaagcagacactgggacaaagggagaatatcttgctcccctcctgagtcagcctggtgttgccctttattccccttatgtgcatatgattaaagagttatttttaaa

SEQ ID NO: 346004 - DNA, 2339 bp, Homo sapiens
agaaggtttccggttccggtgtaacgttcgggctccgtctcaggggctgaagtttgtgaggtgtagtattgagtcctgtttgagctattgttctctttttcctgaaaaatggcactgtcaaagagggagctggatgagctgaaaccatggatagagaagacagtgaagagggtcctgggtttctcagagcctacggtggtcacagcagcattgaactgtgtggggaagggcatggacaagaagaaggcagccgatcatctgaaaccttttcttgatgattctactctccgatttgtggacaaactgtttgaggctgtggaggaaggccgaagctctaggcattccaagtctagcagtgacaggagcagaaaacgagagctaaaggaggtgtttggtgatgactctgagatctctaaagaatcatcaggagtaaagaagcgacgaataccccgttttgaggaggtggaagaagagccagaggtgatccctgggcctccatcagagagccctggcatgctgactaagctccagatcaaacagatgatggaggcagcaacacgacaaatcgaggagaggaaccaaagactccttcttcctcccaaccagaacgacttcctattggcaacactattcagccctcccaggctgccactttcatgaatgatgccattgagaaggcaaggaaagcagctgaactgcaagctcgaatccaagcccagctggcactgaagccaggactcatcggcaatgccaacatggtgggcctggctaatctccatgccatgggcattgctcccccgaaggtggagttaaaagaccaaacgaaacctacaccactgatcctggatgagcaagggcgcactgtagatgcaacaggcaaggagattgagctgacacaccgcatgcctactctgaaagccaatattcgtgctgtgaagagggaacaattcaagcaacaactaaaggaaaagccatcagaagacatggaatccaataccttttttgacccccgagtctccattgccccttcccagcgccagagacgcacttttaaattccatgacaagggcaaatttgagaagattgctcagcgattacggacaaaggctcaactggagaagctacaggcagagatttcacaagcagctcgaaaaacaggcatccatacttcgactaggcttgccctcattgctcctaagaaggagctaaaggaaggagatattcctgaaattgagtggtgggactcttacataatccccaatggctttgatcttacagaggaaaatcccaagagagaagattattttggaatcacaaatcttgttgaacatccagcccagctcaatcctccagttgacaatgacacaccagttactctgggagtatatcttaccaagaaggaacagaaaaaacttcggagacaaacaaggagggaagcacagaaggaactacaagaaaaagtcaggctgggcctgatgcctcctccagaacccaaagtgagaatttctaatttgatgcgagtattaggaacagaagctgttcaagaccccacgaaggtagaagcccacgtcagagctcagatggcaaaaagacagaaagcgcatgaagaggccaacgctgcccgaaaactcacagcagaacagagaaaggtcaagaaaattaaaaagcttaaagaagacatttcacagggggtacacatatctgtatatagagttcgaaatttgagcaacccagccaagaagttcaagattgaagccaatgctgggcaactgtacctgacaggggtggtggtactgcacaaggatgtcaacgtggtagtagtggaagggggccccaaggcccagaagaaatttaagcgtcttatgctgcatcggataaagtgggatgaacagacatctaacacaaagggagatgatgatgaggagtctgatgaggaagctgtgaagaaaaccaacaaatgtgtactagtctgggagggtacagccaaagaccggagctttggagagatgaagtttaaacagtgtcctacagagaacatggctcgtgagcatttcaaaaagcatggggctgaacactactgggaccttgcgctgagtgaatctgtgttagagtccactgattgagactactgcaagcccttgcctctcctcccttgcctttgtctcttcagtcctctcacttattctatttcccaaccccctcccacttgtttgtgtgatctcagaactgtgccaagcagacactgggacaaagggagaatatcttgctcccctcctgagtcagcctggtgttgccctttattccccttatgtgcatatgattaaagagttatttttaaa

SEQ ID NO: 346005 - DNA, 2229 bp, Homo sapiens
agaaggtttccggttccggtgtaacgttcgggctccgtctcaggggctgaagtttgtgaggtgtagtattgagtcctgtttgagctattgttctctttttcctgaaaaatggcactgtcaaagagggagctggatgagctgaaaccatggatagagaagacagtgaagagggtcctgggtttctcagagcctacggtggtcacagcagcattgaactgtgtggggaagggcatggacaagaagaaggcagccgatcatctgaaaccttttcttgatgattctactctccgatttgtggacaaactgtttgaggctgtggaggaaggccgaagctctaggcattccaagtctagcagtgacaggagcagaaaacgagagctaaagatcaaacagatgatggaggcagcaacacgacaaatcgaggagaggaaaaaacagctgagcttcattagcccccctacacctcagccaaagactccttcttcctcccaaccagaacgacttcctattggcaacactattcagccctcccaggctgccactttcatgaatgatgccattgagaaggcaaggaaagcagctgaactgcaagctcgaatccaagcccagctggcactgaagccaggactcatcggcaatgccaacatggtgggcctggctaatctccatgccatgggcattgctcccccgaaggtggagttaaaagaccaaacgaaacctacaccactgatcctggatgagcaagggcgcactgtagatgcaacaggcaaggagattgagctgacacaccgcatgcctactctgaaagccaatattcgtgctgtgaagagggaacaattcaagcaacaactaaaggaaaagccatcagaagacatggaatccaataccttttttgacccccgagtctccattgccccttcccagcgccagagacgcacttttaaattccatgacaagggcaaatttgagaagattgctcagcgattacggacaaaggctcaactggagaagctacaggcagagatttcacaagcagctcgaaaaacaggcatccatacttcgactaggcttgccctcattgctcctaagaaggagctaaaggaaggagatattcctgaaattgagtggtgggactcttacataatccccaatggctttgatcttacagaggaaaatcccaagagagaagattattttggaatcacaaatcttgttgaacatccagcccagctcaatcctccagttgacaatgacacaccagttactctgggagtatatcttaccaagaaggaacagaaaaaacttcggagacaaacaaggagggaagcacagaaggaactacaagaaaaagtcaggctgggcctgatgcctcctccagaacccaaagtgagaatttctaatttgatgcgagtattaggaacagaagctgttcaagaccccacgaaggtagaagcccacgtcagagctcagatggcaaaaagacagaaagcgcatgaagaggccaacgctgcccgaaaactcacagcagaacagagaaaggtcaagaaaattaaaaagcttaaagaagacatttcacagggggtacacatatctgtatatagagttcgaaatttgagcaacccagccaagaagttcaagattgaagccaatgctgggcaactgtacctgacaggggtggtggtactgcacaaggatgtcaacgtggtagtagtggaagggggccccaaggcccagaagaaatttaagcgtcttatgctgcatcggataaagtgggatgaacagacatctaacacaaagggagatgatgatgaggagtctgatgaggaagctgtgaagaaaaccaacaaatgtgtactagtctgggagggtacagccaaagaccggagctttggagagatgaagtttaaacagtgtcctacagagaacatggctcgtgagcatttcaaaaagcatggggctgaacactactgggaccttgcgctgagtgaatctgtgttagagtccactgattgagactactgcaagcccttgcctctcctcccttgcctttgtctcttcagtcctctcacttattctatttcccaaccccctcccacttgtttgtgtgatctcagaactgtgccaagcagacactgggacaaagggagaatatcttgctcccctcctgagtcagcctggtgttgccctttattccccttatgtgcatatgattaaagagttatttttaaa

SEQ ID NO: 346006 - DNA, 2024 bp, Homo sapiens
cttacaggcgtgagctaccacgcccagccaattattttcttttttggggggtgggggatggagtcttgctctgtcacttaggctggagtacggtggcgcgttctcggctcactgcaacctctgcctcccgggttcacgccattctcctgcctcagcctcctgagtagctgggactacagatcaaacagatgatggaggcagcaacacgacaaatcgaggagaggaaaaaacagctgagcttcattagcccccctacacctcagccaaagactccttcttcctcccaaccagaacgacttcctattggcaacactattcagccctcccaggctgccactttcatgaatgatgccattgagaaggcaaggaaagcagctgaactgcaagctcgaatccaagcccagctggcactgaagccaggactcatcggcaatgccaacatggtgggcctggctaatctccatgccatgggcattgctcccccgaaggtggagttaaaagaccaaacgaaacctacaccactgatcctggatgagcaagggcgcactgtagatgcaacaggcaaggagattgagctgacacaccgcatgcctactctgaaagccaatattcgtgctgtgaagagggaacaattcaagcaacaactaaaggaaaagccatcagaagacatggaatccaataccttttttgacccccgagtctccattgccccttcccagcgccagagacgcacttttaaattccatgacaagggcaaatttgagaagattgctcagcgattacggacaaaggctcaactggagaagctacaggcagagatttcacaagcagctcgaaaaacaggcatccatacttcgactaggcttgccctcattgctcctaagaaggagctaaaggaaggagatattcctgaaattgagtggtgggactcttacataatccccaatggctttgatcttacagaggaaaatcccaagagagaagattattttggaatcacaaatcttgttgaacatccagcccagctcaatcctccagttgacaatgacacaccagttactctgggagtatatcttaccaagaaggaacagaaaaaacttcggagacaaacaaggagggaagcacagaaggaactacaagaaaaagtcaggctgggcctgatgcctcctccagaacccaaagtgagaatttctaatttgatgcgagtattaggaacagaagctgttcaagaccccacgaaggtagaagcccacgtcagagctcagatggcaaaaagacagaaagcgcatgaagaggccaacgctgcccgaaaactcacagcagaacagagaaaggtcaagaaaattaaaaagcttaaagaagacatttcacagggggtacacatatctgtatatagagttcgaaatttgagcaacccagccaagaagttcaagattgaagccaatgctgggcaactgtacctgacaggggtggtggtactgcacaaggatgtcaacgtggtagtagtggaagggggccccaaggcccagaagaaatttaagcgtcttatgctgcatcggataaagtgggatgaacagacatctaacacaaagggagatgatgatgaggagtctgatgaggaagctgtgaagaaaaccaacaaatgtgtactagtctgggagggtacagccaaagaccggagctttggagagatgaagtttaaacagtgtcctacagagaacatggctcgtgagcatttcaaaaagcatggggctgaacactactgggaccttgcgctgagtgaatctgtgttagagtccactgattgagactactgcaagcccttgcctctcctcccttgcctttgtctcttcagtcctctcacttattctatttcccaaccccctcccacttgtttgtgtgatctcagaactgtgccaagcagacactgggacaaagggagaatatcttgctcccctcctgagtcagcctggtgttgccctttattccccttatgtgcatatgattaaagagttatttttaaa

SEQ ID NO: 346007 - DNA, 2647 bp, Homo sapiens
agaaggtttccggttccggtgtaacgttcgggctccgtctcaggggctgaagtttgtgaggtgtagtattgagtcctgtttgagctattgttctctttttcctgaaaaatggcactgtcaaagagggagctggatgagctgaaaccatggatagagaagacagtgaagagggtcctgggtttctcagagcctacggtggtcacagcagcattgaactgtgtggggaagggcatggacaagaagaaggcagccgatcatctgaaaccttttcttgatgattctactctccgatttgtggacaaactgtttgaggctgtggaggaaggccgaagctctaggcattccaagtctagcagtgacaggagcagaaaacgagagctaaaggaggtgtttggtgatgactctgagatctctaaagaatcatcaggagtaaagaagcgacgaataccccgttttgaggaggtggaagaagagccagaggtgatccctgggcctccatcagagagccctggcatgctgactaagctccagatcaaacagatgatggaggcagcaacacgacaaatcgaggagaggaaaaaacagctgagcttcattagcccccctacacctcagccaaagactccttcttcctcccaaccagaacgacttcctattggcaacactattcagccctcccaggctgccactttcatgaatgatgccattgagaaggcaaggaaagcagctgaactgcaagctcgaatccaagcccagctggcactgaagccaggactcatcggcaatgccaacatggtgggcctggctaatctccatgccatgggcattgctcccccgaaggtggagttaaaagaccaaacgaaacctacaccactgatcctggatgagcaagggcgcactgtagatgcaacaggcaaggagattgagctgacacaccgcatgcctactctgaaagccaatattcgtgctgtgaagagggaacaattcaagcaacaactaaaggaaaagccatcagaagacatggaatccaataccttttttgacccccgagtctccattgccccttcccagcgccagagacgcacttttaaattccatgacaagggcaaatttgagaagattgctcagcgattacggacaaaggctcaactggagaagctacaggcagagatttcacaagcagctcgaaaaacaggcatccatacttcgactaggcttgccctcattgctcctaagaaggagctaaaggaaggagatattcctgaaattgagtggtgggactcttacataatccccaatggctttgatcttacagaggaaaatcccaagagagaagattattttggaatcacaaatcttgttgaacatccagcccagctcaatcctccagttgacaatgacacaccagttactctgggagtatatcttaccaagaaggaacagaaaaaacttcggagacaaacaaggagggaagcacagaaggaactacaagaaaaagtcaggctgggcctgatgcctcctccagaacccaaagtgagaatttctaatttgatgcgagtattaggaacagaagctgttcaagaccccacgaaggtagaagcccacgtcagagctcagatggcaaaaagacagaaagcgcatgaagaggccaacgctgcccgaaaactcacagcagaacagagaaaggtcaagaaaattaaaaagcttaaagaagacatttcacagggggtacacatatctgtatatagagttcgaaatttgagcaacccagccaagaagttcaagattgaagccaatgctgggcaactgtacctgacaggggtggtggtactgcacaaggatgtcaacgtggtagtagtggaagggggtgagtctgaaaaacttgagggagactgtccccagacaaccctaggcttagagtgattagcattgtggggagaaaggagaaaaagatcgtattttagtgccatacctgatataatatgctaggtctctgcttctgtgttttttggagtagaaggccctaagatgtggttcctgagattgcttcaactaccacattaatgtctgagctcagaggttctttctaccccatcatcttccacagttctggcaaaattattcttctctgtttccaggccccaaggcccagaagaaatttaagcgtcttatgctgcatcggataaagtgggatgaacagacatctaacacaaagggagatgatgatgaggagtctgatgaggaagctgtgaagaaaaccaacaaatgtgtactagtctgggagggtacagccaaagaccggagctttggagagatgaagtttaaacagtgtcctacagagaacatggctcgtgagcatttcaaaaagcatggggctgaacactactgggaccttgcgctgagtgaatctgtgttagagtccactgattgagactactgcaagcccttgcctctcctcccttgcctttgtctcttcagtcctctcacttattctatttcccaaccccctcccacttgtttgtgtgatctcagaactgtgccaagcagacactgggacaaagggagaatatcttgctcccctcctgagtcagcctggtgttgccctttattccccttatgtgcatatgattaaagagttatttttaaa

SEQ ID NO: 346008 - DNA, 1562 bp, Homo sapiens
cttcctgcttctgcctttggttatgttcaccagcttctctatgcttcctgcttctgcccctgatcctggatgagcaagggcgcactgtagatgcaacaggcaaggagattgagctgacacaccgcatgcctactctgaaagccaatattcgtgctgtgaagagggaacaattcaagcaacaactaaaggaaaagccatcagaagacatggaatccaataccttttttgacccccgagtctccattgccccttcccagcgccagagacgcacttttaaattccatgacaagggcaaatttgagaagattgctcagcgattacggacaaaggctcaactggagaagctacaggcagagatttcacaagcagctcgaaaaacaggcatccatacttcgactaggcttgccctcattgctcctaagaaggagctaaaggaaggagatattcctgaaattgagtggtgggactcttacataatccccaatggctttgatcttacagaggaaaatcccaagagagaagattattttggaatcacaaatcttgttgaacatccagcccagctcaatcctccagttgacaatgacacaccagttactctgggagtatatcttaccaagaaggaacagaaaaaacttcggagacaaacaaggagggaagcacagaaggaactacaagaaaaagtcaggctgggcctgatgcctcctccagaacccaaagtgagaatttctaatttgatgcgagtattaggaacagaagctgttcaagaccccacgaaggtagaagcccacgtcagagctcagatggcaaaaagacagaaagcgcatgaagaggccaacgctgcccgaaaactcacagcagaacagagaaaggtcaagaaaattaaaaagcttaaagaagacatttcacagggggtacacatatctgtatatagagttcgaaatttgagcaacccagccaagaagttcaagattgaagccaatgctgggcaactgtacctgacaggggtggtggtactgcacaaggatgtcaacgtggtagtagtggaagggggccccaaggcccagaagaaatttaagcgtcttatgctgcatcggataaagtgggatgaacagacatctaacacaaagggagatgatgatgaggagtctgatgaggaagctgtgaagaaaaccaacaaatgtgtactagtctgggagggtacagccaaagaccggagctttggagagatgaagtttaaacagtgtcctacagagaacatggctcgtgagcatttcaaaaagcatggggctgaacactactgggaccttgcgctgagtgaatctgtgttagagtccactgattgagactactgcaagcccttgcctctcctcccttgcctttgtctcttcagtcctctcacttattctatttcccaaccccctcccacttgtttgtgtgatctcagaactgtgccaagcagacactgggacaaagggagaatatcttgctcccctcctgagtcagcctggtgttgccctttattccccttatgtgcatatgattaaagagttatttttaaa

SEQ ID NO: 346009 - DNA, 1647 bp, Homo sapiens
agaaggtttccggttccggtgtaacgttcgggctccgtctcaggggctgaagtttgtgaggtgtagtattgagtcctgtttgagctattgttctctttttcctgaaaaatggcactgtcaaagagggagctggatgagctgaaaccatggatagagaagacagtgaagagggtcctgggtttctcagagcctacggtggtcacagcacgcatgcctactctgaaagccaatattcgtgctgtgaagagggaacaattcaagcaacaactaaaggaaaagccatcagaagacatggaatccaataccttttttgacccccgagtctccattgccccttcccagcgccagagacgcacttttaaattccatgacaagggcaaatttgagaagattgctcagcgattacggacaaaggctcaactggagaagctacaggcagagatttcacaagcagctcgaaaaacaggcatccatacttcgactaggcttgccctcattgctcctaagaaggagctaaaggaaggagatattcctgaaattgagtggtgggactcttacataatccccaatggctttgatcttacagaggaaaatcccaagagagaagattattttggaatcacaaatcttgttgaacatccagcccagctcaatcctccagttgacaatgacacaccagttactctgggagtatatcttaccaagaaggaacagaaaaaacttcggagacaaacaaggagggaagcacagaaggaactacaagaaaaagtcaggctgggcctgatgcctcctccagaacccaaagtgagaatttctaatttgatgcgagtattaggaacagaagctgttcaagaccccacgaaggtagaagcccacgtcagagctcagatggcaaaaagacagaaagcgcatgaagaggccaacgctgcccgaaaactcacagcagaacagagaaaggtcaagaaaattaaaaagcttaaagaagacatttcacagggggtacacatatctgtatatagagttcgaaatttgagcaacccagccaagaagttcaagattgaagccaatgctgggcaactgtacctgacaggggtggtggtactgcacaaggatgtcaacgtggtagtagtggaagggggccccaaggcccagaagaaatttaagcgtcttatgctgcatcggataaagtgggatgaacagacatctaacacaaagggagatgatgatgaggagtctgatgaggaagctgtgaagaaaaccaacaaatgtgtactagtctgggagggtacagccaaagaccggagctttggagagatgaagtttaaacagtgtcctacagagaacatggctcgtgagcatttcaaaaagcatggggctgaacactactgggaccttgcgctgagtgaatctgtgttagagtccactgattgagactactgcaagcccttgcctctcctcccttgcctttgtctcttcagtcctctcacttattctatttcccaaccccctcccacttgtttgtgtgatctcagaactgtgccaagcagacactgggacaaagggagaatatcttgctcccctcctgagtcagcctggtgttgccctttattccccttatgtgcatatgattaaagagttatttttaaa

SEQ ID NO: 346010 - DNA, 1309 bp, Homo sapiens
agaattacttgaacccaggaggcagaggctacagtgagctgagatcgtgccattgcactccaacctgggtgacagagtgagagagagaaaaaaatatatatatatatatgtattcttactgctttggtatactaatatctctgcctgacagttgacaatgacacaccagttactctgggagtatatcttaccaagaaggaacagaaaaaacttcggagacaaacaaggagggaagcacagaaggaactacaagaaaaagtcaggctgggcctgatgcctcctccagaacccaaagtgagaatttctaatttgatgcgagtattaggaacagaagctgttcaagaccccacgaaggtagaagcccacgtcagagctcagatggcaaaaagacagaagtaagtgccatgggattgggtggaaacctcgggcaagtacctttcccaaactcttctggggggtccatatttggagggaggggagagttctccgttgctctctctttccctcagccctgcctctgatcttcaatgcctttctcacttgtggatgtccttcctgtcacgacagagcgcatgaagaggccaacgctgcccgaaaactcacagcagaacagagaaaggtcaagaaaattaaaaagcttaaagaagacatttcacagggggtacacatatctgtatatagagttcgaaatttgagcaacccagccaagaagttcaagattgaagccaatgctgggcaactgtacctgacaggggtggtggtactgcacaaggatgtcaacgtggtagtagtggaagggggccccaaggcccagaagaaatttaagcgtcttatgctgcatcggataaagtgggatgaacagacatctaacacaaagggagatgatgatgaggagtctgatgaggaagctgtgaagaaaaccaacaaatgtgtactagtctgggagggtacagccaaagaccggagctttggagagatgaagtttaaacagtgtcctacagagaacatggctcgtgagcatttcaaaaagcatggggctgaacactactgggaccttgcgctgagtgaatctgtgttagagtccactgattgagactactgcaagcccttgcctctcctcccttgcctttgtctcttcagtcctctcacttattctatttcccaaccccctcccacttgtttgtgtgatctcagaactgtgccaagcagacactgggacaaagggagaatatcttgctcccctcctgagtcagcctggtgttgccctttattccccttatgtgcatatgattaaagagttatttttaaa

SEQ ID NO: 346011 - DNA, 1106 bp, Homo sapiens
ggggtttcaccatgttggccaggctggtcttaaactcctgacctcgtgatctgcccactttggcctcccaaagtgctgggattacaggcatgagccaccgcacccagccaagtaatcctatattataagagtctaagggtctagaggacaaaaagtctgtaggtctttacattgtcaagaacaatgagattgtaagtatttttggatgatagtaaatacctctccctgactcttagagtaaactttggttagtaatgtaatggttaatgtaaagtgctagactttgaagaaatgtaagagtgtggaaatatttctagactcatcaactctaccttttaagcattcatctatttgtttactccagaggcctttgtttatagagaggaaaccattttggattcatctttttacttgccactccattcaggcagctgctgatgctaaaatggaagacataactaaactttcccttctccagagttcgaaatttgagcaacccagccaagaagttcaagattgaagccaatgctgggcaactgtacctgacaggggtggtggtactgcacaaggatgtcaacgtggtagtagtggaagggggccccaaggcccagaagaaatttaagcgtcttatgctgcatcggataaagtgggatgaacagacatctaacacaaagggagatgatgatgaggagtctgatgaggaagctgtgaagaaaaccaacaaatgtgtactagtctgggagggtacagccaaagaccggagctttggagagatgaagtttaaacagtgtcctacagagaacatggctcgtgagcatttcaaaaagcatggggctgaacactactgggaccttgcgctgagtgaatctgtgttagagtccactgattgagactactgcaagcccttgcctctcctcccttgcctttgtctcttcagtcctctcacttattctatttcccaaccccctcccacttgtttgtgtgatctcagaactgtgccaagcagacactgggacaaagggagaatatcttgctcccctcctgagtcagcctggtgttgccctttattccccttatgtgcatatgattaaagagttatttttaaa

SEQ ID NO: 346012 - DNA, 2242 bp, Homo sapiens
agaaggtttccggttccggtgtaacgttcgggctccgtctcaggggctgaagtttgtgaggtgtagtattgagtcctgtttgagctattgttctctttttcctgaaaaatggcactgtcaaagagggagctggatgagctgaaaccatggatagagaagacagtgaagagggtcctgggtttctcagagcctacggtggtcacagcagcattgaactgtgtggggaagggcatggacaagaagaaggcagccgatcatctgaaaccttttcttgatgattctactctccgatttgtggacaaactgtttgaggctgtggaggaaggccgaagctctaggcattccaagtctagcagtgacaggagcagaaaacgagagctaaaggaggtgtttggtgatgactctgagatctctaaagaatcatcaggagtaaagaagcgacgaataccccgttttgaggaggtggaagaagagccagaggtgatccctgggcctccatcagagagccctggcatgctgactaagctccagatcaaacagatgatggaggcagcaacacgacaaatcgaggagaggaaaaaacagctgagcttcattagcccccctacacctcagccaaagactccttcttcctcccaaccagaacgacttcctattggcaacactattcagccctcccaggctgccactttcatgaatgatgccattgagaaggcaaggaaagcagctgaactgcaagctcgaatccaagcccagctggcactgaagccaggactcatcggcaatgccaacatggtgggcctggctaatctccatgccatgggcattgctcccccgaaggtggagttaaaagaccaaacgaaacctacaccactgatcctggatgagcaagggcgcactgtagatgcaacaggcaaggagattgagctgacacaccgcatgcctactctgaaagccaatattcgtgctgtgaagagggaacaattcaagcaacaactaaaggaaaagccatcagaagacatggaatccaataccttttttgacccccgagtctccattgccccttcccagcgccagagacgcacttttaaattccatgacaagggcaaatttgagaagattgctcagcgattacggacaaaggctcaactggagaagctacaggcagagatttcacaagcagctcgaaaaacaggcatccatacttcgactaggcttgccctcattgctcctaagaaggagctaaaggaaggagatattcctgaaattgagtggtgggactcttacataatccccaatggctttgatcttacagaggaaaatcccaagagagaagattattttggaatcacaaatcttgttgaacatccagcccagctcaatcctccagttgacaatgacacaccagttactctgggagtatatcttaccaagaaggaacagaaaaaacttcggagacaaacaaggagggaagcacagaaggaactacaagaaaaagtcaggctgggcctgatgcctcctccagaacccaaagtgagaatttctaatttgatgcgagtattaggaacagaagctgttcaagaccccacgaaggtagaagcccacgtcagagctcagatggcaaaaagacagaaagcgcatgaagaggccaacgctgcccgaaaactcacagcagaacagagaaaggtcaagaaaattaaaaagcttaaagaagacatttcacagggggtacacatatctgtatatagagttcgaaatttgagcaacccagccaagaagttcaagattgaagccaatgctgggcaactgtacctgacaggggtggtggtactgcacaaggatgtcaacgtggtagtagtggaagggggccccaaggcccagaagaaatttaagcgtcttatgctgcatcggataaagtgggatgaacagacatctaacacaaagggagatgatgatgaggagtctgatgaggaagctgtgaagaaaaccaacaaatgtgtactagtctgggagggtacagccaaagaccggagctttggagagatgaagtttaaacagtgtcctacagagaacatggctcgtgagcatttcaaaaagcatggggctgaacactactgggaccttgcgctgagtgaatctgtgttagagtccactgattgagactactgcaagcccttgcctctcctcccttgcctttgtctcttcagtcctctctcctgaaagagtcctataggtagccacg

SEQ ID NO: 346013 - DNA, 1377 bp, Homo sapiens
ggggtttcaccatgttggccaggctggtcttaaactcctgacctcgtgatctgcccactttggcctcccaaagtgctgggattacaggcatgagccaccgcacccagccaagtaatcctatattataagagtctaagggtctagaggacaaaaagtctgtaggtctttacattgtcaagaacaatgagattgtaagtatttttggatgatagtaaatacctctccctgactcttagagtaaactttggttagtaatgtaatggttaatgtaaagtgctagactttgaagaaatgtaagagtgtggaaatatttctagactcatcaactctaccttttaagcattcatctatttgtttactccagaggcctttgtttatagagaggaaaccattttggattcatctttttacttgccactccattcaggcagctgctgatgctaaaatggaagacataactaaactttcccttctccagagttcgaaatttgagcaacccagccaagaagttcaagattgaagccaatgctgggcaactgtacctgacaggggtggtggtactgcacaaggatgtcaacgtggtagtagtggaagggggtgagtctgaaaaacttgagggagactgtccccagacaaccctaggcttagagtgattagcattgtggggagaaaggagaaaaagatcgtattttagtgccatacctgatataatatgctaggtctctgcttctgtgttttttggagtagaaggccctaagatgtggttcctgagattgcttcaactaccacattaatgtctgagctcagaggttctttctaccccatcatcttccacagttctggcaaaattattcttctctgtttccaggccccaaggcccagaagaaatttaagcgtcttatgctgcatcggataaagtgggatgaacagacatctaacacaaagggagatgatgatgaggagtctgatgaggaagctgtgaagaaaaccaacaaatgtgtactagtctgggagggtacagccaaagaccggagctttggagagatgaagtttaaacagtgtcctacagagaacatggctcgtgagcatttcaaaaagcatggggctgaacactactgggaccttgcgctgagtgaatctgtgttagagtccactgattgagactactgcaagcccttgcctctcctcccttgcctttgtctcttcagtcctctcacttattctatttcccaaccccctcccacttgtttgtgtgatctcagaactgtgccaagcagacactgggacaaagggagaatatcttgctcccctcctgagtcagcctggtgttgccctttattccccttatgtgcatatgattaaagagttatttttaaa

SEQ ID NO: 346014 - DNA, 1584 bp, Homo sapiens
agaaggtttccggttccggtgtaacgttcgggctccgtctcaggggctgaagtttgtgaggtgtagtattgagtcctgtttgagctattgttctctttttcctgaaaaatggcactgtcaaagagggagctggatgagctgaaaccatggatagagaagacagtgaagagggtcctgggtttctcagagcctacggtggtcacagcagcattgaactgtgtggggaagggcatggacaagaagaaggcagccgatcatctgaaaccttttcttgatgattctactctccgatttgtggacaaactgtttgaggctgtggaggaaggccgaagctctaggcattccaagtctagcagtgacaggagcagaaaacgagagctaaaggaggtgtttggtgatgactctgagatctctaaagaatcatcaggagtaaagaagcgacgaataccccgttttgaggaggtggaagaagagccagaggtgatccctgggcctccatcagagagccctggcatgctgactaagctccagatcaaacagatgatggaggcagcaacacgacaaatcgaggagaggaaaaaacagctgagcttcattagcccccctacacctcagccaaagactccttcttcctcccaaccagaacgacttcctattggcaacactattcagccctcccaggctgccactttcatgaatgatgccattgagaaggcaaggaaagcagctgaactgcaagctcgaatccaagcccagctggcactgaagccaggactcatcggcaatgccaacatggtgggcctggctaatctccatgccatgggcattgctcccccgaaggtggagttaaaagaccaaacgaaacctacaccactgatcctggatgagcaagggcgcactgtagatgcaacaggcaaggagattgagctgacacaccgcatgcctactctgaaagccaatattcgtgctgtgaagagggaacaattcaagcaacaactaaaggaaaagccatcagaagacatggaatccaataccttttttgacccccgagtctccattgccccttcccagcgccagagacgcacttttaaattccatgacaagggcaaatttgagaagattgctcagcgattacggacaaaggctcaactggagaagctacaggcagagatttcacaagcagctcgaaaaacaggcatccatacttcgactaggcttgccctcattgctcctaagaaggagctaaaggaaggagatattcctgaaattgagtggtgggactcttacataatccccaatggctttgatcttacagaggaaaatcccaagagagaagattattttggaatcacaaatcttgttgaacatccagcccagctcaatcctccagttgacaatgacacaccagttactctgggagtatatcttaccaagaaggaacagaaaaaacttcggagacaaacaaggagggaagcacagaaggaactacaagaaaaagtcaggctgggcctgatgcctcctccagaacccaaagtgagaatttctaagtttgatgcggatagctttgaggggatcctgctagag

SEQ ID NO: 346015 - DNA, 637 bp, Homo sapiens
gcgcctatagtcccagctactcgggatgctgaggcaggagaatggcatgaacccgggaggcagagcttgcagtgagccaagatcgcaccactgcactccagcctgagtgacagagcgagactccatctcaaaaaaaaaaaagaaaaattaagtataatattttgtgtaggttctgttaggtttgcatgcattatttaagtggttaacactagacctgtaaggtaggtactgttttcttcccccttctagacacttaggaggtttagagactaagttccttatccaagataacaaaggcattaagtggcagagttaagattcaaactcaggtttctctgactccagagtctcaatcatcacactatattactacctaatatgctaatcttgctttaggaacatgggttgaaaaattccagtgctcacttatcttgactaaattttttgcactgtggtgcaggcagaatgtggtatagtcattcaaaacattttaagtgtctagacctgagagccttgtgggtttaaaaacctgaatgggagaagtaagaaggagaaattaacagtttttcaatttttttcctggagagcagatcaaacagatgatggaggcagcaacacgacaaatcgaggagaggaa

SEQ ID NO: 346016 - DNA, 2434 bp, Homo sapiens
agaaggtttccggttccggtgtaacgttcgggctccgtctcaggggctgaagtttgtgaggtgtagtattgagtcctgtttgagctattgttctctttttcctgaaaaatggcactgtcaaagagggagctggatgagctgaaaccatggatagagaagacagtgaagagggtcctgggtttctcagagcctacggtggtcacagcagcattgaactgtgtggggaagggcatggacaagaagaaggcagccgatcatctgaaaccttttcttgatgattctactctccgatttgtggacaaactgtttgaggctgtggaggaaggccgaagctctaggcattccaagtctagcagtgacaggagcagaaaacgagagctaaaggaggtgtttggtgatgactctgagatctctaaagaatcatcaggagtaaagaagcgacgaataccccgttttgaggaggtggaagaagagccagaggtgatccctgggcctccatcagagagccctggcatgctgactaagctccagatcaaacagatgatggaggcagcaacacgacaaatcgaggagaggaaaaaacagctgagcttcattagcccccctacacctcagccaaagactccttcttcctcccaaccagaacgacttcctattggcaacactattcagccctcccaggctgccactttcatgaatgatgccattgagaaggcaaggaaagcagctgaactgcaagctcgaatccaagcccagctggcactgaagccaggactcatcggcaatgccaacatggtgggcctggctaatctccatgccatgggcattgctcccccgaaggtggagttaaaagaccaaacgaaacctacaccactgatcctggatgagcaagggcgcactgtagatgcaacaggcaaggagattgagctgacacaccgcatgcctactctgaaagccaatattcgtgctgtgaagagggaacaattcaagcaacaactaaaggaaaagccatcagaagacatggaatccaataccttttttgacccccgagtctccattgccccttcccagcgccagagacgcacttttaaattccatgacaagggcaaatttgagaagattgctcagcgattacggacaaaggctcaactggagaagctacaggcagagatttcacaagcagctcgaaaaacaggcatccatacttcgactaggcttgccctcattgctcctaagaaggagctaaaggaaggagatattcctgaaattgagtggtgggactcttacataatccccaatggctttgatcttacagaggaaaatcccaagagagaagattattttggaatcacaaatcttgttgaacatccagcccagctcaatcctccagttgacaatgacacaccagttactctgggagtatatcttaccaagaaggaacagaaaaaacttcggagacaaacaaggagggaagcacagaaggaactacaagaaaaagtcaggctgggcctgatgcctcctccagaacccaaagtgagaatttctaatttgatgcgagtattaggaacagaagctgttcaagaccccacgaaggtagaagcccacgtcagagctcagatggcaaaaagacagaaccctgcctctgatcttcaatgcctttctcacttgtggatgtccttcctgtcacgacagagcgcatgaagaggccaacgctgcccgaaaactcacagcagaacagagaaaggtcaagaaaattaaaaagcttaaagaagacatttcacagggggtacacatatctgtatatagagttcgaaatttgagcaacccagccaagaagttcaagattgaagccaatgctgggcaactgtacctgacaggggtggtggtactgcacaaggatgtcaacgtggtagtagtggaagggggccccaaggcccagaagaaatttaagcgtcttatgctgcatcggataaagtgggatgaacagacatctaacacaaagggagatgatgatgaggagtctgatgaggaagctgtgaagaaaaccaacaaatgtgtactagtctgggagggtacagccaaagaccggagctttggagagatgaagtttaaacagtgtcctacagagaacatggctcgtgagcatttcaaaaagcatggggctgaacactactgggaccttgcgctgagtgaatctgtgttagagtccactgattgagactactgcaagcccttgcctctcctcccttgcctttgtctcttcagtcctctcacttattctatttcccaaccccctcccacttgtttgtgtgatctcagaactgtgccaagcagacactgggacaaagggagaatatcttgctcccctcctgagtcagcctggtgttgccctttattccccttatgtgcatatgattaaagagttatttttaaa

SEQ ID NO: 346017 - DNA, 3102 bp, Homo sapiens
agaaggtttccggttccggtgtaacgttcgggctccgtctcaggggctgaagtttgtgaggtgtagtattgagtcctgtttgagctattgttctctttttcctgaaaaatggcactgtcaaagagggagctggatgagctgaaaccatggatagagaagacagtgaagagggtcctgggtttctcagagcctacggtggtcacagcagcattgaactgtgtggggaagggcatggacaagaagaaggcagccgatcatctgaaaccttttcttgatgattctactctccgatttgtggacaaactgtttgaggctgtggaggaaggccgaagctctaggcattccaagtctagcagtgacaggagcagaaaacgagagctaaaggaggtgtttggtgatgactctgagatctctaaagaatcatcaggagtaaagaagcgacgaataccccgttttgaggaggtggaagaagagccagaggtgatccctgggcctccatcagagagccctggcatgctgactaagctccagatcaaacagatgatggaggcagcaacacgacaaatcgaggagaggaaaaaacagctgagcttcattagcccccctacacctcagccaaagactccttcttcctcccaaccagaacgacttcctattggcaacactattcagccctcccaggctgccactttcatgaatgatgccattgagaaggcaaggaaagcagctgaactgcaagctcgaatccaagcccagctggcactgaagccaggactcatcggcaatgccaacatggtgggcctggctaatctccatgccatgggcattgctcccccgaaggtggagttaaaagaccaaacgaaacctacaccactgatcctggatgagcaagggcgcactgtagatgcaacaggcaaggagattgagctgacacaccgcatgcctactctgaaagccaatattcgtgctgtgaagagggaacaattcaagcaacaactaaaggaaaagccatcagaagacatggaatccaataccttttttgacccccgagtctccattgccccttcccagcgccagagacgcacttttaaattccatgacaagggcaaatttgagaagattgctcagcgattacggacaaaggctcaactggagaagctacaggcagagatttcacaagcagctcgaaaaacaggcatccatacttcgactaggcttgccctcattgctcctaagaaggagctaaaggaaggagatattcctgaaattgagtggtgggactcttacataatccccaatggctttgatcttacagaggaaaatcccaagagagaagattattttggaatcacaaatcttgttgaacatccagcccagctcaatcctccagttgacaatgacacaccagttactctgggagtatatcttaccaagaaggaacagaaaaaacttcggagacaaacaaggagggaagcacagaaggaactacaagaaaaagtcaggctgggcctgatgcctcctccagaacccaaagtgagaatttctaatttgatgcgagtattaggaacagaagctgttcaagaccccacgaaggtagaagcccacgtcagagctcagatggcaaaaagacagaaagcgcatgaagaggccaacgctgcccgaaaactcacagcagaacagagaaaggtcaagaaaattaaaaagcttaaagaagacatttcacagggggtacacatatctgtatatagagttcgaaatttgagcaacccagccaagaagttcaagattgaagccaatgctgggcaactgtacctgacaggggtggtggtactgcacaaggatgtcaacgtggtagtagtggaagggggccccaaggcccagaagaaatttaagcgtcttatgctgcatcggataaagtgggatgaacagacatctaacacaaagggagatgatgatgaggagtctgatgaggaagctgtgaagaaaaccaacaaatgtgtactagtctgggagggtacagccaaagaccggagctttggagagatgaagtttaaacagtgtcctacagagaacatggctcgtgagcatttcaaaaagcatggggctgaacactactgggaccttgcgctgagtgaatctgtgttagagtccactgattgagactactgcaagcccttgcctctcctcccttgcctttgtctcttcagtcctctcacttattctatttcccaaccccctcccacttgtttgtgtgatctcagaactgtgccaagcagacactgggacaaagggagaatatcttgctcccctcctgagtcagcctggtgttgccctttattccccttatgtgcatatgattaaagagttatttttaaacttggtgtgatatttttcacacattcgtaagtattagagtttgggtctacaggtgatcttttttccggacttttagcaattgctgtggaaaaaaacattttttgtcattgacatttatttatatatataaatggatgaatggatggatggatagatggatgtgtatttttgaagtctagtggaaatgtttgatctcatcctggagctagaatgataaatactgttttcctggagcagaatgaagcagggagatgtgtaaagtggtaagggaggaaggagggacaaatgagtatccatcccttaaccaagagaatcaccaggttagacagattacctcaggacttggctaagtagtctttccaggaaatcagttcctctaagggatgcatatgtgggaatgtgtgttgtgggtgaaatggacacagggaaagtccaaggaggatgctatgggtcagtttgtaaagtggaataggatttaagaatttagcccattttgtctcttttactagtttaaaaatccgcttctaatagaaattgtgtagtttttttttttttttttctatctatgaatccgactacatgtgggtggttttatttcagcatttaatgtttctggtttgattttaggagtatttgaagtccaaaatttttaccatacctatccttccgtttcatattgcctctgttgggaatggatcaaacaagtcaatagagctcccatacctt

SEQ ID NO: 346018 - DNA, 1183 bp, Homo sapiens
agaaggtttccggttccggtgtaacgttcgggctccgtctcaggggctgaagtttgtgaggtgtagtattgagtcctgtttgagctattgttctctttttcctgaaaaatggcactgtcaaagagggagctggatgagctgaaaccatggatagagaagacagtgaagagggtcctgggtttctcagagcctacggtggtcacagcagcattgaactgtgtggggaagggcatggacaagaagaaggcagccgatcatctgaaaccttttcttgatgattctactctccgatttgtggacaaactgtttgaggctgtggaggaaggccgaagctctaggcattccaagtctagcagtgacaggagcagaaaacgagagctaaaggaggtgtttggtgatgactctgagatctctaaagaatcatcaggagtaaagaagcgacgaataccccgttttgaggaggtggaagaagagccagaggtgatccctgggcctccatcagagagccctggcatgctgactaagctccagatcaaacagatgatggaggcagcaacacgacaaatcgaggagaggaaaaaacagctgagcttcattagcccccctacacctcagccaaagactccttcttcctcccaaccagaacgacttcctattggcaacactattcagccctcccaggctgccactttcatgaatgatgccattgagaaggcaaggaaagcagctgaactgcaagctcgaatccaagcccagctggcactgaagccaggactcatcggcaatgccaacatggtgggcctggctaatctccatgccatgggcattgctcccccgaaggtggagttaaaagaccaaacgaaacctacaccaagagaacatggctcgtgagcatttcaaaaagcatggggctgaacactactgggaccttgcgctgagtgaatctgtgttagagtccactgattgagactactgcaagcccttgcctctcctcccttgcctttgtctcttcagtcctctcacttattctatttcccaaccccctcccacttgtttgtgtgatctcagaactgtgccaagcagacactgggacaaagggagaatatcttgctcccctcctgagtcagcctggtgttgccctttattccccttatgtgcatatgattaaagagttatttttaaa

SEQ ID NO: 346019 - DNA, 99 bp, Homo sapiens
ctctgggtaaagaaacacaaataccaaagcctgagctccttaaccttttgttccagagggcagacatttttaagaaaggtgaatgttagagaaggttac

SEQ ID NO: 346020 - DNA, 804 bp, Homo sapiens
ctgtctcatgcaccacatgattttgcacagctagaggatgacggtcttattaggaaatgaatggtgccctagagggatggatgctgggacatctgtctgtctgccatttattctcctagtctccctttcctctcctttgctcctgccatccttcctacgttctgggttgccttgctggtccttgttattgtctgaggatgaatagatatggggttattggggagggatatttacgtgggatcaacctgataatggcaatgccatttctgatttccagggccttttcgtcttcccttggcttcgcagacacacaccctgccggaagcgttcttaggaggcctggccgtgctttctcttgccctcagccccattccctagccctctaaccaggctgggcctgggtatctgtatccagggctgtgcctgaggggccccaccctgctttgggcatccatcacgctactgcggcccttactttcagtgctcttgtccaggtctctgtggtggcaggtatttatttttcagctcttctcttctccttctatttctccccaatctgctttcatctcacttcatctctttgtccctgtcctttgtgtctgtgtcagcctcggccttttcttgacactcctgtgtattttctgtcttccttcttatgtcttcatctgtctttgtctccatctgtcttcgttggtcttttctctgtctctctctttctctgtctttgtctctgtctctgtctctccctgcctccctgcctccctgtcctaacccaccacctcaaagttttttttagcttggaag

SEQ ID NO: 346021 - DNA, 578 bp, Homo sapiens
ctcgaacttcagctttaatagggtttcacaactgcatccctggatctcacatctctcttagaggcacttattttggagatgacgtcttgctacataaccaaggctggtctcaaaatcctggcctgaagcatttctctccaacagtaatgtaccatgtagctgtcattacagatgtgaaccataatgcctggttgtctcataaagtcatttttggtcagggatggctgactttttttgctataaggggatatgaaaatagagcacttttattattttcatcttactgatgtcactctccttataccttttttctttctatattctatttcaaatttgtaattttagattcagttatttaggataatatgctagaatttgcatggtatgctgaaagtaaattagataattagtaagcactccatatttatgaaaatagttactaaatataaacatagttactagttataagtagttataaaattatggaattttcatctactttcttcaccctgtatataaataatgagtttatttcctaatatttgttttacatatcagagggtctaaccctattctcc

SEQ ID NO: 346022 - DNA, 1144 bp, Homo sapiens
tgacatgctgagtgtacgtctcccatcacccaaatgcaagctccttgagagcagcgacgtggtatttccaatgcctggaaacagtacgtggcacctgatgagtacagtcaaaggtatttcggaatgtttgctgagtggtgactgatagcacagcaaagaagctccatgcagactggattgctggcatggggtaaggaggagaagccagccagagtgacctggcccagcgattgggaaccagggaccttgactaactttgtccagatgtaaagggctggaatgttggcgtgatggttgaagctgtaacagccatcttcgactacaaaatggaagctgcatgctacaaatgacagaagacaagatcaaaagaacctgtgttcccagcaccacagaactgtccctatggaaatagacatgactgttacataagaaagaaatataccctactatgtttaagcctctgttattttagcatgtgttgtagcagttgtatactaagtaactaatgagaaagaatattttgtgccctggtaaagatggatacttctatatgttatgagaacaatttgatgaggtaattgtaatttagtagaataatatcaaatattaatgtcaaatgactagtttggcattgccacatagtaattgttgggcaagttattaacctgtgtctcagtttcctcactggtagaataacaataacagacaatggtactagtgtctaacgttttactgaacatgtagcttggttcagcgccacacattatttgaattaagtagaataagagagtcctgagtaaatataacccaaatgtaaattatttttaaactttattacatatgtgaatattattatttgagcttctcatactgacttcttatttacttaactgattctaggcattgaccactcctgagattttgcatccatactccctaaaagttctggtccaaaatttagcacacaataaatatttaatgagggcatagcttatttttaagtaggtacctctattcacagaatgtttttctcttgattaaaaaaattaattgcattatatacataacataaaattcactattttaaccattttaagtgtacaattcagtggcattaaatacatttacattgctctgaaccatc

SEQ ID NO: 346023 - DNA, 736 bp, Homo sapiens
attggctgccattagccaataattataatagtaatgtgctgtgtagtaaaattgcttgattggcctcagctacccataaaaatcatatgaaatggttaactaactttatcaggttttttcaccttcaaaaaaaaacacctttactggccatatacagtgcagtacattttgcttactaagttatattccatcacaattcatttaagatatccatgcacagaaaagtaattttattatattctgttccttgttcaacatctaaatccatgtaccttttgtggtgggagcagcctgagaaaacaaagacaccatggactttgaacttagactaagatttgaatcttacttaaaagttctgtgaccttgggaaaattacctgctatctctgatccttagttcttcttccgtatgatgagtgtatgataatattacttaatattaaagatttcttctatgtgttgaagaaggtagagtgaagtagagaaaacataggtactgaacacatcttatttgtgtttccccctcctttcgtgttgtttttggattaaaaaaaagaaatctgactgggcgcggtggctcatgcccgtaatcccacaagtttgggaggctgaggtgggtggatcacctgaggtcaggagttcaagaccagcctggccaacatggtgaaaccctgtctctactaaaaatacaaacattagctgggcgtggtggcatgtgcctgtaatcccagctactc

SEQ ID NO: 346024 - DNA, 1017 bp, Homo sapiens
ggctgaggcgggagggtcacctgaggtgaggcgggagtgtcacctgaggtcaggagttcgagaccagcttggccaacatggtgaaaccctgtctctactaaaaatacaaaaaattagccaggtgtagtagcgggtgcctgtaatcccagctactcgggaggccaaggcgggagaattgcttgaacccgggaggtggaggttgcagtgagccaagatcgcgcctttgcactccagcctgggcaacaagagcgaaacttcatcttaaatgaataaataaataaagtagtttgtcatggcttgtcggcttttccctccaatgtaaaagaaactaaaagagaccttcttttgatcttgagattctgccatatatactgaggacaaaatatggtaaaaagagccgggtgcaatggcatggcctgtattcccagctacttgggttgtggtgtgaggatcacatgagcccaagagttcaaggctttagtaggctataatggtgcctgtgaataaccactgcatttcagccatggtgagacccccacccccaacgcttaaaatgttacgtgtgtgtgtgtgtgtgtgtgtgtgtgtgtgtctttgtgtgtatgaagaaaaaaatcttgcattgctggctaggatggggatgacagtagatttggttagatttaggaaggtattcctggtttcgagagttgtctatgtgtgtagtggaaccttcattttgttggatttggggacatatccttaaaatttggcaggattttcatctagatgtagttcaggcagttattttaagtggtgacttttggattagaagaacctatgtatcagccgggcgcagtggctcacgcctgtaatcctagcactttgggaggatgaggcaggcagattgcctgagctcaggagttagccaccaacttgggcaacacggagaaacaccgtctctactaaaaatacaaaaattagccaggtgtggtggtggacacctgtagtcccagctactcgggaggctgaggcagg

SEQ ID NO: 346025 - DNA, 410 bp, Homo sapiens
agataatggcttccagcttcatgcatgtccctgcaaaggacatgatcttgctcctttttatggcttcatcgtattccatggtgtatatgtaccacattttctttatccagtctatcattgatgggcatttgggttgattccatgtctttcgttaacagcatttaaaagcaagttgagccaggcgtggtggctcatgcctgtaatctcagcactttgggaggccgaagccggaggatcacgagatcaagaaattgagaccttcctggccaccatggtgaaatcccgtctctactaaaaatacaaaaattagcctggtgtggtagtgcgtgcctgtagtgccagctattcaggaggctgaggcaggagaatcacttgaacctgggaggaggaagttgcagtgaaccgagatc

SEQ ID NO: 346026 - DNA, 660 bp, Homo sapiens
ctacaggtatgtaccaccacgcccagctaatttttgtatttttggtagagatggggttttaccatgttggccagactagtctcgaactcctgaccttaggtgatgccctcgccttggccccccaaagtgctgggattacaggcatgagccaccgcatccagccaatgcaatggtatattatttggtcatataaaggaatggagttccagtacatgccacaacatgcatgagccttgaaaacatgatgctaagtgaaaaagtggtcactaaagactacatagtgtgtgagtccatttatctgaaatgtccagaacaggcaaatccatagagacaggaagtggatttgtggttgtcagggcctgggtgggagaagggaatggggagtggccactccatggtgctgggtttctttaggatgataaaaatgttctacaattgattgtggtgatatcggacaactctgtgactttattaaaacccaatgaattgcacattttaaaagggcgagtttgatggtatgtaaatcaataaaaatattgttgtagctttattgagatatacttaccatacaattcacccatttcatgtgtgcaattctgattttttttttcatttttatttatttttattttttgagacagggtttggctctgttgccca

SEQ ID NO: 346027 - DNA, 1046 bp, Homo sapiens
ggaaatgagacttttcagcacaaaggatcacccctcttacttttccagaatatttttcccgtaacagattattttgtctttgcttaatcaatgtttgtctacttcctttctggccatgtaaataattcatacagttcactaatgcaacttttaaaattattaataaaaatgtctgttttatatcacattctgctggcaaagcaaggggacggggctacttgaaaacaggaaacaggtagtataaaaatggccaagactaattctccattctcagagagcttataatcacttgcaagagagaatgcttgaaaagataaataggcagactatggttagtattatgagacagaaggggcctagatagatgaattgaagggatgaagaggcaagacattaattaggaatctattgatggtttagatgagaagcaataaggatcctaacagtgaaaataaagagggaacttaagccagaaataaaatgaaagtacatgaattatggcttcgttgctgattggctgtgaaggtcagaggagaagaagaaggagtcagtgctatctctaagtaggatttttgagtctgtaaacttgtaaaaatagtggtgtccttaaaacacacacagaaagaaagagaaagaacagattttggggagaaaagatgaacttgactttgaatttactaagctttagataaggaagtaaaacctagatgaaattgcccatcaggcaaaggaaaggtaaggttgaagttagaagtagatttagttgtcatctctgtagaagggattctcaccagacagagattttctaaagaagggactgaggcctgagggaatggctttacttaggaactacaagaagaaaaaaaaaaaaaatgaagaaatggtcattgacctatttgaagcttaggataatcctcaaacaatgagatttcactgtattttgtttttatttatttatttgagacagagtctcgctctgtcacccaggagaatcacttaaggccaggagtccagcctgggcaacatagcaggatcctatcccttta

SEQ ID NO: 346028 - DNA, 330 bp, Homo sapiens
tatttatttgagacagagtctcgctctgtcacccaggctggagtgcaatggcatgatctcgactcactgtaacctccacctccaggatgcaagcagttctcctgcctcagcctcccaggtagctgggattacaggtgcccaccaccacacctggctaattttatgtttttagtagagacgagttttcaccgtgttggccaggctggtctcgaactcctgacctcaagtgatccacctgccttggcctcccaaagtgctgagattacaggcatgagccaccgtgcctggctgtgtattttcttttgcttagccttatgttaaaagctccca

SEQ ID NO: 346029 - DNA, 298 bp, Homo sapiens
acaaaggggaccacgtaggaagtcactgtcctgctctgcatttgaaataagcactgttcagagccccgctgtccagtatggcagccactggccatgtgtggctgttgaatacttgaaatttggcccctctgagttgagatgtgctgcaggggtaagatgcataccagatttcaaagacctatcatggcaaaaagaatataaaatatctcattaataatgcttcagggtgggcactgtggcttatgcctgtaatcccacactttgggaggctgaagtgggcggacacctgaggtcagga

SEQ ID NO: 346030 - DNA, 840 bp, Homo sapiens
gaaaagtccttagctgatttggagtcccaccaccatggataacagaaacgcaatagtgaaccaatgcaaagttcactgtcaaatgccccaggtgtactgaggtgggataaaaagttttaagacaggctgggtgcagtggctcacacctgtaataccaacactttgggaagccgaggtgggtagataacttgaggtcaggagttttagaccagcctgggcaacatggtgaaaccctgcctctactacaaatacaaaaattagctgggcggggtggcgggcacctgtagtcccagctacctgggaggcttaggcaggagaatcgcttgaacccaggaggcggaggttgcagtgaaccaagagatggcgccagtgcactccaccctgggtgacagagagactctttctttttaaaaaaaaaaaaaaaaaaaaaaaatttaaaacagcctgaccagttagcttacgtccttgtcatttcttgggtggagggatagattttatgtctttgaatagtctacttgcaaaggggcatgagacagaaaaatcagttaaaaggctgtccttttcttggggttagcaaccatactgttttctgttacagcaagggtctagcccggtgcttgattacttactactcagttattaaatttattatgtgcagaatagcactggctagaatttgagcttagaaatagaaaggagcatgtttttgccttagggcctttgcatttgccaccttcaacctagaacgtttttctcctgtctcatttcatttgtcacctgagaacattgttattcacatatccattattcccttactcttaatttttttatgttgtcact

SEQ ID NO: 346031 - DNA, 1043 bp, Homo sapiens
cagaaggtaagcatgagcaaattactttttagaggtaactttgctgaacttgtgaagaatggtgtgcaaggtccagagcgactgcaggagagggaaggtgggattcccacagagcaggagcacagatgagccaagcaaggccctgcttggaaggcagcaatcaacagagatgcacagacctgtgagggtgccgggacagccatgcaacaatgcagcccttttgcttcctaagctcaccagttccctcgctccacctctgagaggtggtttggagaaacacagcccttctcaagagggctgcaagctacttaagtcctgaaaatttccacaaggctgagtcaaatctgcgtttcatcatctataagaaaggtacctatcgagaacaccctgctggccagtgtgtaaatatctaaaggaggactcagaaaacaccggggaagtccagcctgcacgtggtggctgggcttcagtgaagcatgcagcacaacaggagttagcagaccacaaagagcatgtctggacctagaaccacagcatgtaacctcggaagcagtgagacaccagccagcatggacaagcagcaggcacttgctctataccagatatgctgcatgatagaacgctatgccctctcacagataggtcccacctccagccttcccctgctgccatctaacatcctaaactccagctctgaatgtctgtctcctgctctgaatcttcagtgacttcgaaactcaagtcaggacacctctcagtttggcctcactgctcaagattgagctgaattcatgaccataattcaagcattcagattcatgggctgttttgtgggttttgctatctcttattttgtttttgcacatcttacccactgaaacgttgggctgcaaaaagtttgatcactaaatatgtaggcaatgctggatactgggctgttatttacatatttgtatcaccttttatttcataagatagcattgtcagagtaatttagtatttcaacataatcaacaagtaaaataaaattaatgagaatgatc

SEQ ID NO: 346032 - DNA, 746 bp, Homo sapiens
cagaaggtaagcatgagcaaattactttttagaggtaactttgctgaacttgtgaagaatggtgtgcaaggtccagagcgactgcaggagagggaaggtgggattcccacagagcaggagcacagatgagccaagcaaggccctgcttggaaggcagcaatcaacagagatgcacagacctgtgagggtgccgggacagccatgcaacaatgcagcccttttgcttcctaagctcaccagttccctcgctccacctctgagaggtggtttggagaaacacagcccttctcaagagggctgcaagctacttaagtcctgaaaatttccacaaggctgagtcaaatctgcgtttcatcatctataagaaaggtacctatcgagaacaccctgctggccagtgtgtaaatatctaaaggaggactcagaaaacaccggggaagtccagcctgcacgtggtggctgggcttcagtgaagcatgcagcacaacaggagttagcagaccacaaagagcatgtctggacctagaaccacagcatgtaacctcggaagcagtgagacaccagccagcatggacaagcagcaggcacttgctctataccaggtgagggtgtggagacatgacgtggtgcagggacaccagcacccagtcctagttctggtccctctcagccttgttaggtcctggttcctaagattccagggaacatccccacagcctcacaataagatcctcctttcctgcata

SEQ ID NO: 346033 - DNA, 2941 bp, Homo sapiens
ttcatctataaaatggagatgatgatgaagagcttacttagccccgtgtccatcatggtaagagcctcgtaaagggtacttatcagtataatcagatgctgttttgcccaggtttgcaccctgtgcgcctgtcctcaggacccagcaggctcagacttgcctgcgatcaaagaaagccctgtgtgcctcccagacccaccacccccgtgcaaactctctcaacacgacaccgctgcgtgactttcctgctgttactagaggtcggcaggtacttttccctaggaaactgggtgtgcacgtctcatccccgtgccaattctcttgccgcttttccttccacacgcggcgtcctctgggcggagggtgcagctccgcgtgctccagctgccgcgaaagttgcacccggcccagtctggctgcgggccccgcctccgccttctcagcgcccagccccaccctccgattggtcagcagtgcccagccccgccccgctcctccgaggggatttaaagcagcggccgctcagtctgggcgcttgcaggctgctaaacccaaccgcagttgactagcacctgctaccgcgcctttgcttcctggcgcacgcggagcctcctggagcctgccaccatcctgcctactacgtgctgccctgcgcccgcagccatgtgccgcaccctggccgccttccccaccacctgcctggagagagccaaagagttcaagacacgtctggggatctttcttcacaaatcagagctgggctgcgatactgggagtactggcaagttcgagtggggcagtaaacacagcaaagagaatagaaacttctcagaagatgtgctggggtggagagagtcgttcgacctgctgctgagcagtaaaaatggagtggctgccttccacgctttcctgaagacagagttcagtgaggagaacctggagttctggctggcctgtgaggagttcaagaagatccgatcagctaccaagctggcctccagggcacaccagatctttgaggagttcatttgcagtgaggcccctaaagaggtcaacattgaccatgagacccgcgagctgacgaggatgaacctgcagactgccacagccacatgctttgatgcggctcaggggaagacacgtaccctgatggagaaggactcctacccacgcttcctgaagtcgcctgcttaccgggacctggctgcccaagcctcagccgcctctgccactctgtccagctgcagcctggacgagccctcacacacctgagtctccacggcagtgaggaagccagccgggaagagaggttgagtcacccatccccgaggtggctgcccctgtgtgggaggcaggttctgcaaagcaagtgcaagaggacaaaaaaaaaaaaaaaaaaaaaaaaaatgcgctccagcagcctgtttgggaagcagcagtctctccttcagatactgtgggactcatgctggagaggagccgcccacttccaggacctgtgaataagggctaatgatgagggttggtggggctctctgtggggcaaaaaggtggtatgggggttagcactggctctcgttctcaccggagaaggaagtgttctagtgtggtttaggaaacatgtggataaagggaaccatgaaaatgagaggaggaaagacatccagatcagctgttttgcctgttgctcagttgactctgattgcatcctgttttcctaattcccagactgttctgggcacggaagggaccctggatgtggagtcttcccctttggccctcctcactggcctctgggctagcccagagtcccttagcttgtacctcgtaacactcctgtgtgtctgtccagccttgcagtcatgtcaaggccagcaagctgatgtgactcttgccccatgcgagatatttatacctcaaacactggcctgtgagccctttccaagtcagtggagagccctgaaaggaggctcacttgaatccagctcagtgctctgggtggccccctgcaggtggcccctgaccctgcgttgcagcagggtccacctgtgagcaggcccgccctggggcctcttcctggatgtgccctctctgagttctgtgctgtctcttggaggcagggcccaggagaacaaagtgtggaggcctcggggagtggcttttccagctctcatgccccgcagtgtggaacaaggcagaaaaggatcctaggaaataagtctcttggcggtccctgagagtcctgctgaaatccagccagtgttttttgtggtatgagaacaggcaaaaagagatgccccgagatagaaggggagccttgtgtttctttcctgcagacgtgagatgaacactggagtgggcagaggtggcccaggaccatggcacccttagagtgcagaagctggggggagaggctgcttcgaagggcaggactggggataatcagaacctgcctgtcacctcagggcatcactgaacaaacatttcctgatgggaactcctgcggcagagcccaggctggggaagtgaactacccagggcagcccctttgtggcccaggataatcaacactgttctctctgtaccatgagctcctccaggagattatttaagtgtattgtatcattggttttctgtgattgtcataacattgtttttgttattgttggtgctgttgttatttattattgtaatttcagtttgcctctactggagaatctcagcaggggtttcagcctgactgtctccctttctctaccagactctacctctgaatgtgctgggaacctcttggagcctgtcaggaactcctcactgtttaaatatttatttattgtgacaaatggagctggtttcctagatatgaatgatgtttgcaatccccattttcctgtttcagcatgttatattcttataaaataaaagcaaaagtcaaatatga

SEQ ID NO: 346034 - DNA, 2344 bp, Homo sapiens
  misc_feature (2216)..(2216): n is a, c, g, or t
ttcatctataaaatggagatgatgatgaagagcttacttagccccgtgtccatcatggtaagagcctcgtaaagggtacttatcagtataatcagatgctgttttgcccaggtttgcaccctgtgcgcctgtcctcaggacccagcaggctcagacttgcctgcgatcaaagaaagccctgtgtgcctcccagacccaccacccccgtgcaaactctctcaacacgacaccgctgcgtgactttcctgctgttactagaggtcggcaggtacttttccctaggaaactgggtgtgcacgtctcatccccgtgccaattctcttgccgcttttccttccacacgcggcgtcctctgggcggagggtgcagctccgcgtgctccagctgccgcgaaagttgcacccggcccagtctggctgcgggccccgcctccgccttctcagcgcccagccccaccctccgattggtcagcagtgcccagccccgccccgctcctccgaggggatttaaagcagcggccgctcagtctgggcgcttgcaggctgctaaacccaaccgcagttgactagcacctgctaccgcgcctttgcttcctggcgcacgcggagcctcctggagcctgccaccatcctgcctactacgtgctgccctgcgcccgcagccatgtgccgcaccctggccgccttccccaccacctgcctggagagagccaaagagttcaagacacgtctggggatctttcttcacaaatcagagctgggctgcgatactgggagtactggcaagttcgagtggggcagtaaacacagcaaagagaatagaaacttctcagaagatgtgctggggtggagagagtcgttcgacctgctgctgagcagtaaaaatggagtggctgccttccacgctttcctgaagacagagttcagtgaggagaacctggagttctggctggcctgtgaggagttcaagaagatccgatcagctaccaagctggcctccagggcacaccagatctttgaggagttcatttgcagtgaggcccctaaagaggtcaacattgaccatgagacccgcgagctgacgaggatgaacctgcagactgccacagccacatgctttgatgcggctcaggggaagacacgtaccctgatggagaaggactcctacccacgcttcctgaagtcgcctgcttaccgggacctggctgcccaagcctcagccgcctctgccactctgtccagctgcagcctggacgagccctcacacacctgagtctccacggcagtgaggaagccagccgggaagagaggttgagtcacccatccccgaggtggctgcccctgtgtgggaggcaggttctgcaaagcaagtgcaagaggacaaaaaaaaaaaaaaaaaaaaaaaaaatgcgctccagcagcctgtttgggaagcagcagtctctccttcagatactgtgggactcatgctggagaggagccgcccacttccaggacctgtgaataagggctaatgatgagggttggtggggctctctgtggggcaaaaaggtggtatgggggttagcactggctctcgttctcaccggagaaggaagtgttctagtgtggtttaggaaacatgtggataaagggaaccatgaaaatgagaggaggaaagacatccagatcagctgttttgcctgttgctcagttgactctgattgcatcctgttttcctaattcccagactgttctgggcacggaagggaccctggatgtggagtcttcccctttggccctcctcactggcctctgggctagcccagagtcccttagcttgtacctcgtaacactcctgtgtgtctgtccagccttgcagtcatgtcaaggccagcaagctgatgtgactcttgccccatgcgagatatttatacctcaaacactggcctgtgagccctttccaagtcagtggagagccctgaaaggaggctcacttgaatccagctcagtgctctgggtggccccctgcaggtggcccctgaccctgcgttgcagcagggtccacctgtgagcaggcccgccctggggcctcttcctggatgtgccctctctgagttctgtgctgtctcttggaggcagggcccaggagaacaaagtgtggaggcctcggggagtggcttttccagctctcatgccccgcagtgtggaacaaggcagaaaaggatcctaggaaanagcactgggggaccgaaagcgagaaatcccaaccgggggaggagagacagcaagagaatgcccgaacaaggaccaggtctctgcacgtaaaaacggcggcgaggccgaaggcataagcaggggaagcc

SEQ ID NO: 346035 - DNA, 2815 bp, Homo sapiens
ttcatctataaaatggagatgatgatgaagagcttacttagccccgtgtccatcatggtaagagcctcgtaaagggtacttatcagtataatcagatgctgttttgcccaggtttgcaccctgtgcgcctgtcctcaggacccagcaggctcagacttgcctgcgatcaaagaaagccctgtgtgcctcccagacccaccacccccgtgcaaactctctcaacacgacaccgctgcgtgactttcctgctgttactagaggtcggcaggtacttttccctaggaaactgggtgtgcacgtctcatccccgtgccaattctcttgccgcttttccttccacacgcggcgtcctctgggcggagggtgcagctccgcgtgctccagctgccgcgaaagttgcacccggcccagtctggctgcgggccccgcctccgccttctcagcgcccagccccaccctccgattggtcagcagtgcccagccccgccccgctcctccgaggggatttaaagcagcggccgctcagtctgggcgcttgcaggctgctaaacccaaccgcagttgactagcacctgctaccgcgcctttgcttcctggcgcacgcggagcctcctggagcctgccaccatcctgcctactacgtgctgccctgcgcccgcagccatgtgccgcaccctggccgccttccccaccacctgcctggagagagccaaagagttcaagacacgtctggggatctttcttcacaaatcagagctgggctgcgatactgggagtactggcaagttcgagtggggcagtaaacacagcaaagagaatagaaacttctcagaagatgtgctggggtggagagagtcgttcgacctgctgctgagcagtaaaaatggagtggctgccttccacgctttcctgaagacagagttcagtgaggagaacctggagttctggctggcctgtgaggagttcaagaagatccgatcagctaccaagctggcctccagggcacaccagatctttgaggagttcatttgcagtgaggcccctaaagaggtcaacattgaccatgagacccgcgagctgacgaggatgaacctgcagactgccactctgtccagctgcagcctggacgagccctcacacacctgagtctccacggcagtgaggaagccagccgggaagagaggttgagtcacccatccccgaggtggctgcccctgtgtgggaggcaggttctgcaaagcaagtgcaagaggacaaaaaaaaaaaaaaaaaaaaaaaaaatgcgctccagcagcctgtttgggaagcagcagtctctccttcagatactgtgggactcatgctggagaggagccgcccacttccaggacctgtgaataagggctaatgatgagggttggtggggctctctgtggggcaaaaaggtggtatgggggttagcactggctctcgttctcaccggagaaggaagtgttctagtgtggtttaggaaacatgtggataaagggaaccatgaaaatgagaggaggaaagacatccagatcagctgttttgcctgttgctcagttgactctgattgcatcctgttttcctaattcccagactgttctgggcacggaagggaccctggatgtggagtcttcccctttggccctcctcactggcctctgggctagcccagagtcccttagcttgtacctcgtaacactcctgtgtgtctgtccagccttgcagtcatgtcaaggccagcaagctgatgtgactcttgccccatgcgagatatttatacctcaaacactggcctgtgagccctttccaagtcagtggagagccctgaaaggaggctcacttgaatccagctcagtgctctgggtggccccctgcaggtggcccctgaccctgcgttgcagcagggtccacctgtgagcaggcccgccctggggcctcttcctggatgtgccctctctgagttctgtgctgtctcttggaggcagggcccaggagaacaaagtgtggaggcctcggggagtggcttttccagctctcatgccccgcagtgtggaacaaggcagaaaaggatcctaggaaataagtctcttggcggtccctgagagtcctgctgaaatccagccagtgttttttgtggtatgagaacaggcaaaaagagatgccccgagatagaaggggagccttgtgtttctttcctgcagacgtgagatgaacactggagtgggcagaggtggcccaggaccatggcacccttagagtgcagaagctggggggagaggctgcttcgaagggcaggactggggataatcagaacctgcctgtcacctcagggcatcactgaacaaacatttcctgatgggaactcctgcggcagagcccaggctggggaagtgaactacccagggcagcccctttgtggcccaggataatcaacactgttctctctgtaccatgagctcctccaggagattatttaagtgtattgtatcattggttttctgtgattgtcataacattgtttttgttattgttggtgctgttgttatttattattgtaatttcagtttgcctctactggagaatctcagcaggggtttcagcctgactgtctccctttctctaccagactctacctctgaatgtgctgggaacctcttggagcctgtcaggaactcctcactgtttaaatatttatttattgtgacaaatggagctggtttcctagatatgaatgatgtttgcaatccccattttcctgtttcagcatgttatattcttataaaataaaagcaaaagtcaaatatga

SEQ ID NO: 346036 - DNA, 1898 bp, Homo sapiens
ctgtctgcggtgactctgaggatccctgcatcaacgccgcgatggtataactgcagactgcacagccacatgctttgatgcggctcaggggaagacacgtaccctgatggagaaggactcctacccacgcttcctgaagtcgcctgcttaccgggacctggctgcccaagcctcagccgcctctgccactctgtccagctgcagcctggacgagccctcacacacctgagtctccacggcagtgaggaagccagccgggaagagaggttgagtcacccatccccgaggtggctgcccctgtgtgggaggcaggttctgcaaagcaagtgcaagaggacaaaaaaaaaaaaaaaaaaaaaaaaaatgcgctccagcagcctgtttgggaagcagcagtctctccttcagatactgtgggactcatgctggagaggagccgcccacttccaggacctgtgaataagggctaatgatgagggttggtggggctctctgtggggcaaaaaggtggtatgggggttagcactggctctcgttctcaccggagaaggaagtgttctagtgtggtttaggaaacatgtggataaagggaaccatgaaaatgagaggaggaaagacatccagatcagctgttttgcctgttgctcagttgactctgattgcatcctgttttcctaattcccagactgttctgggcacggaagggaccctggatgtggagtcttcccctttggccctcctcactggcctctgggctagcccagagtcccttagcttgtacctcgtaacactcctgtgtgtctgtccagccttgcagtcatgtcaaggccagcaagctgatgtgactcttgccccatgcgagatatttatacctcaaacactggcctgtgagccctttccaagtcagtggagagccctgaaaggaggctcacttgaatccagctcagtgctctgggtggccccctgcaggtggcccctgaccctgcgttgcagcagggtccacctgtgagcaggcccgccctggggcctcttcctggatgtgccctctctgagttctgtgctgtctcttggaggcagggcccaggagaacaaagtgtggaggcctcggggagtggcttttccagctctcatgccccgcagtgtggaacaaggcagaaaaggatcctaggaaataagtctcttggcggtccctgagagtcctgctgaaatccagccagtgttttttgtggtatgagaacaggcaaaaagagatgccccgagatagaaggggagccttgtgtttctttcctgcagacgtgagatgaacactggagtgggcagaggtggcccaggaccatggcacccttagagtgcagaagctggggggagaggctgcttcgaagggcaggactggggataatcagaacctgcctgtcacctcagggcatcactgaacaaacatttcctgatgggaactcctgcggcagagcccaggctggggaagtgaactacccagggcagcccctttgtggcccaggataatcaacactgttctctctgtaccatgagctcctccaggagattatttaagtgtattgtatcattggttttctgtgattgtcataacattgtttttgttattgttggtgctgttgttatttattattgtaatttcagtttgcctctactggagaatctcagcaggggtttcagcctgactgtctccctttctctaccagactctacctctgaatgtgctgggaacctcttggagcctgtcaggaactcctcactgtttaaatatttatttattgtgacaaatggagctggtttcctagatatgaatgatgtttgcaatccccattttcctgtttcagcatgttatattcttataaaataaaagcaaaagtcaaatatga

SEQ ID NO: 346037 - DNA, 1584 bp, Homo sapiens
ccaaatgattgcatgagggcgtgcctgggttaattcagtgacgaggctgtcgtggaattagaagctgtttgggaagcagcagtctctccttcagatactgtgggactcatgctggagaggagccgcccacttccaggacctgtgaataagggctaatgatgagggttggtggggctctctgtggggcaaaaaggtggtatgggggttagcactggctctcgttctcaccggagaaggaagtgttctagtgtggtttaggaaacatgtggataaagggaaccatgaaaatgagaggaggaaagacatccagatcagctgttttgcctgttgctcagttgactctgattgcatcctgttttcctaattcccagactgttctgggcacggaagggaccctggatgtggagtcttcccctttggccctcctcactggcctctgggctagcccagagtcccttagcttgtacctcgtaacactcctgtgtgtctgtccagccttgcagtcatgtcaaggccagcaagctgatgtgactcttgccccatgcgagatatttatacctcaaacactggcctgtgagccctttccaagtcagtggagagccctgaaaggaggctcacttgaatccagctcagtgctctgggtggccccctgcaggtggcccctgaccctgcgttgcagcagggtccacctgtgagcaggcccgccctggggcctcttcctggatgtgccctctctgagttctgtgctgtctcttggaggcagggcccaggagaacaaagtgtggaggcctcggggagtggcttttccagctctcatgccccgcagtgtggaacaaggcagaaaaggatcctaggaaataagtctcttggcggtccctgagagtcctgctgaaatccagccagtgttttttgtggtatgagaacaggcaaaaagagatgccccgagatagaaggggagccttgtgtttctttcctgcagacgtgagatgaacactggagtgggcagaggtggcccaggaccatggcacccttagagtgcagaagctggggggagaggctgcttcgaagggcaggactggggataatcagaacctgcctgtcacctcagggcatcactgaacaaacatttcctgatgggaactcctgcggcagagcccaggctggggaagtgaactacccagggcagcccctttgtggcccaggataatcaacactgttctctctgtaccatgagctcctccaggagattatttaagtgtattgtatcattggttttctgtgattgtcataacattgtttttgttattgttggtgctgttgttatttattattgtaatttcagtttgcctctactggagaatctcagcaggggtttcagcctgactgtctccctttctctaccagactctacctctgaatgtgctgggaacctcttggagcctgtcaggaactcctcactgtttaaatatttatttattgtgacaaatggagctggtttcctagatatgaatgatgtttgcaatccccattttcctgtttcagcatgttatattcttataaaataaaagcaaaagtcaaatatga

SEQ ID NO: 346038 - DNA, 600 bp, Homo sapiens
  misc_feature (33)..(34): n is a, c, g, or t
gcgttatagaggatcccgcacgaggggtgtccnngacatggcacccttagagtgcagaagctggggggagaggctgcttcgaagggcaggactggggataatcagaacctgcctgtcacctcagggcatcactgaacaaacatttcctgatgggaactcctgcggcagagcccaggctggggaagtgaactacccagggcagcccctttgtggcccaggataatcaacactgttctctctgtaccatgagctcctccaggagattatttaagtgtattgtatcattggttttctgtgattgtcataacattgtttttgttattgttggtgctgttgttatttattattgtaatttcagtttgcctctactggagaatctcagcaggggtttcagcctgactgtctccctttctctaccagactctacctctgaatgtgctgggaacctcttggagcctgtcaggaactcctcactgtttaaatatttatttattgtgacaaatggagctggtttcctagatatgaatgatgtttgcaatccccattttcctgtttcagcatgttatattcttataaaataaaagcaaaagtcaaatatga

SEQ ID NO: 346039 - DNA, 369 bp, Homo sapiens
tgtgtctaggtgtttgtgtccaggtgtgtgtgtccaggtgtgtgtgtctaggtgtgtctctttgtgattgtcataacattgtttttgttattgttggtgctgttgttatttattattgtaatttcagtttgcctctactggagaatctcagcaggggtttcagcctgactgtctccctttctctaccagactctacctctgaatgtgctgggaacctcttggagcctgtcaggaactcctcactgtttaaatatttatttattgtgacaaatggagctggtttcctagatatgaatgatgtttgcaatccccattttcctgtttcagcatgttatattcttataaaataaaagcaaaagtcaaatatga

SEQ ID NO: 346040 - DNA, 284 bp, Homo sapiens
cgatactgggagtactggcaagttcgagtggggcagtaaacacagcaaagagaagtaagtgttgctgaccagctcagggctccgagagggaagggagtgggaagggagtcatgaggagggaaatacagggagaagccaggacacgctaagtggaccttggcaacacctccctagagattttagtgggacttgttgctggtctgttatgactacttggctcatgggtgagtgggtaggtggctccagggctccaagtccatccacggatgagggcacacagggca

SEQ ID NO: 346041 - DNA, 285 bp, Homo sapiens
cctggcgcacgcggagcctcctggagcctgccaccatcctgcctactacgtgctgccctgcgcccgcagccatgtgccgcaccctggccgccttccccaccacctgcctggagaggtaaggggaggttgtccaactgcttgggggaagtcccaccaactcttagggagtggagcggcaggcctggggacctgggtgggcgcggggatggggcgctagaggcttgagtagagaggtagaagcgcacttgatgccacgtgctcagattccaggagcagggagaaagc

SEQ ID NO: 346042 - DNA, 3164 bp, Homo sapiens
ttcatctataaaatggagatgatgatgaagagcttacttagccccgtgtccatcatggtaagagcctcgtaaagggtacttatcagtataatcagatgctgttttgcccaggtttgcaccctgtgcgcctgtcctcaggacccagcaggctcagacttgcctgcgatcaaagaaagccctgtgtgcctcccagacccaccacccccgtgcaaactctctcaacacgacaccgctgcgtgactttcctgctgttactagaggtcggcaggtacttttccctaggaaactgggtgtgcacgtctcatccccgtgccaattctcttgccgcttttccttccacacgcggcgtcctctgggcggagggtgcagctccgcgtgctccagctgccgcgaaagttgcacccggcccagtctggctgcgggccccgcctccgccttctcagcgcccagccccaccctccgattggtcagcagtgcccagccccgccccgctcctccgaggggatttaaagcagcggccgctcagtctgggcgcttgcaggctgctaaacccaaccgcagttgactagcacctgctaccgcgcctttgcttcctggcgcacgcggagcctcctggagcctgccaccatcctgcctactacgtgctgccctgcgcccgcagccatgtgccgcaccctggccgccttccccaccacctgcctggagagagccaaagagttcaagacacgtctggggatctttcttcacaaatcagagctgggctgcgatactgggagtactggcaagttcgagtggggcagtaaacacagcaaagagaatagaaacttctcagaagatgtgctggggtggagagagtcgttcgacctgctgctgagcagtaaaaatggagtggctgccttccacgctttcctgaagacagagttcagtgaggagaacctggagttctggctggcctgtgaggagttcaagaagatccgatcagctaccaagctggcctccagggcacaccagatctttgaggagttcatttgcagtgaggcccctaaagaggtcaacattgaccatgagacccgcgagctgacgaggatgaacctgcagactgccacagccacatgctttgatgcggctcaggggaagacacgtaccctgatggagaaggactcctacccacgcttcctgaagtcgcctgcttaccgggacctggctgcccaagcctcagccgcctctgccactctgtccagctgcagcctggacgagccctcacacacctgagtctccacggcagtgaggaagccagccgggaagagaggttgagtcacccatccccgaggtggctgcccctgtgtgggaggcaggttctgcaaagcaagtgcaagaggacaaaaaaaaaaaaaaaaaaaaaaaaaatgcgctccagcagcctgtttgggaagcagcagtctctccttcagatactgtgggactcatgctggagaggagccgcccacttccaggacctgtgaataagggctaatgatgagggttggtggggctctctgtggggcaaaaaggtggtatgggggttagcactggctctcgttctcaccggagaaggaagtgttctagtgtggtttaggaaacatgtggataaagggaaccatgaaaatgagaggaggaaagacatccagatcagctgttttgcctgttgctcagttgactctgattgcatcctgttttcctaattcccagactgttctgggcacggaagggaccctggatgtggagtcttcccctttggccctcctcactggcctctgggctagcccagagtcccttagcttgtacctcgtaacactcctgtgtgtctgtccagccttgcagtcatgtcaaggccagcaagctgatgtgactcttgccccatgcgagatatttatacctcaaacactggcctgtgagccctttccaagtcagtggagagccctgaaaggaggctcacttgaatccagctcagtgctctgggtggccccctgcaggtggcccctgaccctgcgttgcagcagggtccacctgtgagcaggcccgccctggggcctcttcctggatgtgccctctctgagttctgtgctgtctcttggaggcagggcccaggagaacaaagtgtggaggcctcggggagtggcttttccagctctcatgccccgcagtgtggaacaaggcagaaaaggatcctaggaaataagtctcttggcggtccctgagagtcctgctgaaatccagccagtgttttttgtggtatgagaacaggcaaaaagagatgccccgagatagaaggggagccttgtgtttctttcctgcagacgtgagatgaacactggagtgggcagaggtggcccaggaccatggcacccttagagtgcagaagctggggggagaggctgcttcgaagggcaggactggggataatcagaacctgcctgtcacctcagggcatcactgaacaaacatttcctgatgggaactcctgcggcagagcccaggctggggaagtgaactacccagggcagcccctttgtggcccaggataatcaacactgttctctctgtaccatgagctcctccaggagattatttaagtgtattgtatcattggttttctgtgattgtcataacattgtttttgttattgttggtgctgttgttatttattattgtaatttcagtttgcctctactggagaatctcagcaggggtttcagcctgactgtctccctttctctaccagactctacctctgaatgtgctgggaacctcttggagcctgtcaggaactcctcactgtttaaatatttatttattgtgacaaatggagctggtttcctagatatgaatgatgtttgcaatccccattttcctgtttcagcatgttatattcttataaaataaaagcaaaagtcaaatatgaaaaaaaaaaccacaaacaaaaacaaacaacaaaaccaaaccaaccacactacctctaaaaactctcccatcccaaaaaacccactaaaaaaaaaaaaaatttgtggcccttctggcccaatgcgcttttgaccttgggcaagctttatcatggggcccaaatttgggcctctttggccaattcgcccttaggggggccgtttttccaggggcggggttttcac

SEQ ID NO: 346043 - DNA, 2388 bp, Homo sapiens
agcagttctgctgcaaagaagtcttctgcacccaggcgcacttctgcacccaggcgcacttctgcacccaggcgcacttctgcacccaggcgcacttctgcacccaggcgcacttctgcacccaggcgcacttctccaccacctgcctggagagagccaaagagttcaagacacgtctggggatctttcttcacaaatcagagctgggctgcgatactgggagtactggcaagttcgagtggggcagtaaacacagcaaagagaatagaaacttctcagaagatgtgctggggtggagagagtcgttcgacctgctgctgagcagtaaaaatggagtggctgccttccacgctttcctgaagacagagttcagtgaggagaacctggagttctggctggcctgtgaggagttcaagaagatccgatcagctaccaagctggcctccagggcacaccagatctttgaggagttcatttgcagtgaggcccctaaagaggtcaacattgaccatgagacccgcgagctgacgaggatgaacctgcagactgccacagccacatgctttgatgcggctcaggggaagacacgtaccctgatggagaaggactcctacccacgcttcctgaagtcgcctgcttaccgggacctggctgcccaagcctcagccgcctctgccactctgtccagctgcagcctggacgagccctcacacacctgagtctccacggcagtgaggaagccagccgggaagagaggttgagtcacccatccccgaggtggctgcccctgtgtgggaggcaggttctgcaaagcaagtgcaagaggacaaaaaaaaaaaaaaaaaaaaaaaaaatgcgctccagcagcctgtttgggaagcagcagtctctccttcagatactgtgggactcatgctggagaggagccgcccacttccaggacctgtgaataagggctaatgatgagggttggtggggctctctgtggggcaaaaaggtggtatgggggttagcactggctctcgttctcaccggagaaggaagtgttctagtgtggtttaggaaacatgtggataaagggaaccatgaaaatgagaggaggaaagacatccagatcagctgttttgcctgttgctcagttgactctgattgcatcctgttttcctaattcccagactgttctgggcacggaagggaccctggatgtggagtcttcccctttggccctcctcactggcctctgggctagcccagagtcccttagcttgtacctcgtaacactcctgtgtgtctgtccagccttgcagtcatgtcaaggccagcaagctgatgtgactcttgccccatgcgagatatttatacctcaaacactggcctgtgagccctttccaagtcagtggagagccctgaaaggaggctcacttgaatccagctcagtgctctgggtggccccctgcaggtggcccctgaccctgcgttgcagcagggtccacctgtgagcaggcccgccctggggcctcttcctggatgtgccctctctgagttctgtgctgtctcttggaggcagggcccaggagaacaaagtgtggaggcctcggggagtggcttttccagctctcatgccccgcagtgtggaacaaggcagaaaaggatcctaggaaataagtctcttggcggtccctgagagtcctgctgaaatccagccagtgttttttgtggtatgagaacaggcaaaaagagatgccccgagatagaaggggagccttgtgtttctttcctgcagacgtgagatgaacactggagtgggcagaggtggcccaggaccatggcacccttagagtgcagaagctggggggagaggctgcttcgaagggcaggactggggataatcagaacctgcctgtcacctcagggcatcactgaacaaacatttcctgatgggaactcctgcggcagagcccaggctggggaagtgaactacccagggcagcccctttgtggcccaggataatcaacactgttctctctgtaccatgagctcctccaggagattatttaagtgtattgtatcattggttttctgtgattgtcataacattgtttttgttattgttggtgctgttgttatttattattgtaatttcagtttgcctctactggagaatctcagcaggggtttcagcctgactgtctccctttctctaccagactctacctctgaatgtgctgggaacctcttggagcctgtcaggaactcctcactgtttaaatatttatttattgtgacaaatggagctggtttcctagatatgaatgatgtttgcaatccccattttcctgtttcagcatgttatattcttataaaataaaagcaaaagtcaaatatga

SEQ ID NO: 346044 - DNA, 2162 bp, Homo sapiens
gcagggttgctgtagaagaaagggtgaaaggggattgcgtttgtatacattcttgatagatcctcatgttaattctgagagattggaggacagacactggatcagatgtgggtacaagcccagagctgaaaagctagtgatcaactcaggagcccccacttcctgatgcagcatccgatgctctttccaatgcccagcctgccgttggccctccctcagccatgcccaccctcttccccaactcaccctgtgtgtgtcctccttcccgcaggtcaacattgaccatgagacccgcgagctgacgaggatgaacctgcagactgccacagccacatgctttgatgcggctcaggggaagacacgtaccctgatggagaaggactcctacccacgcttcctgaagtcgcctgcttaccgggacctggctgcccaagcctcagccgcctctgccactctgtccagctgcagcctggacgagccctcacacacctgagtctccacggcagtgaggaagccagccgggaagagaggttgagtcacccatccccgaggtggctgcccctgtgtgggaggcaggttctgcaaagcaagtgcaagaggacaaaaaaaaaaaaaaaaaaaaaaaaaatgcgctccagcagcctgtttgggaagcagcagtctctccttcagatactgtgggactcatgctggagaggagccgcccacttccaggacctgtgaataagggctaatgatgagggttggtggggctctctgtggggcaaaaaggtggtatgggggttagcactggctctcgttctcaccggagaaggaagtgttctagtgtggtttaggaaacatgtggataaagggaaccatgaaaatgagaggaggaaagacatccagatcagctgttttgcctgttgctcagttgactctgattgcatcctgttttcctaattcccagactgttctgggcacggaagggaccctggatgtggagtcttcccctttggccctcctcactggcctctgggctagcccagagtcccttagcttgtacctcgtaacactcctgtgtgtctgtccagccttgcagtcatgtcaaggccagcaagctgatgtgactcttgccccatgcgagatatttatacctcaaacactggcctgtgagccctttccaagtcagtggagagccctgaaaggaggctcacttgaatccagctcagtgctctgggtggccccctgcaggtggcccctgaccctgcgttgcagcagggtccacctgtgagcaggcccgccctggggcctcttcctggatgtgccctctctgagttctgtgctgtctcttggaggcagggcccaggagaacaaagtgtggaggcctcggggagtggcttttccagctctcatgccccgcagtgtggaacaaggcagaaaaggatcctaggaaataagtctcttggcggtccctgagagtcctgctgaaatccagccagtgttttttgtggtatgagaacaggcaaaaagagatgccccgagatagaaggggagccttgtgtttctttcctgcagacgtgagatgaacactggagtgggcagaggtggcccaggaccatggcacccttagagtgcagaagctggggggagaggctgcttcgaagggcaggactggggataatcagaacctgcctgtcacctcagggcatcactgaacaaacatttcctgatgggaactcctgcggcagagcccaggctggggaagtgaactacccagggcagcccctttgtggcccaggataatcaacactgttctctctgtaccatgagctcctccaggagattatttaagtgtattgtatcattggttttctgtgattgtcataacattgtttttgttattgttggtgctgttgttatttattattgtaatttcagtttgcctctactggagaatctcagcaggggtttcagcctgactgtctccctttctctaccagactctacctctgaatgtgctgggaacctcttggagcctgtcaggaactcctcactgtttaaatatttatttattgtgacaaatggagctggtttcctagatatgaatgatgtttgcaatccccattttcctgtttcagcatgttatattcttataaaataaaagcaaaagtcaaatatga

SEQ ID NO: 346045 - DNA, 1205 bp, Homo sapiens
ttcatctataaaatggagatgatgatgaagagcttacttagccccgtgtccatcatggtaagagcctcgtaaagggtacttatcagtataatcagatgctgttttgcccaggtttgcaccctgtgcgcctgtcctcaggacccagcaggctcagacttgcctgcgatcaaagaaagccctgtgtgcctcccagacccaccacccccgtgcaaactctctcaacacgacaccgctgcgtgactttcctgctgttactagaggtcggcaggtacttttccctaggaaactgggtgtgcacgtctcatccccgtgccaattctcttgccgcttttccttccacacgcggcgtcctctgggcggagggtgcagctccgcgtgctccagctgccgcgaaagttgcacccggcccagtctggctgcgggccccgcctccgccttctcagcgcccagccccaccctccgattggtcagcagtgcccagccccgccccgctcctccgaggggatttaaagcagcggccgctcagtctgggcgcttgcaggctgctaaacccaaccgcagttgactagcacctgctaccgcgcctttgcttcctggcgcacgcggagcctcctggagcctgccaccatcctgcctactacgtgctgccctgcgcccgcagccatgtgccgcaccctggccgccttccccaccacctgcctggagagagccaaagagttcaagacacgtctggggatctttcttcacaaatcagagctgggctgcgatactgggagtactggcaagttcgagtggggcagtaaacacagcaaagagaatagaaacttctcagaagatgtgctggggtggagagagtcgttcgacctgctgctgagcagtaaaaatggagtggctgccttccacgctttcctgaagacagagttcagtgaggagaacctggagttctggctggcctgtgaggagttcaagaagatccgatcagctaccaagctggcctccagggcacaccagatctttgaggagttcatttgcagtgaggcccctaaagaggtcaacattgaccatgagacccgcgagctgacgaggatgaacctgcagactgccacagccacatgctttgatgcggctcaggggaagacacgtaccctgatggagaaggactcctacccacgcagccaggtcccggtaagcaggcgacgtcgacc

SEQ ID NO: 346046 - DNA, 109 bp, Homo sapiens
aaaagtggattcttattctagaataacaaaacaattagaaattggcattttttaccaacccattatatcaaatattactctcaatactattctctgctttccaacaacc

SEQ ID NO: 346047 - DNA, 1273 bp, Homo sapiens
gccaagattccctcagtccagtacctccttgctcctttccagtcttctgtcctgggaggctgagatttatgggtcttccttgccctccactaccaatttctatttccttgactatgcccctctctacaaggtctttttggtttcactgcctacatagctttaggtatactacctttccgcattgttggagcatgaggcagttgggccaaaatggcattaaagcctaaagtgaggcatgttcaagatgccacagtgaccaaattcacgccatccaggatgcacctgactctggaagctgatgaggctaatgatgctaacgtgtatcctggatccctgaggtccgctcccaacatcagcccttcagcctcagctgggttctaacaaaaccccctgccacctccacgttgatctttgttgtcattctcatcgcagtgctttggtatgggaggtgttagaaaacttagagactagaattgtggaggttgggaccttgtaactccaataagcactgaagaaggtgtctctacagtcccttcttccatggagctggaacccccgcacccaccccaagtgtaaaccctctcctcctgcaggttcaagctcctcagtcccagggaactaaaactgaataatgtgaggaagcagtgatgtttctgctcaaactgtgatctggatccagaaactagccctaaacagctcatggcttctcaggaagctttataaaaggactgtctcactcacattctgcctactttcccatcttccctcctgggaaaatgaagtccagttaatggaatcagcacctttccttcattcctggtagattaacccttggcattaagcagatagatatttctaagattattctaccagattcatgaaggctaaagggaattccttttgattttgtccttgttacttaggggtcagggataaggatggtagagttgattgaggccctagatcaggaccattgtcagaaaatgaatggcatggccgggcgcggtggctcacaccttaatcccagcactttgggaggctgaggaaggcaaatcacaaggtcaggagttcgagaccagcctggccagcatggtgaaactctgtctctactaaaaataaaaaaattagctgggcatggtggcaggtacgtgtagtccctgctactcaggaggctgaggcaggagaatggcttgaacccagcagatggaggttgcagtgagccaagatcgtgccattgcactccagcctgggtgacagagcgagactctgtctc

SEQ ID NO: 346048 - DNA, 460 bp, Homo sapiens
ctagaaatgaactgagctggagtttgaaccagacagtttggttccaatccttacttcttaagcacttcaccatagtgcagaaggataagacaggcacagtgcaatgtacatgttggtgctgttgttattaataaatacagttagagcaatgactgttttgtgggctcagagaggctgctgtcctatttcttgctgaagcagtgggttgaccaaaggctactctgtttttggtggctcaaatctttggtggcacataagctgctgtctcctattgaagttaaaattcacaagtgccattgaagagcttttcagctgaagcacatagcatttatccaaactagagaccttgaaagccggtgattagggtggattgtgtacacattcattccaagtttagacaaaaaaaaaatggggagaaggagggaggaggttggagattttcagagcggttgcttagaaa

SEQ ID NO: 346049 - DNA, 126 bp, Homo sapiens
ttttttttttcataggcatgatgtatcattcttggcttgtcttaaagagttatgcaaattgtctaaactttcagcagtgatatgtcactgaacttataggcatttagtaataattcaaatagttaa

SEQ ID NO: 346050 - DNA, 727 bp, Homo sapiens
agttttcaagatgtattccctctctgacatctattaactagcacagagtcttcaggatattattaggtgctcaataaaagtttattgtatgagaataagcaatattttctttatctctcatttggttgtatctttccctactttgttatttcattttttcttacattttatctttgtattctgacactatttcttagttttgcttctgttttccccagaagagtactttggttaaaatgtatcacttgcaaaatagaataacacaccgccatgtagtgttgcttcaggttataattttccatatatgtacagtatgccaaaaggatgctgcttctagagagaatgtttaaaactcacttctctagatttttttaaagttactttagtgtttcacatgtttgccagatatcattgtcattgaagataagcattgattaaatttcagaattttattaatgaaagcaatcttttgagcaaatttagaaaataaatttagttttggtagggtatattatttattttttgtagcaaaattatttcttcataatgtcaaagataatagtcagtgttttacattatcaaagtaaattcccaaaggtaaagaatgatttgtgagtgccactgggcttggctgtgctgaaattgtgagcctgttgttacttctgatttatgactgggaaagtctgtgttcattgtgctcactctgatgtcctagtcaggaaaccaa

SEQ ID NO: 346051 - DNA, 507 bp, Homo sapiens
cagaaccacacaaaaccccttgatgccagcaaaaatctctttctggatagagattcaggtaattgttttagaaggcttgattgacttattgtacaaaattaaatttttggtgaacaaaatatcttggcttagaattttaaaacagtctgaacagacgatgacgttaagctgttgtggctacagctttgtgccttttagggttacacgattcaggagatgataaaattgcctcccaactaatattgtccatgcggaggcttcgcagatcagcgattttcaccctaaggctcgcatgggcttgtggtcaccgcatctctcttcatctcgcagccttcgcaagacgggagggaggctgcgagatgagtctgtgggatgcaaaggagccacggccaccccacatcttccgcagataacacgttcacacctgcgccccttctatttaaaagaaacaaaatctctcactacatctcactttttagagatagcctttgatgatattactgccag

SEQ ID NO: 346052 - DNA, 142 bp, Homo sapiens
ttgggattagacactgaccttatacctttcacaaaaatgaactcaatatggatcatagatgacatcttgattgcttccaattttttggcaattttgaataaatctaatgtaaatatttgtgtgcaggtgtgtgagtgggcat

SEQ ID NO: 346053 - DNA, 771 bp, Homo sapiens
tgcatttgaggacctcgaggttagaggatcctgtggtctgttcctatttatgcagctcgtggtggaacttgtgttccaacccaggtcttctgtctctgactccggcgcgttctctgccacacccagctcttggggtcgtattgactaaggtgggtccgtaactgtcactgcagtgggcactcaggggaaccctggaaagccacagagaaaatccactagcacaactgcaccttggggaaagcgcttcgtgtgtttgcttcagctattcaaggagtcctgagctcctgtacgatgaaaatgtttcttcatctctgacacttctgtggggcttcgcatacaatgctgagttacatcgcgagttatcaacaaacatttctggaatgaatgatccactgagttgggagagaaaagccaaggggggattttaacacagggggctttctaactgggcctagaaactggtgactccatgcccctaggaataaaacaaaataggagagaactgaaatacaaggttacacatcaacaagaattccacattttaaaaagagagagagagatgaaagatctacaggggctgtgtgtcagaccctgatgtctcacctctcggaagggccttcctggacttcaggccccaactgtcctagcaattccaagaaaagaactggggaatgaggaccatccatccaggaagcatgtttctggttccaggtggtcggtcactaggcgttcctcctctgcccttagaaacatgccaggggccgtatttct

SEQ ID NO: 346054 - DNA, 716 bp, Homo sapiens
tgcatttgaggacctcgaggttagaggatcctgtggtctgttcctatttatgcagctcgtggtggaacttgtgttccaacccaggtcttctgtctctgactccggcgcgttctctgccacacccagctcttggggtcgtattgactaaggtgggtccgtaactgtcactgcagtgggcactcaggggaaccctggaaagccacagagaaaatccactagcacaactgcaccttggggaaagcgcttcgtgtgtttgcttcagctattcaaggagtcctgagctcctgtacgatgaaaatgtttcttcatctctgacacttctgtggggcttcgcatacaatgctgagttacatcgcgagttatcaacaaacatttctggaatgaatgatccactgagttgggagagaaaagccaaggggggattttaacacagggggctttctaactgggcctagaaactggtgactccatgcccctaggaatattttaaaaagagagagagagatgaaagatctacaggggctgtgtgtcagaccctgatgtctcacctctcggaagggccttcctggacttcaggccccaactgtcctagcaattccaagaaaagaactggggaatgaggaccatccatccaggaagcatgtttctggttccaggtggtcggtcactaggcgttcctcctctgcccttagaaacatgccaggggccgtatttct

SEQ ID NO: 346055 - DNA, 245 bp, Homo sapiens
tgaaagcaccagatttccgcgtaggagggactcgggggcaacgatgcaattggaaggtaagggttccaggaacaaagtcactcactgtcctgtgggtagtctccgagtctctgcgaggacccactgcacggcaggagctagtctcagactgagatgcctaccgggtacctgccaggtgggccaggccctgttctcaccactgctctgaatggtcaccacagagaatggtctccctcctctcaggg

SEQ ID NO: 346056 - DNA, 896 bp, Homo sapiens
tgaaagcaccagatttccgcgtaggagggactcgggggcaacgatgcaattggaaggtaagggttccaggaacaaagtcactcactgtcctgtgggtagtctccgagtctctgcgaggacccactgcacggcaggagctagtctcagactgaggtgagttctcggcagcagaaggcaccaccgcactcccaagggctaaaggtttaccctgcacctctcctactgaagcttgcagagggttggcatggcagccttcttcatcataggagactctaagactgctacttttggctcctctgggttgtgcagcttgagtggaagagcagatcctctcacagcctagacctcctggccagccgtttcttgccctagactccactccgagtggcagtctcccaagctgtctaataggcgtatgggagaagtatcagcaagtatgctacttctaatgtcccaggtggtgcacccagcactgtgcctcttccctagtgcagctgaaggaaagctgccactgcctgtgccttcctttacaagggttgtcctggcatgtgtcagaccactgggtcccctaacaaccttgccaatgtgccagtcctctgaatgtttctggctttagcccctgcccttggcttgcacgtgtcttcttcctaggacatccggggtgcttgtgtcatatgctggtagcataatgtcatcaacagtgcaccagtgtgctgtgcaaactatcccgagacagcctgtatgcatgcaaaatatgctcaaaagtacccaaggccgaggcgtggcagctcatgcctataattccagcactttgggaggctgagactggtggatcacttaagcctaggagtttgagactagcctgagcaaaatagtgagaccctatctcaactgaa

SEQ ID NO: 346057 - DNA, 294 bp, Homo sapiens
ccagtctcaggtagtacctttacagcagtgtgagcacagattaatacataagagttccttatattttacatgttaagcttttatcagatgtatggttttaaaatatttttcccatccataagttgtgaataatacattaaagccttacaataaaaaccaaatatttcttccactgtatatataaacagaaaacatgaatactttcagaatatttactcattataaaaatatgccaaattagtattattagcagtattatctatttgtatgtaacaactccagcagttaaaaatt

SEQ ID NO: 346058 - DNA, 225 bp, Homo sapiens
tactctttagtcacattctctcacccatcctgcaactgttgtgcatgttgagaaatgcagtgcatgataaagaaacatttaaattaaatctttagtcctaatctgaaaaaaatcaatgtttaaggatatttgttaagacattgctatagaatgttctgggcctttggcctcaggttgtggtgatggatgtgtatgtagtagtacttgaagctttctatggctata

SEQ ID NO: 346059 - DNA, 526 bp, Homo sapiens
ccggccgagaattcaatcttccttgttagccttggagaattcatttgatttattaaaggaagatgttgttttcttcttcacaactttttggagggtgtccttggcctctgtactctacaaagttcagtcagagagggtgcaagccagggtaggagtgtcagtcccagtggggtttgctaatgtgcagatacagcaggtgctacagggaagggaaagggcactggggtgagtcaggtctaggttctgccaccggcttcctgggttcctttagacaagtcacttctctctgagtctcagtttccccatatgtacaatggagttggggcagatggcctccaagtcccttcactctaggaggcaggaacacccaggtgcctccagggttggggcttcttcagtgggggcgctcagtctcccacatgtccagacccccactcttgggggattctggagccggaagggtcctgggcatcccgtttgatctgagcacagtcccccagccacaggcttaagccatctggagaat

SEQ ID NO: 346060 - DNA, 686 bp, Homo sapiens
ttggaagtattgttgtagaactggcaaaaattaaaggagaagaaagaacaacaaaagcattttggaatggataacgaaaaacaggggtaacggtagaagttatacttagtgttagtaaatatagttaataaatatacagtagggccatgtgcgagtgactgtttccatgtcagcatattaagtttgttgacttaataatgctgtgtattatatctgtttctcatttggaaagttgctcaaatttgcacatgagcatagattgaagttagtgtgtccaccctttgaatcatattgttcctgaaaaaggtacaccctgttttaaaagtttactagtgttgttttacttttatttctatcaaaggaggattaaacttatccatggtatttaaaaatagatgtgtctgctgggcgcagtggctcacacctgtaatctcagcactttgggaggccgaggcgagtggatcacctgaggtcaggagttcaagaccagcctggccaacatggcaaaaccccgtctctactaaaaatacaaaaattggccggcacactgtcacatgcctgtaattctagctactcgggaggctgaggcaggagaatcgctttgaacccgggaggcagaggttgcagtcagtggagatagccaccactacactccagcctgggcaacagagtgagactgtaaaaaa

SEQ ID NO: 346061 - DNA, 286 bp, Homo sapiens
gccagcagtgtgccacgtgtccccatcctctgactgcagggagagtacagacccaaggctgtagctgggtcacgagctgcatgggcaggaatgcagggtgagctaactgggattcacgtgttttcagccttgcttacgtttatatgatgtatattttcaaatttcgtggactttctgcataaggttttagcagctataactgttttgtttttttgttttttgttttttgttttgagatggagtctcactctgtcgcccaggctggagtgcagtggcacgatctcag

SEQ ID NO: 346062 - DNA, 612 bp, Homo sapiens
tgtgctgtgttcgtgtaggcataatgtgaggaggtggggagacaccccacccccatgtccaccatgaccctcttcccacgctggcctggcatgtgctgtaggccagcggatcacctgaggtcgggagttcgagaccagcctgaccaacatggaaaaaccccgtctctactaaaaatacaaaattagtcaggcatggtagcgcatgtgggaggtaatatatccattactctgacctgtcttttaaaaacagagtggtagaccaggtatccttacgttagtgattctgggtcatgacaccccaagatcattggtgagagtacaatgaacatgcaaggatgcatacaaggttgcttttgtgtttgttttttagaaaatgaggtttgcagaccttttgtccttttttactcgatttaaaaaattttcaacaggtatttatctgaagtactgggtacaggccagtttttttgttttttgttgttgttgttttttgaactaccaccacagtcatgcaaatgaatatgagctgttgaattaattaccctatcttctacatctcttctacttcccatcacgctggcctacagcacatgccggtaccgagctgattgtatt

SEQ ID NO: 346063 - DNA, 549 bp, Homo sapiens
gctatacaactcgagctcggtaccggcatgtgctgtaggccagcggatcacctgaggtcgggagttcgagaccagcctgaccaacatggaaaaaccccgtctctactaaaaatacaaaattagtcaggcatggtagcgcatgtgggaggtaatatatccattactctgacctgtcttttaaaaacagagtggtagaccaggtatccttacgttagtgattctgggtcatgacaccccaagatcattggtgagagtacaatgaacatgcaaggatgcatacaaggttgcttttgtgtttgttttttagaaaatgaggtttgcagaccttttgtccttttttactcgatttaaaaaattttcaacaggtatttatctgaagtactgggtacaggccagtttttttgttttttgttgttgttgttttttgaactaccaccacagtcatgcaaatgaatatgagctgttgaattaattaccctatcttctacatctcttctacttcccatcacgctggcctacagcacatgccggtaccgagctgattgtatt

SEQ ID NO: 346064 - DNA, 637 bp, Homo sapiens
  misc_feature (510)..(510): n is a, c, g, or t
  misc_feature (526)..(526): n is a, c, g, or t
  misc_feature (541)..(542): n is a, c, g, or t
tgtgctgtgttcgtgtaggcataatgtgaggaggtggggagacaccccacccccatgtccaccatgaccctcttcccacgctggcctggcatgtgctgtaggccagcggatcacctgaggtcgggagttcgagaccagcctgaccaacatggaaaaaccccgtctctactaaaaatacaaaattagtcaggcatggtagcgcatgtgggaggtaatatatccattactctgacctgtcttttaaaaacagagtggtagaccaggtatccttacgttagtgattctgggtcatgacaccccaagatcattggtgagagtacaatgaacatgcaaggatgcatacaaggttgcttttgtgtttgttttttagaaaatgaggtttgcagaccttttgtccttttttagtggaggacaatatattataacaggagatagtcaatgtacacatgactggggaacttggccgctcggtacccggcatgtgctttttgtcttgctgtaatagcacgnacagtgaagcataagngaatatggtctgttnntttaactgctcaattttatacatcatgatctgatcggtcgcttcatcgctggcctacaacacctgccggcaccggctcggcttgtactatgtctg

SEQ ID NO: 346065 - DNA, 821 bp, Homo sapiens
tgtgctgtgttcgtgtaggcataatgtgaggaggtggggagacaccccacccccatgtccaccatgaccctcttcccacgctggcctggcatgtgctgtaggccagcggatcacctgaggtcgggagttcgagaccagcctgaccaacatggaaaaaccccgtctctactaaaaatacaaaattagtcaggcatggtagcgcatgtgggaggtaatatatccattactctgacctgtcttttaaaaacagagtggtagaccaggtatccttacgttagtgattctgggtcatgacaccccaagatcattggtgagagtacaatgaacatgcaaggatgcatacaaggttgcttttgtgtttgttttttagaaaatgaggtttgcagaccttttgtccttttttactcgatttaaaaaattttcaacaggtatttatccgaagtgctgggattacaggcgtgagccagctcacccggccttaggttggggcttttaaatgacccttcaggtgtgtgtctgtgatgacttgaggcttttttttttactgtcttccagtgaaattaccagatgaatatcagtggtgagaaatttgattccttgaaatgtaaggaatttcattcttgaattgtgtgacaaaaccagggagcatgattttgggtccattcaggatctatccagtcaacactgagtatatagttgttgatggagactatgataggttctgaggatggatctgttatattctccataaatctgtatgtgagtcatgcctttgtttgcttcctacttgttctgtttactgggttttttttttctttgag

SEQ ID NO: 346066 - DNA, 414 bp, Homo sapiens
aggcatggtagcgcatgtgggaggtaatatatccattactctgacctgtcttttaaaaacagagtggtagaccaggtatccttacgttagtgattctgggtcatgacaccccaagatcattggtgagagtacaatgaacatgcaaggatgcatacaaggttgcttttgtgtttgttttttagaaaatgaggtttgcagaccttttgtccttttttactcgatttaaaaaattttcaacaggtatttatctgaagtactgggtacaggccagtttttttgttttttgttgttgttgttttttgaactaccaccacagtcatgcaaatgaatatgagctgttgaattaattaccctatcttctacatctcttctacttcccatcacgctggcctataagaagtttgatgccacatg

SEQ ID NO: 346067 - DNA, 1730 bp, Homo sapiens
  misc_feature (20)..(20): n is a, c, g, or t
gcagtggtatcaacgcaggnctggccattatggccgggggggtcagtgtcacctccaggatacagacagccccccttcagcccagcccagccaggtctcctacaccgccaccatgccattcggtaacacccacaacaagttcaagctgaattacaagcctgaggaggagtaccccgacctcagcaaacataacaaccacatggccaaggtactgacccttgaactctacaagaagctgcgggacaaggagactccatctggcttcactgtagacgatgtcatccagacaggagtggacaacccaggtcaccccttcatcatgaccgtgggctgcgtggctggtgatgaggagtcctacgaagttttcaaggaactctttgaccccatcatctcggatcgccacgggggctacaaacccactgacaagcacaagactgacctcaaccatgaaaacctcaagggtggagacgacctggaccccaactacgtgctcagcagccgcgtccgcactggccgcagcatcaagggctacacgttgcccccacactgctcccgtggcgagcgccgggcggtggagaagctctctgtggaagctctcaacagcctgacgggcgagttcaaagggaagtactaccctctgaagagcatgacggagaaggagcagcagcagctcatcgatgaccacttcctgttcgacaagcccgtgtccccgctgctgctggcctcaggcatggcccgcgactggcccgacgcccgtggcatctggcacaatgacaacaagagcttcctggtgtgggtgaacgaggaggatcacctccgggtcatctccatggagaaggggggcaacatgaaggaggttttccgccgcttctgcgtagggctgcagaagattgaggagatctttaagaaagctggccaccccttcatgtggaaccagcacctgggctacgtgctcacctgcccatccaacctgggcactgggctgcgtggaggcgtgcatgtgaagctggcgcacctgagcaagcaccccaagttcgaggagatcctcacccgcctgcgtctgcagaagaggggtacaggtggcgtggacacagctgccgtgggctcagtatttgacgtgtccaacgctgatcggctgggctcgtccgaagtagaacaggtgcagctggtggtggatggtgtgaagctcatggtggaaatggagaagaagttggagaaaggccagtccatcgacgacatgatccccgcccagaagtaggcgcctgcccacctgccaccgactgctggaacccagccagtgggagggcctggcccaccagagtcctgctccctcactcctcgccccgccccctgtcccagagtcccacctgggggctctctccacccttctcagagttccagtttcaaccagagttccaaccaatgggctccatcctctggattctggccaatgaaatatctccctggcagggtcctcttcttttcccagagctccaccccaaccaggagctctagttaatggagagctcccagcacactcggagcttgtgctttgtctccacgcaaagcgataaataaaagcattggtggccttaaaaaaaaaaacaaataacaaaaaaaaacaaaactttgggcggggggctgggcccgggaaaaagtttttctaagaaacttgtgtgggggggggggcccaggtgtgtatgggaacaggggcgccaagggggccagag

SEQ ID NO: 346068 - DNA, 1702 bp, Homo sapiens
  misc_feature (20)..(20): n is a, c, g, or t
gcagtggtatcaacgcaggnctggccattatggccgggggggtcagtgtcacctccaggatacagacagccccccttcagcccagcccagccaggtctcctacaccgccaccatgccattcggtaacacccacaacaagttcaagctgaattacaagcctgaggaggagtaccccgacctcagcaaacataacaaccacatggccaaggtactgacccttgaactctacaagaagctgcgggacaaggagactccatctggcttcactgtagacgatgtcaccccttcatcatgaccgtgggctgcgtggctggtgatgaggagtcctacgaagttttcaaggaactctttgaccccatcatctcggatcgccacgggggctacaaacccactgacaagcacaagactgacctcaaccatgaaaacctcaagggtggagacgacctggaccccaactacgtgctcagcagccgcgtccgcactggccgcagcatcaagggctacacgttgcccccacactgctcccgtggcgagcgccgggcggtggagaagctctctgtggaagctctcaacagcctgacgggcgagttcaaagggaagtactaccctctgaagagcatgacggagaaggagcagcagcagctcatcgatgaccacttcctgttcgacaagcccgtgtccccgctgctgctggcctcaggcatggcccgcgactggcccgacgcccgtggcatctggcacaatgacaacaagagcttcctggtgtgggtgaacgaggaggatcacctccgggtcatctccatggagaaggggggcaacatgaaggaggttttccgccgcttctgcgtagggctgcagaagattgaggagatctttaagaaagctggccaccccttcatgtggaaccagcacctgggctacgtgctcacctgcccatccaacctgggcactgggctgcgtggaggcgtgcatgtgaagctggcgcacctgagcaagcaccccaagttcgaggagatcctcacccgcctgcgtctgcagaagaggggtacaggtggcgtggacacagctgccgtgggctcagtatttgacgtgtccaacgctgatcggctgggctcgtccgaagtagaacaggtgcagctggtggtggatggtgtgaagctcatggtggaaatggagaagaagttggagaaaggccagtccatcgacgacatgatccccgcccagaagtaggcgcctgcccacctgccaccgactgctggaacccagccagtgggagggcctggcccaccagagtcctgctccctcactcctcgccccgccccctgtcccagagtcccacctgggggctctctccacccttctcagagttccagtttcaaccagagttccaaccaatgggctccatcctctggattctggccaatgaaatatctccctggcagggtcctcttcttttcccagagctccaccccaaccaggagctctagttaatggagagctcccagcacactcggagcttgtgctttgtctccacgcaaagcgataaataaaagcattggtggccttaaaaaaaaaaacaaataacaaaaaaaaacaaaactttgggcggggggctgggcccgggaaaaagtttttctaagaaacttgtgtgggggggggggcccaggtgtgtatgggaacaggggcgccaagggggccagag

SEQ ID NO: 346069 - DNA, 1614 bp, Homo sapiens
gcataagcctgcgtcagattaaaacactgaactgacaattaacagcccaatatctacaatcaaccaacaagtcattattaccctcactgtcaacccaacacaggcatgctcataaggaaaggttaaaaaaaaagtaaaaggaactcggcaaatcttaccccgcctgtttaccaaaaacatcacctctagcatcaccagtattagaggcaccgcctgcccagtgacacatgtttaacggccgcgagattttcaaggaactctttgaccccatcatctcggatcgccacgggggctacaaacccactgacaagcacaagactgacctcaaccatgaaaacctcaagggtggagacgacctggaccccaactacgtgctcagcagccgcgtccgcactggccgcagcatcaagggctacacgttgcccccacactgctcccgtggcgagcgccgggcggtggagaagctctctgtggaagctctcaacagcctgacgggcgagttcaaagggaagtactaccctctgaagagcatgacggagaaggagcagcagcagctcatcgatgaccacttcctgttcgacaagcccgtgtccccgctgctgctggcctcaggcatggcccgcgactggcccgacgcccgtggcatctggcacaatgacaacaagagcttcctggtgtgggtgaacgaggaggatcacctccgggtcatctccatggagaaggggggcaacatgaaggaggttttccgccgcttctgcgtagggctgcagaagattgaggagatctttaagaaagctggccaccccttcatgtggaaccagcacctgggctacgtgctcacctgcccatccaacctgggcactgggctgcgtggaggcgtgcatgtgaagctggcgcacctgagcaagcaccccaagttcgaggagatcctcacccgcctgcgtctgcagaagaggggtacaggtggcgtggacacagctgccgtgggctcagtatttgacgtgtccaacgctgatcggctgggctcgtccgaagtagaacaggtgcagctggtggtggatggtgtgaagctcatggtggaaatggagaagaagttggagaaaggccagtccatcgacgacatgatccccgcccagaagtaggcgcctgcccacctgccaccgactgctggaacccagccagtgggagggcctggcccaccagagtcctgctccctcactcctcgccccgccccctgtcccagagtcccacctgggggctctctccacccttctcagagttccagtttcaaccagagttccaaccaatgggctccatcctctggattctggccaatgaaatatctccctggcagggtcctcttcttttcccagagctccaccccaaccaggagctctagttaatggagagctcccagcacactcggagcttgtgctttgtctccacgcaaagcgataaataaaagcattggtggccttaaaaaaaaaaacaaataacaaaaaaaaacaaaactttgggcggggggctgggcccgggaaaaagtttttctaagaaacttgtgtgggggggggggcccaggtgtgtatgggaacaggggcgccaagggggccagag

SEQ ID NO: 346070 - DNA, 1292 bp, Homo sapiens
tttttttgaagagaacctcaagggtggagacgacctggaccccaactacgtgctcagcagccgcgtccgcactggccgcagcatcaagggctacacgttgcccccacactgctcccgtggcgagcgccgggcggtggagaagctctctgtggaagctctcaacagcctgacgggcgagttcaaagggaagtactaccctctgaagagcatgacggagaaggagcagcagcagctcatcgatgaccacttcctgttcgacaagcccgtgtccccgctgctgctggcctcaggcatggcccgcgactggcccgacgcccgtggcatctggcacaatgacaacaagagcttcctggtgtgggtgaacgaggaggatcacctccgggtcatctccatggagaaggggggcaacatgaaggaggttttccgccgcttctgcgtagggctgcagaagattgaggagatctttaagaaagctggccaccccttcatgtggaaccagcacctgggctacgtgctcacctgcccatccaacctgggcactgggctgcgtggaggcgtgcatgtgaagctggcgcacctgagcaagcaccccaagttcgaggagatcctcacccgcctgcgtctgcagaagaggggtacaggtggcgtggacacagctgccgtgggctcagtatttgacgtgtccaacgctgatcggctgggctcgtccgaagtagaacaggtgcagctggtggtggatggtgtgaagctcatggtggaaatggagaagaagttggagaaaggccagtccatcgacgacatgatccccgcccagaagtaggcgcctgcccacctgccaccgactgctggaacccagccagtgggagggcctggcccaccagagtcctgctccctcactcctcgccccgccccctgtcccagagtcccacctgggggctctctccacccttctcagagttccagtttcaaccagagttccaaccaatgggctccatcctctggattctggccaatgaaatatctccctggcagggtcctcttcttttcccagagctccaccccaaccaggagctctagttaatggagagctcccagcacactcggagcttgtgctttgtctccacgcaaagcgataaataaaagcattggtggccttaaaaaaaaaaacaaataacaaaaaaaaacaaaactttgggcggggggctgggcccgggaaaaagtttttctaagaaacttgtgtgggggggggggcccaggtgtgtatgggaacaggggcgccaagggggccagag

SEQ ID NO: 346071 - DNA, 1305 bp, Homo sapiens
cgggtccaggtcgtctccacccttgaggttttcatggttgaggtcagtcttgtgcttgtcagtgggtttgtagccgcgtccgcactggccgcagcatcaagggctacacgttgcccccacactgctcccgtggcgagcgccgggcggtggagaagctctctgtggaagctctcaacagcctgacgggcgagttcaaagggaagtactaccctctgaagagcatgacggagaaggagcagcagcagctcatcgatgaccacttcctgttcgacaagcccgtgtccccgctgctgctggcctcaggcatggcccgcgactggcccgacgcccgtggcatctggcacaatgacaacaagagcttcctggtgtgggtgaacgaggaggatcacctccgggtcatctccatggagaaggggggcaacatgaaggaggttttccgccgcttctgcgtagggctgcagaagattgaggagatctttaagaaagctggccaccccttcatgtggaaccagcacctgggctacgtgctcacctgcccatccaacctgggcactgggctgcgtggaggcgtgcatgtgaagctggcgcacctgagcaagcaccccaagttcgaggagatcctcacccgcctgcgtctgcagaagaggggtacaggtggcgtggacacagctgccgtgggctcagtatttgacgtgtccaacgctgatcggctgggctcgtccgaagtagaacaggtgcagctggtggtggatggtgtgaagctcatggtggaaatggagaagaagttggagaaaggccagtccatcgacgacatgatccccgcccagaagtaggcgcctgcccacctgccaccgactgctggaacccagccagtgggagggcctggcccaccagagtcctgctccctcactcctcgccccgccccctgtcccagagtcccacctgggggctctctccacccttctcagagttccagtttcaaccagagttccaaccaatgggctccatcctctggattctggccaatgaaatatctccctggcagggtcctcttcttttcccagagctccaccccaaccaggagctctagttaatggagagctcccagcacactcggagcttgtgctttgtctccacgcaaagcgataaataaaagcattggtggccttaaaaaaaaaaacaaataacaaaaaaaaacaaaactttgggcggggggctgggcccgggaaaaagtttttctaagaaacttgtgtgggggggggggcccaggtgtgtatgggaacaggggcgccaagggggccagag

SEQ ID NO: 346072 - DNA, 1632 bp, Homo sapiens
  misc_feature (20)..(20): n is a, c, g, or t
gcagtggtatcaacgcaggnctggccattatggccgggggggtcagtgtcacctccaggatacagacagccccccttcagcccagcccagccaggtctcctacaccgccaccatgccattcggtaacacccacaacaagttcaagctgaattacaagcctgaggaggagtaccccgacctcagcaaacataacaaccacatggccaaggtactgacccttgaactctacaagaagctgcgggacaaggagactccatctggcttcactgtagacgatgtcatccagacaggagtggacaacccaggtcaccccttcatcatgaccgtgggctgcgtggctggtgatgaggagtcctacgaagttttcaaggaactctttgaccccatcatctcggatcgccacgggggctacaaacccactgacaagcacaagactgacctcaaccatgaaaacctcaagggtggagacgacctggaccccaactacgtgctcagcagccgcgtccgcactggccgcagcatcaagggctacacgttgcccccacactgctcccgtggcgagcgccgggcggtggagaagctctctgtggaagctctcaacagcctgacgggcgagttcaaagggaagtactaccctctgaagagcatgacggagaaggagcagcagcagctcatcgatgaccacttcctgttcgacaagcccgtgtccccgctgctgctggcctcaggcatggcccgcgactggcccgacgcccgtggcatctggcacaatgacaacaagagcttcctggtgtgggtgaacgaggaggatcacctccgggtcatctccatggagaaggggggcaacatgaaggaggttttccgccgcttctgcgtagggctgcagaagattgaggagatctttaagaaagctggccaccccttcatgtggaaccagcacctgggctacgtgctcacctgcccatccaacctgggcactgggctgcgtggaggcgtgcatgtgaagctggcgcacctgagcaagcaccccaagttcgaggagatcctcacccgcctgcgtctgcagaagaggggtacaggtggcgtggacacagctgccgtgggctcagtatttgacgtgtccaacgctgatcggctgggctcgtccgaagtagaacaggtgcagctggtggtggatggtgtgaagctcatggtggaaatggagaagaagttggagaaaggccagtccatcgacgacatgatccccgcccagaagtaggcgcctgcccacctgccaccgactgctggaacccagccagtgggagggcctggcccaccagagtcctgctccctcactcctcgccccgccccctgtcccagagtcccacctgggggctctctccacccttctcagagttccagtttcaaccagagttccaaccaatgggctccatcctctggattctggccaatgaaatatctccctggcagggtcctcttcttttcccagagctccaccccaaccaggagctctagttaatggagagctcccagcacactcggagcttgtgctttgtctccacgcaaagcgattacgataaatagcagttgggcgggcttgtccaaagatagaatcttagttaaaaaaaaaaa

SEQ ID NO: 346073 - DNA, 919 bp, Homo sapiens
  misc_feature (20)..(20): n is a, c, g, or t
gcagtggtatcaacgcaggnctggccattatggccgggggggtcagtgtcacctccaggatacagacagccccccttcagcccagcccagccaggtctcctacaccgccaccatgccattcggtaacacccacaacaagttcaagctgaattacaagcctgaggaggagtaccccgacctcagcaaacataacaaccacatggccaaggtactgacccttgaactctacaagaagctgcgggacaaggagactccatctggcttcactgtagacgatgtcatccagacaggagtggacaacccaggtcaccccttcatcatgaccgtgggctgcgtggctggtgatgaggagtcctacgaagttttcaaggaactctttgaccccatcatctcggatcgccacgggggctacaaacccactgacaagcacaagactgacctcaaccatgaaaacctcaagggtggagacgacctggaccccaactacgtgctcagcagccgcgtccgcactggccgcagcatcaagggctacacgttgcccccacactgctcccgtggcgagcgccgggcggtggagaagctctctgtggaagctctcaacagtgcctaagacagaaattcgggaaaaactagcccaaatgtcagacacacggatgtccatcttgtgttggattcgaactctttggtggtgcagacactgctttgctgattatgatcccggtgtgcaagaaaatgaccattgatgcagacgggcgttgagagaaagacccagaagagaaggagcgacgatggagcggggcgcagcccttggcgccacaaatagttccggggatgtacccaggaaggggagatggcgggtgtggaaacctcaaaaaaaaggggcggaaggggggagagagggtaccgcgggtgcgcccag

SEQ ID NO: 346074 - DNA, 770 bp, Homo sapiens
  misc_feature (20)..(20): n is a, c, g, or t
gcagtggtatcaacgcaggnctggccattatggccgggggggtcagtgtcacctccaggatacagacagccccccttcagcccagcccagccaggtctcctacaccgccaccatgccattcggtaacacccacaacaagttcaagctgaattacaagcctgaggaggagtaccccgacctcagcaaacataacaaccacatggccaaggtactgacccttgaactctacaagaagctgcgggacaaggagactccatctggcttcactgtagacgatgtcatccagacaggagtggacaacccaggtcaccccttcatcatgaccgtgggctgcgtggctggtgatgaggagtcctacgaagttttcaaggaactctttgaccccatcatctcggatcgccacgggggctacaaacccactgacaagcacaagactgacctcaaccatgaaaacctcaagcaatgggctccatcctctggattctggccaatgaaatatctccctggcagggtcctcttcttttcccagagctccaccccaaccaggagctctagttaatggagagctcccagcacactcggagcttgtgctttgtctccacgcaaagcgataaataaaagcattggtggccttaaaaaaaaaaacaaataacaaaaaaaaacaaaactttgggcggggggctgggcccgggaaaaagtttttctaagaaacttgtgtgggggggggggcccaggtgtgtatgggaacaggggcgccaagggggccagag

SEQ ID NO: 346075 - DNA, 1112 bp, Homo sapiens
  misc_feature (20)..(20): n is a, c, g, or t
gcagtggtatcaacgcaggnctggccattatggccgggggggtcagtgtcacctccaggatacagacagccccccttcagcccagcccagccaggtctcctacatgtattttataagaaaatgttaagtcaaattttagtggctctttaattcctgacctcttcattctccttttcagtataacctcccctatgctcatgcccacacagacaaaaaaaacaaaacgaaatacacacagaaaaaagtctttccaaactgtttaacgtatttaaaccatctgagccaaaagcagcatagcaacgtcatcgctcatccactggctcacatcacctttgccaacataggggctatcagaattacctatatctggccatcgcctggattcatacaacctctcatatcctgctccatacttacaccggtggttcgcacgctttcaccacatctgcgcgcctggctccactggactccacgcacagtttcgcatccctccggagcacacaccgctcctcatgccgcctcctaaacgctaacctggccttggctaacaaagggcatgtacatagtcaccttactacgcgcaggaccccgtttcaacatttccccacacaggccactattatttccaaccacacatttcccggctgaactactctaccgcttcggtgaaacctacctagggcgcatgcacaccagtaacaggtgtacatctaccgaacatttacggaaaatggttaaattgccctacttacgagcactctcgcactagcgaaatacaccgtggtactaaccgctaaggcaaggcttgcacgaaacccacaccctgaaggttaccagctggtaaggaccctcctcaattctcctaaaatacctttgccttagctattcgagccttcccacttcctgaaggtcaccacttaagggctccgccaactggtgaacattataattggcaagctgctagtcgatacagcaccaccacttgtgaaccaggcaacttttaaaatctagatagtacgagctaccctaaacacactaaccctttgccaaaaatcctcgtagtggcacaccacacggctgtacgcccaaaagagcagatatatggtaaaaca

SEQ ID NO: 346076 - DNA, 912 bp, Homo sapiens
  misc_feature (20)..(20): n is a, c, g, or t
gcagtggtatcaacgcaggnctggccattatggccgggggggtcagtgtcacctccaggatacagacagccccccttcagcccagcccagccaggtctcctacaccgccacctctagcctagccgtttactcaatcctctgatcagggtgagcatcaaactcaaactacgccctgatcggcgcactgcgagcagtagcccaaacaatctcatatgaagtcaccctagccatcattctactatcaacattactaataagtggctcctttaacctctccacccttatcacaacacaagaacacctctgattactcctgccatcatgacccttggccataatatgatttatctccacactagcagagaccaaccgaacccccttcgaccttgccgaaggggagtccgaactagtctcaggcttcaaccatcgaatacgccgcaggccccttcgccctattcttcatagccgaatacacaaacattattataataaacaccctcaccatacaatcttcctaggaacaacatatgacgcactctcccctgaaactctacacaacatatttggtcaccaagaacctacttctaacctcccctgtccttattgaattccggaacaggattaccccccgattgccgctaccggaacaatcatacacctccctatcgaaaaaattcctaaccattcagcgctaagcttacttattatggatttggctccataccctttaacatcttccagattcccccctcaacaaagcacaaaaaaagcaaaacaattctggggggcccccccccggaagttacaccattggtggggcggggacagattgaaatggccgggccaggaccgcgtcgcgggggcccacaaacgcgggccgctacacaaggcggcagtccgggcgcaaacccg

SEQ ID NO: 346077 - DNA, 199 bp, Homo sapiens
ggggcctggacagatggcaggaacagattttggggagccgtcacaagtgtgggtttagacacagggttcaggtgcctttaggacatccagggggccaaggcccaggcccgttaggagcagcagcaggggaaaccctgggcctccacaccctggttgaggtgggacaggctgctgaccactccctcgtgtgtccccatag

SEQ ID NO: 346078 - DNA, 1351 bp, Homo sapiens
cttgaatggtccaaaaatgaaactgtaattgaaaaacccactgacaagcacaagactgacctcaaccatgaaaacctcaagggtggagacgacctggaccccaactacgtgctcagcagccgcgtccgcactggccgcagcatcaagggctacacgttgcccccacactgctcccgtggcgagcgccgggcggtggagaagctctctgtggaagctctcaacagcctgacgggcgagttcaaagggaagtactaccctctgaagagcatgacggagaaggagcagcagcagctcatcgatgaccacttcctgttcgacaagcccgtgtccccgctgctgctggcctcaggcatggcccgcgactggcccgacgcccgtggcatctggcacaatgacaacaagagcttcctggtgtgggtgaacgaggaggatcacctccgggtcatctccatggagaaggggggcaacatgaaggaggttttccgccgcttctgcgtagggctgcagaagattgaggagatctttaagaaagctggccaccccttcatgtggaaccagcacctgggctacgtgctcacctgcccatccaacctgggcactgggctgcgtggaggcgtgcatgtgaagctggcgcacctgagcaagcaccccaagttcgaggagatcctcacccgcctgcgtctgcagaagaggggtacaggtggcgtggacacagctgccgtgggctcagtatttgacgtgtccaacgctgatcggctgggctcgtccgaagtagaacaggtgcagctggtggtggatggtgtgaagctcatggtggaaatggagaagaagttggagaaaggccagtccatcgacgacatgatccccgcccagaagtaggcgcctgcccacctgccaccgactgctggaacccagccagtgggagggcctggcccaccagagtcctgctccctcactcctcgccccgccccctgtcccagagtcccacctgggggctctctccacccttctcagagttccagtttcaaccagagttccaaccaatgggctccatcctctggattctggccaatgaaatatctccctggcagggtcctcttcttttcccagagctccaccccaaccaggagctctagttaatggagagctcccagcacactcggagcttgtgctttgtctccacgcaaagcgataaataaaagcattggtggccttaaaaaaaaaaacaaataacaaaaaaaaacaaaactttgggcggggggctgggcccgggaaaaagtttttctaagaaacttgtgtgggggggggggcccaggtgtgtatgggaacaggggcgccaagggggccagag

SEQ ID NO: 346079 - DNA, 872 bp, Homo sapiens
attaggcgcgttctgcgtagggctgcagaagattgaggagatctttaagaaagctggccaccccttcatgtggaaccagcacctgggctacgtgctcacctgcccatccaacctgggcactgggctgcgtggaggcgtgcatgtgaagctggcgcacctgagcaagcaccccaagttcgaggagatcctcacccgcctgcgtctgcagaagaggggtacaggtggcgtggacacagctgccgtgggctcagtatttgacgtgtccaacgctgatcggctgggctcgtccgaagtagaacaggtgcagctggtggtggatggtgtgaagctcatggtggaaatggagaagaagttggagaaaggccagtccatcgacgacatgatccccgcccagaagtaggcgcctgcccacctgccaccgactgctggaacccagccagtgggagggcctggcccaccagagtcctgctccctcactcctcgccccgccccctgtcccagagtcccacctgggggctctctccacccttctcagagttccagtttcaaccagagttccaaccaatgggctccatcctctggattctggccaatgaaatatctccctggcagggtcctcttcttttcccagagctccaccccaaccaggagctctagttaatggagagctcccagcacactcggagcttgtgctttgtctccacgcaaagcgataaataaaagcattggtggccttaaaaaaaaaaacaaataacaaaaaaaaacaaaactttgggcggggggctgggcccgggaaaaagtttttctaagaaacttgtgtgggggggggggcccaggtgtgtatgggaacaggggcgccaagggggccagag

SEQ ID NO: 346080 - DNA, 858 bp, Homo sapiens
  misc_feature (20)..(20): n is a, c, g, or t
gcagtggtatcaacgcaggnctggccattatggccgggggggtcagtgtcacctccaggatacagacagccccccttcagcccagcccagccaggtctcctacaccgccaccatgccattcggtaacacccacaacaagttcaagctgaattacaagcctgaggaggagtaccccgacctcagcaaacataacaaccacatggccaaggtactgacccttgaactctacaagaagctgcgggacaaggagactccatctggcttcactgtagacgatgtcatccagacaggagtggacaacccaggtcaccccttcatcatgaccgtgggctgcgtggctggtgatgaggagtcctacgaagttttcaaggaactctttgaccccatcatctcggatcgccacgggggctacaaacccactgacaagcacaagactgacctcaaccatgaaaacctcaagggtggagacgacctggaccccaactacgtgctcagcagccgcgtccgcactggccgcagcatcaagggctacacgttgcccccacactgctcccgtggcgagcgccgggcggtggagaagctctctgtggaagctctcaacagcctgacgggcgagttcaaagggaagtactaccctctgaagagcatgacggagaaggagcagcagcagctcatcgatgaccacttcctgttcgacaagcccgtgtccccgctgctgctggcctcaggcatggccggatggccgagccggggtctggccatgacaccagagctccggggggtgacaagaggacccccggcactcccagggaagggcacacgaagcgtcagcgccggagggaaatgggtaaaaggacc

SEQ ID NO: 346081 - DNA, 205 bp, Homo sapiens
atcttcaatcttcccctcctgccctgcccatcaggtctcctacaccgccaccatgccattcggtaacacccacaacaagttcaagctgaattacaagcctgaggaggagtaccccgacctcagcaaacataacaaccacatggccaaggtactgacccttgaactctacaagaagctgcgggacaaggagactccatctggcttc

SEQ ID NO: 346082 - DNA, 298 bp, Homo sapiens
tcatcttcctgtctcagcctcccaaatagctaggactataggtgcatggcactgcactgcacctggctaattttgtttttttgtagaaatggggtcttgctttgttgctcaggttggtcttgaactcctggcctcaagtgattcttccacttcagcctcccgaggtgttgggattacaggcatgagccaccgcccccagacctaaatcaattactaataaagatttattctttaaaggcagagaaagagacattgctgtcataccgaaacatgattttgaacttactgaattttgaag

SEQ ID NO: 346083 - DNA, 640 bp, Homo sapiens
cattctaggatgaagtgtgtgtgtgtgtgtgtgtgtgtgcacgcgtgtgtgtgtgtgtgtgtgagagagagagagattagagaagtctagagaagtcctgtccaggcctccctcccttgtaggaaggggtggattccctgcttttggatgctctgctgtcagagaagatatcttaaagctgatggccggccgggcgcagtggcttacgcctgtaatcccagcactttgggaggccgaggcgggcagatcatgaggtcaggagatcgagaccagcctggctaacacagtgaaaccccgtctctactaaaaatacaaaaaattagccaggcatggtggcgggcgcctgtagtgccagctactcgggagactgaggcaggagaatggcgtgaacctgggaggcagagcttgcagtgagccgagatcgggcaacagagcgagactccgtctcaaaaaaaaaaaaaaaaaaaaaaaagttgatggccatgatgcaaagtactgaggtggtatgcttgtctttaccattacaggccaagaccaatgaatggatagcttctgaggcagaatgtgaattatgtagcttttctactcagggaggaccaatgaggtgatgctgtgagccccaaagtagagattgctggta

SEQ ID NO: 346084 - DNA, 422 bp, Homo sapiens
tgagacagtctcactctgtcgcccaggctggattcagtgatggtagaagacagaggaactaagagggctttaaggctactttttccactgcaaacaaaagcttcaggaagtgtctcctaacacatctacttatgcccttagcatctagtcctctgcctgccacttagtaagtgaacagcaagtatttgttgaatgaataaaaagcaagaagttgggaaccaaatgaatgcttgtctcggccgggcgtggtgtttttgactcttgaccaccgtcttaacctataattggtacccagcatatctcctcataatagagtagcttccatcctgagatctctccctttcttctttattcatacaagtatcgattttttttttccattcaattttttttttttccattttggtttggaaccttttttt

SEQ ID NO: 346085 - DNA, 225 bp, Homo sapiens
caagtgatccagccgcctcagcctcccaaggcacatgagccaccgtgcctggcgtttttgactcttgaccaccgtcttaacctataattggtacccagcatatctcctcataatagagtagcttccatcctgagatctctccctttcttctttattcatacaagtatcgattttttttttccattcaattttttttttttccattttggtttggaaccttttttt

SEQ ID NO: 346086 - DNA, 1068 bp, Homo sapiens
gcactttttaatcactattttattgacatcctccctgccccgcttccaatgcacaacactgcattgagccccctgaggtgaaggacatgtattctatttctctgttacttccccctaccaatagaaaatatgcacagtcagtactaagtaattcctggttgattgacttgaaacttaataggggaaacaggacagtaaatacaacatgagagcgcacaaacactgtaaacatcctgagggtttggggaactactgtggtggataaacacaagagtaattagccaaagaatgttcagttaagaaataatttgaaaaataggtaagacatagtttgacagaaacattcccaaagtgagaaatgacagccaggagcaggaacagagctggtgggtggagaggacaaaaagcttgtgtacctaggtgggtatgcaaaaggccaagcccgtcaccaaggatattaggtgaagagagcagtagctgaaatgtcttgagaacaatgattatgagcttaactgagacaatggcaacaactgtgtgtttctacaaatgggaataaacgtaagactgtgtaagacactgtctgtgaactgtacatattggacaggaaacggggtgagatgaccagagccaataccagcatctggaaaagagagataagtattagaaaagggggcaggattcagtgatggtagaagacagaggaactaagagggctttaaggctactttttccactgcaaacaaaagcttcaggaagtgtctcctaacacatctacttatgcccttagcatctagtcctctgcctgccacttagtaagtgaacagcaagtatttgttgaatgaataaaaagcaagaagttgggaaccaaatgaatgcttgtctcggccgggcgtggtgtttttgactcttgaccaccgtcttaacctataattggtacccagcatatctcctcataatagagtagcttccatcctgagatctctccctttcttctttattcatacaagtatcgattttttttttccattcaattttttttttttccattttggtttggaaccttttttt

SEQ ID NO: 346087 - DNA, 1014 bp, Homo sapiens
gcactttttaatcactattttattgacatcctccctgccccgcttccaatgcacaacactgcattgagccccctgaggtgaaggacatgtattctatttctctgttacttccccctaccaatagaaaatatgcacagtcagtactaagtaattcctggttgattgacttgaaacttaataggggaaacaggacagtaaatacaacatgagagcgcacaaacactgtaaacatcctgagggtttggggaactactgtggtggataaacacaagagtaattagccaaagaatgttcagttaagaaataatttgaaaaataggtaagacatagtttgacagaaacattcccaaagtgagaaatgacagccaggagcaggaacagagctggtgggtggagaggacaaaaagcttgtgtacctaggtgggtatgcaaaaggccaagcccgtcaccaaggatattaggtgaagagagcagtagctgaaatgtcttgagaacaatgattatgagcttaactgagacaatggcaacaactgtgtgtttctacaaatgggaataaacgtaagactgtgtaagacactgtctgtgaactgtacatattggacaggaaacggggtgagatgaccagagccaataccagcatctggaaaagagagataagtattagaaaagggggcatccactgcaaacaaaagcttcaggaagtgtctcctaacacatctacttatgcccttagcatctagtcctctgcctgccacttagtaagtgaacagcaagtatttgttgaatgaataaaaagcaagaagttgggaaccaaatgaatgcttgtctcggccgggcgtggtgtttttgactcttgaccaccgtcttaacctataattggtacccagcatatctcctcataatagagtagcttccatcctgagatctctccctttcttctttattcatacaagtatcgattttttttttccattcaattttttttttttccattttggtttggaaccttttttt

SEQ ID NO: 346088 - DNA, 763 bp, Homo sapiens
gtaaagacctgttaagccaatggcaagacactagatcctctggcttccaatagcgaaagagttcgtgcaagaagtgcctggggtgactcaagagtcatgtaacttcttttctggaaacttccttttcttagtggttcaaatttcctttcataccttgaagtatgtgtttagtagcctcaattctccattaattaaaagtgtgggctgggcgtgggggctcatgcctgtaatcccagcactttgggaggccgaggtgggcagatcacctgaggtcaggagttcaagaccagcctggccaacatggtgaaaccccgtctctacaaaaatacaaaaattagccaggcgtgatggcaggtgcctgtaatcctagctacttggcaggctaacgcaggagaatcacttgaccgggagacagaggttgcagtgagctgagatcgtacctattgcactccatcctggatgaaagagccagactctgtctcaaaacaaacaaaaaagcgtggggacttctggggacagacaaggtgcctgttatatatttactcagtctttgccctgaatggtctcagcttgagaccatttcaaactggagagaagcaagccagccaatagaatggggtgatttacagggatttctgtttactgtcaaaatatttctcatctgcactatgtttccatttgtggtcctgaaggaaattcttataactcaacatttgtctggtcttataagtaaagacagctttaaaatctgatcactttcaaa

SEQ ID NO: 346089 - DNA, 426 bp, Homo sapiens
taaatttttgtattttatttatttatttatttttaatttttgtttttgagatggagtcttggtctgtcattcaagctggagttgcagtgagctgagatcgtacctattgcactccatcctggatgaaagagccagactctgtctcaaaacaaacaaaaaagcgtggggacttctggggacagacaaggtgcctgttatatatttactcagtctttgccctgaatggtctcagcttgagaccatttcaaactggagagaagcaagccagccaatagaatggggtgatttacagggatttctgtttactgtcaaaatatttctcatctgcactatgtttccatttgtggtcctgaaggaaattcttataactcaacatttgtctggtcttataagtaaagacagctttaaaatctgatcactttcaaa

SEQ ID NO: 346090 - DNA, 491 bp, Homo sapiens
tgatttgctcctccttgaccagggtgggaagtaaaagtgtgtgtgtgtatctgtgtctgtatgtgtctgtgtgcatatgtgtgtgtcggcgactcgtggaaatgtccacgtggacatttccacgagtcaccaaaacctgggacaggctcatgctccaggacaattgctgtggcgtaaatggtccatcagactggcaaaaatacacatctgccttccggactgagaataatgatgctgactatccctggcctcgtcaatgctgtgttatgaacaatcttaaagaacctctcaacctggaggcttgtaaactaggcgtgcctggtttttatcacaatcagggctgctatgaactgatctctggtccaatgaaccgacacgcctggggggttgcctggtttggatttgccattctctgctggactttttgggttctcctgggtaccatggttctcctgtgatgcacgcttgatcttgttgcatcacgccctcgc

SEQ ID NO: 346091 - DNA, 436 bp, Homo sapiens
ttcccctggcctcatagtgatttcttttaagatgagagtctcttctctgcatggggacttatgccaacctcagccagctgtacttggtgcctctgagtacagttttgctccaggagagaatgttcagtgtccccaggaaaagacagagaaaaatattttcctctccttgaaaattagcgtgctatctctccctcttgtgttgcctcttcctactatagttcacacccaacctcttcctgaagcagatgctagagaggtaccaaaacaacagccctccaaacaatgatgaccagtggaaaaacaatggagtcaccaaaacctgggacaggctcatgctccaggtaagacctgtggtcttggggagatgccatttttacttactggtgggagtgggtgtcatacacatgactcagtgggaccctatattttatttcaa

SEQ ID NO: 346092 - DNA, 2038 bp, Homo sapiens
  misc_feature (3)..(3): n is a, c, g, or t
ggnacgggccctaccgtgtgcgcagaaagaggaggcgcttgccttcagcttgtgggaaatcccgaagatggccaaagacaactcaactgttcgttgcttccagggcctgctgatttttggaaatgtgattattggttgttgcggcattgccctgactgcggagtgcatcttctttgtatctgaccaacacagcctctacccactgcttgaagccaccgacaacgatgacatctatggggctgcctggatcggcatatttgtgggcatctgcctcttctgcctgtctgttctaggcattgtaggcatcatgaagtccagcaggaaaattcttctggcgtatttcattctgatgtttatagtatatgcctttgaagtggcatcttgtatcacagcagcaacacaacgagactttttcacacccaacctcttcctgaagcagatgctagagaggtaccaaaacaacagccctccaaacaatgatgaccagtggaaaaacaatggagtcaccaaaacctgggacaggctcatgctccaggacaattgctgtggcgtaaatggtccatcagactggcaaaaatacacatctgccttccggactgagaataatgatgctgactatccctggcctcgtcaatgctgtgttatgaacaatcttaaagaacctctcaacctggaggcttgtaaactaggcgtgcctggtttttatcacaatcagggctgctatgaactgatctctggtccaatgaaccgacacgcctggggggttgcctggtttggatttgccattctctgctggactttttgggttctcctgggtaccatgttctactggagcagaattgaatattaagcataaagtgttgccaccatacctccttccccgagtgactctggatttggtgctggaaccagctctctcctaatattccacgtttgtgccccacactaacgtgtgtgtcttacattgccaagtcagatggtacggacttcctttaggatctcaggcttctgcagttctcatgactcctacttttcatcctagtctagcattctgcaacatttatatagactgttgaaaggagaatttgaaaaatgcataataactacttccatccctgcttatttttaatttgggaaaataaatacattcgaaggaacctgtgttatcacagtaacccagagctgtatttggctagcaatctgcctgtatctctcactattatctaaaagaaaccttccaatgcttctgttgatctcagtattgtcaggggaacagagaagttgggaaaagattactgaaatataccttttgcatttctttctagagtagctcccatatatggagatgggtgattctcttgatgccaccttcagatccttttattctccagaataattcttaacagtggttcaaatttcctttcataccttgaagtatgtgtttagtagcctcaattctccattaattaaaagtgtgggctgggcgtgggggctcatgcctgtaatcccagcactttgggaggccgaggtgggcagatcacctgaggtcaggagttcaagaccagcctggccaacatggtgaaaccccgtctctacaaaaatacaaaaattagccaggcgtgatggcaggtgcctgtaatcctagctacttggcaggctaacgcaggagaatcacttgaccgggagacagaggttgcagtgagctgagatcgtacctattgcactccatcctggatgaaagagccagactctgtctcaaaacaaacaaaaaagcgtggggacttctggggacagacaaggtgcctgttatatatttactcagtctttgccctgaatggtctcagcttgagaccatttcaaactggagagaagcaagccagccaatagaatggggtgatttacagggatttctgtttactgtcaaaatatttctcatctgcactatgtttccatttgtggtcctgaaggaaattcttataactcaacatttgtctggtcttataagtaaagacagctttaaaatctgatcactttcaaa

SEQ ID NO: 346093 - DNA, 2150 bp, Homo sapiens
  misc_feature (3)..(3): n is a, c, g, or t
ggnacgggccctaccgtgtgcgcagaaagaggaggcgctggacttatcctaccttaagttgaagcagaccagcaattgttgtgacctacaatctccacacccatctttactctgagccaaggaagtgtctgttcttgtgctgagtttcaggtgccttcagcttgtgggaaatcccgaagatggccaaagacaactcaactgttcgttgcttccagggcctgctgatttttggaaatgtgattattggttgttgcggcattgccctgactgcggagtgcatcttctttgtatctgaccaacacagcctctacccactgcttgaagccaccgacaacgatgacatctatggggctgcctggatcggcatatttgtgggcatctgcctcttctgcctgtctgttctaggcattgtaggcatcatgaagtccagcaggaaaattcttctggcgtatttcattctgatgtttatagtatatgcctttgaagtggcatcttgtatcacagcagcaacacaacgagactttttcacacccaacctcttcctgaagcagatgctagagaggtaccaaaacaacagccctccaaacaatgatgaccagtggaaaaacaatggagtcaccaaaacctgggacaggctcatgctccaggacaattgctgtggcgtaaatggtccatcagactggcaaaaatacacatctgccttccggactgagaataatgatgctgactatccctggcctcgtcaatgctgtgttatgaacaatcttaaagaacctctcaacctggaggcttgtaaactaggcgtgcctggtttttatcacaatcagggctgctatgaactgatctctggtccaatgaaccgacacgcctggggggttgcctggtttggatttgccattctctgctggactttttgggttctcctgggtaccatgttctactggagcagaattgaatattaagcataaagtgttgccaccatacctccttccccgagtgactctggatttggtgctggaaccagctctctcctaatattccacgtttgtgccccacactaacgtgtgtgtcttacattgccaagtcagatggtacggacttcctttaggatctcaggcttctgcagttctcatgactcctacttttcatcctagtctagcattctgcaacatttatatagactgttgaaaggagaatttgaaaaatgcataataactacttccatccctgcttatttttaatttgggaaaataaatacattcgaaggaacctgtgttatcacagtaacccagagctgtatttggctagcaatctgcctgtatctctcactattatctaaaagaaaccttccaatgcttctgttgatctcagtattgtcaggggaacagagaagttgggaaaagattactgaaatataccttttgcatttctttctagagtagctcccatatatggagatgggtgattctcttgatgccaccttcagatccttttattctccagaataattcttaacagtggttcaaatttcctttcataccttgaagtatgtgtttagtagcctcaattctccattaattaaaagtgtgggctgggcgtgggggctcatgcctgtaatcccagcactttgggaggccgaggtgggcagatcacctgaggtcaggagttcaagaccagcctggccaacatggtgaaaccccgtctctacaaaaatacaaaaattagccaggcgtgatggcaggtgcctgtaatcctagctacttggcaggctaacgcaggagaatcacttgaccgggagacagaggttgcagtgagctgagatcgtacctattgcactccatcctggatgaaagagccagactctgtctcaaaacaaacaaaaaagcgtggggacttctggggacagacaaggtgcctgttatatatttactcagtctttgccctgaatggtctcagcttgagaccatttcaaactggagagaagcaagccagccaatagaatggggtgatttacagggatttctgtttactgtcaaaatatttctcatctgcactatgtttccatttgtggtcctgaaggaaattcttataactcaacatttgtctggtcttataagtaaagacagctttaaaatctgatcactttcaaa

SEQ ID NO: 346094 - DNA, 1532 bp, Homo sapiens
aattccacttaacgctggaagcacgcagacgctcttgaggcgggcagctgcgtagcgtgtggaggagccgggagagcgcaccccaatgtggcacctgagcgtctgggaccgaaccagcatggggagtcggaaggggacaaatccgcgatcccagtcatgcatctctgctttcccagcacgctgcctcaccaagaaagaatccagagaaggactggtggacttggaatgttaagtcatggcccatttgatgatgttcagggatgtggctgtagatttctctcaggaggagtgggagtgcctggacctggaacagagggatttatatagagatgtgatgttggagaactacagcaacatggtctcactgggtttttgcatttatcagccagaagcgttctctttattggagaaagggaaagagccctggaagattttgagggatgagacaagaggaccttgcccagacatgcagtcgaggtgtcagaccaagaagttattaccaaaaaatggcatttttgagagagaaatagcccaattggaaataatgagaatttgtaaaaaccacagccttgactgtttatgttttagaggtgactgggaaggcaacactcagtttcaaacacttcaagataatcaagaggaatgcttcaagcaggtgatacgcacctgtgaaaaaaggcccacttttaaccagcatacagtgtttaatctacaccagagacttaatacaggagacaaactgaatgaatttaaagaactggggaaagcctttatttctggttcagatcatactcaacatcagttaattcacacaagtgagaaattctgtggagataaagaatgtgggaatacctttcttcctgattcagaagttattcaatatcagacagttcacactgttaagaaaacatatgaatgtaaagaatgtgggaagtcttttagtttacgttcgagtcttactggtcataagagaattcataccggtgagaaaccttttaaatgtaaggattgtgggaaagcctttagatttcattcacaacttagtgtccataagcgaattcatactggtgagaaatcttatgaatgtaaggaatgtgggaaggcctttagttgtggctcagatcttactcgacatcagagaattcatactggtgaaaaaccctatgaatgtaatgaatgtagaaaggcctttagtcagcgatcacatcttattaaacatcagagaattcacactggtgaaaaaccttatgaatgtaaggagtgtgggaaagcttttactcgtggatcacacctaactcagcatcagagaattcatactggtgagaaatctcatgagtgtaaggaatgtggaaaagcctttattcgtggttcaaatcttgctcaacatcagaatgttcatgttggtaggaaaccttataaatgtgagaaatgtgggaaagcctatatttggagctcacaccttgctcgacatcagcgaattcatactggcaggaaaccttatgaatgtaagcaatgcgggaagacttttactt

SEQ ID NO: 346095 - DNA, 386 bp, Homo sapiens
gggccaggatttcttcaggttccttctgacttacctccaaggaagaaaatggcatttcctatttgtccctttgagagctctgagaaaggcctgaccttgtgattctttccttctagctctgctttcccagcacgctgcctcaccaagaaagaatccagagaaggactggtggacttggaatgttaagtcatggcccatgtgagttggaattgcctctctccaaaaatataacccatttatatcaaatcatgtgaatatttttattgcttatccttaaactgcttacctgaatcactattgagtgtcataagtaatgactgtgaaacagtccaatgctttccctagatatccctcttttctccaaccagtatgaccaaatctatcca

SEQ ID NO: 346096 - DNA, 253 bp, Homo sapiens
aattccacttaacgctggaagcacgcagacgctcttgaggcgggcagctgcgtagcgtgtggaggagccgggagagcgcaccccaatgtggcacctgagcgtctgggaccgaaccagcatggggagtcggaaggggacaaatccgcgatcccagtcatgcatgtgagactgggcaaaggaaggctcgagtgtgtgtgagaccgcggtgggcctgcttgtgctggtgggatgaggggtgtctgggtagttgagt

SEQ ID NO: 346097 - DNA, 458 bp, Homo sapiens
ttgccctttttttcatattgctcatatttgagaattttctaagccattcacttctcatatgctttacttcaagattttctatatctattttagaagttgtattgctttttgtacatacaaccgtatgatgtttttaccttcttatttttcagacatgcagtcgaggtgtcagaccaagaagttattaccaaaaaatggcatttttgagagagaaatagcccaattggaaataatgagaatttgtaaaaaccacagccttgactgtttatgttttagaggtgactgggaaggcaacactcagtttcaaacacttcaagataatcaagaggaatgcttcaagcaggtgatacgcacctgtgaaaaaaggcccacttttaaccagcatacagtgtttaatctacaccagagacttaatacaggagacaaactgaatgaatttaaagaactggggaaagcct

SEQ ID NO: 346098 - DNA, 1718 bp, Homo sapiens
acaggcagccaactccagtttttcgcccaatatatgccccactccctgcagtgcccctttccagcctttcccctttcatctatagggattataattatttttaaaaatttcaccattaatacttggaattattctttccaacagttgatgatgttcagggatgtggctgtagatttctctcaggaggagtgggagtgcctggacctggaacagagggatttatatagagatgtgatgttggagaactacagcaacatggtctcactgggtaagattcagcattttccttagaaattcctgctttctgtattgtgattttttttattgtcttttaaatgtccagggtaacttctgacctttgttttttagaaaatggtttgcgctttgtaaatctggcaatagttatcatcagtgggcacttccatctttcccatagtttatacttatttttgtcctgcctgtaattgtttctcttccttagtaaccaaagaagtagttgcaaattttagaatctttacaatgtggttctttgctgtttctcatcttctgggcaggtttttgcatttatcagccagaagcgttctctttattggagaaagggaaagagccctggaagattttgagggatgagacaagaggaccttgcccagacatgcagtcgaggtgtcagaccaagaagttattaccaaaaaatggcatttttgagagagaaatagcccaattggaaataatgagaatttgtaaaaaccacagccttgactgtttatgttttagaggtgactgggaaggcaacactcagtttcaaacacttcaagataatcaagaggaatgcttcaagcaggtgatacgcacctgtgaaaaaaggcccacttttaaccagcatacagtgtttaatctacaccagagacttaatacaggagacaaactgaatgaatttaaagaactggggaaagcctttatttctggttcagatcatactcaacatcagttaattcacacaagtgagaaattctgtggagataaagaatgtgggaatacctttcttcctgattcagaagttattcaatatcagacagttcacactgttaagaaaacatatgaatgtaaagaatgtgggaagtcttttagtttacgttcgagtcttactggtcataagagaattcataccggtgagaaaccttttaaatgtaaggattgtgggaaagcctttagatttcattcacaacttagtgtccataagcgaattcatactggtgagaaatcttatgaatgtaaggaatgtgggaaggcctttagttgtggctcagatcttactcgacatcagagaattcatactggtgaaaaaccctatgaatgtaatgaatgtagaaaggcctttagtcagcgatcacatcttattaaacatcagagaattcacactggtgaaaaaccttatgaatgtaaggagtgtgggaaagcttttactcgtggatcacacctaactcagcatcagagaattcatactggtgagaaatctcatgagtgtaaggaatgtggaaaagcctttattcgtggttcaaatcttgctcaacatcagaatgttcatgttggtaggaaaccttataaatgtgagaaatgtgggaaagcctatatttggagctcacaccttgctcgacatcagcgaattcatactggcaggaaaccttatgaatgtaagcaatgcgggaagacttttactt

SEQ ID NO: 346099 - DNA, 268 bp, Homo sapiens
atgttttactttcttccccgtgcttctcaagtggtgagcttcttgagaaagggacatgaggtagtcactcgtgcatccctggagaatagtatatactgtctcaggcccggtgaatatcctttaaattgattgattaggaacgactcctcctttagaaccttttggtttttttaaatatttttatttttattttttgagatggaatcttgctctgtcacccaaggtgaagtacagtggcgcaatctcagctcactgcaacctctgcctc

SEQ ID NO: 346100 - DNA, 465 bp, Homo sapiens
taaaaaaaacccatacagagtactagagaaggatttcaaggaacatcttacagtgtgaatgattctagttatagtttattagaattcctttttgtttttccatatcgttatgccgctatatttagtctgtattaaacatttctaatcagttttttctctttttctttgtgtcattataatgcattttaaaatgtgatggctataggtttaatgagttaatctcacttggtgaatatgaaaaggcagcttgttatgcagcaaacagtcctagaagaattcttcgaaacattggtacaatgaatacatttaagggtaagcatttctctctgaaccttatatatgtatgaaaatttactactttttctctcataaaatagaaaaagcattaaactgggagactaaagatctaggccccagccctatctctaccatttactctgtatggggatatggtacgcgagctcc

SEQ ID NO: 346101 - DNA, 506 bp, Homo sapiens
tcacataagccttgattttcataatgcagacagtattctctatatggctgtaggaatataagacttcagtggtgtttgcatagtaactcctttttcaccttctactacaagagcccctcttgtagctggggagtgcacccacaagatctaacagctgtttcagagctgctcattttagagtgattggtagggagttggtggctcaaaggtcctaatcagaatgtgtcctgggttctgaatgactagcagactatcattaaccaaagtgctgggattacaggcatgaaccaccatgcccggcccaatttggtttaatgagttaatctcacttggtgaatatgaaaaggcagcttgttatgcagcaaacagtcctagaagaattcttcgaaacattggtacaatgaatacatttaaggctgttggaaaaattagaggaaagcctcttccattactcttattttttgaggccctctttatcacaagtcatgcttttccatgtcctgttg

SEQ ID NO: 346102 - DNA, 211 bp, Homo sapiens
agacagggtttcccatgttggccagactggtttcaaactcctaacctcaggcaatccacctgctttggcctcccaaagtactggaattacaggtgtgaaccatcgtgcccagcccaatttgctgttggaaaaattagaggaaagcctcttccattactcttattttttgaggccctctttatcacaagtcatgcttttccatgtcctgttg

SEQ ID NO: 346103 - DNA, 3030 bp, Homo sapiens
  misc_feature (680)..(680): n is a, c, g, or t
tgaggtcctggacgaggtgcttctgtgctctgaacctcagtttccccatctaaatcagggcgatgcctggcaagagctggtgagggctgacctggaggacctgggctgccctgcccattcccttccgggggtgatgattgccttggcttgcagtgccaggcctttgcctgtattatcagcaatcctgacggttctgttagattggcactgttatgcctgcttacagatgagcaaactgaggctggaaggtgggggaccaggtagctggaagtgggcgaactccaacccagctctgagctcagtaccctgtcctgtcccctcgatgggctgccccgcctgtcacctcacctcatcagtgtggcatgtgtcaggcactggaccagggacacctcgctgaggaagaaatggctctgcccttcccggatgttctgtgatgggcaggcagctgagggcaccgtcttgggttcgcagatccccaggggagaactgccagcacctcctggcccgagacgtggggctgcccctgtgccaggccctggtggaggctgaggacgggaaccctgaccgcgtcctggagctgctcctgcccatccgctaccggatcgtccagctcggtgggagcaatgcccaggtgagccgatggccgccagctggggtgcctagggcctgggccagggagnctgggcgccccgcagcccccaagtttctcccatggtgttggtgccaacaatgtgggtgtgaacgtgtctctcacactcccgccgtgtaagttcgtcgttgagggtgtggcatcaacaccactgtctccctggagagcaggcagcccgcggtgggcgggggctcgcctcccccatcctgaggtacaggagactcacatgcccgattgacatttcagagagacgtcttcaaccagctgctgattcacgcggccttaaactgcacctccagcgtccataagaacgtagcccggtgagctcctggcccctgcccagcactcccgaccttcacaggctctccctgcagacctcaggagtgcctggaagccccaccacccttggcccgagatgctcctgcttctgaggctgtgaggtcgggaggctgtggggaatttggttctcctttgttagcaggctcagtgtgaccaagtggagccagccccaccccaggcccaacctcccacccttcccagcccactcccttttagccttgctaagctacctgggtacgtaaacacgtcctgctctttcaggctcctgggcctttgcacgcttggaacaccctttctccttttttgcacctggccgacacctaatgctcagttagacctcagctcatttcacctgcctgcctgtgctgggtaccgagagggagcagtgagcaggcacaccagtcactggctaccaggagcccatctgtagtcgggggagcgacagggagcaatcagtcccacagacacgtaaactcgcactgagggagcagcagctgagggcagacccgaaaccacagtgggtttagccaggccaggcatggggctggtaggagggtggcgtggctggagggtgagtgttagggtggcatggctggagggtgagtgtgttagggcagcgtggctggagggtgttaggagggtggtgtggctggagggtgagtgttaggagggtggcgtggctggagggtgagtgttaggagggtggcgtggctggaaggtgtgttagggtggcgtggctggagggtgagtgttaggagggtggtgtggctggcaggcgagtgtcaggagggtggcatagctggcagatgagagtgctgggggaactccaaagagccctcaccattgccagcagccttggtgcttccatggcccagcttgcctccctccacttaggctgctgagctcttggccagcagctgcgtagcccgtgtgcctgagcggcgagtttgacacctctccttgcccatgtccctgccaccctcagacataagtgaaaggaagaatagaggagtcatggggtgcctggtggggaaggtgtgctgtgagagcaggtggcagcccgggtccacaggaggcccttggctggtgacaagcccagtggtttaggcgcaggtgcaccagcgcagctccctccaggcagggttacccaaactgagctgtacaggttctgtggtactcatgaaacaggtctggctggcagcactggaaccgcctagaactgtaaaatgtcttggacgcatgctccccgctttccccttccatggctgtagacaaaaccatgcgtgtttctttggtggtcaagccccctggggagctcaggctgtggtgtgggtgggagttggtgcctctggcagcagcggtggggaaagtggctgtgtggacaggagggctgaggatggagctggggtgacatctgtggggcagtgcggcagtgccgatgtggccttctgcggggcccagtgggggagggcagggggagagcaggctgcacagggagccgactgcattaggagacgtggagggggccttctctccaagtcctgtcctgctaccaggcagcatccatggggccatcagcacagctcaccagcccccaaggtgggaaaccttccacccacagccatggtgccccccacaatgagttcccggccccagccccttcacaccacccacgccctctagaaccactgttttcaggtgtttgggggctgtcttagtcagtttgggttgttattttaaaagtgccacagacaggccgggcacggtggctcatgcctgtaatcccagcactttcggaggccaaggcgggtggatcacctgaggtcaggagttcaagaccagcctggctaatatggtgaaactccgcctctactaaaaatacaaaaaattagccgggcgtggtggtgggtacctgtaatcccggctagtcgggagcctgaggcaggagaatcgcttgaacctgggaggtggaggttgcagtgagccgagatcgcgtcattgcactccagcctgagtgaccgagggagattctatctcaaaaa

SEQ ID NO: 346104 - DNA, 1036 bp, Homo sapiens
cccttagagacctgccgtcgcctgccccggcagcctgactgatctgctttatctggaatcctcttccccgcaccctgcgtaggctttatctattaacccgacagacgcatggtcggtgcacaccgtcgctcacatccacgagatgaaagcagagatcaaggatgggttggaattcatgcagcactcagagaccctctggaaggactctgatatgttggcttgtcataactattggcactgggctttatatctgattgagaagggcgaatatgaggccgcgctgaccatctacgatacccacgtaagttgcattcacaccgtgtttggtttgttgcagcattttgcctttgagtctcaaagagaccagatttttgagttcatcaggattgtcccagccagaaaaacagctggagcaagaacacatttcttgtgtaaggcctcatggggttaattttgccaagagcaatgttgtaaccctgcctatgatggggacagtggttggccctgctcaactcgagggtgctgatagatttacacatctaagggcctcacctctgcaattgtggactctcctccagccctttcagatcacttttctttggtaagacaactggtctacccataggaattttttttttttttgagacagagtttcgctcttgttgcccaggctggagtgcaatggtgcgattggctggaattttttttctttgctgtgataaaataaaaataacataaaattacgtgtacaaggccgggtgtggtggctcacacctgtaatcccagtaatttgggagtccgaggcaggtggatcatttgaggtcaggagttcaagaccagcctggccaacatggtgaaacgctgtctctactaaaaatacaaaaaaattagctaggcgtggtggtgggcacctgtaatcccagctactcggggggctgaggcacgagaatcacttgaacccaggaggcagaggttacagtgagccaagatcacgctactgcactccagcctgggtgacagagtgagactctgtctc

SEQ ID NO: 346105 - DNA, 548 bp, Homo sapiens
ttgtactggaggacgtgggagggtggggacatatctctgccccccccccacagcgtcctaaaagggcctctgcactctcccttcttccccaggactctgagtggtgggtggacagcggtgggtgcagtggggatgttttttgaggatgctggcctccccgggcctcccattgtggcctgctgagggtctgatgcagggctcggctgcttaggacgtgggatcctgtcctgggatgaatctgtgagtatactgccttcacctaggctgtgcctttagaactaggagaagtctcagaagtaagatccaactagcttccttgacaagtggggaaactgaggctcagagttgaacctacttgacttgaaggttgtccatgaattacaggcagaaccaggatgaacctgggcctaactgcactgatagaaacctaagctgaccttggcgtgggtggtgaggcccctgcatactgacttcatccacataacaggaggactcaggtagctcttagaagcctacgggctgaacaagagaggactgatggaatgctg

SEQ ID NO: 346106 - DNA, 2536 bp, Homo sapiens
ccctttccgcgaccgccccgcccactcccaggaaggcccgggtgcccagagctcgcggtggactccgacccggcgcaacatggccgcagcctcgcctctgcgcgactgccaggcctggaaggatgcgaggctcccgctctccaccacaagcaacgaagcctgcaagctgttcgatgccacgctgacccagtatgtaaaatggaccaatgacaagagtctcggtggcatcgagggctgcctgtcaaagctcaaagcagcagatccaacctttgtgatgggccacgccatggctactggccttgtgctgattggcactggaagctccgtgaagctggacaaagagctggacctggctgtgaagacaatggtggagatttcaagaacccagccgctgacaaggcgggagcagctgcacgtgtctgcagtagagacatttgccaatgggaactttccgaaagcctgtgaactatgggaacagattctccaggaccacccgacagacatgttggccctgaaattttcccatgatgcttatttttacctgggctatcaggaacagatgagagattctgttgctcgaatttaccccttctggacacctgacatccccctaagcagctatgtgaaaggcatctactcttttggcttgatggaaaccaacttctacgaccaggcagaaaaactcgccaaagaggctttatctattaacccgacagacgcatggtcggtgcacaccgtcgctcacatccacgagatgaaagcagagatcaaggatgggttggaattcatgcagcactcagagaccctctggaaggactctgatatgttggcttgtcataactattggcactgggctttatatctgattgagaagggcgaatatgaggccgcgctgaccatctacgatacccacatccttcccagcctgcaggccaacgatgcaatgctggacgtggtggacagctgctccatgctctaccgcctgcagatggaaggagtgtctgtgggccagcggtggcaggatgtcctgcctgtggcccggaagcacagccgagaccacatcctgctgttcaatgacgcacacttcctgatggcatccctgggtgcacacgacccccagaccacacaggagctgctgaccaccctgcgggacgccagcgaatccccaggggagaactgccagcacctcctggcccgagacgtggggctgcccctgtgccaggccctggtggaggctgaggacgggaaccctgaccgcgtcctggagctgctcctgcccatccgctaccggatcgtccagctcggtgggagcaatgcccagagagacgtcttcaaccagctgctgattcacgcggccttaaactgcacctccagcgtccataagaacgtagcccggagccttctgatggagcgtgatgccttgaagcccaactcgcccctgaccgagcggctcatccgcaaggcagctaccgtccacctcatgcagtgagccagcagcctgtttgttagggctgttagagggtgatcttcagttttacaggaagtgggtcacgggttaattttaaatgtgattccgaatctcctttcagtcctcgagaagggccaatgagcatttttcagcagtcacagccagtgtgagtgctgctctttccacctgccttgcaaattctgtttcccaggggaatgtgtctactgcctggtggttcaaaggttggaaggcagggcagaggtgggggctgattctgctgggacaggtcttccagaggcagcctccccccactgcctgtccccgtccccaccaggctgcccttgggatggaccttttcattcttttctttatattctagacagtctctgttgtctcattgtgttgctgtcccatttttcaggtgagggtaccggggtaggggagtggcctgcccagggtcacactatgagaggcccccacctgctgcctttggacgcagccccctgctgctgcatccaccacccttcttacagatcagcgcgcacatggggtccttctgctgtctctggggcgagtcttggagccccctggggggctctgttggtgctgatttggacccgtttctctttttaaactgcacatcataacagggcttcatgtcgagcatgattttaatcataaatgcacttctgaggtgcaaggattgagctcagagctgctctgttgtggcaaaacccaaagtgctgtgatgtgtggctgtgacaagcctggagcgggtcctgtgagcgccgcctctgtctcctgcttccccactgaacgcctgctgaatgtgccgctgactcagctgtgctgctttcagccctcctgtgaggggcggtcccagtgcacagatgtttttcaagttcctcagtttgtactgaaattagggattcatcagggcaggaagcaggcaggcctctcagaagggagaggaggcctccaaatctattgagtccccacagtttgctcaagcccaggcaaatttctgtgattaaaatgaattcatcagttcctccaaaaaaaaaagca

SEQ ID NO: 346107 - DNA, 2772 bp, Homo sapiens
ccctttccgcgaccgccccgcccactcccaggaaggcccgggtgcccagagctcgcggtggactccgacccggcgcaacatggccgcagcctcgcctctgcgcgactgccaggcctggaaggatgcgaggctcccgctctccaccacaagcaacgaagcctgcaagctgttcgatgccacgctgacccaggactctgagtggtgggtggacagcggtgggtgcagtggggatgttttttgaggatgctggcctccccgggcctcccattgtggcctgctgagggtctgatgcagggctcggctgcttaggacgtgggatcctgtcctgggatgaatcttatgtaaaatggaccaatgacaagagtctcggtggcatcgagggctgcctgtcaaagctcaaagcagcagatccaacctttgtgatgggccacgccatggctactggccttgtgctgattggcactggaagctccgtgaagctggacaaagagctggacctggctgtgaagacaatggtggagatttcaagaacccagccgctgacaaggcgggagcagctgcacgtgtctgcagtagagacatttgccaatgggaactttccgaaagcctgtgaactatgggaacagattctccaggaccacccgacagacatgttggccctgaaattttcccatgatgcttatttttacctgggctatcaggaacagatgagagattctgttgctcgaatttaccccttctggacacctgacatccccctaagcagctatgtgaaaggcatctactcttttggcttgatggaaaccaacttctacgaccaggcagaaaaactcgccaaagaggctttatctattaacccgacagacgcatggtcggtgcacaccgtcgctcacatccacgagatgaaagcagagatcaaggatgggttggaattcatgcagcactcagagaccctctggaaggactctgatatgttggcttgtcataactattggcactgggctttatatctgattgagaagggcgaatatgaggccgcgctgaccatctacgatacccacatccttcccagcctgcaggccaacgatgcaatgctggacgtggtggacagctgctccatgctctaccgcctgcagatggaaggagtgtctgtgggccagcggtggcaggatgtcctgcctgtggcccggaagcacagccgagaccacatcctgctgttcaatgacgcacacttcctgatggcatccctgggtgcacacgacccccagaccacacaggagctgctgaccaccctgcgggacgccagcgaatccccaggggagaactgccagcacctcctggcccgagacgtggggctgcccctgtgccaggccctggtggaggctgaggacgggaaccctgaccgcgtcctggagctgctcctgcccatccgctaccggatcgtccagctcggtgggagcaatgcccagagagacgtcttcaaccagctgctgattcacgcggccttaaactgcacctccagcgtccataagaacgtagcccggagccttctgatggagcgtgatgccttgaagcccaactcgcccctgaccgagcggctcatccgcaaggcagctaccgtccacctcatgcagtgagccagcctggccgcctccaccctgcagaacctcagtggtggcgtcactgcgtccagtcagctgctccaccgggttagggtcaggagacggccagagcctgtttgttagggctgttagagggtgatcttcagttttacaggaagtgggtcacgggttaattttaaatgtgattccgaatctcctttcagtcctcgagaagggccaatgagcatttttcagcagtcacagccagtgtgagtgctgctctttccacctgccttgcaaattctgtttcccaggggaatgtgtctactgcctggtggttcaaaggttggaaggcagggcagaggtgggggctgattctgctgggacaggtcttccagaggcagcctccccccactgcctgtccccgtccccaccaggctgcccttgggatggaccttttcattcttttctttatattctagacagtctctgttgtctcattgtgttgctgtcccatttttcaggtgagggtaccggggtaggggagtggcctgcccagggtcacactatgagaggcccccacctgctgcctttggacgcagccccctgctgctgcatccaccacccttcttacagatcagcgcgcacatggggtccttctgctgtctctggggcgagtcttggagccccctggggggctctgttggtgctgatttggacccgtttctctttttaaactgcacatcataacagggcttcatgtcgagcatgattttaatcataaatgcacttctgaggtgcaaggattgagctcagagctgctctgttgtggcaaaacccaaagtgctgtgatgtgtggctgtgacaagcctggagcgggtcctgtgagcgccgcctctgtctcctgcttccccactgaacgcctgctgaatgtgccgctgactcagctgtgctgctttcagccctcctgtgaggggcggtcccagtgcacagatgtttttcaagttcctcagtttgtactgaaattagggattcatcagggcaggaagcaggcaggcctctcagaagggagaggaggcctccaaatctattgagtccccacagtttgctcaagcccaggcaaatttctgtgattaaaatgaattcatcagttcctccaaaaaaaaaagca

SEQ ID NO: 346108 - DNA, 2450 bp, Homo sapiens
ccctttccgcgaccgccccgcccactcccaggaaggcccgggtgcccagagctcgcggtggactccgacccggcgcaacatggccgcagcctcgcctctgcgcgactgccaggcctggaaggatgcgaggctcccgctctccaccacaagcaacgaagcctgcaagctgttcgatgccacgctgacccagtatgtaaaatggaccaatgacaagagtctcggtggcatcgagggctgcctgtcaaagctcaaagcagcagatccaacctttgtgatgggccacgccatggctactggccttgtgctgattggcactggaagctccgtgaagctggacaaagagctggacctggctgtgaagacaatggtggagatttcaagaacccagccgctgacaaggcgggagcagctgcacgtgtctgcagtagagacatttgccaatggctatgtgaaaggcatctactcttttggcttgatggaaaccaacttctacgaccaggcagaaaaactcgccaaagaggctttatctattaacccgacagacgcatggtcggtgcacaccgtcgctcacatccacgagatgaaagcagagatcaaggatgggttggaattcatgcagcactcagagaccctctggaaggactctgatatgttggcttgtcataactattggcactgggctttatatctgattgagaagggcgaatatgaggccgcgctgaccatctacgatacccacatccttcccagcctgcaggccaacgatgcaatgctggacgtggtggacagctgctccatgctctaccgcctgcagatggaaggagtgtctgtgggccagcggtggcaggatgtcctgcctgtggcccggaagcacagccgagaccacatcctgctgttcaatgacgcacacttcctgatggcatccctgggtgcacacgacccccagaccacacaggagctgctgaccaccctgcgggacgccagcgaatccccaggggagaactgccagcacctcctggcccgagacgtggggctgcccctgtgccaggccctggtggaggctgaggacgggaaccctgaccgcgtcctggagctgctcctgcccatccgctaccggatcgtccagctcggtgggagcaatgcccagagagacgtcttcaaccagctgctgattcacgcggccttaaactgcacctccagcgtccataagaacgtagcccggagccttctgatggagcgtgatgccttgaagcccaactcgcccctgaccgagcggctcatccgcaaggcagctaccgtccacctcatgcagtgagccagcctggccgcctccaccctgcagaacctcagtggtggcgtcactgcgtccagtcagctgctccaccgggttagggtcaggagacggccagagcctgtttgttagggctgttagagggtgatcttcagttttacaggaagtgggtcacgggttaattttaaatgtgattccgaatctcctttcagtcctcgagaagggccaatgagcatttttcagcagtcacagccagtgtgagtgctgctctttccacctgccttgcaaattctgtttcccaggggaatgtgtctactgcctggtggttcaaaggttggaaggcagggcagaggtgggggctgattctgctgggacaggtcttccagaggcagcctccccccactgcctgtccccgtccccaccaggctgcccttgggatggaccttttcattcttttctttatattctagacagtctctgttgtctcattgtgttgctgtcccatttttcaggtgagggtaccggggtaggggagtggcctgcccagggtcacactatgagaggcccccacctgctgcctttggacgcagccccctgctgctgcatccaccacccttcttacagatcagcgcgcacatggggtccttctgctgtctctggggcgagtcttggagccccctggggggctctgttggtgctgatttggacccgtttctctttttaaactgcacatcataacagggcttcatgtcgagcatgattttaatcataaatgcacttctgaggtgcaaggattgagctcagagctgctctgttgtggcaaaacccaaagtgctgtgatgtgtggctgtgacaagcctggagcgggtcctgtgagcgccgcctctgtctcctgcttccccactgaacgcctgctgaatgtgccgctgactcagctgtgctgctttcagccctcctgtgaggggcggtcccagtgcacagatgtttttcaagttcctcagtttgtactgaaattagggattcatcagggcaggaagcaggcaggcctctcagaagggagaggaggcctccaaatctattgagtccccacagtttgctcaagcccaggcaaatttctgtgattaaaatgaattcatcagttcctccaaaaaaaaaagca

SEQ ID NO: 346109 - DNA, 2012 bp, Homo sapiens
cccttagagacctgccgtcgcctgccccggcagcctgactgatctgctttatctggaatcctcttccccgcaccctgcgtaggctttatctattaacccgacagacgcatggtcggtgcacaccgtcgctcacatccacgagatgaaagcagagatcaaggatgggttggaattcatgcagcactcagagaccctctggaaggactctgatatgttggcttgtcataactattggcactgggctttatatctgattgagaagggcgaatatgaggccgcgctgaccatctacgatacccacatccttcccagcctgcaggccaacgatgcaatgctggacgtggtggacagctgctccatgctctaccgcctgcagatggaaggagtgtctgtgggccagcggtggcaggatgtcctgcctgtggcccggaagcacagccgagaccacatcctgctgttcaatgacgcacacttcctgatggcatccctgggtgcacacgacccccagaccacacaggagctgctgaccaccctgcgggacgccagcgaatccccaggggagaactgccagcacctcctggcccgagacgtggggctgcccctgtgccaggccctggtggaggctgaggacgggaaccctgaccgcgtcctggagctgctcctgcccatccgctaccggatcgtccagctcggtgggagcaatgcccagagagacgtcttcaaccagctgctgattcacgcggccttaaactgcacctccagcgtccataagaacgtagcccggagccttctgatggagcgtgatgccttgaagcccaactcgcccctgaccgagcggctcatccgcaaggcagctaccgtccacctcatgcagtgagccagcctggccgcctccaccctgcagaacctcagtggtggcgtcactgcgtccagtcagctgctccaccgggttagggtcaggagacggccagagcctgtttgttagggctgttagagggtgatcttcagttttacaggaagtgggtcacgggttaattttaaatgtgattccgaatctcctttcagtcctcgagaagggccaatgagcatttttcagcagtcacagccagtgtgagtgctgctctttccacctgccttgcaaattctgtttcccaggggaatgtgtctactgcctggtggttcaaaggttggaaggcagggcagaggtgggggctgattctgctgggacaggtcttccagaggcagcctccccccactgcctgtccccgtccccaccaggctgcccttgggatggaccttttcattcttttctttatattctagacagtctctgttgtctcattgtgttgctgtcccatttttcaggtgagggtaccggggtaggggagtggcctgcccagggtcacactatgagaggcccccacctgctgcctttggacgcagccccctgctgctgcatccaccacccttcttacagatcagcgcgcacatggggtccttctgctgtctctggggcgagtcttggagccccctggggggctctgttggtgctgatttggacccgtttctctttttaaactgcacatcataacagggcttcatgtcgagcatgattttaatcataaatgcacttctgaggtgcaaggattgagctcagagctgctctgttgtggcaaaacccaaagtgctgtgatgtgtggctgtgacaagcctggagcgggtcctgtgagcgccgcctctgtctcctgcttccccactgaacgcctgctgaatgtgccgctgactcagctgtgctgctttcagccctcctgtgaggggcggtcccagtgcacagatgtttttcaagttcctcagtttgtactgaaattagggattcatcagggcaggaagcaggcaggcctctcagaagggagaggaggcctccaaatctattgagtccccacagtttgctcaagcccaggcaaatttctgtgattaaaatgaattcatcagttcctccaaaaaaaaaagca

SEQ ID NO: 346110 - DNA, 1665 bp, Homo sapiens
ataagggcactaatcccattcacaagggccccaccctcatgacttaatcacctccaagaggccctgttcttaataccatcaccttgggcatttgggcttcaacatatacatttagcctggacacagacattcagtccacagcagggtctttacctcaaaccgtacctgggtcttctctcttcaaacctgggttttccccactgccacctgttgtgccccatctcgggtgtggcttcctgcactggaggtctgtgccctcccatcctcacctctccccaaactgaggccaggcctcctgcccctgggccttggcccttgctgttccctcagtgccgcagtctagcctgcctgtgttctgccttgggaccaagggaccaccaggccccacatccctctagaaggttctgtaacaggacctctgtgtctgtttccacaggagccttctgatggagcgtgatgccttgaagcccaactcgcccctgaccgagcggctcatccgcaaggcagctaccgtccacctcatgcagtgagccagcctggccgcctccaccctgcagaacctcagtggtggcgtcactgcgtccagtcagctgctccaccgggttagggtcaggagacggccagagcctgtttgttagggctgttagagggtgatcttcagttttacaggaagtgggtcacgggttaattttaaatgtgattccgaatctcctttcagtcctcgagaagggccaatgagcatttttcagcagtcacagccagtgtgagtgctgctctttccacctgccttgcaaattctgtttcccaggggaatgtgtctactgcctggtggttcaaaggttggaaggcagggcagaggtgggggctgattctgctgggacaggtcttccagaggcagcctccccccactgcctgtccccgtccccaccaggctgcccttgggatggaccttttcattcttttctttatattctagacagtctctgttgtctcattgtgttgctgtcccatttttcaggtgagggtaccggggtaggggagtggcctgcccagggtcacactatgagaggcccccacctgctgcctttggacgcagccccctgctgctgcatccaccacccttcttacagatcagcgcgcacatggggtccttctgctgtctctggggcgagtcttggagccccctggggggctctgttggtgctgatttggacccgtttctctttttaaactgcacatcataacagggcttcatgtcgagcatgattttaatcataaatgcacttctgaggtgcaaggattgagctcagagctgctctgttgtggcaaaacccaaagtgctgtgatgtgtggctgtgacaagcctggagcgggtcctgtgagcgccgcctctgtctcctgcttccccactgaacgcctgctgaatgtgccgctgactcagctgtgctgctttcagccctcctgtgaggggcggtcccagtgcacagatgtttttcaagttcctcagtttgtactgaaattagggattcatcagggcaggaagcaggcaggcctctcagaagggagaggaggcctccaaatctattgagtccccacagtttgctcaagcccaggcaaatttctgtgattaaaatgaattcatcagttcctccaaaaaaaaaagca

SEQ ID NO: 346111 - DNA, 2167 bp, Homo sapiens
ccctttccgcgaccgccccgcccactcccaggaaggcccgggtgcccagagctcgcggtggactccgacccggcgcaacatggccgcagcctcgcctctgcgcgactgccaggcctggaaggatgcgaggctcccgctctccaccacaagcaacgaagcctgcaagctgttcgatgccacgctgacccagtatgtaaaatggaccaatgacaagagtctcggtggcatcgagggctgcctgtcaaagctcaaagcagcagatccaacctttgtgatgggccacgccatggctactggccttgtgctgattggcactggaagctccgtgaagctggacaaagagctggacctggctgtgaagacaatggtggagatttcaagaacccagccgctgacaaggcgggagcagctgcacgtgtctgcagtagagacatttgccaatgggaactttccgaaagcctgtgaactatgggaacagattctccaggaccacccgacagacatgttggccctgaaattttcccatgatgcttatttttacctgggctatcaggaacagatgagagattctgttgctcgaatttaccccttctggacacctgacatccccctaagcagctatgtgaaaggcatctactcttttggcttgatggaaaccaacttctacgaccaggcagaaaaactcgccaaagaggctttatctattaacccgacagacgcatggtcggtgcacaccgtcgctcacatccacgagatgaaagcagagatcaaggatgggttggaattcatgcagcactcagagaccctctggaaggactctgatatgttggcttgtcataactattggcactgggctttatatctgattgagaagggcgaatatgaggccgcgctgaccatctacgatacccacatccttcccagcctgcaggccaacgatgcaatgctggacgtggtggacagctgctccatgctctaccgcctgcagatggaaggagtgtctgtgggccagcggtggcaggatgtcctgcctgtggcccggaagcacagccgagaccacatcctgctgttcaatgacgcacacttcctgatggcatccctgggtgcacacgacccccagaccacacaggagctgctgaccaccctgcgggacgccagcgaatccccaggggagaactgccagcacctcctggcccgagacgtggggctgcccctgtgccaggccctggtggaggctgaggacgggaaccctgaccgcgtcctggagctgctcctgcccatccgctaccggatcgtccagctcggtgggagcaatgcccagagagacgtcttcaaccagctgctgattcacgcggccttaaactgcacctccagcgtccataagaacgtagcccggagccttctgatggagcgtgatgccttgaagcccaactcgcccctgaccgagcggctcatccgcaaggcagctaccgtccacctcatgcagtgagccagcctggccgcctccaccctgcagaacctcagtggtggcgtcactgcgtccagtcagctgctccaccgggttagggtcaggagacggccagagcctgtttgttagggctgttagagggtgatcttcagttttacaggaagtgggtcacgggttaattttaaatgtgattccgaatctcctttcagtcctcgagaagggccaatgagcatttttcagcagtcacagccagtgtgagtgctgctctttccacctgccttgcaaattctgtttcccaggggaatgtgtctactgcctggtggttcaaaggttggaaggcagggcagaggtgggggctgattctgctgggacaggtcttccagaggcagcctccccccactgcctgtccccgtccccaccaggctgcccttgggatggaccttttcattcttttctttatattctagacagtctctgttgtctcattgtgttgctgtcccatttttcaggtgagggtaccggggtaggggagtggcctgcccagggtcacactatgagaggcccccacctgctgcctttggacgcagcccctgtgtggattcacaaccttttcgatcggcgcatggggcctctgtgccttggggggtttgagccccgggggctcttggtctgttgcccgttcttaggccttaaggtttg

SEQ ID NO: 346112 - DNA, 1648 bp, Homo sapiens
ccctttccgcgaccgccccgcccactcccaggaaggcccgggtgcccagagctcgcggtggactccgacccggcgcaacatggccgcagcctcgcctctgcgcgactgccaggcctggaaggatgcgaggctcccgctctccaccacaagcaacgaagcctgcaagctgttcgatgccacgctgacccagtatgtaaaatggaccaatgacaagagtctcggtggcatcgagggctgcctgtcaaagctcaaagcagcagatccaacctttgtgatgggccacgccatggctactggccttgtgctgattggcactggaagctccgtgaagctggacaaagagctggacctggctgtgaagacaatggtggagatttcaagaacccagccgctgacaaggcgggagcagctgcacgtgtctgcagtagagacatttgccaatgggaactttccgaaagcctgtgaactatgggaacagattctccaggaccacccgacagacatgttggccctgaaattttcccatgatgcttatttttacctgggctatcaggaacagatgagagattctgttgctcgaatttaccccttctggacacctgacatccccctaagcagctatgtgaaaggcatctactcttttggcttgatggaaaccaacttctacgaccaggcagaaaaactcgccaaagaggctttatctattaacccgacagacgcatggtcggtgcacaccgtcgctcacatccacgagatgaaagcagagatcaaggatgggttggaattcatgcagcactcagagaccctctggaaggactctgatatgttggcttgtcataactattggcactgggctttatatctgattgagaagggcgaatatgaggccgcgctgaccatctacgatacccacgtaagttgcattcacaccgtgtttggtttgttgcagcattttgcctttgagtctcaaagagaccagatttttgagttcatcaggattgtcccagccagaaaaacagctggagcaagaacacatttcttgtgtaaggcctcatggggttaattttgccaagagcaatgttgtaaccctgcctatgatggggacagtggttggccctgctcaactcgagggtgctgatagatttacacatctaagggcctcacctctgcaattgtggactctcctccagccctttcagatcacttttctttggtaagacaactggtctacccataggaattttttttttttttgagacagagtttcgctcttgttgcccaggctggagtgcaatggtgcgattggctggaattttttttctttgctgtgataaaataaaaataacataaaattacgtgtacaaggccgggtgtggtggctcacacctgtaatcccagtaatttgggagtccgaggcaggtggatcatttgaggtcaggagttcaagaccagcctggccaacatggtgaaacgctgtctctactaaaaatacaaaaaaattagctaggcgtggtggtgggcacctgtaatcccagctactcggggggctgaggcacgagaatcacttgaacccaggaggcagaggttacagtgagccaagatcacgctactgcactccagcctgggtgacagagtgagactctgtctc

SEQ ID NO: 346113 - DNA, 184 bp, Homo sapiens
cctcccattgtggcctgctgagggtctgatgcagggctcggctgcttaggacgtgggatcctgtcctgggatgaatctgtgagtatactgccttcacctaggctgtgccaagaccttctgccacattaccagtcatttctctaccaatgaagggtcctatagtttagaactaggagaagtctca

SEQ ID NO: 346114 - DNA, 430 bp, Homo sapiens
ggcctggtcaggaggagcgagcagcctcttcaaagcacatgagctgcaccatgacggggaccctctgtgggatgtggaaacgcagaggaagcattaaactcaactgggcttggggggacagtggctagggaaggcatcctggagggggcaacctctgagttggctactgaaggatgagcaggtgtgtgccacacagagggggaagatggagggcatcctagcccgtcactagcttgagcaaggcctccaaggcctacagtggcctgtgagggagaggagagctgcttactttggtgtcctagagcccaggtacaaggcggacatgggctgtgcaggaggccttgtcagtccctctttccaggggaggcaaggtggtgtccaggcagaggcagaaacgcctgcagaggcctcagggaaggaaaggctagca

SEQ ID NO: 346115 - DNA, 2624 bp, Homo sapiens
ccctttccgcgaccgccccgcccactcccaggaaggcccgggtgcccagagctcgcggtggactccgacccggcgcaacatggccgcagcctcgcctctgcgcgactgccaggcctggaaggatgcgaggctcccgctctccaccacaagcaacgaagcctgcaagctgttcgatgccacgctgacccagtatgtaaaatggaccaatgacaagagtctcggtggcatcgagggctgcctgtcaaagctcaaagcagcagatccaacctttgtgatgggccacgccatggctactggccttgtgctgattggcactggaagctccgtgaagctggacaaagagctggacctggctgtgaagacaatggtggagatttcaagaacccagccgctgacaaggcgggagcagctgcacgtgtctgcagtagagacatttgccaatgggaactttccgaaagcctgtgaactatgggaacagattctccaggaccacccgacagacatgttggccctgaaattttcccatgatgcttatttttacctgggctatcaggaacagatgagagattctgttgctcgaatttaccccttctggacacctgacatccccctaagcagctatgtgaaaggcatctactcttttggcttgatggaaaccaacttctacgaccaggcagaaaaactcgccaaagaggctttatctattaacccgacagacgcatggtcggtgcacaccgtcgctcacatccacgagatgaaagcagagatcaaggatgggttggaattcatgcagcactcagagaccctctggaaggactctgatatgttggcttgtcataactattggcactgggctttatatctgattgagaagggcgaatatgaggccgcgctgaccatctacgatacccacatccttcccagcctgcaggccaacgatgcaatgctggacgtggtggacagctgctccatgctctaccgcctgcagatggaaggagtgtctgtgggccagcggtggcaggatgtcctgcctgtggcccggaagcacagccgagaccacatcctgctgttcaatgacgcacacttcctgatggcatccctgggtgcacacgacccccagaccacacaggagctgctgaccaccctgcgggacgccagcgaatccccaggggagaactgccagcacctcctggcccgagacgtggggctgcccctgtgccaggccctggtggaggctgaggacgggaaccctgaccgcgtcctggagctgctcctgcccatccgctaccggatcgtccagctcggtgggagcaatgcccagagagacgtcttcaaccagctgctgattcacgcggccttaaactgcacctccagcgtccataagaacgtagcccggagccttctgatggagcgtgatgccttgaagcccaactcgcccctgaccgagcggctcatccgcaaggcagctaccgtccacctcatgcagtgagccagcctggccgcctccaccctgcagaacctcagtggtggcgtcactgcgtccagtcagctgctccaccgggttagggtcaggagacggccagagcctgtttgttagggctgttagagggtgatcttcagttttacaggaagtgggtcacgggttaattttaaatgtgattccgaatctcctttcagtcctcgagaagggccaatgagcatttttcagcagtcacagccagtgtgagtgctgctctttccacctgccttgcaaattctgtttcccaggggaatgtgtctactgcctggtggttcaaaggttggaaggcagggcagaggtgggggctgattctgctgggacaggtcttccagaggcagcctccccccactgcctgtccccgtccccaccaggctgcccttgggatggaccttttcattcttttctttatattctagacagtctctgttgtctcattgtgttgctgtcccatttttcaggtgagggtaccggggtaggggagtggcctgcccagggtcacactatgagaggcccccacctgctgcctttggacgcagccccctgctgctgcatccaccacccttcttacagatcagcgcgcacatggggtccttctgctgtctctggggcgagtcttggagccccctggggggctctgttggtgctgatttggacccgtttctctttttaaactgcacatcataacagggcttcatgtcgagcatgattttaatcataaatgcacttctgaggtgcaaggattgagctcagagctgctctgttgtggcaaaacccaaagtgctgtgatgtgtggctgtgacaagcctggagcgggtcctgtgagcgccgcctctgtctcctgcttccccactgaacgcctgctgaatgtgccgctgactcagctgtgctgctttcagccctcctgtgaggggcggtcccagtgcacagatgtttttcaagttcctcagtttgtactgaaattagggattcatcagggcaggaagcaggcaggcctctcagaagggagaggaggcctccaaatctattgagtccccacagtttgctcaagcccaggcaaatttctgtgattaaaatgaattcatcagttcctccaaaaaaaaaagca

SEQ ID NO: 346116 - DNA, 2750 bp, Homo sapiens
ccctttccgcgaccgccccgcccactcccaggaaggcccgggtgcccagagctcgcggtggactccgacccggcgcaacatggccgcagcctcgcctctgcgcgactgccaggcctggaaggatgcgaggctcccgctctccaccacaagcaacgaagcctgcaagctgttcgatgccacgctgacccagtatgtaaaatggaccaatgacaagagtctcggtggcatcgagggctgcctgtcaaagctcaaagcagcagatccaacctttgtgatgggccacgccatggctactggccttgtgctgattggcactggaagctccgtgaagctggacaaagagctggacctggctgtgaagacaatggtggagatttcaagaacccagccgctgacaaggcgggagcagctgcacgtgtctgcagtagagacatttgccaatgggaactttccgaaagcctgtgaactatgggaacagattctccaggaccacccgacagacatgttggccctgaaattttcccatgatgcttatttttacctgggctatcaggaacagatgagagattctgttgctcgaatttaccccttctggacacctgacatccccctaagcagctatgtgaaaggcatctactcttttggcttgatggaaaccaacttctacgaccaggcagaaaaactcgccaaagaggctttatctattaacccgacagacgcatggtcggtgcacaccgtcgctcacatccacgagatgaaagcagagatcaaggatgggttggaattcatgcagcactcagagaccctctggaaggactctgatatgttggcttgtcataactattggcactgggctttatatctgattgagaagggcgaatatgaggccgcgctgaccatctacgatacccacatccttcccagcctgcaggccaacgatgcaatgctggacgtggtggacagctgctccatgctctaccgcctgcagatggaaggagtgtctgtgggccagcggtggcaggatgtcctgcctgtggcccggaagcacagccgagaccacatcctgctgttcaatgacgcacacttcctgatggcatccctgggtgcacacgacccccagaccacacaggagctgctgaccaccctgcgggacgccagcgaatccccaggggagaactgccagcacctcctggcccgagacgtggggctgcccctgtgccaggccctggtggaggctgaggacgggaaccctgaccgcgtcctggagctgctcctgcccatccgctaccggatcgtccagctcggtgggagcaatgcccagagagacgtcttcaaccagctgctgattcacgcggccttaaactgcacctccagcgtccataagaacgtagcccgaggcaaggtctcactcggtcatccaggttggaatgcagtggtgtgatcacagttcactgtaaactcaaactcctgggctcaaggaatcttcctgcctcatccttccatcgtgcagggattacaggggagccttctgatggagcgtgatgccttgaagcccaactcgcccctgaccgagcggctcatccgcaaggcagctaccgtccacctcatgcagtgagccagcctggccgcctccaccctgcagaacctcagtggtggcgtcactgcgtccagtcagctgctccaccgggttagggtcaggagacggccagagcctgtttgttagggctgttagagggtgatcttcagttttacaggaagtgggtcacgggttaattttaaatgtgattccgaatctcctttcagtcctcgagaagggccaatgagcatttttcagcagtcacagccagtgtgagtgctgctctttccacctgccttgcaaattctgtttcccaggggaatgtgtctactgcctggtggttcaaaggttggaaggcagggcagaggtgggggctgattctgctgggacaggtcttccagaggcagcctccccccactgcctgtccccgtccccaccaggctgcccttgggatggaccttttcattcttttctttatattctagacagtctctgttgtctcattgtgttgctgtcccatttttcaggtgagggtaccggggtaggggagtggcctgcccagggtcacactatgagaggcccccacctgctgcctttggacgcagccccctgctgctgcatccaccacccttcttacagatcagcgcgcacatggggtccttctgctgtctctggggcgagtcttggagccccctggggggctctgttggtgctgatttggacccgtttctctttttaaactgcacatcataacagggcttcatgtcgagcatgattttaatcataaatgcacttctgaggtgcaaggattgagctcagagctgctctgttgtggcaaaacccaaagtgctgtgatgtgtggctgtgacaagcctggagcgggtcctgtgagcgccgcctctgtctcctgcttccccactgaacgcctgctgaatgtgccgctgactcagctgtgctgctttcagccctcctgtgaggggcggtcccagtgcacagatgtttttcaagttcctcagtttgtactgaaattagggattcatcagggcaggaagcaggcaggcctctcagaagggagaggaggcctccaaatctattgagtccccacagtttgctcaagcccaggcaaatttctgtgattaaaatgaattcatcagttcctccaaaaaaaaaagca

SEQ ID NO: 346117 - DNA, 2467 bp, Homo sapiens
ccctttccgcgaccgccccgcccactcccaggaaggcccgggtgcccagagctcgcggtggactccgacccggcgcaacatggccgcagcctcgcctctgcgcgactgccaggcctggaaggatgcgaggctcccgctctccaccacaagcaacgaagcctgcaagctgttcgatgccacgctgacccagtatgtaaaatggaccaatgacaagagtctcggtggcatcgagggctgcctgtcaaagctcaaagcagcagatccaacctttgtgatgggccacgccatggctactggccttgtgctgattggcactggaagctccgtgaagctggacaaagagctggacctggctgtgaagacaatggtggagatttcaagaacccagccgctgacaaggcgggagcagctgcacgtgtctgcagtagagacatttgccaatgggaactttccgaaagcctgtgaactatgggaacagattctccaggaccacccgacagacatgttggccctgaaattttcccatgatgcttatttttacctgggctatcaggaacagatgagagattctgttgctcgaatttaccccttctggacacctgacatccccctaagcagctatgtgaaaggcatctactcttttggcttgatggaaaccaacttctacgaccaggcagaaaaactcgccaaagaggctttatctattaacccgacagacgcatggtcggtgcacaccgtcgctcacatccacgagatgaaagcagagatcaaggatgggttggaattcatgcagcactcagagaccctctggaaggactctgatatgttggcttgtcataactattggcactgggctttatatctgattgagaagggcgaatatgaggccgcgctgaccatctacgatacccacatccttcccagcctgcaggccaacgatgcaatgctggacgtggtggacagctgctccatgctctaccgcctgcagatggaaggagtgtctgtgggccagcggtggcaggatgtcctgcctgtggcccggaagcacagccgagaccacatcctgctgttcaatgacgcacacttcctgatggcatccctgggtgcacacgacccccagaccacacaggagctgctgaccaccctgcgggacgccagcgaatccccaggggagaactgccagcacctcctggcccgagacgtggggctgcccctgtgccaggccctggtggaggctgaggacgggaaccctgaccgcgtcctggagctgctcctgcccatccgctaccggatcgtccagctcggtgggagcaatgcccagagagacgtcttcaaccagctgctgattcacgcggccttaaactgcacctccagcgtccataagaacgtagcccggagccttctgatggagcgtgatgccttgaagcccaactcgcccctgaccgagcggctcatccgcaaggcagctaccgtccacctcatgcagtgagccagcctggccgcctccaccctgcagaacctcagtggtggcgtcactgcgtccagtcagctgctccaccgggttagggtcaggagacggccagagcctgtttgttagggctgttagagggtgatcttcagttttacaggaagtgggtcacgggttaattttaaatgtgattccgaatctcctttcagtcctcgagaagggccaatgagcatttttcagcagtcacagccagtgtgagtgctgctctttccacctgctggaccttttcattcttttctttatattctagacagtctctgttgtctcattgtgttgctgtcccatttttcaggtgagggtaccggggtaggggagtggcctgcccagggtcacactatgagaggcccccacctgctgcctttggacgcagccccctgctgctgcatccaccacccttcttacagatcagcgcgcacatggggtccttctgctgtctctggggcgagtcttggagccccctggggggctctgttggtgctgatttggacccgtttctctttttaaactgcacatcataacagggcttcatgtcgagcatgattttaatcataaatgcacttctgaggtgcaaggattgagctcagagctgctctgttgtggcaaaacccaaagtgctgtgatgtgtggctgtgacaagcctggagcgggtcctgtgagcgccgcctctgtctcctgcttccccactgaacgcctgctgaatgtgccgctgactcagctgtgctgctttcagccctcctgtgaggggcggtcccagtgcacagatgtttttcaagttcctcagtttgtactgaaattagggattcatcagggcaggaagcaggcaggcctctcagaagggagaggaggcctccaaatctattgagtccccacagtttgctcaagcccaggcaaatttctgtgattaaaatgaattcatcagttcctccaaaaaaaaaagca

SEQ ID NO: 346118 - DNA, 2490 bp, Homo sapiens
tttgttagaatgatccaagggctccgtgaggacttgttttgcttttcccatttcagtatgtaaaatggaccaatgacaagagtctcggtggcatcgagggctgcctgtcaaagctcaaagcagcagatccaacctttgtgatgggccacgccatggctactggccttgtgctgattggcactggaagctccgtgaagctggacaaagagctggacctggctgtgaagacaatggtggagatttcaagaacccagccgctgacaaggcgggagcagctgcacgtgtctgcagtagagacatttgccaatgggaactttccgaaagcctgtgaactatgggaacagattctccaggaccacccgacagacatgttggccctgaaattttcccatgatgcttatttttacctgggctatcaggaacagatgagagattctgttgctcgaatttaccccttctggacacctgacatccccctaagcagctatgtgaaaggcatctactcttttggcttgatggaaaccaacttctacgaccaggcagaaaaactcgccaaagaggctttatctattaacccgacagacgcatggtcggtgcacaccgtcgctcacatccacgagatgaaagcagagatcaaggatgggttggaattcatgcagcactcagagaccctctggaaggactctgatatgttggcttgtcataactattggcactgggctttatatctgattgagaagggcgaatatgaggccgcgctgaccatctacgatacccacatccttcccagcctgcaggccaacgatgcaatgctggacgtggtggacagctgctccatgctctaccgcctgcagatggaaggagtgtctgtgggccagcggtggcaggatgtcctgcctgtggcccggaagcacagccgagaccacatcctgctgttcaatgacgcacacttcctgatggcatccctgggtgcacacgacccccagaccacacaggagctgctgaccaccctgcgggacgccagcgaatccccaggggagaactgccagcacctcctggcccgagacgtggggctgcccctgtgccaggccctggtggaggctgaggacgggaaccctgaccgcgtcctggagctgctcctgcccatccgctaccggatcgtccagctcggtgggagcaatgcccagagagacgtcttcaaccagctgctgattcacgcggccttaaactgcacctccagcgtccataagaacgtagcccggagccttctgatggagcgtgatgccttgaagcccaactcgcccctgaccgagcggctcatccgcaaggcagctaccgtccacctcatgcagtgagccagcctggccgcctccaccctgcagaacctcagtggtggcgtcactgcgtccagtcagctgctccaccgggttagggtcaggagacggccagagcctgtttgttagggctgttagagggtgatcttcagttttacaggaagtgggtcacgggttaattttaaatgtgattccgaatctcctttcagtcctcgagaagggccaatgagcatttttcagcagtcacagccagtgtgagtgctgctctttccacctgccttgcaaattctgtttcccaggggaatgtgtctactgcctggtggttcaaaggttggaaggcagggcagaggtgggggctgattctgctgggacaggtcttccagaggcagcctccccccactgcctgtccccgtccccaccaggctgcccttgggatggaccttttcattcttttctttatattctagacagtctctgttgtctcattgtgttgctgtcccatttttcaggtgagggtaccggggtaggggagtggcctgcccagggtcacactatgagaggcccccacctgctgcctttggacgcagccccctgctgctgcatccaccacccttcttacagatcagcgcgcacatggggtccttctgctgtctctggggcgagtcttggagccccctggggggctctgttggtgctgatttggacccgtttctctttttaaactgcacatcataacagggcttcatgtcgagcatgattttaatcataaatgcacttctgaggtgcaaggattgagctcagagctgctctgttgtggcaaaacccaaagtgctgtgatgtgtggctgtgacaagcctggagcgggtcctgtgagcgccgcctctgtctcctgcttccccactgaacgcctgctgaatgtgccgctgactcagctgtgctgctttcagccctcctgtgaggggcggtcccagtgcacagatgtttttcaagttcctcagtttgtactgaaattagggattcatcagggcaggaagcaggcaggcctctcagaagggagaggaggcctccaaatctattgagtccccacagtttgctcaagcccaggcaaatttctgtgattaaaatgaattcatcagttcctccaaaaaaaaaagca

SEQ ID NO: 346119 - DNA, 2049 bp, Homo sapiens
caatacctatattaactttccactaggagagagaatgcttccacagcaactgtttcttcagtggtggcggcacaggtgctgctgtgctttctacactggggaaccaaagccccggttggaagcgggttcaccttctcccatcccgaatgccaccaagacaccgtccgtccacctctgagaggaggtggaggccggagaccatgtgctcaggggtctttggcctggccgttctcagttcacgtgccagcattacactttgccttctccagggtttaataaggagaactttattcttccagggcgaatatgaggccgcgctgaccatctacgatacccacatccttcccagcctgcaggccaacgatgcaatgctggacgtggtggacagctgctccatgctctaccgcctgcagatggaaggagtgtctgtgggccagcggtggcaggatgtcctgcctgtggcccggaagcacagccgagaccacatcctgctgttcaatgacgcacacttcctgatggcatccctgggtgcacacgacccccagaccacacaggagctgctgaccaccctgcgggacgccagcgaatccccaggggagaactgccagcacctcctggcccgagacgtggggctgcccctgtgccaggccctggtggaggctgaggacgggaaccctgaccgcgtcctggagctgctcctgcccatccgctaccggatcgtccagctcggtgggagcaatgcccagagagacgtcttcaaccagctgctgattcacgcggccttaaactgcacctccagcgtccataagaacgtagcccggagccttctgatggagcgtgatgccttgaagcccaactcgcccctgaccgagcggctcatccgcaaggcagctaccgtccacctcatgcagtgagccagcctggccgcctccaccctgcagaacctcagtggtggcgtcactgcgtccagtcagctgctccaccgggttagggtcaggagacggccagagcctgtttgttagggctgttagagggtgatcttcagttttacaggaagtgggtcacgggttaattttaaatgtgattccgaatctcctttcagtcctcgagaagggccaatgagcatttttcagcagtcacagccagtgtgagtgctgctctttccacctgccttgcaaattctgtttcccaggggaatgtgtctactgcctggtggttcaaaggttggaaggcagggcagaggtgggggctgattctgctgggacaggtcttccagaggcagcctccccccactgcctgtccccgtccccaccaggctgcccttgggatggaccttttcattcttttctttatattctagacagtctctgttgtctcattgtgttgctgtcccatttttcaggtgagggtaccggggtaggggagtggcctgcccagggtcacactatgagaggcccccacctgctgcctttggacgcagccccctgctgctgcatccaccacccttcttacagatcagcgcgcacatggggtccttctgctgtctctggggcgagtcttggagccccctggggggctctgttggtgctgatttggacccgtttctctttttaaactgcacatcataacagggcttcatgtcgagcatgattttaatcataaatgcacttctgaggtgcaaggattgagctcagagctgctctgttgtggcaaaacccaaagtgctgtgatgtgtggctgtgacaagcctggagcgggtcctgtgagcgccgcctctgtctcctgcttccccactgaacgcctgctgaatgtgccgctgactcagctgtgctgctttcagccctcctgtgaggggcggtcccagtgcacagatgtttttcaagttcctcagtttgtactgaaattagggattcatcagggcaggaagcaggcaggcctctcagaagggagaggaggcctccaaatctattgagtccccacagtttgctcaagcccaggcaaatttctgtgattaaaatgaattcatcagttcctccaaaaaaaaaagca

SEQ ID NO: 346120 - DNA, 3456 bp, Homo sapiens
ccctttccgcgaccgccccgcccactcccaggaaggcccgggtgcccagagctcgcggtggactccgacccggcgcaacatggccgcagcctcgcctctgcgcgactgccaggcctggaaggatgcgaggctcccgctctccaccacaagcaacgaagcctgcaagctgttcgatgccacgctgacccagtatgtaaaatggaccaatgacaagagtctcggtggcatcgagggctgcctgtcaaagctcaaagcagcagatccaacctttgtgatgggccacgccatggctactggccttgtgctgattggcactggaagctccgtgaagctggacaaagagctggacctggctgtgaagacaatggtggagatttcaagaacccagccgctgacaaggcgggagcagctgcacgtgtctgcagtagagacatttgccaatgggaactttccgaaagcctgtgaactatgggaacagattctccaggaccacccgacagacatgttggccctgaaattttcccatgatgcttatttttacctgggctatcaggaacagatgagagattctgttgctcgaatttaccccttctggacacctgacatccccctaagcagctatgtgaaaggcatctactcttttggcttgatggaaaccaacttctacgaccaggcagaaaaactcgccaaagaggctttatctattaacccgacagacgcatggtcggtgcacaccgtcgctcacatccacgagatgaaagcagagatcaaggatgggttggaattcatgcagcactcagagaccctctggaaggactctgatatgttggcttgtcataactattggcactgggctttatatctgattgagaagggcgaatatgaggccgcgctgaccatctacgatacccacatccttcccagcctgcaggccaacgatgcaatgctggacgtggtggacagctgctccatgctctaccgcctgcagatggaaggagtgtctgtgggccagcggtggcaggatgtcctgcctgtggcccggaagcacagccgagaccacatcctgctgttcaatgacgcacacttcctgatggcatccctgggtgcacacgacccccagaccacacaggagctgctgaccaccctgcgggacgccagcgaatccccaggggagaactgccagcacctcctggcccgagacgtggggctgcccctgtgccaggccctggtggaggctgaggacgggaaccctgaccgcgtcctggagctgctcctgcccatccgctaccggatcgtccagctcggtgggagcaatgcccagagagacgtcttcaaccagctgctgattcacgcggccttaaactgcacctccagcgtccataagaacgtagcccggtgagctcctggcccctgcccagcactcccgaccttcacaggctctccctgcagacctcaggagtgcctggaagccccaccacccttggcccgagatgctcctgcttctgaggctgtgaggtcgggaggctgtggggaatttggttctcctttgttagcaggctcagtgtgaccaagtggagccagccccaccccaggcccaacctcccacccttcccagcccactcccttttagccttgctaagctacctgggtacgtaaacacgtcctgctctttcaggctcctgggcctttgcacgcttggaacaccctttctccttttttgcacctggccgacacctaatgctcagttagacctcagctcatttcacctgcctgcctgtgctgggtaccgagagggagcagtgagcaggcacaccagtcactggctaccaggagcccatctgtagtcgggggagcgacagggagcaatcagtcccacagacacgtaaactcgcactgagggagcagcagctgagggcagacccgaaaccacagtgggtttagccaggccaggcatggggctggtaggagggtggcgtggctggagggtgagtgttagggtggcatggctggagggtgagtgtgttagggcagcgtggctggagggtgttaggagggtggtgtggctggagggtgagtgttaggagggtggcgtggctggagggtgagtgttaggagggtggcgtggctggaaggtgtgttagggtggcgtggctggagggtgagtgttaggagggtggtgtggctggcaggcgagtgtcaggagggtggcatagctggcagatgagagtgctgggggaactccaaagagccctcaccattgccagcagccttggtgcttccatggcccagcttgcctccctccacttaggctgctgagctcttggccagcagctgcgtagcccgtgtgcctgagcggcgagtttgacacctctccttgcccatgtccctgccaccctcagacataagtgaaaggaagaatagaggagtcatggggtgcctggtggggaaggtgtgctgtgagagcaggtggcagcccgggtccacaggaggcccttggctggtgacaagcccagtggtttaggcgcaggtgcaccagcgcagctccctccaggcagggttacccaaactgagctgtacaggttctgtggtactcatgaaacaggtctggctggcagcactggaaccgcctagaactgtaaaatgtcttggacgcatgctccccgctttccccttccatggctgtagacaaaaccatgcgtgtttctttggtggtcaagccccctggggagctcaggctgtggtgtgggtgggagttggtgcctctggcagcagcggtggggaaagtggctgtgtggacaggagggctgaggatggagctggggtgacatctgtggggcagtgcggcagtgccgatgtggccttctgcggggcccagtgggggagggcagggggagagcaggctgcacagggagccgactgcattaggagacgtggagggggccttctctccaagtcctgtcctgctaccaggcagcatccatggggccatcagcacagctcaccagcccccaaggtgggaaaccttccacccacagccatggtgccccccacaatgagttcccggccccagccccttcacaccacccacgccctctagaaccactgttttcaggtgtttgggggctgtcttagtcagtttgggttgttattttaaaagtgccacagacaggccgggcacggtggctcatgcctgtaatcccagcactttcggaggccaaggcgggtggatcacctgaggtcaggagttcaagaccagcctggctaatatggtgaaactccgcctctactaaaaatacaaaaaattagccgggcgtggtggtgggtacctgtaatcccggctagtcgggagcctgaggcaggagaatcgcttgaacctgggaggtggaggttgcagtgagccgagatcgcgtcattgcactccagcctgagtgaccgagggagattctatctcaaaaa

SEQ ID NO: 346121 - DNA, 1063 bp, Homo sapiens
ccctttccgcgaccgccccgcccactcccaggaaggcccgggtgcccagagctcgcggtggactccgacccggcgcaacatggccgcagcctcgcctctgcgcgactgccaggcctggaaggatgcgaggctcccgctctccaccacaagcaacgaagcctgcaagctgttcgatgccacgctgacccagtatgtaaaatggaccaatgacaagagtctcggtggcatcgagggctgcctgtcaaagctcaaagcagcagatccaacctttgtgatgggccacgccatggctactggccttgtgctgattggcactggaagctccgtgaagctggacaaagagctggacctggctgtgaagacaatggtggagatttcaagaacccagccgctgacaaggcgggagcagctgcacgtgtctgcagtagagacatttgccaatgggaactttccgaaagcctgtgaactatgggaacagattctccaggaccacccgacagacatgttggccctgaaattttcccatgatgcttatttttacctgggctatcaggaacagatgagagattctgttgctcgaatttaccccttctggacacctgacatccccctaagcagctatgtgaaaggcatctactcttttggcttgatggaaaccaacttctacgaccaggcagaaaaactcgccaaagaggctttatctattaacccgacagacgcatggtcggtgcacaccgtcgctcacatccacgagatgaaagcagagatcaaggatgggttggaattcatgcagcactcagagaccctctggaagggcctggtcaggaggagcgagcagcctcttcaaagcacatgagctgcaccatgacggggaccctctgtgggatgtttttcaagttcctcagtttgtactgaaattagggattcatcagggcaggaagcaggcaggcctctcagaagggagaggaggcctccaaatctattgagtccccacagtttgctcaagcccaggcaaatttctgtgattaaaatgaattcatcagttcctccaaaaaaaaaagca

SEQ ID NO: 346122 - DNA, 254 bp, Homo sapiens
tgacatctcatgggaaatttaggaaccaactttttccactccataaaatcctatttatagaatttcttttgtgttcatccttctctgtgcagaaaagaagctttttttttcttctggagaggattctataatgtgaaagctaacaaatgatcaatatttattttttaaaaaccacactacctaaacatctaagggggcaagaagacaactccagtttaaaatgtatgacttcgaaaggccattgacatccaagg

SEQ ID NO: 346123 - DNA, 714 bp, Homo sapiens
tgctgaggggccgggcgggctaggggccggctagccgccgttcgcccctgctttgcatattcatgaagtctagcgaggccggtcgcccaggctagccgtggacgggtcatgaattattcatgaggaaacctctggtcccgcccagaaaggcctcgttgactattcatgagccgaggagcgggtttgggccggaaaaggccgttgacccccggtgggagggaagcgtcgacgagctgaggttggacttgttgaaataatcctgatacattcctacaatggccactgctcagctttctcactgcatcacaatacacaaggcttctaaggaaacagttttcccatcccaaatcactaatgagcatgagtcattgaaaatggtgaagaaactttttgctacttccatctcatgtataacatacctaaggggcctgtttccagagagctcttatggagaacgccatttggatgacctcagtttaaaaatcctccgagaagataaaaaatgtcccgggtcactgcatattatcagatggattcaaggttgttttgatgctttggaaaagagatacgtaagaatgtttttacacttacactggaatcaaaggcttgtcttttattctttaaaaaaagaaattagacatttattttgtttttgtgtttaacagtataagtgtctacgtttgcatccataaactaatttcttatcttatgtct

SEQ ID NO: 346124 - DNA, 2113 bp, Homo sapiens
tgctgaggggccgggcgggctaggggccggctagccgccgttcgcccctgctttgcatattcatgaagtctagcgaggccggtcgcccaggctagccgtggacgggtcatgaattattcatgaggaaacctctggtcccgcccagaaaggcctcgttgactattcatgagccgaggagcgggtttgggccggaaaaggccgttgacccccggtgggagggaagcgtcgacgagctgaggttggacttgttgaaataatcctgatacattcctacaatggccactgctcagctttctcactgcatcacaatacacaaggcttctaaggaaacagttttcccatcccaaatcactaatgagcatgagtcattgaaaatggtgaagaaactttttgctacttccatctcatgtataacatacctaaggggcctgtttccagagagctcttatggagaacgccatttggatgacctcagtttaaaaatcctccgagaagataaaaaatgtcccgggtcactgcatattatcagatggattcaaggttgttttgatgctttggaaaagagatacctacgtatggcagtactgacactttacacagatcccatgggatctgagaaggtgactgagatgtaccagttcaaattcaaatacacgaaagaaggagccactatggattttgacagtcatagcagcagtacaagctttgaaagtggaacaaacaatgaagatattaagaaagccagtgttctactgatccgtaaattgtatatactgatgcaggaccttgagccacttcctaataatgttgtacttactatgaaactccactactataatgcagtgaccccacatgattaccaacccctcggttttaaagaaggggtaaattcacacttcctgctgtttgacaaggagcctatcaacgtgcaagtgggatttgtctccactggctttcatagcatgaaagtaaaagtcatgacagaggctacaaaagtgattgatttggagaacaatctgtttcgggagaacagcactactgagatcgcccatcagggtctagactgtgatgaggaagaagaatgcaatgaccatattcaaagaatgaattttgtgtgcagtcagcaaagttctgagtgctccaggaagaagaggaaggtcagtgaaccagtgaaggtcttcatccctaacagaaaatgaaagctaaatattccttctacatttattttaaaataagtttattttgtaaaaacatgcataaactgtcttagcaggaaagtacattcctgttaccaaaacctttttctaaattttttgctcaattttttttgtcagttgctaagtgctaaattactggccaggtaggacgcgagtccactttgccataaggaaagcgggtcaatagggctgcctctggatagcattacttcaaagctgggttagagatgaggcaccttttatattatatttgtaaaagaaccacagcagctattttggaaagaagctgttgttctcaaaggaaagaaggatttttttgcataattaaactcttcagctatttagactactgtgaaatgttttgacttgttgtaacctgtatactggaatccctctctagctgtattaaaaattcccacagagttgcataggatgtgtggaggtgcttatccaggtgtgatttatgtgttaacctcagtcacgaggttgatcagctaattgtgggaccaaaatgtgccctgcctcaactctggccccaggccctgttctgttatccaatccgaaacacggaacatgctgcaattcaggagtctggctctcttcttaagacctatattaaatatttcccaagaagcacttcagtttatcagtctgtaacctgcaaatgatgctattagttccctccttattctggaagaatttggatagacttaattgatgattagtatgagatgaacaatagatgacttaaagtgttatttctattatttatataacatgagatttagtaacttataaaatgaggtttagtaatttaatttaaatggataggaccaataagttaaatattaagtgtgtgacttatggttaaataaaatgaaaatacaaaaattttt

SEQ ID NO: 346125 - DNA, 2076 bp, Homo sapiens
tgctgaggggccgggcgggctaggggccggctagccgccgttcgcccctgctttgcatattcatgaagtctagcgaggccggtcgcccaggctagccgtggacgggtcatgaattattcatgaggaaacctctggtcccgcccagaaaggcctcgttgactattcatgagccgaggagcgggtttgggccggaaaaggccgttgacccccggtgggagggaagcgtcgacgagctgaggttggacttgttgaaataatcctgatacattcctacaatggccactgctcagctttctcactgcatcacaatacacaaggcttctaaggaaacagttttcccatcccaaatcactaatgagcatgagtcattgaaaatggtgaagaaactttttgctacttccatctcatgtataacatacctaaggggcctgtttccagagagctcttatggagaacgccatttggatgacctcagtttaaaaatcctccgagaagataaaaaatgtcccgggtcactgcatattatcagatggtaagtaatagaaattctatactttacacagatcccatgggatctgagaaggtgactgagatgtaccagttcaaattcaaatacacgaaagaaggagccactatggattttgacagtcatagcagcagtacaagctttgaaagtggaacaaacaatgaagatattaagaaagccagtgttctactgatccgtaaattgtatatactgatgcaggaccttgagccacttcctaataatgttgtacttactatgaaactccactactataatgcagtgaccccacatgattaccaacccctcggttttaaagaaggggtaaattcacacttcctgctgtttgacaaggagcctatcaacgtgcaagtgggatttgtctccactggctttcatagcatgaaagtaaaagtcatgacagaggctacaaaagtgattgatttggagaacaatctgtttcgggagaacagcactactgagatcgcccatcagggtctagactgtgatgaggaagaagaatgcaatgaccatattcaaagaatgaattttgtgtgcagtcagcaaagttctgagtgctccaggaagaagaggaaggtcagtgaaccagtgaaggtcttcatccctaacagaaaatgaaagctaaatattccttctacatttattttaaaataagtttattttgtaaaaacatgcataaactgtcttagcaggaaagtacattcctgttaccaaaacctttttctaaattttttgctcaattttttttgtcagttgctaagtgctaaattactggccaggtaggacgcgagtccactttgccataaggaaagcgggtcaatagggctgcctctggatagcattacttcaaagctgggttagagatgaggcaccttttatattatatttgtaaaagaaccacagcagctattttggaaagaagctgttgttctcaaaggaaagaaggatttttttgcataattaaactcttcagctatttagactactgtgaaatgttttgacttgttgtaacctgtatactggaatccctctctagctgtattaaaaattcccacagagttgcataggatgtgtggaggtgcttatccaggtgtgatttatgtgttaacctcagtcacgaggttgatcagctaattgtgggaccaaaatgtgccctgcctcaactctggccccaggccctgttctgttatccaatccgaaacacggaacatgctgcaattcaggagtctggctctcttcttaagacctatattaaatatttcccaagaagcacttcagtttatcagtctgtaacctgcaaatgatgctattagttccctccttattctggaagaatttggatagacttaattgatgattagtatgagatgaacaatagatgacttaaagtgttatttctattatttatataacatgagatttagtaacttataaaatgaggtttagtaatttaatttaaatggataggaccaataagttaaatattaagtgtgtgacttatggttaaataaaatgaaaatacaaaaattttt

SEQ ID NO: 346126 - DNA, 720 bp, Homo sapiens
tgtaaagaagggattaaaccatgccgttgacaagttaacttacccctgggctccttgaaggcttgtcagtttagtctttggaggtccccgagtaccattttaagtgttaccatgttactgctgctgagtaatagtgcaagtgctaaaatgcaaaattcagatggtacagggtttggaaatcatgcagattcagatgcagaaaaaaaaaattaaaacaactcaagatccctttacagaggaaactgaataatgaaacaatgtggcgattacaagtctaaaggatgacttcattgataaatgtttatgtaacttgcaaaatgacaaacctatttatcataatctaattaggtaagggcattaggtaaactaccaacacaacaaatatcacattcttccaactagaaaatgagctcaactctcacagaattagttacaaaaaagtacaacagagaatcaatgttattgcttttacatacttaacaatgcattgtgagagtgtgagttttgtaagcgattttattcaactgtattcaatgttaccacattcccccacctcctggaggacaaagcccattccacttaacacttccagacagacaacccaccctaattcttaaagctatcaggcctcttaatggatttcaggcacaagataatttgtggtttcttctactttatccctactgcaattaattccacttttcaaatcccaaactagga

SEQ ID NO: 346127 - DNA, 536 bp, Homo sapiens
aaaagcctcattaccaagcattccagttagtcaagatttgactgtatattcctttcagtggcaacttgcccccaggtgagatttccatccatttcatgataaattccaacagatacattttccccccttcatcaactgtgtgtgaagaaagggtgaaggcagggtcccctgggatggattctgatgttctaatgaaatgatggctcctacgaattccacttttgagtggtcactaatttccttaatgcacaagagaccctaaactaagcttcaaagcttgactgaggtgttccctattgtgtgtaaataatgctttaaaaaccatgtgtcacaacgcagtggctggtggtgccctggactctctgagggcttcgccctgtctcggcatgtttcaagggacgatggtagatgtacggcagtgatgtgagtctatgtgcagcattgtgggtgcagtggtttgccttctttcagaaacgcatacttcccactcctttgactttgccaaagatggtatagcagacatttgacatagcaga

SEQ ID NO: 346128 - DNA, 460 bp, Homo sapiens
atgattatttctatgcttaactgattttcttctgaaaaaataaatttttatgtagtttcaccaggtgatatggatcggacacaaattgagcttaatccgtacctcacatgtgtattttcaggtgggaaagcagtgccactctccgcttcacagatgccccctgccaagatgtcagtgatgctgccgtcagtgaacctcgaggactgctctcagtctctgagtctcagcacaatgcaggaggacatggagtcttcgggggcagataccttctgaacgggaagagacagccagcacagtgtttatgccactggttttaaagtcattttaccttggcttaaaaccctctctcagactgtttggtttttgagcatattctgaaaaaaaaattccaatattttaaaataaaacaaaaagcataatttgggtatttaaagtttttaaataaaataagtataagtca

SEQ ID NO: 346129 - DNA, 424 bp, Homo sapiens
gtttgggggtacatgtgaagaaggtttcctgtataggtaaactcgggccgtggaggtttgtcatacagattatttcatcacccaggtgggaaagcagtgccactctccgcttcacagatgccccctgccaagatgtcagtgatgctgccgtcagtgaacctcgaggactgctctcagtctctgagtctcagcacaatgcaggaggacatggagtcttcgggggcagataccttctgaacgggaagagacagccagcacagtgtttatgccactggttttaaagtcattttaccttggcttaaaaccctctctcagactgtttggtttttgagcatattctgaaaaaaaaattccaatattttaaaataaaacaaaaagcataatttgggtatttaaagtttttaaataaaataagtataagtca

SEQ ID NO: 346130 - DNA, 5488 bp, Homo sapiens
agcggagggcagtgggtgttgacctgcgggcaactgacgctgttgtcagattacacccacgacggtgcgggtctcgggcgttctggagatacgtaggggtgaatttatgtttccgacgattgcatctggaggggttcatcagacttaacttctgctagaaattgttaccagcctctattagaaaatcccatggtgtcagaaagtgatttttctaaagacgttgcagtgcaagtgttgcctttggataaaatagaagagaacaacaagcaaaaagcaaatgacatcttcatttctcagtatacaatgggacagaaagatgctctaagaacagttttaaagcaaaaagacagggtttgccatgttgcccagctggtcttgaactcctgggctcaagcagtcttcctgcctcagcctcccacagtgctaggattacagagctcaaagcatgcctgtttttaaggaagtaaaggtacatctgttagaagatgcaggcatagagaaggatgctgttactcaggagactagaatttcacccagtggaattgattcagctacaaccgtggctgcagcaactgctgctgccattgcaaccgcagctccgttgataaaggtgcagagtgatttggaagcaaaagtcaattctgttacagaattacttagtaaattacaggagactgataaacacctgcaacgtgttacagagcagcaaacaagcattcagaggaaacaagagaaattacattgtcatgatcacgaaaagcaaatgaatgtgtttatggagcagcacataaggcatcttgaaaagttacaacaacaacaaatagatattcagactcattttattagtgctgcactcaagactagtagttttcagcctgttagtatgccctcctccagagcagtggaaaagtattccgtaaaaccagaacaccctaatcttggtagctgtaatccatctttatataacacatttgcttccaaacaagcacctttaaaagaagttgaagatacgagttttgataaacagaaatctcctttggagacaccagcacctcgcagatttgctcctgtacctgtttcaagggatgatgaactatcaaagagggaaaatcttttggaagaaaaagaaaatatggaagtgtcatgtcacagaggaaatgtaagactattggaacaaattttgaataataatgattctttgacaagaaaaagtgaatcatcaaacaccacctcactaactaggtcaaaaataggatggactcctgagaaaacaaacagatttccttcctgtgaagagctagaaacaactaaagtgactatgcagaagtctgatgatgttcttcatgaccttggccaaaaagagaaagaaacaaatagcatggtccagccaaaagaatctctgagtatgttgaagcttccagatcttccacagaattctgttaagcttcaaacaaccaatacaacaagatctgtattgaaagatgctgagaagattttgagaggagtacaaaacaataaaaaagtacttgaagaaaacctggaagctattattcgtgcaaaagatggagctgccatgtattcgcttatcaatgctttatctaccaacagagagatgtcagagaaaattaggatcagaaagacagtggatgaatggattaaaactatttctgcagaaattcaggatgaactgtcaagaacagattatgaacaaaaaagatttgatcagaagaatcagagaaccaagaaaggtcagaatatgactaaagatattagaaccaacacacaagataaaactgtcaacaaatctgtaattccaagaaaacattctcaaaagcaaatagaagagcattttagaaatctacctatgaggggcatgcctgcttcaagtttacagaaagagagaaaggaagggcttttgaaagcaaccacagtaatacaagatgaagattatatgttacaagtctatggaaagccagtttatcagggccatcgaagcactcttaaaaaaggaccatatctcagatttaattctccatctcctaagtccagaccacagagaccaaaagtaatagaacgagttaaaggcactaaggtaaagtcaataagaacacagactgacttctatgcaacaaaacctaagaagatggattctaaaatgaaacattctgttcctgtgttacctcatggcgatcagcaatatttgttcagcccaagtagagaaatgcctactttttcaggtacattggaaggtcatctgattcctatggcaattcttttaggacaaacccaaagtaatagtgataccatgccacctgctggagtgattgtcagcaagccacaccctgtaactgtgactacttctattcctccatcatctcgaaaagtagaaactggagtaaagaaacctaacatagccattgtagaaatgaagtcagaaaaaaaggatcctcctcagcttactgtgcaggtattacccagtgtagatattgacagcatttcaaatagtagtgctgatgtcctttcacctctgtctagccccaaagaagcatctcctcctcctgtgcaaacttggataaagactccagaaattatgaaggtagatgaagaagaggtgaagtttccaggaactaactttgatgaaataatcgatgtcatacaggaagaagaaaaatgtgatgaaattccagactctgaaccaattctggagtttaacagaagtgttaaagctgattctacaaaatataatggtcctccatttccgccagttgcttctacttttcagcccactgctgatattctggataaagtaattgagagaaaagaaacactggaaaatagcttaattcaatgggtagagcaagaaataatgtcaagaattatctctgggctctttccagtccagcaacagattgcacctagtatcagtgtttcagtcagtgagacaagtgaaccactgacttctgacattgtggaaggaacaagcagtggcgccctccagctttttgttgatgctggtgttcctgtgaactcaaatgtgattaaacattttgttaacgaagctcttgctgagaccattgctgtcatgctgggtgacagagaagcaaagaagcaaggtcctgttgctacaggtgtttctggggatgcttcaacaaatgaaacatatttgccggcaagagtgtgcaccccactggctaccccacagcctacgcctccttgctcaccttcatcacctgctaaggagtgtgttttggtaaagactccagattcttctccctgtgattcggatcatgatatggcttttcctgtgaaagaaatatgtgctgaaaaaggagatgatatgcctgccatcatgcttgttaatactccaacagttacccctactactacacctcctccagcggcggcagtttttaccccaactttgtcagatatttccattgataaattgaaggtatcaagcccagagcttcccaagccatggggtgatggagacctgccactggaagaagagaaccctaactcacctcaagaagaacttcatccaagagctattgtaatgtctgtggctaaggatgaagaaccagagagtatggatttccctgctcagcctccacctccagagccagttccctttatgccatttcctgccggcaccaaggccccttccccctcacagatgccaggttctgattcatcaacactggagagcacattgagtgttactgtcactgaaactgaaactttagataaacccatctctgaaggagagattttatttagctgtggtcaaaaattggcccccaagattttagaagatataggactgtacctgacaaaccttaatgatagcttatccagcactctgcatgatgccgttgaaatggaggatgatcctcctagtgaagggcaagtgattaggatgtcccataaaaaatttcatgcagatgcaattctttcttttgctaaacaaaaccaggagtcagcagtttcccagcaagcagtctatcattcagaggacttggaaaacagtgtgggtgaacttagtgaaggacaaagaccccagctaacagcggcagcagagaacatcttaatgggacattctctctatatgcagccacctgtcactaatacacagtctttggatcaacaatgtgatcctaaaccattatctcggcaatttgacacagtttcaggtagtatttatgaagattcatgtgctagtcatggtccaatgagtttgggagaattggagttggagccaaattctaagctggttcttcccacaacacttctgacagcacaagaaaatgatgttaatttaccagtagccgctgaagatttttcccagtaccaactaaagcaaaatcaggatgttaagcaagttgaacacaaaccatcacaaagttacctacgtgttagaaataaatctgatattgcaccttcacagcaacaagtttcaccaggtgatatggatcggacacaaattgagcttaatccgtacctcacatgtgtattttcaggtgggaaagcagtgccactctccgcttcacagatgccccctgccaagatgtcagtgatgctgccgtcagtgaacctcgaggactgctctcagtctctgagtctcagcacaatgcaggaggacatggagtcttcgggggcagataccttctgaacgggaagagacagccagcacagtgtttatgccactggttttaaagtcattttaccttggcttaaaaccctctctcagactgtttggtttttgagcatattctgaaaaaaaaattccaatattttaaaataaaacaaaaagcataatttgggtatttaaagtttttaaataaaataagtataagtcattataagtctgattgtgagttgtttcttagaatcctgagatagcatagagtagtgaaagggcatggcttttgacatctaggcatttaatctataggtgtaattatctgtatgtatttataaaattatgtagctcaaggttattcattctaacatttttataacagcaaatagaaaaaatcaaatgtctatcaataatagactggttttaaagtgatggtacatcagtacaatggaatactatgtattacaaaaaaaaatttaaaaagtttattgatatggaataatctttgagatgcactgttaaagtgaaaaaagccatgtgcaaaatagtgtgtgaactatgcagttgttgaaattatttaaaatggggtggggaggaattcaaatgtatggtatgtcacatattcttacatgtatttgcttgtaaatatattatataaacaagaaactgtctaagtttgtctccagggagtagaattgttggctgggtgataggagaggctaagtgataggaatcaaggataatcgtggttactatgtatttgaacttcagttgtgatagaaaaaaatcatcagtgagattaatttttatatgccttatgtataccatataaacctttataaacct

SEQ ID NO: 346131 - DNA, 5422 bp, Homo sapiens
agcggagggcagtgggtgttgacctgcgggcaactgacgctgttgtcagattacacccacgacggtgcgggtctcgggcgttctggagatacgtaggggtgaatttatgtttccgacgattgcatctggaggggttcatcagacttaacttctgctagaaattgttaccagcctctattagaaaatcccatggtgtcagaaagtgatttttctaaagacgttgcagtgcaagtgttgcctttggataaaatagaagagaacaacaagcaaaaagcaaatgacatcttcatttctcagtatacaatgggacagaaagatgctctaagaacagttttaaagcaaaaagacagggtttgccatgttgcccagctggtcttgaactcctgggctcaagcagtcttcctgcctcagcctcccacagtgctaggattacagagctcaaagcatgcctgtttttaaggaagtaaaggtacatctgttagaagatgcaggcatagagaaggatgctgttactcaggagactagaatttcacccagtggaattgattcagctacaaccgtggctgcagcaactgctgctgccattgcaaccgcagctccgttgataaaggtgcagagtgatttggaagcaaaagtcaattctgttacagaattacttagtaaattacaggagactgataaacacctgcaacgtgttacagagcagcaaacaagcattcagaggaaacaagagaaattacattgtcatgatcacgaaaagcaaatgaatgtgtttatggagcagcacataaggcatcttgaaaagttacaacaacaacaaatagatattcagactcattttattagtgctgcactcaagactagtagttttcagcctgttagtatgccctcctccagagcagtggaaaagtattccgtaaaaccagaacaccctaatcttggtagctgtaatccatctttatataacacatttgcttccaaacaagcacctttaaaagaagttgaagatacgagttttgataaacagaaatctcctttggagacaccagcacctcgcagatttgctcctgtacctgtttcaagggatgatgaactatcaaagagggaaaatcttttggaagaaaaagaaaatatggaagtgtcatgtcacagaggaaatgtaagactattggaacaaattttgaataataatgattctttgacaagaaaaagtgaatcatcaaacaccacctcactaactaggtcaaaaataggatggactcctgagaaaacaaacagatttccttcctgtgaagagctagaaacaactaaagtgactatgcagaagtctgatgatgttcttcatgaccttggccaaaaagagaaagaaacaaatagcatggtccagccaaaagaatctctgagtatgttgaagcttccagatcttccacagaattctgttaagcttcaaacaaccaatacaacaagatctgtattgaaagatgctgagaagattttgagaggagtacaaaacaataaaaaagtacttgaagaaaacctggaagctattattcgtgcaaaagatggagctgccatgtattcgcttatcaatgctttatctaccaacagagagatgtcagagaaaattaggatcagaaagacagtggatgaatggattaaaactatttctgcagaaattcaggatgaactgtcaagaacagattatgaacaaaaaagatttgatcagaagaatcagagaaccaagaaaggtcagaatatgactaaagatattagaaccaacacacaagataaaactgtcaacaaatctgtaattccaagaaaacattctcaaaagcaaatagaagagcattttagaaatctacctatgaggggcatgcctgcttcaagtttacagaaagagagaaaggaagggcttttgaaagcaaccacagtaatacaagatgaagattatatgttacaagtctatggaaagccagtttatcagggccatcgaagcactcttaaaaaaggaccatatctcagatttaattctccatctcctaagtccagaccacagagaccaaaagtaatagaacgagttaaaggcactaaggtaaagtcaataagaacacagactgacttctatgcaacaaaacctaagaagatggattctaaaatgaaacattctgttcctgtgttacctcatggcgatcagcaatatttgttcagcccaagtagagaaatgcctactttttcaggtacattggaaggtcatctgattcctatggcaattcttttaggacaaacccaaagtaatagtgataccatgccacctgctggagtgattgtcagcaagccacaccctgtaactgtgactacttctattcctccatcatctcgaaaagtagaaactggagtaaagaaacctaacatagccattgtagaaatgaagtcagaaaaaaaggatcctcctcagcttactgtgcaggtattacccagtgtagatattgacagcatttcaaatagtagtgctgatgtcctttcacctctgtctagccccaaagaagcatctcctcctcctgtgcaaacttggataaagactccagaaattatgaaggtagatgaagaagaggtgaagtttccaggaactaactttgatgaaataatcgatgtcatacaggaagaagaaaaatgtgatgaaattccagactctgaaccaattctggagtttaacagaagtgttaaagctgattctacaaaatataatggtcctccatttccgccagttgcttctacttttcagcccactgctgatattctggataaagtaattgagagaaaagaaacactggaaaatagcttaattcaatgggtagagcaagaaataatgtcaagaattatctctgggctctttccagtccagcaacagattgcacctagtatcagtgtttcagtcagtgagacaagtgaaccactgacttctgacattgtggaaggaacaagcagtggcgccctccagctttttgttgatgctggtgttcctgtgaactcaaatgtgattaaacattttgttaacgaagctcttgctgagaccattgctgtcatgctgggtgacagagaagcaaagaagcaaggtcctgttgctacaggtgtttctggggatgcttcaacaaatgaaacatatttgccggcaagagtgtgcaccccactggctaccccacagcctacgcctccttgctcaccttcatcacctgctaaggagtgtgttttggtaaagactccagattcttctccctgtgattcggatcatgatatggcttttcctgtgaaagaaatatgtgctgaaaaaggagatgatatgcctgccatcatgcttgttaatactccaacagttacccctactactacacctcctccagcggcggcagtttttaccccaactttgtcagatatttccattgataaattgaaggtatcaagcccagagcttcccaagccatggggtgatggagacctgccactggaagaagagaaccctaactcacctcaagaagaacttcatccaagagctattgtaatgtctgtggctaaggatgaagaaccagagagtatggatttccctgctcagcctccacctccagagccagttccctttatgccatttcctgccggcaccaaggccccttccccctcacagatgccaggttctgattcatcaacactggagagcacattgagtgttactgtcactgaaactgaaactttagataaacccatctctgaaggagagattttatttagctgtggtcaaaaattggcccccaagattttagaagatataggactgtacctgacaaaccttaatgatagcttatccagcactctgcatgatgccgttgaaatggaggatgatcctcctagtgaagggcaagtgattaggatgtcccataaaaaatttcatgcagatgcaattctttcttttgctaaacaaaaccaggagtcagcagtttcccagcaagcagtctatcattcagaggacttggaaaacagtgtgggtgaacttagtgaaggacaaagaccccagctaacagcggcagcagagaacatcttaatgggacattctctctatatgcagccacctgtcactaatacacagtctttggatcaacaatgtgatcctaaaccattatctcggcaatttgacacagtttcaggtagtatttatgaagattcatgtgctagtcatggtccaatgagtttgggagaattggagttggagccaaattctaagctggttcttcccacaacacttctgacagcacaagaaaatgatgttaatttaccagtagccgctgaagatttttcccagtaccaactaaagcaaaatcaggatgttaagcaagttgaacacaaaccatcacaaagttacctacgtgttagaaataaatctgatattgcaccttcacagcaacaaggtgggaaagcagtgccactctccgcttcacagatgccccctgccaagatgtcagtgatgctgccgtcagtgaacctcgaggactgctctcagtctctgagtctcagcacaatgcaggaggacatggagtcttcgggggcagataccttctgaacgggaagagacagccagcacagtgtttatgccactggttttaaagtcattttaccttggcttaaaaccctctctcagactgtttggtttttgagcatattctgaaaaaaaaattccaatattttaaaataaaacaaaaagcataatttgggtatttaaagtttttaaataaaataagtataagtcattataagtctgattgtgagttgtttcttagaatcctgagatagcatagagtagtgaaagggcatggcttttgacatctaggcatttaatctataggtgtaattatctgtatgtatttataaaattatgtagctcaaggttattcattctaacatttttataacagcaaatagaaaaaatcaaatgtctatcaataatagactggttttaaagtgatggtacatcagtacaatggaatactatgtattacaaaaaaaaatttaaaaagtttattgatatggaataatctttgagatgcactgttaaagtgaaaaaagccatgtgcaaaatagtgtgtgaactatgcagttgttgaaattatttaaaatggggtggggaggaattcaaatgtatggtatgtcacatattcttacatgtatttgcttgtaaatatattatataaacaagaaactgtctaagtttgtctccagggagtagaattgttggctgggtgataggagaggctaagtgataggaatcaaggataatcgtggttactatgtatttgaacttcagttgtgatagaaaaaaatcatcagtgagattaatttttatatgccttatgtataccatataaacctttataaacct

SEQ ID NO: 346132 - DNA, 5356 bp, Homo sapiens
agcggagggcagtgggtgttgacctgcgggcaactgacgctgttgtcagattacacccacgacggtgcgggtctcgggcgttctggagatacgtaggggtgaatttatgtttccgacgattgcatctggaggggttcatcagacttaacttctgctagaaattgttaccagcctctattagaaaatcccatggtgtcagaaagtgatttttctaaagacgttgcagtgcaagtgttgcctttggataaaatagaagagaacaacaagcaaaaagcaaatgacatcttcatttctcagtatacaatgggacagaaagatgctctaagaacagttttaaagcaaaaagacagggtttgccatgttgcccagctggtcttgaactcctgggctcaagcagtcttcctgcctcagcctcccacagtgctaggattacagagctcaaagcatgcctgtttttaaggaagtaaaggtacatctgttagaagatgcaggcatagagaaggatgctgttactcaggagactagaatttcacccagtggaattgattcagctacaaccgtggctgcagcaactgctgctgccattgcaaccgcagctccgttgataaaggtgcagagtgatttggaagcaaaagtcaattctgttacagaattacttagtaaattacaggagactgataaacacctgcaacgtgttacagagcagcaaacaagcattcagaggaaacaagagaaattacattgtcatgatcacgaaaagcaaatgaatgtgtttatggagcagcacataaggcatcttgaaaagttacaacaacaacaaatagatattcagactcattttattagtgctgcactcaagactagtagttttcagcctgttagtatgccctcctccagagcagtggaaaagtattccgtaaaaccagaacaccctaatcttggtagctgtaatccatctttatataacacatttgcttccaaacaagcacctttaaaagaagttgaagatacgagttttgataaacagaaatctcctttggagacaccagcacctcgcagatttgctcctgtacctgtttcaagggatgatgaactatcaaagagggaaaatcttttggaagaaaaagaaaatatggaagtgtcatgtcacagaggaaatgtaagactattggaacaaattttgaataataatgattctttgacaagaaaaagtgaatcatcaaacaccacctcactaactaggtcaaaaataggatggactcctgagaaaacaaacagatttccttcctgtgaagagctagaaacaactaaagtgactatgcagaagtctgatgatgttcttcatgaccttggccaaaaagagaaagaaacaaatagcatggtccagccaaaagaatctctgagtatgttgaagcttccagatcttccacagaattctgttaagcttcaaacaaccaatacaacaagatctgtattgaaagatgctgagaagattttgagaggagtacaaaacaataaaaaagtacttgaagaaaacctggaagctattattcgtgcaaaagatggagctgccatgtattcgcttatcaatgctttatctaccaacagagagatgtcagagaaaattaggatcagaaagacagtggatgaatggattaaaactatttctgcagaaattcaggatgaactgtcaagaacagattatgaacaaaaaagatttgatcagaagaatcagagaaccaagaaaggtcagaatatgactaaagatattagaaccaacacacaagataaaactgtcaacaaatctgtaattccaagaaaacattctcaaaagcaaatagaagagcattttagaaatctacctatgaggggcatgcctgcttcaagtttacagaaagagagaaaggaagggcttttgaaagcaaccacagtaatacaagatgaagattatatgttacaagtctatggaaagccagtttatcagggccatcgaagcactcttaaaaaaggaccatatctcagatttaattctccatctcctaagtccagaccacagagaccaaaagtaatagaacgagttaaaggcactaaggtaaagtcaataagaacacagactgacttctatgcaacaaaacctaagaagatggattctaaaatgaaacattctgttcctgtgttacctcatggcgatcagcaatatttgttcagcccaagtagagaaatgcctactttttcaggtacattggaaggtcatctgattcctatggcaattcttttaggacaaacccaaagtaatagtgataccatgccacctgctggagtgattgtcagcaagccacaccctgtaactgtgactacttctattcctccatcatctcgaaaagtagaaactggagtaaagaaacctaacatagccattgtagaaatgaagtcagaaaaaaaggatcctcctcagcttactgtgcaggtattacccagtgtagatattgacagcatttcaaatagtagtgctgatgtcctttcacctctgtctagccccaaagaagcatctcctcctcctgtgcaaacttggataaagactccagaaattatgaaggtagatgaagaagaggtgaagtttccaggaactaactttgatgaaataatcgatgtcatacaggaagaagaaaaatgtgatgaaattccagactctgaaccaattctggagtttaacagaagtgttaaagctgattctacaaaatataatggtcctccatttccgccagttgcttctacttttcagcccactgctgatattctggataaagtaattgagagaaaagaaacactggaaaatagcttaattcaatgggtagagcaagaaataatgtcaagaattatctctgggctctttccagtccagcaacagattgcacctagtatcagtgtttcagtcagtgagacaagtgaaccactgacttctgacattgtggaaggaacaagcagtggcgccctccagctttttgttgatgctggtgttcctgtgaactcaaatgtgattaaacattttgttaacgaagctcttgctgagaccattgctgtcatgctgggtgacagagaagcaaagaagcaaggtcctgttgctacaggtgtttctggggatgcttcaacaaatgaaacatatttgccggcaagagtgtgcaccccactggctaccccacagcctacgcctccttgctcaccttcatcacctgctaaggagtgtgttttggtaaagactccagattcttctccctgtgattcggatcatgatatggcttttcctgtgaaagaaatatgtgctgaaaaaggagatgatatgcctgccatcatgcttgttaatactccaacagttacccctactactacacctcctccagcggcggcagtttttaccccaactttgtcagatatttccattgataaattgaaggtatcaagcccagagcttcccaagccatggggtgatggagacctgccactggaagaagagaaccctaactcacctcaagaagaacttcatccaagagctattgtaatgtctgtggctaaggatgaagaaccagagagtatggatttccctgctcagcctccacctccagagccagttccctttatgccatttcctgccggcaccaaggccccttccccctcacagatgccaggttctgattcatcaacactggagagcacattgagtgttactgtcactgaaactgaaactttagataaacccatctctgaaggagagattttatttagctgtggtcaaaaattggcccccaagattttagaagatataggactgtacctgacaaaccttaatgatagcttatccagcactctgcatgatgccgttgaaatggacttggaaaacagtgtgggtgaacttagtgaaggacaaagaccccagctaacagcggcagcagagaacatcttaatgggacattctctctatatgcagccacctgtcactaatacacagtctttggatcaacaatgtgatcctaaaccattatctcggcaatttgacacagtttcaggtagtatttatgaagattcatgtgctagtcatggtccaatgagtttgggagaattggagttggagccaaattctaagctggttcttcccacaacacttctgacagcacaagaaaatgatgttaatttaccagtagccgctgaagatttttcccagtaccaactaaagcaaaatcaggatgttaagcaagttgaacacaaaccatcacaaagttacctacgtgttagaaataaatctgatattgcaccttcacagcaacaagtttcaccaggtgatatggatcggacacaaattgagcttaatccgtacctcacatgtgtattttcaggtgggaaagcagtgccactctccgcttcacagatgccccctgccaagatgtcagtgatgctgccgtcagtgaacctcgaggactgctctcagtctctgagtctcagcacaatgcaggaggacatggagtcttcgggggcagataccttctgaacgggaagagacagccagcacagtgtttatgccactggttttaaagtcattttaccttggcttaaaaccctctctcagactgtttggtttttgagcatattctgaaaaaaaaattccaatattttaaaataaaacaaaaagcataatttgggtatttaaagtttttaaataaaataagtataagtcattataagtctgattgtgagttgtttcttagaatcctgagatagcatagagtagtgaaagggcatggcttttgacatctaggcatttaatctataggtgtaattatctgtatgtatttataaaattatgtagctcaaggttattcattctaacatttttataacagcaaatagaaaaaatcaaatgtctatcaataatagactggttttaaagtgatggtacatcagtacaatggaatactatgtattacaaaaaaaaatttaaaaagtttattgatatggaataatctttgagatgcactgttaaagtgaaaaaagccatgtgcaaaatagtgtgtgaactatgcagttgttgaaattatttaaaatggggtggggaggaattcaaatgtatggtatgtcacatattcttacatgtatttgcttgtaaatatattatataaacaagaaactgtctaagtttgtctccagggagtagaattgttggctgggtgataggagaggctaagtgataggaatcaaggataatcgtggttactatgtatttgaacttcagttgtgatagaaaaaaatcatcagtgagattaatttttatatgccttatgtataccatataaacctttataaacct

SEQ ID NO: 346133 - DNA, 4735 bp, Homo sapiens
agcggagggcagtgggtgttgacctgcgggcaactgacgctgttgtcagattacacccacgacggtgcgggtctcgggcgttctggagatacgtaggggtgaatttatgtttccgacgattgcatctggaggggttcatcagacttaacttctgctagaaattgttaccagcctctattagaaaatcccatggtgtcagaaagtgatttttctaaagacgttgcagtgcaagtgttgcctttggataaaatagaagagaacaacaagcaaaaagcaaatgacatcttcatttctcagtatacaatgggacagaaagatgctctaagaacagttttaaagcaaaaagacagggtttgccatgttgcccagctggtcttgaactcctgggctcaagcagtcttcctgcctcagcctcccacagtgctaggattacagagctcaaagcatgcctgtttttaaggaagtaaaggtacatctgttagaagatgcaggcatagagaaggatgctgttactcaggagactagaatttcacccagtggaattgattcagctacaaccgtggctgcagcaactgctgctgccattgcaaccgcagctccgttgataaaggtgcagagtgatttggaagcaaaagtcaattctgttacagaattacttagtaaattacaggagactgataaacacctgcaacgtgttacagagcagcaaacaagcattcagaggaaacaagagaaattacattgtcatgatcacgaaaagcaaatgaatgtgtttatggagcagcacataaggcatcttgaaaagttacaacaacaacaaatagatattcagactcattttattagtgctgcactcaagactagtagttttcagcctgttagtatgccctcctccagagcagtggaaaagtattccgtaaaaccagaacaccctaatcttggtagctgtaatccatctttatataacacatttgcttccaaacaagcacctttaaaagaagttgaagatacgagttttgataaacagaaatctcctttggagacaccagcacctcgcagatttgctcctgtacctgtttcaagggatgatgaactatcaaagagggaaaatcttttggaagaaaaagaaaatatggaagtgtcatgtcacagaggaaatgtaagactattggaacaaattttgaataataatgattctttgacaagaaaaagtgaatcatcaaacaccacctcactaactaggtcaaaaataggatggactcctgagaaaacaaacagatttccttcctgtgaagagctagaaacaactaaagtgactatgcagaagtctgatgatgttcttcatgaccttggccaaaaagagaaagaaacaaatagcatggtccagccaaaagaatctctgagtatgttgaagcttccagatcttccacagaattctgttaagcttcaaacaaccaatacaacaagatctgtattgaaagatgctgagaagattttgagaggagtacaaaacaataaaaaagtacttgaagaaaacctggaagctattattcgtgcaaaagatggagctgccatgtattcgcttatcaatgctttatctaccaacagagagatgtcagagaaaattaggatcagaaagacagtggatgaatggattaaaactatttctgcagaaattcaggatgaactgtcaagaacagattatgaacaaaaaagatttgatcagaagaatcagagaaccaagaaaggtcagaatatgactaaagatattagaaccaacacacaagataaaactgtcaacaaatctgtaattccaagaaaacattctcaaaagcaaatagaagagcattttagaaatctacctatgaggggcatgcctgcttcaagtttacagaaagagagaaaggaagggcttttgaaagcaaccacagtaatacaagatgaagattatatgttacaagtctatggaaagccagtttatcagggccatcgaagcactcttaaaaaaggaccatatctcagatttaattctccatctcctaagtccagaccacagagaccaaaagtaatagaacgagttaaaggcactaaggtaaagtcaataagaacacagactgacttctatgcaacaaaacctaagaagatggattctaaaatgaaacattctgttcctgtgttacctcatggcgatcagcaatatttgttcagcccaagtagagaaatgcctactttttcaggtacattggaaggtcatctgattcctatggcaattcttttaggacaaacccaaagtaatagtgataccatgccacctgctggagtgattgtcagcaagccacaccctgtaactgtgactacttctattcctccatcatctcgaaaagtagaaactggagtaaagaaacctaacatagccattgtagaaatgaagtcagaaaaaaaggatcctcctcagcttactgtgcaggtattacccagtgtagatattgacagcatttcaaatagtagtgctgatgtcctttcacctctgtctagccccaaagaagcatctcctcctcctgtgcaaacttggataaagactccagaaattatgaaggtagatgaagaagaggtgaagtttccaggaactaactttgatgaaataatcgatgtcatacaggaagaagaaaaatgtgatgaaattccagactctgaaccaattctggagtttaacagaagtgttaaagctgattctacaaaatataatggtcctccatttccgccagttgcttctacttttcagcccactgctgatattctggataaagtaattgagagaaaagaaacactggaaaatagcttaattcaatgggtagagcaagaaataatgtcaagaattatctctgggctctttccagtccagcaacagattgcacctagtatcagtgtttcagtcagtgagacaagtgaaccactgacttctgacattgtggaaggaacaagcagtggcgccctccagctttttgttgatgctggtgttcctgtgaactcaaatgtgattaaacattttgttaacgaagctcttgctgagaccattgctgtcatgctgggtgacagagaagcaaagaagcaaggtcctgttgctacaggtgtttctggggatgcttcaacaaatgaaacatatttgccggcaagagtgtgcaccccactggctaccccacagcctacgcctccttgctcaccttcatcacctgctaaggagtgtgttttggtaaagactccagattcttctccctgtgattcggatcatgatatggcttttcctgtgaaagaaatatgtgctgaaaaaggagatgatatgcctgccatcatgcttgttaatactccaacagttacccctactactacacctcctccagcggcggcagtttttaccccaactttgtcagatatttccattgataaattgaaggtatcaagcccagagcttcccaagccatggggtgatggagacctgccactggaagaagagaaccctaactcacctcaagaagaacttcatccaagagctattgtaatgtctgtggctaaggatgaagaaccagagagtatggatttccctgctcagcctccacctccagagccagttccctttatgccatttcctgccggcaccaaggccccttccccctcacagatgccaggttctgattcatcaacactggagagcacattgagtgttactgtcactgaaactgaaactttagataaacccatctctgaaggagagattttatttagctgtggtcaaaaattggcccccaagattttagaagatataggactgtacctgacaaaccttaatgatagcttatccagcactctgcatgatgccgttgaaatggaggatgatcctcctagtgaagggcaagtgattaggatgtcccataaaaaatttcatgcagatgcaattctttcttttgctaaacaaaaccaggagtcagcagtttcccagcaagcagtctatcattcagaggacttggaaaacagtgtgggtgaacttagtgaaggacaaagaccccagctaacagcggcagcagagaacatcttaatgggacattctctctatatgcagccacctgtcactaatacacagtctttggatcaacaatgtgatcctaaaccattatctcggcaatttgacacagtttcaggtagtatttatgaagattcatgtgctagtcatggtccaatgagtttgggagaattggagttggagccaaattctaagctggttcttcccacaacacttctgacagcacaagaaaatgatgttaatttaccagtagccgctgaagatttttcccagtaccaactaaagcaaaatcaggatgttaagcaagttgaacacaaaccatcacaaagttacctacgtgttagaaataaatctgatattgcaccttcacagcaacaaggttaatcttttttagcatccctttacataaagtaccatagaaagtgctgtggccctagagagatggataaaacaaagcatctgctctcccgggataaaaagaagaaaggccattttgtgaagagatgaagactgagcggttgtggccgccttgccgaccttgagcagcagttggcttctccacatagtacccgggaataggagtctcagaatcgaatctcttctgcctgctcacttctgtgagatttttttgatcttcagctacatttttggctttgtgag

SEQ ID NO: 346134 - DNA, 1046 bp, Homo sapiens
atattatttcgcaaagcataaagcacgtaaatactcaggttacgcatgttgagctgaatgagcttctcctttgtgcaggtgggaaagcagtgccactctccgcttcacagatgccccctgccaagatgtcagtgatgctgccgtcagtgaacctcgaggactgctctcagtctctgagtctcagcacaatgcaggaggacatggagtcttcgggggcagataccttctgaacgggaagagacagccagcacagtgtttatgccactggttttaaagtcattttaccttggcttaaaaccctctctcagactgtttggtttttgagcatattctgaaaaaaaaattccaatattttaaaataaaacaaaaagcataatttgggtatttaaagtttttaaataaaataagtataagtcattataagtctgattgtgagttgtttcttagaatcctgagatagcatagagtagtgaaagggcatggcttttgacatctaggcatttaatctataggtgtaattatctgtatgtatttataaaattatgtagctcaaggttattcattctaacatttttataacagcaaatagaaaaaatcaaatgtctatcaataatagactggttttaaagtgatggtacatcagtacaatggaatactatgtattacaaaaaaaaatttaaaaagtttattgatatggaataatctttgagatgcactgttaaagtgaaaaaagccatgtgcaaaatagtgtgtgaactatgcagttgttgaaattatttaaaatggggtggggaggaattcaaatgtatggtatgtcacatattcttacatgtatttgcttgtaaatatattatataaacaagaaactgtctaagtttgtctccagggagtagaattgttggctgggtgataggagaggctaagtgataggaatcaaggataatcgtggttactatgtatttgaacttcagttgtgatagaaaaaaatcatcagtgagattaatttttatatgccttatgtataccatataaacctttataaacct

SEQ ID NO: 346135 - DNA, 5692 bp, Homo sapiens
gtccctaacggtcttcggaagcgaagcagtgtcaacagtccctggtaaacacaagtagtattacaagtcgggagctcttcaagtcttggatgagactgtagagcggtcttgtgcggcaatgtgctaccttaaaataaataaataaataaacccctgttatgtccggagtttgtttccacccggagaggaatggaagagcaccagagagcgcttagctttctggttggatgttttgggctctgaggtcagcttggagaagaaaaaaaagattaagatgccagtgaagagacttcgtgaggtagtttctcaaaatcatggagatcatttggttttgctgaaagatgagttgccctgtgttcctccggcattgtctgcaaataaacgtcttcctgttggaacggggactagtttgaatggaacatcacgtggttcatcagacttaacttctgctagaaattgttaccagcctctattagaaaatcccatggtgtcagaaagtgatttttctaaagacgttgcagtgcaagtgttgcctttggataaaatagaagagaacaacaagcaaaaagcaaatgacatcttcatttctcagtatacaatgggacagaaagatgctctaagaacagttttaaagcaaaaagctcaaagcatgcctgtttttaaggaagtaaaggtacatctgttagaagatgcaggcatagagaaggatgctgttactcaggagactagaatttcacccagtggaattgattcagctacaaccgtggctgcagcaactgctgctgccattgcaaccgcagctccgttgataaaggtgcagagtgatttggaagcaaaagtcaattctgttacagaattacttagtaaattacaggagactgataaacacctgcaacgtgttacagagcagcaaacaagcattcagaggaaacaagagaaattacattgtcatgatcacgaaaagcaaatgaatgtgtttatggagcagcacataaggcatcttgaaaagttacaacaacaacaaatagatattcagactcattttattagtgctgcactcaagactagtagttttcagcctgttagtatgccctcctccagagcagtggaaaagtattccgtaaaaccagaacaccctaatcttggtagctgtaatccatctttatataacacatttgcttccaaacaagcacctttaaaagaagttgaagatacgagttttgataaacagaaatctcctttggagacaccagcacctcgcagatttgctcctgtacctgtttcaagggatgatgaactatcaaagagggaaaatcttttggaagaaaaagaaaatatggaagtgtcatgtcacagaggaaatgtaagactattggaacaaattttgaataataatgattctttgacaagaaaaagtgaatcatcaaacaccacctcactaactaggtcaaaaataggatggactcctgagaaaacaaacagatttccttcctgtgaagagctagaaacaactaaagtgactatgcagaagtctgatgatgttcttcatgaccttggccaaaaagagaaagaaacaaatagcatggtccagccaaaagaatctctgagtatgttgaagcttccagatcttccacagaattctgttaagcttcaaacaaccaatacaacaagatctgtattgaaagatgctgagaagattttgagaggagtacaaaacaataaaaaagtacttgaagaaaacctggaagctattattcgtgcaaaagatggagctgccatgtattcgcttatcaatgctttatctaccaacagagagatgtcagagaaaattaggatcagaaagacagtggatgaatggattaaaactatttctgcagaaattcaggatgaactgtcaagaacagattatgaacaaaaaagatttgatcagaagaatcagagaaccaagaaaggtcagaatatgactaaagatattagaaccaacacacaagataaaactgtcaacaaatctgtaattccaagaaaacattctcaaaagcaaatagaagagcattttagaaatctacctatgaggggcatgcctgcttcaagtttacagaaagagagaaaggaagggcttttgaaagcaaccacagtaatacaagatgaagattatatgttacaagtctatggaaagccagtttatcagggccatcgaagcactcttaaaaaaggaccatatctcagatttaattctccatctcctaagtccagaccacagagaccaaaagtaatagaacgagttaaaggcactaaggtaaagtcaataagaacacagactgacttctatgcaacaaaacctaagaagatggattctaaaatgaaacattctgttcctgtgttacctcatggcgatcagcaatatttgttcagcccaagtagagaaatgcctactttttcaggtacattggaaggtcatctgattcctatggcaattcttttaggacaaacccaaagtaatagtgataccatgccacctgctggagtgattgtcagcaagccacaccctgtaactgtgactacttctattcctccatcatctcgaaaagtagaaactggagtaaagaaacctaacatagccattgtagaaatgaagtcagaaaaaaaggatcctcctcagcttactgtgcaggtattacccagtgtagatattgacagcatttcaaatagtagtgctgatgtcctttcacctctgtctagccccaaagaagcatctcctcctcctgtgcaaacttggataaagactccagaaattatgaaggtagatgaagaagaggtgaagtttccaggaactaactttgatgaaataatcgatgtcatacaggaagaagaaaaatgtgatgaaattccagactctgaaccaattctggagtttaacagaagtgttaaagctgattctacaaaatataatggtcctccatttccgccagttgcttctacttttcagcccactgctgatattctggataaagtaattgagagaaaagaaacactggaaaatagcttaattcaatgggtagagcaagaaataatgtcaagaattatctctgggctctttccagtccagcaacagattgcacctagtatcagtgtttcagtcagtgagacaagtgaaccactgacttctgacattgtggaaggaacaagcagtggcgccctccagctttttgttgatgctggtgttcctgtgaactcaaatgtgattaaacattttgttaacgaagctcttgctgagaccattgctgtcatgctgggtgacagagaagcaaagaagcaaggtcctgttgctacaggtgtttctggggatgcttcaacaaatgaaacatatttgccggcaagagtgtgcaccccactggctaccccacagcctacgcctccttgctcaccttcatcacctgctaaggagtgtgttttggtaaagactccagattcttctccctgtgattcggatcatgatatggcttttcctgtgaaagaaatatgtgctgaaaaaggagatgatatgcctgccatcatgcttgttaatactccaacagttacccctactactacacctcctccagcggcggcagtttttaccccaactttgtcagatatttccattgataaattgaaggtatcaagcccagagcttcccaagccatggggtgatggagacctgccactggaagaagagaaccctaactcacctcaagaagaacttcatccaagagctattgtaatgtctgtggctaaggatgaagaaccagagagtatggatttccctgctcagcctccacctccagagccagttccctttatgccatttcctgccggcaccaaggccccttccccctcacagatgccaggttctgattcatcaacactggagagcacattgagtgttactgtcactgaaactgaaactttagataaacccatctctgaaggagagattttatttagctgtggtcaaaaattggcccccaagattttagaagatataggactgtacctgacaaaccttaatgatagcttatccagcactctgcatgatgccgttgaaatggaggatgatcctcctagtgaagggcaagtgattaggatgtcccataaaaaatttcatgcagatgcaattctttcttttgctaaacaaaaccaggagtcagcagtttcccagcaagcagtctatcattcagaggacttggaaaacagtgtgggtgaacttagtgaaggacaaagaccccagctaacagcggcagcagagaacatcttaatgggacattctctctatatgcagccacctgtcactaatacacagtctttggatcaacaatgtgatcctaaaccattatctcggcaatttgacacagtttcaggtagtatttatgaagattcatgtgctagtcatggtccaatgagtttgggagaattggagttggagccaaattctaagctggttcttcccacaacacttctgacagcacaagaaaatgatgttaatttaccagtagccgctgaagatttttcccagtaccaactaaagcaaaatcaggatgttaagcaagttgaacacaaaccatcacaaagttacctacgtgttagaaataaatctgatattgcaccttcacagcaacaagtttcaccaggtgatatggatcggacacaaattgagcttaatccgtacctcacatgtgtattttcaggtgggaaagcagtgccactctccgcttcacagatgccccctgccaagatgtcagtgatgctgccgtcagtgaacctcgaggactgctctcagtctctgagtctcagcacaatgcaggaggacatggagtcttcgggggcagataccttctgaacgggaagagacagccagcacagtgtttatgccactggttttaaagtcattttaccttggcttaaaaccctctctcagactgtttggtttttgagcatattctgaaaaaaaaattccaatattttaaaataaaacaaaaagcataatttgggtatttaaagtttttaaataaaataagtataagtcattataagtctgattgtgagttgtttcttagaatcctgagatagcatagagtagtgaaagggcatggcttttgacatctaggcatttaatctataggtgtaattatctgtatgtatttataaaattatgtagctcaaggttattcattctaacatttttataacagcaaatagaaaaaatcaaatgtctatcaataatagactggttttaaagtgatggtacatcagtacaatggaatactatgtattacaaaaaaaaatttaaaaagtttattgatatggaataatctttgagatgcactgttaaagtgaaaaaagccatgtgcaaaatagtgtgtgaactatgcagttgttgaaattatttaaaatggggtggggaggaattcaaatgtatggtatgtcacatattcttacatgtatttgcttgtaaatatattatataaacaagaaactgtctaagtttgtctccagggagtagaattgttggctgggtgataggagaggctaagtgataggaatcaaggataatcgtggttactatgtatttgaacttcagttgtgatagaaaaaaatcatcagtgagattaatttttatatgccttatgtataccatataaacctttataaacct

SEQ ID NO: 346136 - DNA, 4859 bp, Homo sapiens
agcggagggcagtgggtgttgacctgcgggcaactgacgctgttgtcagattacacccacgacggtgcgggtctcgggcgttctggagatacgtaggggtgaatttatgtttccgacgattgcatctggaggggttcatcagacttaacttctgctagaaattgttaccagcctctattagaaaatcccatggtgtcagaaagtgatttttctaaagacgttgcagtgcaagtgttgcctttggataaaatagaagagaacaacaagcaaaaagcaaatgacatcttcatttctcagtatacaatgggacagaaagatgctctaagaacagttttaaagcaaaaagacagggtttgccatgttgcccagctggtcttgaactcctgggctcaagcagtcttcctgcctcagcctcccacagtgctaggattacagagctcaaagcatgcctgtttttaaggaagtaaaggtacatctgttagaagatgcaggcatagagaaggatgctgttactcaggagactagaatttcacccagtggaattgattcagctacaaccgtggctgcagcaactgctgctgccattgcaaccgcagctccgttgataaaggtgcagagtgatttggaagcaaaagtcaattctgttacagaattacttagtaaattacaggagactgataaacacctgcaacgtgttacagagcagcaaacaagcattcagaggaaacaagagaaattacattgtcatgatcacgaaaagcaaatgaatgtgtttatggagcagcacataaggcatcttgaaaagttacaacaacaacaaatagatattcagactcattttattagtgctgcactcaagactagtagttttcagcctgttagtatgccctcctccagagcagtggaaaagtattccgtaaaaccagaacaccctaatcttggtagctgtaatccatctttatataacacatttgcttccaaacaagcacctttaaaagaagttgaagatacgagttttgataaacagaaatctcctttggagacaccagcacctcgcagatttgctcctgtacctgtttcaagggatgatgaactatcaaagagggaaaatcttttggaagaaaaagaaaatatggaagtgtcatgtcacagaggaaatgtaagactattggaacaaattttgaataataatgattctttgacaagaaaaagtgaatcatcaaacaccacctcactaactaggtcaaaaataggatggactcctgagaaaacaaacagatttccttcctgtgaagagctagaaacaactaaagtgactatgcagaagtctgatgatgttcttcatgaccttggccaaaaagagaaagaaacaaatagcatggtccagccaaaagaatctctgagtatgttgaagcttccagatcttccacagaattctgttaagcttcaaacaaccaatacaacaagatctgtattgaaagatgctgagaagattttgagaggagtacaaaacaataaaaaagtacttgaagaaaacctggaagctattattcgtgcaaaagatggagctgccatgtattcgcttatcaatgctttatctaccaacagagagatgtcagagaaaattaggatcagaaagacagtggatgaatggattaaaactatttctgcagaaattcaggatgaactgtcaagaacagattatgaacaaaaaagatttgatcagaagaatcagagaaccaagaaaggtcagaatatgactaaagatattagaaccaacacacaagataaaactgtcaacaaatctgtaattccaagaaaacattctcaaaagcaaatagaagagcattttagaaatctacctatgaggggcatgcctgcttcaagtttacagaaagagagaaaggaagggcttttgaaagcaaccacagtaatacaagatgaagattatatgttacaagtctatggaaagccagtttatcagggccatcgaagcactcttaaaaaaggaccatatctcagatttaattctccatctcctaagtccagaccacagagaccaaaagtaatagaacgagttaaaggcactaaggtaaagtcaataagaacacagactgacttctatgcaacaaaacctaagaagatggattctaaaatgaaacattctgttcctgtgttacctcatggcgatcagcaatatttgttcagcccaagtagagaaatgcctactttttcaggtacattggaaggtcatctgattcctatggcaattcttttaggacaaacccaaagtaatagtgataccatgccacctgctggagtgattgtcagcaagccacaccctgtaactgtgactacttctattcctccatcatctcgaaaagtagaaactggagtaaagaaacctaacatagccattgtagaaatgaagtcagaaaaaaaggatcctcctcagcttactgtgcaggtattacccagtgtagatattgacagcatttcaaatagtagtgctgatgtcctttcacctctgtctagccccaaagaagcatctcctcctcctgtgcaaacttggataaagactccagaaattatgaaggtagatgaagaagaggtgaagtttccaggaactaactttgatgaaataatcgatgtcatacaggaagaagaaaaatgtgatgaaattccagactctgaaccaattctggagtttaacagaagtgttaaagctgattctacaaaatataatggtcctccatttccgccagttgcttctacttttcagcccactgctgatattctggataaagtaattgagagaaaagaaacactggaaaatagcttaattcaatgggtagagcaagaaataatgtcaagaattatctctgggctctttccagtccagcaacagattgcacctagtatcagtgtttcagtcagtgagacaagtgaaccactgacttctgacattgtggaaggaacaagcagtggcgccctccagctttttgttgatgctggtgttcctgtgaactcaaatgtgattaaacattttgttaacgaagctcttgctgagaccattgctgtcatgctgggtgacagagaagcaaagaagcaaggtcctgttgctacaggtgtttctggggatgcttcaacaaatgaaacatatttgccggcaagagtgtgcaccccactggctaccccacagcctacgcctccttgctcaccttcatcacctgctaaggagtgtgttttggtaaagactccagattcttctccctgtgattcggatcatgatatggcttttcctgtgaaagaaatatgtgctgaaaaaggagatgatatgcctgccatcatgcttgttaatactccaacagttacccctactactacacctcctccagcggcggcagtttttaccccaactttgtcagatatttccattgataaattgaaggtatcaagcccagagcttcccaagccatggggtgatggagacctgccactggaagaagagaaccctaactcacctcaagaagaacttcatccaagagctattgtaatgtctgtggctaaggatgaagaaccagagagtatggatttccctgctcagcctccacctccagagccagttccctttatgccatttcctgccggcaccaaggccccttccccctcacagatgccaggttctgattcatcaacactggagagcacattgagtgttactgtcactgaaactgaaactttagataaacccatctctgaaggagagattttatttagctgtggtcaaaaattggcccccaagattttagaagatataggactgtacctgacaaaccttaatgatagcttatccagcactctgcatgatgccgttgaaatggaggatgatcctcctagtgaagggcaagtgattaggatgtcccataaaaaatttcatgcagatgcaattctttcttttgctaaacaaaaccaggagtcagcagtttcccagcaagcagtctatcattcagaggacttggaaaacagtgtgggtgaacttagtgaaggacaaagaccccagctaacagcggcagcagagaacatcttaatgggacattctctctatatgcagccacctgtcactaatacacagtctttggatcaacaatgtgatcctaaaccattatctcggcaatttgacacagtttcaggtagtatttatgaagattcatgtgctagtcatggtccaatgagtttgggagaattggagttggagccaaattctaagctggttcttcccacaacacttctgacagcacaagaaaatgatgttaatttaccagtagccgctgaagatttttcccagtaccaactaaagcaaaatcaggatgttaagcaagttgaacacaaaccatcacaaagttacctacgtgttagaaataaatctgatattgcaccttcacagcaacaagtttcaccaggtgatatggatcggacacaaattgagcttaatccgtacctcacatgtgtattttcaggtgggaaagcagtgccactctccgcttcacagatgccccctgccaagatgtcagtgatgctgccgtcagtgaacctcgaggactgctctcagtctctgagtctcagcacaatgcaggaggacatggagtcttcgggggcagataccttctgaacgggaagagacagccagcacagtgtttatgccactggttttaaagtcattttaccttggcttaaaaccctctctcagactgtttggtttttgagcatattctgaaaaaaaaattccaatattttaaaataaaacaaaaagcataatttgggtatttaaagtttttaaataaaataagtataagtca

SEQ ID NO: 346137 - DNA, 5153 bp, Homo sapiens
agcggagggcagtgggtgttgacctgcgggcaactgacgctgttgtcagattacacccacgacggtgcgggtctcgggcgttctggagatacgtaggggtgaatttatgtttccgacgattgcatctggaggggttcatcagacttaacttctgctagaaattgttaccagcctctattagaaaatcccatggtgtcagaaagtgatttttctaaagacgttgcagtgcaagtgttgcctttggataaaatagaagagaacaacaagcaaaaagcaaatgacatcttcatttctcagtatacaatgggacagaaagatgctctaagaacagttttaaagcaaaaagacagggtttgccatgttgcccagctggtcttgaactcctgggctcaagcagtcttcctgcctcagcctcccacagtgctaggattacagagctcaaagcatgcctgtttttaaggaagtaaaggtacatctgttagaagatgcaggcatagagaaggatgctgttactcaggagactagaatttcacccagtggaattgattcagctacaaccgtggctgcagcaactgctgctgccattgcaaccgcagctccgttgataaaggtgcagagtgatttggaagcaaaagtcaattctgttacagaattacttagtaaattacaggagactgataaacacctgcaacgtgttacagagcagcaaacaagcattcagaggaaacaagagaaattacattgtcatgatcacgaaaagcaaatgaatgtgtttatggagcagcacataaggcatcttgaaaagttacaacaacaacaaatagatattcagactcattttattagtgctgcactcaagactagtagttttcagcctgttagtatgccctcctccagagcagtggaaaagtattccgtaaaaccagaacaccctaatcttggtagctgtaatccatctttatataacacatttgcttccaaacaagcacctttaaaagaagttgaagatacgagttttgataaacagaaatctcctttggagacaccagcacctcgcagatttgctcctgtacctgtttcaagggatgatgaactatcaaagagggaaaatcttttggaagaaaaagaaaatatggaagtgtcatgtcacagaggaaatgtaagactattggaacaaattttgaataataatgattctttgacaagaaaaagtgaatcatcaaacaccacctcactaactaggtcaaaaataggatggactcctgagaaaacaaacagatttccttcctgtgaagagctagaaacaactaaagtgactatgcagaagtctgatgatgttcttcatgaccttggccaaaaagagaaagaaacaaatagcatggtccagccaaaagaatctctgagtatgttgaagcttccagatcttccacagaattctgttaagcttcaaacaaccaatacaacaagatctgtattgaaagatgctgagaagattttgagaggagtacaaaacaataaaaaagtacttgaagaaaacctggaagctattattcgtgcaaaagatggagctgccatgtattcgcttatcaatgctttatctaccaacagagagatgtcagagaaaattaggatcagaaagacagtggatgaatggattaaaactatttctgcagaaattcaggatgaactgtcaagaacagattatgaacaaaaaagatttgatcagaagaatcagagaaccaagaaaggtcagaatatgactaaagatattagaaccaacacacaagataaaactgtcaacaaatctgtaattccaagaaaacattctcaaaagcaaatagaagagcattttagaaatctacctatgaggggcatgcctgcttcaagtttacagaaagagagaaaggaagggcttttgaaagcaaccacagtaatacaagatgaagattatatgttacaagtctatggaaagccagtttatcagggccatcgaagcactcttaaaaaaggaccatatctcagatttaattctccatctcctaagtccagaccacagagaccaaaagtaatagaacgagttaaaggcactaaggtaaagtcaataagaacacagactgacttctatgcaacaaaacctaagaagatggattctaaaatgaaacattctgttcctgtgttacctcatggcgatcagcaatatttgttcagcccaagtagagaaatgcctactttttcaggtacattggaaggtcatctgattcctatggcaattcttttaggacaaacccaaagtaatagtgataccatgccacctgctggagtgattgtcagcaagccacaccctgtaactgtgactacttctattcctccatcatctcgaaaagtagaaactggagtaaagaaacctaacatagccattgtagaaatgaagtcagaaaaaaaggatcctcctcagcttactgtgcaggtattacccagtgtagatattgacagcatttcaaatagtagtgctgatgtcctttcacctctgtctagccccaaagaagcatctcctcctcctgtgcaaacttggataaagactccagaaattatgaaggtagatgaagaagaggtgaagtttccaggaactaactttgatgaaataatcgatgtcatacaggaagaagaaaaatgtgatgaaattccagactctgaaccaattctggagtttaacagaagtgttaaagctgattctacaaaatataatggtcctccatttccgccagttgcttctacttttcagcccactgctgatattctggataaagtaattgagagaaaagaaacactggaaaatagcttaattcaatgggtagagcaagaaataatgtcaagaattatctctgggctctttccagtccagcaacagattgcacctagtatcagtgtttcagtcagtgagacaagtgaaccactgacttctgacattgtggaaggaacaagcagtggcgccctccagctttttgttgatgctggtgttcctgtgaactcaaatgtgattaaacattttgttaacgaagctcttgctgagaccattgctgtcatgctgggtgacagagaagcaaagaagcaaggtcctgttgctacaggtgtttctggggatgcttcaacaaatgaaacatatttgccggcaagagtgtgcaccccactggctaccccacagcctacgcctccttgctcaccttcatcacctgctaaggagtgtgttttggtaaagactccagattcttctccctgtgattcggatcatgatatggcttttcctgtgaaagaaatatgtgctgaaaaaggagatgatatgcctgccatcatgcttgttaatactccaacagttacccctactactacacctcctccagcggcggcagtttttaccccaactttgtcagatatttccattgataaattgaaggtatcaagcccagagcttcccaagccatggggtgatggagacctgccactggaagaagagaaccctaactcacctcaagaagaacttcatccaagagctattgtaatgtctgtggctaaggatgaagaaccagagagtatggatttccctgctcagcctccacctccagagccagttccctttatgccatttcctgccggcaccaaggccccttccccctcacagatgccaggttctgattcatcaacactggagagcacattgagtgttactgtcactgaaactgaaactttagataaacccatctctgaaggagagattttatttagctgtggtcaaaaattggcccccaagattttagaagatataggactgtacctgacaaaccttaatgatagcttatccagcactctgcatgatgccgttgaaatggaggatgatcctcctagtgaagggcaagtgattaggatgtcccataaaaaatttcatgcagatgcaattctttcttttgctaaacaaaaccaggagtcagcagtttcccagcaagcagtctatcattcagaggacttggaaaacagtgtgggtgaacttagtgaaggacaaagaccccagctaacagcggcagcagagaacatcttaatgggacattctctctatatgcagccacctgtcactaatacacagtctttggatcaacaatgtgatcctaaaccattatctcggcaatttgacacagtttcaggtagtatttatgaagattcatgtgctagtcatggtccaatgagtttgggagaattggagttggaacctcgaggactgctctcagtctctgagtctcagcacaatgcaggaggacatggagtcttcgggggcagataccttctgaacgggaagagacagccagcacagtgtttatgccactggttttaaagtcattttaccttggcttaaaaccctctctcagactgtttggtttttgagcatattctgaaaaaaaaattccaatattttaaaataaaacaaaaagcataatttgggtatttaaagtttttaaataaaataagtataagtcattataagtctgattgtgagttgtttcttagaatcctgagatagcatagagtagtgaaagggcatggcttttgacatctaggcatttaatctataggtgtaattatctgtatgtatttataaaattatgtagctcaaggttattcattctaacatttttataacagcaaatagaaaaaatcaaatgtctatcaataatagactggttttaaagtgatggtacatcagtacaatggaatactatgtattacaaaaaaaaatttaaaaagtttattgatatggaataatctttgagatgcactgttaaagtgaaaaaagccatgtgcaaaatagtgtgtgaactatgcagttgttgaaattatttaaaatggggtggggaggaattcaaatgtatggtatgtcacatattcttacatgtatttgcttgtaaatatattatataaacaagaaactgtctaagtttgtctccagggagtagaattgttggctgggtgataggagaggctaagtgataggaatcaaggataatcgtggttactatgtatttgaacttcagttgtgatagaaaaaaatcatcagtgagattaatttttatatgccttatgtataccatataaacctttataaacct

SEQ ID NO: 346138 - DNA, 4666 bp, Homo sapiens
agcggagggcagtgggtgttgacctgcgggcaactgacgctgttgtcagattacacccacgacggtgcgggtctcgggcgttctggagatacgtaggggtgaatttatgtttccgacgattgcatctggaggggttcatcagacttaacttctgctagaaattgttaccagcctctattagaaaatcccatggtgtcagaaagtgatttttctaaagacgttgcagtgcaagtgttgcctttggataaaatagaagagaacaacaagcaaaaagcaaatgacatcttcatttctcagtatacaatgggacagaaagatgctctaagaacagttttaaagcaaaaagacagggtttgccatgttgcccagctggtcttgaactcctgggctcaagcagtcttcctgcctcagcctcccacagtgctaggattacagagctcaaagcatgcctgtttttaaggaagtaaaggtacatctgttagaagatgcaggcatagagaaggatgctgttactcaggagactagaatttcacccagtggaattgattcagctacaaccgtggctgcagcaactgctgctgccattgcaaccgcagctccgttgataaaggtgcagagtgatttggaagcaaaagtcaattctgttacagaattacttagtaaattacaggagactgataaacacctgcaacgtgttacagagcagcaaacaagcattcagaggaaacaagagaaattacattgtcatgatcacgaaaagcaaatgaatgtgtttatggagcagcacataaggcatcttgaaaagttacaacaacaacaaatagatattcagactcattttattagtgctgcactcaagactagtagttttcagcctgttagtatgccctcctccagagcagtggaaaagtattccgtaaaaccagaacaccctaatcttggtagctgtaatccatctttatataacacatttgcttccaaacaagcacctttaaaagaagttgaagatacgagttttgataaacagaaatctcctttggagacaccagcacctcgcagatttgctcctgtacctgtttcaagggatgatgaactatcaaagagggaaaatcttttggaagaaaaagaaaatatggaagtgtcatgtcacagaggaaatgtaagactattggaacaaattttgaataataatgattctttgacaagaaaaagtgaatcatcaaacaccacctcactaactaggtcaaaaataggatggactcctgagaaaacaaacagatttccttcctgtgaagagctagaaacaactaaagtgactatgcagaagtctgatgatgttcttcatgaccttggccaaaaagagaaagaaacaaatagcatggtccagccaaaagaatctctgagtatgttgaagcttccagatcttccacagaattctgttaagcttcaaacaaccaatacaacaagatctgtattgaaagatgctgagaagattttgagaggagtacaaaacaataaaaaagtacttgaagaaaacctggaagctattattcgtgcaaaagatggagctgccatgtattcgcttatcaatgctttatctaccaacagagagatgtcagagaaaattaggatcagaaagacagtggatgaatggattaaaactatttctgcagaaattcaggatgaactgtcaagaacagattatgaacaaaaaagatttgatcagaagaatcagagaaccaagaaaggtcagaatatgactaaagatattagaaccaacacacaagataaaactgtcaacaaatctgtaattccaagaaaacattctcaaaagcaaatagaagagcattttagaaatctacctatgaggggcatgcctgcttcaagtttacagaaagagagaaaggaagggcttttgaaagcaaccacagtaatacaagatgaagattatatgttacaagtctatggaaagccagtttatcagggccatcgaagcactcttaaaaaaggaccatatctcagatttaattctccatctcctaagtccagaccacagagaccaaaagtaatagaacgagttaaaggcactaaggtaaagtcaataagaacacagactgacttctatgcaacaaaacctaagaagatggattctaaaatgaaacattctgttcctgtgttacctcatggcgatcagcaatatttgttcagcccaagtagagaaatgcctactttttcaggtacattggaaggtcatctgattcctatggcaattcttttaggacaaacccaaagtaatagtgataccatgccacctgctggagtgattgtcagcaagccacaccctgtaactgtgactacttctattcctccatcatctcgaaaagtagaaactggagtaaagaaacctaacatagccattgtagaaatgaagtcagaaaaaaaggatcctcctcagcttactgtgcaggtattacccagtgtagatattgacagcatttcaaatagtagtgctgatgtcctttcacctctgtctagccccaaagaagcatctcctcctcctgtgcaaacttggataaagactccagaaattatgaaggtagatgaagaagaggtgaagtttccaggaactaactttgatgaaataatcgatgtcatacaggaagaagaaaaatgtgatgaaattccagactctgaaccaattctggagtttaacagaagtgttaaagctgattctacaaaatataatggtcctccatttccgccagttgcttctacttttcagcccactgctgatattctggataaagtaattgagagaaaagaaacactggaaaatagcttaattcaatgggtagagcaagaaataatgtcaagaattatctctgggctctttccagtccagcaacagattgcacctagtatcagtgtttcagtcagtgagacaagtgaaccactgacttctgacattgtggaaggaacaagcagtggcgccctccagctttttgttgatgctggtgttcctgtgaactcaaatgtgattaaacattttgttaacgaagctcttgctgagaccattgctgtcatgctgggtgacagagaagcaaagaagcaaggtcctgttgctacaggtgtttctggggatgcttcaacaaatgaaacatatttgccggcaagagtgtgcaccccactggctaccccacagcctacgcctccttgctcaccttcatcacctgctaaggagtgtgttttggtaaagactccagattcttctccctgtgattcggatcatgatatggcttttcctgtgaaagaaatatgtgctgaaaaaggagatgatatgcctgccatcatgcttgttaatactccaacagttacccctactactacacctcctccagcggcggcagtttttaccccaactttgtcagatatttccattgataaattgaaggtatcaagcccagagcttcccaagccatggggtgatggagacctgccactggaagaagagaaccctaactcacctcaagaagaacttcatccaagagctattgtaatgtctgtggctaaggatgaagaaccagagagtatggatttccctgctcagcctccacctccagagccagttccctttatgccatttcctgccggcaccaaggccccttccccctcacagatgccaggttctgattcatcaacactggagagcacattgagtgttactgtcactgaaactgaaactttagataaacccatctctgaaggagagattttatttagctgtggtcaaaaattggcccccaagattttagaagatataggactgtacctgacaaaccttaatgatagcttatccagcactctgcatgatgccgttgaaatggaggatgatcctcctagtgaagggcaagtgattaggatgtcccataaaaaatttcatgcagatgcaattctttcttttgctaaacaaaaccaggagtcagcagtttcccagcaagcagtctatcattcagaggacttggaaaacagtgtgggtgaacttagtgaaggacaaagaccccagctaacagcggcagcagagaacatcttaatgggacattctctctatatgcagccacctgtcactaatacacagtctttggatcaacaatgtgatcctaaaccattatctcggcaatttgacacagtttcaggtagtatttatgaagattcatgtgctagtcatggtccaatgagtttgggagaattggagttggagccaaattctaagctggttcttcccacaacacttctgacagcacaagaaaatgatgttaatttaccagtagccgctgaagatttttcccagtaccaactaaagcaaaatcaggatgttaagcaagttgaacacaaaccatcacaaagttacctacgtgttagaaataaatctgatattgcaccttcacagcaacaagttttgatcagcaggataaagaattgtaagaactgacaaacttgagaagcagttttcaagttgtgttgacctagttgtaggccgtgtttgctgttttaatcatcaactgcagagcacaatactcacccttccagtaaacctcgtaaatcaacaagtgagaattatgaagccacttacttgttataagaataaaagtggtcaactctgatactg

SEQ ID NO: 346139 - DNA, 1053 bp, Homo sapiens
gtttgggggtacatgtgaagaaggtttcctgtataggtaaactcgggccgtggaggtttgtcatacagattatttcatcacccaggtgggaaagcagtgccactctccgcttcacagatgccccctgccaagatgtcagtgatgctgccgtcagtgaacctcgaggactgctctcagtctctgagtctcagcacaatgcaggaggacatggagtcttcgggggcagataccttctgaacgggaagagacagccagcacagtgtttatgccactggttttaaagtcattttaccttggcttaaaaccctctctcagactgtttggtttttgagcatattctgaaaaaaaaattccaatattttaaaataaaacaaaaagcataatttgggtatttaaagtttttaaataaaataagtataagtcattataagtctgattgtgagttgtttcttagaatcctgagatagcatagagtagtgaaagggcatggcttttgacatctaggcatttaatctataggtgtaattatctgtatgtatttataaaattatgtagctcaaggttattcattctaacatttttataacagcaaatagaaaaaatcaaatgtctatcaataatagactggttttaaagtgatggtacatcagtacaatggaatactatgtattacaaaaaaaaatttaaaaagtttattgatatggaataatctttgagatgcactgttaaagtgaaaaaagccatgtgcaaaatagtgtgtgaactatgcagttgttgaaattatttaaaatggggtggggaggaattcaaatgtatggtatgtcacatattcttacatgtatttgcttgtaaatatattatataaacaagaaactgtctaagtttgtctccagggagtagaattgttggctgggtgataggagaggctaagtgataggaatcaaggataatcgtggttactatgtatttgaacttcagttgtgatagaaaaaaatcatcagtgagattaatttttatatgccttatgtataccatataaacctttataaacct

SEQ ID NO: 346140 - DNA, 278 bp, Homo sapiens
aggtccttccccagacacctgaagagatgggggaaggagaatcaatttggagagccaagtttgcctgacattttggagcacacatttacccaggaccccaagttccttgtagctgctaaatgctgtactagttctaaaatgtaaattagcttcaagatgtttccatgaagaaaaatcccgccttcaacttctacgttattcatcctgcttttagaaatgacccttgccctgatctgaggtggaagaaataaaggtctggtaaagaaatgatatgctta

SEQ ID NO: 346141 - DNA, 632 bp, Homo sapiens
gtggatacatttaaaaattatcatgtaggtaatttagagtatgtcattctatgtctttgctagaaatgataccaaaatattattttttaaaaattaggttattttttgaataagtggtatattcatggcagagaatttagaaaaggcagatacaaggaaattaatttttaaaataacctataattttatcacctagagaaaatctgtcagtagtttaaggtatttctttctagatttttctagattttaattatctttcaaagttgggatcatactgtatatagaaattggaaaggaccactactgttcccatcaacatagcataaataataatcattgaaagaaaattttagatctttctagcagagtgagtcaagtagccaagtattttcaatgatttcatctggttaaagcattgtgacatttccttaaccttttgctgtaagtattatagtatttagaactaattatttacaaattaaacacagattctgtgtggaaggaaagttgcttgagtattgtcaccttaatgattgtatattggtcattgtactggaaattatccagtgcaaaataggatatcatcaactataaaagaaaataagaagtagtcatttaatttgtatggctag

SEQ ID NO: 346142 - DNA, 198 bp, Homo sapiens
atagacacacacaacacgcacaccacacacacaaaacactccacatcgacacacaactcacgcacaaaccacacacacacaacatgccacataggcacacacaccacgcacaccacacacacacaaaacactccatgtcgacacacaaatcacacacaaaccacacacacaaaacactccacatagacacacatacca

SEQ ID NO: 346143 - DNA, 449 bp, Homo sapiens
taaaattcagggaagtgatggtgtgtgacttgtgacactagatccgaaaagacacggtgatgtctgacttgttctcttggatgtctctccctgagtgaagccagctacttttcatgaggatactcaagcattcctatggagagatccacatggtgagaaactgaagcctcctaccaagagccagcaccaacttgccagctatgtgaatgagccatcttagaagtgggttctctagccctagtcaggccttcatatgactgcagccagggctgatattttgactacaacctcatgagagactgagccacaacaacctagctaagaagctcctgaattccctaccaacagaaactatgtgagataatgtttgttgttttaactaagttttcaagtggtaatttgttatacagaatatgtaactaataaagcatggctcctttaggtctaaa

SEQ ID NO: 346144 - DNA, 211 bp, Homo sapiens
cagtgcaattcaccaccataaagaattaaaagagactaatcatatagtcatcttataagagggtaagggagacacctgataaaatgtgtaactgttattcctgattaagctcctagcaaactaagaactgaatggaacttccctgacttgataaggccatctactactgcagctactatgaaacttaacagcgatgcactggaagcattct

SEQ ID NO: 346145 - DNA, 740 bp, Homo sapiens
cctcctatgctgcatcctgcctgtggtttagatttgagatagggacccctactttctttcccctaagagcagatctgtgtcattggctataactgctttctggtcagccacatgacacgtggacttaacagatggtttctaataagattgaaagcatatcttgactccacttacctggccagcactggagaaaggaagattaagagagatttggatgagtgtccttgtcacataacttcccctccctagaaaacttggtccaatacgttgtaatctggtggtgcaaactcacaacttttcttcccttctgtgagtgtgtatatatgtgagtttattgtatgtgtgtgtaaggtgtgaatgtgtatgtgaagtctgtgtgtgatgtgtgtatatttgaatgtcctgtgcatgagtttttttgtgactgaagtgtgtgtgaggtgtctgtatgtgggatgtgtgtgtctgtgaggtgattgtgtatgaggaatgtacatctgtgtctgtggtatatagaaaacgtgtgtgtggtgtatgcacttgctgtgtctgcatatgcatgaattgagtatgtgacttgagtattgtgtgtgtaggaggaggggggaagtaaaaaggcaaggtgacagtagagactggacaaatgaacatagccgggcactattcctttaactcctagaacagacataacttgaagtgatctagacttgaactttggagtatgaagttccagccagctg

SEQ ID NO: 346146 - DNA, 1098 bp, Homo sapiens
aagtgattctcctgcctcagcttcctgagtagctgggattacaggcatgtgccgccgtgcccggctaatttgtatttttagtagagatggggtttcaccatgttggccaggctggtctcaaactcctgacctcaggtgaccccacccgcctcggcctcccaaagtgctgggattacaggcgtcagccactgcgcctggctgagtctgtgctcttaaccatcacattatactgattctcataggccactatagtaatgtgcttagtgtgtatctctatgtgtttttgcaaaatctgtatttaatttatataaatggtattgtgttatagatctcatttcacctcttactatttttttttttgagacagagtctcgctgtagtgtgcagtggtgcaatctcagctcactgcaacctcccaagttcaagcgattcttctgcctcagcctcccgactagctgagataataggtgcccaccaccacgcctggcgaatttttgtatttttggtagagacggggtttcaccatgttggccaggctggtctcaaacttctgacttcaactgatccacctgtctcagcctcccaaagtgttgggattacaggcgtgagccactgtgccccaccacttttttttttcgaagctctatgttttaaaacccatccgtgtttctccaccgctgatggaacttgtgcctgctttccatgggggcagcacccaccattatacttgtcccctctctgtgtgcgaagggctcaccagccttcaggactggccacctctgtagcctctccttcagtccttccctgcatctagcctgggctctagaagtgctgacttcccagtacatcctagaatgtgcaccagtatgtcacgcctctgtgcctttgttcttcaaggccagtggaatatcccggatcacctagttccaatctcctcattttacagaatcatcctacattttacagaggaggagaataagcttagaaacaatgacctgcttgagaccgtacaaccagaaccccaccctttatctctggccagcctcttctccctcttctctttagtcctcctctgctgctcactggccgaagtcccct

SEQ ID NO: 346147 - DNA, 485 bp, Homo sapiens
ggctcggtaccgtactgcgctggatatgccggctccaggaatgtatgctcatctggttgccctgcagcaccacatccggcctgctttccatgggggcagcacccaccattatacttgtcccctctctgtgtgcgaagggctcaccagccttcaggactggccacctctgtagcctctccttcagtccttccctgcatctagcctgggctctagaagtgctgacttcccagtacatcctagaatgtgcaccagtatgtcacgcctctgtgcctttgttcttcaaggccagtggaatatcccggatcacctagttccaatctcctcattttacagaatcatcctacattttacagaggaggagaataagcttagaaacaatgacctgcttgagaccgtacaaccagaaccccaccctttatctctggccagcctcttctccctcttctctttagtcctcctctgctgctcactggccgaagtcccct

SEQ ID NO: 346148 - DNA, 579 bp, Homo sapiens
ctaaaggacccccgagcggttatgctgtatgcagaaggagcggatggattctagatggagcgcatgtcgcgaggtttgttctcaacacacacacagagaccaagacacgcacaagcatgtatatccattcatacataaacaaacacgcccacacaagctcacaggccaagagaaacagagacacagatacattcacaggcatacaaacattcataccttcaaatgtaccagtgccgacggacacaggccaggacacacgccagccatgacacatacctgcagaggtacatatgtacacgtgaaccccagacacactcacacccgaccagaaagcatatactttgaagcacagacagagggagcagcacacagaaacacagcagagatcagcagctctgccctggagctgccccctgctggccgtgtgaccccgggggttatgtcacctttctgtgcctcaattttgtcatctgccaaaagggatgataatggtctctccctcataggttgtggggcaggcgacatgagtcacttcacataaaacacataaagaaatctcatcacctcctttgagaatga

SEQ ID NO: 346149 - DNA, 553 bp, Homo sapiens
gtggccaggatgacatcctgggttccagcttgagcaaatggggagaggtttgttctcaacacacacacagagaccaagacacgcacaagcatgtatatccattcatacataaacaaacacgcccacacaagctcacaggccaagagaaacagagacacagatacattcacaggcatacaaacattcataccttcaaatgtaccagtgccgacggacacaggccaggacacacgccagccatgacacatacctgcagaggtacatatgtacacgtgaaccccagacacactcacacccgaccagaaagcatatactttgaagcacagacagagggagcagcacacagaaacacagcagagatcagcagctctgccctggagctgccccctgctggccgtgtgaccccgggggttatgtcacctttctgtgcctcaattttgtcatctgccaaaagggatgataatggtctctccctcataggttgtggggcaggcgacatgagtcacttcacataaaacacataaagaaatctcatcacctcctttgagaatga

SEQ ID NO: 346150 - DNA, 375 bp, Homo sapiens
cccaggtctggagcgaattccagcctgcagggctgataagcgaggcattagtgagattgagagagactttaccccgccgtggtggttggagggcgcgcagtagagcagcagcacaggcgcgggtcccgggaggccggctctgctcgcgccgagatgtggaatctccttcacgaaaccgactcggctgtggccaccgcgcgccgcccgcgctggctgtgcgctggggcgctggtgctggcgggtggcttctttctcctcggcttcctcttcgggtggtttataaaatcctccaatgaagctactaacattactccaaagcataatatgaaagcatttttggatgaattgaaagctgagaacatcaagaagttctta

SEQ ID NO: 346151 - DNA, 466 bp, Homo sapiens
acatggacactgtgttcattcagcaccgtcgttcacagctggagttcaccttaggtcccctgcctggaccctcagccagatgctggccccaaacctctttccttgcttccctaggtcagggacaccagtcccatcctcagacaccagcttgggtggatgtcggctctgggacccacaaaagctaacagcccccaggactgaagagcccttgggtatcatagagcatcttagaaaatgggtgatgcaaggccgggtgtggtggctcacgcctgtaatcccagcattttaggaggccagggcaggaggatcacctgaggtcgggagttccagaccagcctgaccaacatggaaaaaccctgtctctactaaaaatacaaaattagctgggcgtggtggcgcatgcctgtagtcccagctactcgggaggctgaggcaggagaatcacttgaatccaggaggctgaggt

SEQ ID NO: 346152 - DNA, 405 bp, Homo sapiens
tctacgaggatcagacttagaaccctcacagagatgatacggttgtcgtaatgagggtgtttcagtgcctctgcaacgctgctggccccttcggaggggcccagccacatctccactctagccggggtgctgagctcactgtccaagaagctccaatgtatggaggagtggttaaagttcagtggggcctgggggaagtggcaaggatgttggaatactctgggctgcgtgctcctgtctgcccctttttacccctttccctctaggttcagctttctttttcttttttcttttttttttttgagatggagtctcgctctgtcgcccaggctggagtgcagtggtgtgatctcggcttactgcaacctccaccttccgggttcaagcgattctcctgagtagctg

SEQ ID NO: 346153 - DNA, 245 bp, Homo sapiens
gtgccaggctctttttaaacaaccggatcttgtgtgaactcattaccacagaaagggcaccaagccatgcataagggactcgcccccatgacaccagcacctcccacaaggccccacctccaacattgaggaatcacatttcaacatgagatttggagggggcaaacatctaaactatatcaaaagtcgatgattaaacacagtctcatataaatgttctacctcaaaaaaacccaaacattgca

SEQ ID NO: 346154 - DNA, 1369 bp, Homo sapiens
ggcagctttgcaagtccgcgttatatatcgcagtggctgcgcccgggatagctggctgcgccgccgcgcacatgcctaggttcgacgccctcctccctttgcccaggagttccttctgtcccggctctgttccgtctcgccccgaggttcacgccatcctcggagccccagcctttcacccagcgcctccaagctttggaccttgacttctgcaaaactagatggtcacagccatgaatgtctcacatgaagtaaatcagctgttccagccctataacttcgagctgtccaaggacatgaggccctttttcgaggagtattgggcaacctcattccccatagccctgatctacctggttctcatcgctgtggggcagaactacatgaaggaacgcaagggcttcaacctgcaagggcctctcatcctctggtccttctgccttgcaatcttcagtatcctgggggcagtgaggatgtggggcattatggggactgtgctacttaccgggggcctaaagcaaaccgtgtgcttcatcaacttcatcgataattccacagtcaaattctggtcctgggtctttcttctcagcaaggtcatagaactcggagacacagccttcatcatcctgcgtaagcggccactcatctttattcactggtaccaccacagcacagtgctcgtgtacacaagctttggatacaagaacaaagtgcctgcaggaggctggttcgtcaccatgaactttggtgttcatgccatcatgtacacctactacactctgaaggctgccaacgtgaagccccccaagatgctgcccatgctcatcaccagcctgcagatcttgcagatgtttgtaggagccatcgtcagcatcctcacgtacatctggaggcaggatcagggatgccacaccacgatggaacacttattctggtccttcatcttgtatatgacctatttcatcctctttgcccacttcttctgccagacctacatcaggcccaaggtcaaagccaagaccaagagccagtgaaggtttggagagaacaatgaagctccaggctctctcttctccagggcaccaagaggctgggcttagttttgggagaatgattaggttgccttacctgcatggtttccccagaggatgtgtgccccaaggtggctggaatttttgacagacaagaagggtgaccttgggatgggggtgtggtctgttactttaatgtttctgtttttaatgtgaaggccaagcaggccctgggatgggagtggggcggaggagggtcctaagagctgattatttaatttctatccagaaatctttcttcttcttgctctgtttttttaaattaaagatttcaacaa

SEQ ID NO: 346155 - DNA, 1305 bp, Homo sapiens
ggcagctttgcaagtccgcgttatatatcgcagtggctgcgcccgggatagctggctgcgccgccgcgcacatgcctaggttcgacgccctcctccctttgcccaggagttccttctgtcccggctctgttccgtctcgccccgaggttcacgccatcctcggagccccagcctttcacccagcgcctccaagctttggaccttgacttctgcaaaactagatggtcacagccatgaatgtctcacatgaagtaaatcagctgttccagccctataacttcgagctgtccaaggacatgaggccctttttcgaggagtattgggcaacctcattccccatagccctgatctacctggttctcatcgctgtggggcagaactacatgaaggaacgcaagggcttcaacctgcaagggcctctcatcctctggtccttctgccttgcaatcttcagtatcctgggggcagtgaggatgtggggcattatggggactgtgctacttaccgggggcctaaagcaaaccgtgtgcttcatcaacttcatcgataattccacagtcaaattctggtcctgggtctttcttctcagcaaggtcatagaactcgcacagtgctcgtgtacacaagctttggatacaagaacaaagtgcctgcaggaggctggttcgtcaccatgaactttggtgttcatgccatcatgtacacctactacactctgaaggctgccaacgtgaagccccccaagatgctgcccatgctcatcaccagcctgcagatcttgcagatgtttgtaggagccatcgtcagcatcctcacgtacatctggaggcaggatcagggatgccacaccacgatggaacacttattctggtccttcatcttgtatatgacctatttcatcctctttgcccacttcttctgccagacctacatcaggcccaaggtcaaagccaagaccaagagccagtgaaggtttggagagaacaatgaagctccaggctctctcttctccagggcaccaagaggctgggcttagttttgggagaatgattaggttgccttacctgcatggtttccccagaggatgtgtgccccaaggtggctggaatttttgacagacaagaagggtgaccttgggatgggggtgtggtctgttactttaatgtttctgtttttaatgtgaaggccaagcaggccctgggatgggagtggggcggaggagggtcctaagagctgattatttaatttctatccagaaatctttcttcttcttgctctgtttttttaaattaaagatttcaacaa

SEQ ID NO: 346156 - DNA, 456 bp, Homo sapiens
gggtgcattccacagcccctgccccgaggaggtctgagaaggtgaaggaaggccagatgcagagagacagggaatgacaaatgacagctcagatttctcccatggccatgattatgggattctctgcctggggggcagggggcaatagcagtccccacagagaagagcaggacatgggattgggggaggccatgcagggaatgggaggggacaggagccctactttcttgcctttggctctgtccctgtatctgcggcctcagagctcaggtgctaccaagagaccctcacaggagtgacccaggacaggcctcacctccctctaggcctcagtcttcctgtctacaatcagccagtccccaaggtcctgctaggcccatggactcctggcagatggctctgcagggtctgtggggtaaagatggtctcttgagggctccctgacagattcttcgt

SEQ ID NO: 346157 - DNA, 651 bp, Homo sapiens
ggacgttcaggtaatcaaattaaaggaaagctcactatggataaggttagttttgaaacatttcatacagaggttagttatgagacacatcttaagtgtttcaagaattcagactggcagaaaggtagaaggaacagcaaagaggtaagaatcaattgaatgtcccagacaataagaacatcacactgaggaacagtgggaggagactgaataggtgaaacgggtccacatcacaggagtcctggaagggcagggctgagtgggctcttctttgatgctatagacaacaccaccaaaggaaaggctcttgaggagggaaatgacaacataagagccctattttaaacaacttaatcttatcacagtataaaggatggagcagattagagataagacgaccaagaatagatacgctagcacaacagtcttcatgaaaggctaacaaacatggggaaaaaaggttcacactcattaataatcaaagacatgcaaattaaaactataaaacaccattttctggcttaaaaaattagtaaataataaaaactaataatactagcaaagataaagcaatctcaaacactgttggtgggaatataaatggaacggtctttatggaaagccattcagcaatatgcattaataatttta

SEQ ID NO: 346158 - DNA, 690 bp, Homo sapiens
gatcaggttttccaagattttctgaatggatgtggttcccctagtagacctggcttcccatctcccatgttaaggaagatcttctttattaatcccctggctcactagagatcaggaaccccagtgggtagaatgttcagctcccaaggaagatatgctgcagaggcacatggcaaactgcttaaaagaaaaaaacaaaacaaaacaaaaaaagcttgtagtcaacagacatgtgaagagtccctcccatccaatccagaagcttaagtaataatttgagaatctgtacccagtaggaagttagccctaagtctcacccaggtcaccagagggcagttatactttccaattctgcctagaacctccacgcttcagtgcaggacttttaaaaattaaaattatatggagagtctgataaagatttgactttgaaaaatttgggggaagaaaggaaccagacacccaataccaccctcagatagggcatggcttctgaacatgcaccaaatgccacagcactgcatgagttgaaaaatgaagaggacatcattttttcattaatgcttttaggaatttcttttagaagggaaggaaaaagaaattcaaaaaaggtggctctttggggaaaaaaaaaaaatgaaagttgtgaaatgtaataccagaaaggttttgcttaccagaaaccgtagc

SEQ ID NO: 346159 - DNA, 638 bp, Homo sapiens
gagaactatttcctgtgactaaaagtggtttacatattggtgctttagcaggaattttggagggtggcttaagtgaataattaaaacagaaatcttcctagacgatgtttatcacactcaagacattaaaaattagagtcaagggactgctaagacttggggtgctggtgggtgaggctgcctttcagggaggccatgctgtgagttgagaatcctaggccaccttgcctgcactgccagctttgcagctgtgggcacatctggatccccatttctgtgcgggtgcagacaggtgaatgttacctgcgtgcatcattagggctcactggcttgcatgataagggatgctgggcacggtaaacacagaaggagaaggcaggctctgctgccaggagcttgcaccctgagccacgtggaactggtttgcctgtgaagcaataggcacagtcctgaaagagcacagtcctgaaagagcacttctaattgggcatacaagcaagctcataataaagttctcctaagaaggtttcctcatgttttgaagatgatacacttagtccctgactggggatggtttcgcttacactttttcaactttacgatggtgtgaaagtgatacacgttcagtacgttcctca

SEQ ID NO: 346160 - DNA, 819 bp, Homo sapiens
ctgtttcagaaacccttggtgaactcttaaagccctgaagagcttaaaaaatgctctgaagagatctgagagtcgcagttaaggactctcaaagaacctcaaagaaaagccaacttagcctttttatacaattaactagatttgggtcttaaattctactttgacatataggcctaagaggtagtttaacatggccttgttacccttaccccttctgttctgtgctgttttctgagaaacggatgcaggaactgattccctttcttcctctctggaacaggatataaagaacccttccgcttccctttacttgtggccttcctggccaggcttatgtatactgaacaaagctagggtgcagtgcttctgagctagctgttaggggtccacagccagaaggaatgggagaccacaggagccattcaaaagataattacatgtcagaagagagtccatccatggggttctgttaaagtagacaccttcacgttgggagacataggctttgtctgcttgctgggctgaaccctcaccatatccacagagaacaaaatggggagcagctgtaccaggggagggatgaacgtctttcacccaagttgccagtctgctagttgtctggaaatgttcaagggaggctaaggtatcttgtcttatgatgtctcaggaaacagggttggttctcagctggcagtgaagggggactggtgtggtattagcagttgaacttgaggttgcaatctcaagtcaccctctggcctcgcaggaatgcaccagggtgatttgggaggatctgagtttcctttatgaagtcagatt

SEQ ID NO: 346161 - DNA, 311 bp, Homo sapiens
ttttttttttaaacctcttaaaagttgatgtatatatatccttaccactaagcatatcttttcaattaggcatgtggcaattcctttcttgatgtttttagggaaaatgagccaaataatattttaaaaaatgtataagccaagctagtttctatcctttcttctattaaactcaggatcacacaagtaggcatgagtgtgcacaaatatttatgccttgcattgttctgagaattagtaaaagaatatcttgaaagcatgatataactttgtatttgtatccaaaaatatacaaagttgttgaattaaaa

SEQ ID NO: 346162 - DNA, 1218 bp, Homo sapiens
agcggacttcacgtgaccgcgcggcggccgctgcggcgcgatggcggcggggctggcgcggctcctgttgctcctcgggctctcggccggcgggcccgcgccggcaggtgcagcgaagatgaaggtggtggaggagcccaacgcgtttggggtgaacaacccgttcttgcctcaggccagtcgcctccaggccaagagggatccttcacccgtgtctggacccgtgcatctcttccgactctcgggcaagtgcttcagcctggtggagtccacgtacaagtatgagttctgcccgttccacaacgtgacccagcacgagcagaccttccgctggaacgcctacagtgggatcctcggcatctggcacgagtgggagatcgccaacaacaccttcacgggcatgtggatgagggacggtgacgcctgccgttcccggagccggcagagcaaggtggagctggcgtgtggaaaaagcaaccggctggcccatgtgtccgagccgagcacctgcgtctacgcgctgacgttcgagacccccctcgtctgccacccccacgccttgctagtgtacccaaccctgccagaggccctgcagcggcagtgggaccaggtagagcaggacctggccgatgagctgatcaccccccagggccatgagaagttgctgaggacactttttgaggatgctggctacttaaagaccccagaagaaaatgaacccacccagctggagggaggtcctgacagcttggggtttgagaccctggaaaactgcaggaaggctcataaagaactctcaaaggagatcaaaaggctgaaaggtttgctcacccagcacggcatcccctacacgaggcccacagaaacttccaacttggagcacttgggccacgagacgcccagagccaagtctccagagcagctgcggggtgacccaggactgcgtgggagtttgtgaccttgtggtgggagagcagaggtggacgcggccgagagccctacagagaagctggctggtaggacccgcagggaccagctgaccaggcttgtgctcagagaagcagacaaaacaaagattcaaggttttaattaattcccatactgataaaaataactccatgaattctgtaaaccattgcataaatgctatagtgtaaaaaaatttaaacaagtgttaactttaaacagttcgctacaagtaaatgattataaatacta

SEQ ID NO: 346163 - DNA, 633 bp, Homo sapiens
agcggacttcacgtgaccgcgcggcggccgctgcggcgcgatggcggcggggctggcgcggctcctgttgctcctcgggctctcggccggcgggcccgcgccggcaggtgcagcgaagatgaaggtggtggaggagcccaacgcgtttggggtgaacaacccgttcttgcctcaggccagtcgcctccaggccaagagggatccttcacccgtgtctggtgagtgaggagcgctgttggccggcgcgggggtggccgcggggagcagcaacagtggaggatggatgagtgaccctgagagttacggcccggagtctaaagcattggtttgtcagccttctaaaattaatgtggaagtacgagagaatataccagaacgttcttgtagcgaattaaattatctccagacttaaaaaaaaaaaaaaaagagaaaagaaaaaataaaaataaagtggacagcaggctaaacaaaaaatattaccactaaaagggagccgcaagatagataaggagcgttaaccacagatttatatgtggaccaaaaggtgactacccaatataggagaagagcggtataattgaagccgaggacatcggggcctctgcattacacagtcttagtgaccgggggaaa

SEQ ID NO: 346164 - DNA, 1246 bp, Homo sapiens
  misc_feature (1225)..(1225): n is a, c, g, or t
agcggacttcacgtgaccgcgcggcggccgctgcggcgcgatggcggcggggctggcgcggctcctgttgctcctcgggctctcggccggcgggcccgcgccggcaggtgcagcgaagatgaaggtggtggaggagcccaacgcgtttggggtgaacaacccgttcttgcctcaggccagtcgcctccaggccaagagggatccttcacccgtgtctggacccgtgcatctcttccgactctcgggcaagtgcttcagcctggtggagtccacgtacaagtatgagttctgcccgttccacaacgtgacccagcacgagcagaccttccgctggaacgcctacagtgggatcctcggcatctggcacgagtgggagatcgccaacaacaccttcacgggcatgtggatgagggacggtgacgcctgccgttcccggagccggcagagcaaggtggagctggcgtgtggaaaaagcaaccggctggcccatgtgtccgagccgagcacctgcgtctacgcgctgacgttcgagacccccctcgtctgccacccccacgccttgctagtgtacccaaccctgccagaggccctgcagcggcagtgggaccaggtagagcaggacctggccgatgagctgatcaccccccagggccatgagaagttgctgaggacactttttgaggatgctggctacttaaagaccccagaagaaaatgaacccacccagctggagggaggtcctgacagcttggggtttgagaccctggaaaactgcaggaaggctcataaagaactctcaaaggagatcaaaaggctgaaaggtttgctcacccagcacggcatcccctacacgaggcccacagaaacttccaacttggagcacttgggccacgagacgcccagagccaagtctccagagcagctgcggggtgacccaggactgcgtgggagtttgtgaccttgtggtgggagagcagaggtggacgcggccgagagccctacagagaagctggctggtaggacccgcagggaccagctgaccaggcttgtgctcagagaagcagacaaaacaaagattcaaggttttaattaattcccatactgataaaaataactccatgaattctgtaaaccattgcataaatgctatagtgtaaaaaaatttaaacaagtgttaactttaaacagttcgctacaagtaaatgattataaatactaaaaaaancacacaaccaaacaaaaaact

SEQ ID NO: 346165 - DNA, 1192 bp, Homo sapiens
ggatatcgtcgacccaggcgccgtcgggcgcggctccgtgttgctcctcgtggctctcggccggcgggcccgcgccggcaggtgcagcgaagatgaaggtggtggaggagcccaacgcgtttggggtgaacaacccgttcttgcctcaggccagtcgcctccaggccaagagggatccttcacccgtgtctggacccgtgcatctcttccgactctcgggcaagtgcttcagcctggtggagtccacgtacaagtatgagttctgcccgttccacaacgtgacccagcacgagcagaccttccgctggaacgcctacagtgggatcctcggcatctggcacgagtgggagatcgccaacaacaccttcacgggcatgtggatgagggacggtgacgcctgccgttcccggagccggcagagcaaggtggagctggcgtgtggaaaaagcaaccggctggcccatgtgtccgagccgagcacctgcgtctacgcgctgacgttcgagacccccctcgtctgccacccccacgccttgctagtgtacccaaccctgccagaggccctgcagcggcagtgggaccaggtagagcaggacctggccgatgagctgatcaccccccagggccatgagaagttgctgaggacactttttgaggatgctggctacttaaagaccccagaagaaaatgaacccacccagctggagggaggtcctgacagcttggggtttgagaccctggaaaactgcaggaaggctcataaagaactctcaaaggagatcaaaaggctgaaaggtttgctcacccagcacggcatcccctacacgaggcccacagaaacttccaacttggagcacttgggccacgagacgcccagagccaagtctccagagcagctgcggggtgacccaggactgcgtgggagtttgtgaccttgtggtgggagagcagaggtggacgcggccgagagccctacagagaagctggctggtaggacccgcagggaccagctgaccaggcttgtgctcagagaagcagacaaaacaaagattcaaggttttaattaattcccatactgataaaaataactccatgaattctgtaaaccattgcataaatgctatagtgtaaaaaaatttaaacaagtgttaactttaaacagttcgctacaagtaaatgattataaatacta

SEQ ID NO: 346166 - DNA, 1242 bp, Homo sapiens
agcggacttcacgtgaccgcgcggcggccgctgcggcgcgatggcggcggggctggcgcggctcctgttgctcctcgggctctcggccggcgggcccgcgccggcaggtgcagcgaagatgaaggtggtggaggagcccaacgcgtttgggtgagcagcctcgcgggctggcggctcgagcgggggacggcccgggcccgttccccgctgaccttgccgcttcccgtagggtgaacaacccgttcttgcctcaggccagtcgcctccaggccaagagggatccttcacccgtgtctggtacaagtatgagttctgcccgttccacaacgtgacccagcacgagcagaccttccgctggaacgcctacagtgggatcctcggcatctggcacgagtgggagatcgccaacaacaccttcacgggcatgtggatgagggacggtgacgcctgccgttcccggagccggcagagcaaggtggagctggcgtgtggaaaaagcaaccggctggcccatgtgtccgagccgagcacctgcgtctacgcgctgacgttcgagacccccctcgtctgccacccccacgccttgctagtgtacccaaccctgccagaggccctgcagcggcagtgggaccaggtagagcaggacctggccgatgagctgatcaccccccagggccatgagaagttgctgaggacactttttgaggatgctggctacttaaagaccccagaagaaaatgaacccacccagctggagggaggtcctgacagcttggggtttgagaccctggaaaactgcaggaaggctcataaagaactctcaaaggagatcaaaaggctgaaaggtttgctcacccagcacggcatcccctacacgaggcccacagaaacttccaacttggagcacttgggccacgagacgcccagagccaagtctccagagcagctgcggggtgacccaggactgcgtgggagtttgtgaccttgtggtgggagagcagaggtggacgcggccgagagccctacagagaagctggctggtaggacccgcagggaccagctgaccaggcttgtgctcagagaagcagacaaaacaaagattcaaggttttaattaattcccatactgataaaaataactccatgaattctgtaaaccattgcataaatgctatagtgtaaaaaaatttaaacaagtgttaactttaaacagttcgctacaagtaaatgattataaatacta

SEQ ID NO: 346167 - DNA, 1200 bp, Homo sapiens
agcggacttcacgtgaccgcgcggcggccgctgcggcgcgatggcggcggggctggcgcggctcctgttgctcctcgggctctcggccggcgggcccgcgccggcaggtgcagcgaagatgaaggtggtggaggagcccaacgcgtttggggtgaacaacccgttcttgcctcaggccagtcgcctccaggccaagagggatccttcacccgtgtctggacccgtgcatctcttccgactctcgggcaagtgcttcagcctggtggagtccacgtacaagtatgagttctgcccgttccacaacgtgacccagcacgagcagaccttccgctggaacgcctacagtgggatcctcggcatctggcacgagtgggagatcgccaacaacaccttcacgggcatgtggatgagggacggtgacgcctgccgttcccggagccggcagagcaaggtggagctggcgtgtggaaaaagcaaccggctggcccatgtgtccgagccgagcacctgcgtctacgcgctgacgttcgagacccccctcgtctgccacccccacgccttgctagaggccctgcagcggcagtgggaccaggtagagcaggacctggccgatgagctgatcaccccccagggccatgagaagttgctgaggacactttttgaggatgctggctacttaaagaccccagaagaaaatgaacccacccagctggagggaggtcctgacagcttggggtttgagaccctggaaaactgcaggaaggctcataaagaactctcaaaggagatcaaaaggctgaaaggtttgctcacccagcacggcatcccctacacgaggcccacagaaacttccaacttggagcacttgggccacgagacgcccagagccaagtctccagagcagctgcggggtgacccaggactgcgtgggagtttgtgaccttgtggtgggagagcagaggtggacgcggccgagagccctacagagaagctggctggtaggacccgcagggaccagctgaccaggcttgtgctcagagaagcagacaaaacaaagattcaaggttttaattaattcccatactgataaaaataactccatgaattctgtaaaccattgcataaatgctatagtgtaaaaaaatttaaacaagtgttaactttaaacagttcgctacaagtaaatgattataaatacta

SEQ ID NO: 346168 - DNA, 1152 bp, Homo sapiens
agcggacttcacgtgaccgcgcggcggccgctgcggcgcgatggcggcggggctggcgcggctcctgttgctcctcgggctctcggccggcgggcccgcgccggcaggtgcagcgaagatgaaggtggtggaggagcccaacgcgtttggggtgaacaacccgttcttgcctcaggccagtcgcctccaggccaagagggatccttcacccgtgtctggacccgtgcatctcttccgactctcgggcaagtgcttcagcctggtggagtccacgtacaagtatgagttctgcccgttccacaacgtgacccagcacgagcagaccttccgctggaacgcctacagtgggatcctcggcatctggcacgagtgggagatcgccaacaacaccttcacgggcatgtggatgagggacggtgacgcctgccgttcccggagccggcagagcaaggcgctgacgttcgagacccccctcgtctgccacccccacgccttgctagtgtacccaaccctgccagaggccctgcagcggcagtgggaccaggtagagcaggacctggccgatgagctgatcaccccccagggccatgagaagttgctgaggacactttttgaggatgctggctacttaaagaccccagaagaaaatgaacccacccagctggagggaggtcctgacagcttggggtttgagaccctggaaaactgcaggaaggctcataaagaactctcaaaggagatcaaaaggctgaaaggtttgctcacccagcacggcatcccctacacgaggcccacagaaacttccaacttggagcacttgggccacgagacgcccagagccaagtctccagagcagctgcggggtgacccaggactgcgtgggagtttgtgaccttgtggtgggagagcagaggtggacgcggccgagagccctacagagaagctggctggtaggacccgcagggaccagctgaccaggcttgtgctcagagaagcagacaaaacaaagattcaaggttttaattaattcccatactgataaaaataactccatgaattctgtaaaccattgcataaatgctatagtgtaaaaaaatttaaacaagtgttaactttaaacagttcgctacaagtaaatgattataaatacta

SEQ ID NO: 346169 - DNA, 1857 bp, Homo sapiens
ggctgactgggacctggcccggggagactttgcccaggctgcccagcagctgtggctggccctgcgggcactgggccggccctgcccacctccaaacttggacctggcttgtagcctcctctggaacctatccccctacacgaggcccacagaaacttccaacttggagcacttgggccacgagacgcccagagccaagtctccagagcagctgcggggtgacccaggactgcgtgggagtttgtgaccttgtggtgggagagcagaggtggacgcggccgagagccctacagagaagctggctggtaggacccgcagggaccagctgaccaggcttgtgctcagagaagcagacaaaacaaagattcaaggttttaattaattcccatactgataaaaataactccatgaattctgtaaaccattgcataaatgctatagtgtaaaaaaatttaaacaagtgttaactttaaacagttcgctacaagtaaatgattataaatactaccttctgggttaagaaaattccattcaaataacattctcatgtaaatactcaaacatacagattgaggcttccagaaattaatccacttgaggcgtccacgcggaacaaggtctgctgaccacagttacacacgtcgtgacaccactgtatcacggcgaatgtcgaacactagagttacagacgacaggcaacaagaacatgcagagccggccgccagccagctcctacgccccgtgcccgccatggccacaggggggagctgctgggcgcgcctccacctcagcctccacggggcaccttccagccactgctgtgcctcagccacctaggagccatccctgaggccatggccaccaagacaggtgagggaggccccagggcacacagccccaggatcttgcccccatttccaaccctggcagcgctgccagccattctttggtcttcccactgctcacctgtcctcagagccagtactgatctaggggagcaggtgccacctccatctcccagctgtccccccacccctggggctccccagctctaccaccccggaagctgagccctggagacaccctgaggggcgggcgccacctccttcccagaaagagcagagcagctggcagactagagctcagctgctcctgaccactgacaaccgggagatgtctcggcagacaccacttatcccagaaaagaccagaggctccaaatgggaaccaagtgcataaatacaaataaaaacagagtttacacatcgatgacagtagcacaaaatatacgtaatttctagatactgagctaataaatcactgtagttaaaaacaaaatagattcactgaaaccaagtcgatagttaccttggagtagtggactagctgcagaatgtcacggacccacttcctttaaaacaacagaatgttgctatcagtttgtcttacgttaaaacagttcttaaaccacctactatattaaatacattctaatttggtcactgatgataaagatttttacctagacgttttgcacttaaaaaatgctattaaaagtctttggcaaagccacggtcggggagaaacacgtcggtgccgcttcccactcgtgtgccctcaccacccacgtggcccgcggagagccaggtcgccgtaaaccacagatgcctgttcctgctcaactcctagggacagtcccagccctgagcagaagggtcaggtcatcgcggggatgcgttctcagtcacgtttctgctgcggccgaaaccacactgtcgctccaggtcccagctctgctgtggtcccctgtcccgtctgcccctggagcgacagtcacgtttaatgctgcctcgtgcc

SEQ ID NO: 346170 - DNA, 785 bp, Homo sapiens
agcggacttcacgtgaccgcgcggcggccgctgcggcgcgatggcggcggggctggcgcggctcctgttgctcctcgggctctcggccggcgggcccgcgccggcaggtgcagcgaagatgaaggtggtggaggagcccaacgcgtttggggtgaacaacccgttcttgcctcaggccagtcgcctccaggccaagagggatccttcacccgtgtctggacccgtgcatctcttccgactctcgggcaagtgcttcagcctggtggagtccacgtacaagtatgagttctgcccgttccacaacgtgacccagcacgagcagaccttccgctggaacgcctacagtgggatcctcggcatctggcacgagtgggagatcgccaacaacaccttcacgggcatgtggatgagggacggtgacgcctgccgttcccggagccggcagagcaaggtggagctggcgtgtggaaaaagcaaccggctggcccatgtgtccgagccgagcacctgcgtctacgcgctgacgttcgagacccccctcgtctgccacccccacgccttgctagtgtacccaaccctgccagaggccctgcagcggcagtgggaccaggtagagcaggacctggccgatgagctgatcaccccccagggccatgagaagttgctgaggacactttttgaggatgctggctacttaaagaatctgagggatcctaagcacttcaagtcagagaagacaggacgggcacagttgagggaaggctggagagatagtcatcagccta

SEQ ID NO: 346171 - DNA, 441 bp, Homo sapiens
agaccttccgctggaacgcctacagtgggatcctcgggtgagtggggccggggcagggatcccaaagcagcagcgcagctccccacccggcctcacgtgccgtgcccgtgtctccccagcatctggcacgagtgggagatcgccaacaacaccttcacgggcatgtggatgagggacggtgacgcctgccgttcccggagccggcagagcaagggggcctcagacgggagcccgggaagaggggccccagtctccccaacccacctacccacgttccctccccaggtggagctggcgtgtggaaaaagcaaccggctggcccatgtgtccgagccgagcacctgcgtctacgcgctgacgttcgagacccccctcgtctgccacccccacgccttgctaggtaggggtgcgggacgcagttgagcccagtggggtcagccg

SEQ ID NO: 346172 - DNA, 227 bp, Homo sapiens
gagagccctacagagaagctggctggtaggacccgcagggaccagctgaccaggcttgtgctcagagaagcagacaaaacaaagattcaaggttttaattaattcccatactgataaaaataactccatgaattctgtaaaccattgcataaatgctatagtgtaaaaaaatttaaacaagtgttaactttaaacagttcgctacaagtaaatgattataaatacta

SEQ ID NO: 346173 - DNA, 2568 bp, Homo sapiens
agcggacttcacgtgaccgcgcggcggccgctgcggcgcgatggcggcggggctggcgcggctcctgttgctcctcgggctctcggccggcgggcccgcgccggcaggtgcagcgaagatgaaggtggtggaggagcccaacgcgtttggggtgaacaacccgttcttgcctcaggccagtcgcctccaggccaagagggatccttcacccgtgtctggacccgtgcatctcttccgactctcgggcaagtgcttcagcctggtggagtccacgtacaagtatgagttctgcccgttccacaacgtgacccagcacgagcagaccttccgctggaacgcctacagtgggatcctcggcatctggcacgagtgggagatcgccaacaacaccttcacgggcatgtggatgagggacggtgacgcctgccgttcccggagccggcagagcaaggtggagctggcgtgtggaaaaagcaaccggctggcccatgtgtccgagccgagcacctgcgtctacgcgctgacgttcgagacccccctcgtctgccacccccacgccttgctagtgtacccaaccctgccagaggccctgcagcggcagtgggaccaggtagagcaggacctggccgatgagctgatcaccccccagggccatgagaagttgctgaggacactttttgaggatgctggctacttaaagaccccagaagaaaatgaacccacccagctggagggaggtcctgacagcttggggtttgagaccctggaaaactgcaggaaggctcataaagaactctcaaaggagatcaaaaggctgaaaggtttgctcacccagcacggcatcccctacacgaggcccacagaaacttccaacttggagcacttgggccacgagacgcccagagccaagtctccagagcagctgcggggtgacccaggactgcgtgggagtttgtgaccttgtggtgggagagcagaggtggacgcggccgagagccctacagagaagctggctggtaggacccgcagggaccagctgaccaggcttgtgctcagagaagcagacaaaacaaagattcaaggttttaattaattcccatactgataaaaataactccatgaattctgtaaaccattgcataaatgctatagtgtaaaaaaatttaaacaagtgttaactttaaacagttcgctacaagtaaatgattataaatactaccttctgggttaagaaaattccattcaaataacattctcatgtaaatactcaaacatacagattgaggcttccagaaattaatccacttgaggcgtccacgcggaacaaggtctgctgaccacagttacacacgtcgtgacaccactgtatcacggcgaatgtcgaacactagagttacagacgacaggcaacaagaacatgcagagccggccgccagccagctcctacgccccgtgcccgccatggccacaggggggagctgctgggcgcgcctccacctcagcctccacggggcaccttccagccactgctgtgcctcagccacctaggagccatccctgaggccatggccaccaagacaggtgagggaggccccagggcacacagccccaggatcttgcccccatttccaaccctggcagcgctgccagccattctttggtcttcccactgctcacctgtcctcagagccagtactgatctaggggagcaggtgccacctccatctcccagctgtccccccacccctggggctccccagctctaccaccccggaagctgagccctggagacaccctgaggggcgggcgccacctccttcccagaaagagcagagcagctggcagactagagctcagctgctcctgaccactgacaaccgggagatgtctcggcagacaccacttatcccagaaaagaccagaggctccaaatgggaaccaagtgcataaatacaaataaaaacagagtttacacatcgatgacagtagcacaaaatatacgtaatttctagatactgagctaataaatcactgtagttaaaaacaaaatagattcactgaaaccaagtcgatagttaccttggagtagtggactagctgcagaatgtcacggacccacttcctttaaaacaacagaatgttgctatcagtttgtcttacgttaaaacagttcttaaaccacctactatattaaatacattctaatttggtcactgatgataaagatttttacctagacgttttgcacttaaaaaatgctattaaaagtctttggcaaagccacggtcggggagaaacacgtcggtgccgcttcccactcgtgtgccctcaccacccacgtggcccgcggagagccaggtcgccgtaaaccacagatgcctgttcctgctcaactcctagggacagtcccagccctgagcagaagggtcaggtcatcgcggggatgcgttctcagtcacgtttctgctgcggccgaaaccacactgtcgctccaggtcccagctctgctgtggtcccctgtcccgtctgcccctggagcgacagtcacgtttaatgctgcctcgtgcc

SEQ ID NO: 346174 - DNA, 1268 bp, Homo sapiens
agcggacttcacgtgaccgcgcggcggccgctgcggcgcgatggcggcggggctggcgcggctcctgttgctcctcgggctctcggccggcgggcccgcgccggcaggtgcagcgaagatgaaggtggtggaggagcccaacgcgtttggggtgaacaacccgttcttgcctcaggccagtcgcctccaggccaagagggatccttcacccgtgtctggacccgtgcatctcttccgactctcgggcaagtgcttcagcctggtggagtccacgtacaagtatgagttctgcccgttccacaacgtgacccagcacgagcagaccttccgctggaacgcctacagtgggatcctcggcatctggcacgagtgggagatcgccaacaacaccttcacgggcatgtggatgagggacggtgacgcctgccgttcccggagccggcagagcaaggtggagctggcgtgtggaaaaagcaaccggctggcccatgtgtccgagccgagcacctgcgtctacgcgctgacgttcgagacccccctcgtctgccacccccacgccttgctagtgtacccaaccctgccagaggccctgcagcggcagtgggaccaggtagagcaggacctggccgatgagctgatcaccccccagggccatgagaagttgctgaggacactttttgaggatgctggctacttaaagaccccagaagaaaatgaacccacccagctggagggaggtcctgacagcttggggtttgagaccctggaaaactgcaggaaggctcataaagaactctcaaaggagatcaaaaggctgaaaggtttgctcacccagcacggcatcccctacacgaggcccacagaaacttccaacttggagcacttgggccacgagacgcccagagccaagtctccagagcagctgcggggtgacccaggactgcgtgggagtttgtgaccttgtggtgggagagcagaggtggacgcggccgagagccctacagagaagctggctggtaggacccgcagggaccagctgaccaggcttgtgctcagagaagcagacaaaacaaagattcaaggttttaattaattcccatactgataaaaataactccatgaattctgtaaaccattgcataaatgctatagtgtaaaaaaatttaaacaagtgttaactttaaacagttcgctacaagtaaatgattataaatactaaaaaaaacaacacacaccaaccatactacataaaaagcaactaaaaacgg

SEQ ID NO: 346175 - DNA, 1297 bp, Homo sapiens
agcggacttcacgtgaccgcgcggcggccgctgcggcgcgatggcggcggggctggcgcggctcctgttgctcctcgggctctcggccggcgggcccgcgccggcaggtgcagcgaagatgaaggtggtggaggagcccaacgcgtttgggtgagcagcctcgcgggctggcggctcgagcgggggacggcccgggcccgttccccgctgaccttgccgcttcccgtagggtgaacaacccgttcttgcctcaggccagtcgcctccaggccaagagggatccttcacccgtgtctggacccgtgcatctcttccgactctcgggcaagtgcttcagcctggtggagtccacgtacaagtatgagttctgcccgttccacaacgtgacccagcacgagcagaccttccgctggaacgcctacagtgggatcctcggcatctggcacgagtgggagatcgccaacaacaccttcacgggcatgtggatgagggacggtgacgcctgccgttcccggagccggcagagcaaggtggagctggcgtgtggaaaaagcaaccggctggcccatgtgtccgagccgagcacctgcgtctacgcgctgacgttcgagacccccctcgtctgccacccccacgccttgctagtgtacccaaccctgccagaggccctgcagcggcagtgggaccaggtagagcaggacctggccgatgagctgatcaccccccagggccatgagaagttgctgaggacactttttgaggatgctggctacttaaagaccccagaagaaaatgaacccacccagctggagggaggtcctgacagcttggggtttgagaccctggaaaactgcaggaaggctcataaagaactctcaaaggagatcaaaaggctgaaaggtttgctcacccagcacggcatcccctacacgaggcccacagaaacttccaacttggagcacttgggccacgagacgcccagagccaagtctccagagcagctgcggggtgacccaggactgcgtgggagtttgtgaccttgtggtgggagagcagaggtggacgcggccgagagccctacagagaagctggctggtaggacccgcagggaccagctgaccaggcttgtgctcagagaagcagacaaaacaaagattcaaggttttaattaattcccatactgataaaaataactccatgaattctgtaaaccattgcataaatgctatagtgtaaaaaaatttaaacaagtgttaactttaaacagttcgctacaagtaaatgattataaatacta

SEQ ID NO: 346176 - DNA, 1351 bp, Homo sapiens
agcggacttcacgtgaccgcgcggcggccgctgcggcgcgatggcggcggggctggcgcggctcctgttgctcctcgggctctcggccggcgggcccgcgccggcaggtgcagcgaagatgaaggtggtggaggagcccaacgcgtttggggtgaacaacccgttcttgcctcaggccagtcgcctccaggccaagagggatccttcacccgtgtctgagacggggtttcaccgtgttagccaggacggtctcgatctcctgacctcgtgatctgcccgcctcggcctcccacagtgctgggatgacagtcatgagccaccgcgcctggcctcgactttattattaatacggacccgtgcatctcttccgactctcgggcaagtgcttcagcctggtggagtccacgtacaagtatgagttctgcccgttccacaacgtgacccagcacgagcagaccttccgctggaacgcctacagtgggatcctcggcatctggcacgagtgggagatcgccaacaacaccttcacgggcatgtggatgagggacggtgacgcctgccgttcccggagccggcagagcaaggtggagctggcgtgtggaaaaagcaaccggctggcccatgtgtccgagccgagcacctgcgtctacgcgctgacgttcgagacccccctcgtctgccacccccacgccttgctagtgtacccaaccctgccagaggccctgcagcggcagtgggaccaggtagagcaggacctggccgatgagctgatcaccccccagggccatgagaagttgctgaggacactttttgaggatgctggctacttaaagaccccagaagaaaatgaacccacccagctggagggaggtcctgacagcttggggtttgagaccctggaaaactgcaggaaggctcataaagaactctcaaaggagatcaaaaggctgaaaggtttgctcacccagcacggcatcccctacacgaggcccacagaaacttccaacttggagcacttgggccacgagacgcccagagccaagtctccagagcagctgcggggtgacccaggactgcgtgggagtttgtgaccttgtggtgggagagcagaggtggacgcggccgagagccctacagagaagctggctggtaggacccgcagggaccagctgaccaggcttgtgctcagagaagcagacaaaacaaagattcaaggttttaattaattcccatactgataaaaataactccatgaattctgtaaaccattgcataaatgctatagtgtaaaaaaatttaaacaagtgttaactttaaacagttcgctacaagtaaatgattataaatacta

SEQ ID NO: 346177 - DNA, 1187 bp, Homo sapiens
agcggacttcacgtgaccgcgcggcggccgctgcggcgcgatggcggcggggctggcgcggctcctgttgctcctcgggctctcggccggcgggcccgcgccggcaggtgcagcgaagatgaaggtggtggaggagcccaacgcgtttggggtgaacaacccgttcttgcctcaggccagtcgcctccaggccaagagggatccttcacccgtgtctggacccgtgcatctcttccgactctcgggcaagtgcttcagcctggtggagtccacgtacaagtatgagttctgcccgttccacaacgtgacccagcacgagcagaccttccgctggaacgcctacagtgggatcctcggcatctggcacgagtgggagatcgccaacaacaccttcacgggcatgtggatgagggacggtgacgcctgccgttcccggagccggcagagcaagtggcccatgtgtccgagccgagcacctgcgtctacgcgctgacgttcgagacccccctcgtctgccacccccacgccttgctagtgtacccaaccctgccagaggccctgcagcggcagtgggaccaggtagagcaggacctggccgatgagctgatcaccccccagggccatgagaagttgctgaggacactttttgaggatgctggctacttaaagaccccagaagaaaatgaacccacccagctggagggaggtcctgacagcttggggtttgagaccctggaaaactgcaggaaggctcataaagaactctcaaaggagatcaaaaggctgaaaggtttgctcacccagcacggcatcccctacacgaggcccacagaaacttccaacttggagcacttgggccacgagacgcccagagccaagtctccagagcagctgcggggtgacccaggactgcgtgggagtttgtgaccttgtggtgggagagcagaggtggacgcggccgagagccctacagagaagctggctggtaggacccgcagggaccagctgaccaggcttgtgctcagagaagcagacaaaacaaagattcaaggttttaattaattcccatactgataaaaataactccatgaattctgtaaaccattgcataaatgctatagtgtaaaaaaatttaaacaagtgttaactttaaacagttcgctacaagtaaatgattataaatacta

SEQ ID NO: 346178 - DNA, 491 bp, Homo sapiens
  misc_feature (461)..(461): n is a, c, g, or t
  misc_feature (463)..(463): n is a, c, g, or t
agcggacttcacgtgaccgcgcggcggccgctgcggcgcgatggcggcggggctggcgcggctcctgttgctcctcgggctctcggccggcgggcccgcgccggcaggtgcagcgaagatgaaggtggtggaggagcccaacgcgtttggggtgaacaacccgttcttgcctcaggccagtcgcctccaggccaagagggatccttcacccgtgtctggacccgtgcatctcttccgactctcgggcaagtgcttcagcctggtggagtccacgtacaagtatgagttctgcccgttccacaacgtgacccagcacgagcagaccttccgctggaacgcctacagtgggatcctcggcatctggcacgagtgggagatcgccaacaacaccttcacgggcatgtggatgagggacggtgacgcctgccgttcccggagccggcagagcaagagctggcgtntncgagcccgagcaactgcgtctaaggggt

SEQ ID NO: 346179 - DNA, 1421 bp, Homo sapiens
cacttaattgtaaattaagatttgctgatgatgatgggctaatttaagctaccgtggaaagagggaagaaatggaagctgctgatcgtaggaagcagtacctgtactgcgcagggttgcagtgacctaacaccaagaaataaaaactctggaaaactagcccttcacatatggaaggaccctcccaaagagctggagctcctctgcccactgcctcccccatcagatcagacctatggtagaagacagcaaggagtaaacgctgtttcctgttttcatttttttcaactggaccaccagctactacaaccctagaaaaatggaggcacagatatgtgggtcccagagccctgggggagctggaatggatactcgctaacacacgggacacgagattctctttcctttggaagggtcctgtccatggcccttcttgggttctggactgtcctacaatgcctgactttagtttctgtggatcatgataagcattattcattttttccccctcaaatatcccacagcttcaaacttacctgaatgcaggttccctgtaaaaataccatcatgtaatttgcacattagcaatcagtttgatgaatggcaaaatcgttcaaatggaaaagaggagagagatagtgtggtcttttgatggagggggagaggcaagagccagataaatcagaagagagaggcgaggctcttgcagcccaagtcttaatttccttgtaagaatcgatgctcactcagtggtgacactgagcttgtgaaagctcaactgtgacactctttagaaagtagtacagagatttttttccttcccattatcaactcattaaaggaagttaaaagtacttactctgtcccacacacagtgtgtgtgtgacaatgtcggaaacattgactgactcataataaatttgagattggataacaatttatactacctttatacctctctcctcgccccaaattgaatcattaaaaaacatttagtaagatcgaatgtgcagttctgtgggcagaactccacaagtcaaaatactcctgaatttaaatactcctgaggtttaacaaattactctgcaatgcaatttgggattttactctaaggaagtacaacagaggcacactcccttaatttccattgccctgtcacagatcagttgcctaacattcttcccatagcatagctcccagttgttgcatgtagaaaagcgctccactgattctaacttgaaaggtgtgtgactcgtgtgtgctcaaagagcatgtgacgatcaacataatgaaaagtcaaacattgttttgttgtgttgttccctacctctttcttggaggtctcttcatcttcaattcccatgagctggcctggttcaccatctggctgttggaaaggaaactaaacacattttctttctt

SEQ ID NO: 346180 - DNA, 801 bp, Homo sapiens
agtggggttcccggcgcggggaatgtcccgggtggagctggctgagtcgcgcgctctgctccacccgacggggctgtgtgtgctgggcctggctcgcggcgaaccgagatggcagagcagtcggacgaggccgtgaagtactacaccctagaggagattcagaagcacaaccacagcaagagcacctggctgatcctgcaccacaaggtgtacgatttgaccaaatttctggaagagcatcctggtggggaagaagttttaagggaacaagctggaggtgacgctactgagaactttgaggatgtcgggcactctacagatgccagggaaatgtccaaaacattcatcattggggagctccatccagatgacagaccaaagttaaacaagcctccggaaactcttatcactactattgattctagttccagttggtggaccaactgggtgatccctgccatctctgcagtggccgtcgccttgatgtatcgcctatacatggcagaggactgaacacctcctcagaagtcagcgcaggaagagcctgctttggacacgggagaaaagaagccattgctaactacttcaactgacagaaaccttcacttgaaaacaatgattttaatatatctctttctttttcttccgacattagaaacaaaacaaaaagaactgtcctttctgcgctcaaatttttcgagtgtgcctttttattcatctactttattttgatgtttccttaatgtgtaatttacttattataagcatgatcttttaaaaatatatttggcttttaaagta

SEQ ID NO: 346181 - DNA, 1172 bp, Homo sapiens
  misc_feature (1)..(1): n is a, c, g, or t
  misc_feature (47)..(47): n is a, c, g, or t
  misc_feature (206)..(206): n is a, c, g, or t
ntgagttgggaggtttgtttgattttgtttttggtggtaggagatangtactttgagggagtaagcttcattcatctgacaagtttatttgccccgatattttcatcccatacttcacaaaggcaaagtgtcttagggtcatcagggaggcctgccgttacacatgcctgatcccatccttgtttccagctgtgggtcaggtttcnggccctgactgtggcacttctgcttcacctgcccactgggttccccctggccagcctttaaacacactgtatttttgacagcttcagcctgaagttgaaatagtttatgactctaaaactgggagactgcagggcttaactgaagatatcatacacgtaagagatacatgcacaatctcaaatggaatttgagaggacagaagggaagaatcagtcttcagctcctccctgaattacgtgtcgcaatctgagtctaataaatgtgtgtgcacatcagcatgtacagagagctgtcatgggtgctgttcgaaactttggaactctagatagaaaatatctcttggcacttaatctgctactaatttttgctgttaaatcagatggatcaaactttgtgtttaatagctaaatgttgaatctgaaatggtaattactgaattataattttaaaaagtctcaaagtcagcattttggaagtggtactttcatagatttttaaattccataatgtgccttatcttttcattgcaggatgacagaccaaagttaaacaagcctccggaaactcttatcactactattgattctagttccagttggtggaccaactgggtgatccctgccatctctgcagtggccgtcgccttgatgtatcgcctatacatggcagaggactgaacacctcctcagaagtcagcgcaggaagagcctgctttggacacgggagaaaagaagccattgctaactacttcaactgacagaaaccttcacttgaaaacaatgattttaatatatctctttctttttcttccgacattagaaacaaaacaaaaagaactgtcctttctgcgctcaaatttttcgagtgtgcctttttattcatctactttattttgatgtttccttaatgtgtaatttacttattataagcatgatcttttaaaaatatatttggcttttaaagta

SEQ ID NO: 346182 - DNA, 631 bp, Homo sapiens
  misc_feature (23)..(23): n is a, c, g, or t
  misc_feature (41)..(41): n is a, c, g, or t
  misc_feature (43)..(43): n is a, c, g, or t
  misc_feature (52)..(52): n is a, c, g, or t
gcgggagcgccgccctggcccgnaaggtttgtatttggaangncgcttcgtnttcctaaagcgatttcatcctggtggggaagaagttttaagggaacaagctggaggtgacgctactgagaactttgaggatgtcgggcactctacagatgccagggaaatgtccaaaacattcatcattggggagctccatccagatgacagaccaaagttaaacaagcctccggaaactcttatcactactattgattctagttccagttggtggaccaactgggtgatccctgccatctctgcagtggccgtcgccttgatgtatcgcctatacatggcagaggactgaacacctcctcagaagtcagcgcaggaagagcctgctttggacacgggagaaaagaagccattgctaactacttcaactgacagaaaccttcacttgaaaacaatgattttaatatatctctttctttttcttccgacattagaaacaaaacaaaaagaactgtcctttctgcgctcaaatttttcgagtgtgcctttttattcatctactttattttgatgtttccttaatgtgtaatttacttattataagcatgatcttttaaaaatatatttggcttttaaagta

SEQ ID NO: 346183 - DNA, 852 bp, Homo sapiens
agtggggttcccggcgcggggaatgtcccgggtggagctggctgagtcgcgcgctctgctccacccgacggggctgtgtgtgctgggcctggctcgcggcgaaccgagatggcagagcagtcggacgaggccgtgaagtactacaccctagaggagattcagaagcacaaccacagcaagagcacctggctgatcctgcaccacaaggtgtacgatttgaccaaatttctggaagagcatcctggtggggaagaagttttaagggaacaagctggaggtgacgctactgagaactttgaggatgtcgggcactctacagatgccagggaaatgtccaaaacattcatcattggggagctccatccagatgacagaccaaagttaaacaagcctccggaaactcttatcactactattgattctagttccagttggtggaccaactgggtgatccctgccatctctgcagtggccgtcgccttgatgtatcgcctatacatggcagaggactgaacacctcctcagaagtcagcgcaggaagagcctgctttggacacgggagaaaagaagccattgctaactacttcaactgacagaaaccttcacttgaaaacaatgattttaatatatctctttctttttcttccgacattagaaacaaaacaaaaagaactgtcctttctgcgctcaaatttttcgagtgtgcctttttattcatctactttattttgatgtttccttaatgtgtaatttacttattataagcatgatcttttaaaaatatatttggcttttaaagtaacaacaaccaccccccccccaggggggggcgcccaaaagttccccccgggg

SEQ ID NO: 346184 - DNA, 456 bp, Homo sapiens
  misc_feature (1)..(1): n is a, c, g, or t
  misc_feature (25)..(25): n is a, c, g, or t
  misc_feature (39)..(39): n is a, c, g, or t
ncccaaccccgattccgcgcgcggnccccacttccgggnaacatcttacctccggctcttatcactactattgattctagttccagttggtggaccaactgggtgatccctgccatctctgcagtggccgtcgccttgatgtatcgcctatacatggcagaggactgaacacctcctcagaagtcagcgcaggaagagcctgctttggacacgggagaaaagaagccattgctaactacttcaactgacagaaaccttcacttgaaaacaatgattttaatatatctctttctttttcttccgacattagaaacaaaacaaaaagaactgtcctttctgcgctcaaatttttcgagtgtgcctttttattcatctactttattttgatgtttccttaatgtgtaatttacttattataagcatgatcttttaaaaatatatttggcttttaaagta

SEQ ID NO: 346185 - DNA, 749 bp, Homo sapiens
agtggggttcccggcgcggggaatgtcccgggtggagctggctgagtcgcgcgctctgctccacccgacggggctgtgtgtgctgggcctggctcgcggcgaaccgagatggcagagcagtcggacgaggccgtgaagtactacaccctagaggagattcagaagcacaaccacagcaagagcacctggctgatcctgcaccacaaggtgtacgatttgaccaaatttctggaagagcatcctggtggggaagaagttttaagggaacaagctggaggtgacgctactgagaactttgaggatgtcgggcactctacagatgccagggaaatgtccaaaacattcatcattggggagctccatccagatgacagaccaaagttaaacaagcctccggaaactcttatcactactattgattctagttccagttggtggaccaactgggtgatccctgccatctctgcagtggccgtcgccttgatgtatcgcctatacatggcagaggactgaacacctcctcagaagtcagcgcaggaagagcctgctttggacacgggagaaaagaagccattgctaactacttcaactgacagaaaccttcacttgaaaacaatgattttaatatatctctttctttttcttccgacattagaaacaattcatctactttattttgatgtttccttaatgtgtaatttacttattataagcatgatcttttaaaaatatatttggcttttaaagta

SEQ ID NO: 346186 - DNA, 426 bp, Homo sapiens
tgatatataataggggtccaattgtcgccaggacaagaaagacttgatgggtactattggtggaccaactgggtgatccctgccatctctgcagtggccgtcgccttgatgtatcgcctatacatggcagaggactgaacacctcctcagaagtcagcgcaggaagagcctgctttggacacgggagaaaagaagccattgctaactacttcaactgacagaaaccttcacttgaaaacaatgattttaatatatctctttctttttcttccgacattagaaacaaaacaaaaagaactgtcctttctgcgctcaaatttttcgagtgtgcctttttattcatctactttattttgatgtttccttaatgtgtaatttacttattataagcatgatcttttaaaaatatatttggcttttaaagta

SEQ ID NO: 346187 - DNA, 386 bp, Homo sapiens
  misc_feature (1)..(1): n is a, c, g, or t
  misc_feature (10)..(10): n is a, c, g, or t
  misc_feature (15)..(15): n is a, c, g, or t
  misc_feature (23)..(23): n is a, c, g, or t
  misc_feature (35)..(35): n is a, c, g, or t
  misc_feature (49)..(49): n is a, c, g, or t
nggtgcggtngaaanaagccaantcttgtgggganccctgaaaaaccgntgcagtggccgtcgccttgatgtatcgcctatacatggcagaggactgaacacctcctcagaagtcagcgcaggaagagcctgctttggacacgggagaaaagaagccattgctaactacttcaactgacagaaaccttcacttgaaaacaatgattttaatatatctctttctttttcttccgacattagaaacaaaacaaaaagaactgtcctttctgcgctcaaatttttcgagtgtgcctttttattcatctactttattttgatgtttccttaatgtgtaatttacttattataagcatgatcttttaaaaatatatttggcttttaaagta

SEQ ID NO: 346188 - DNA, 1513 bp, Homo sapiens
  misc_feature (1)..(1): n is a, c, g, or t
  misc_feature (47)..(47): n is a, c, g, or t
  misc_feature (206)..(206): n is a, c, g, or t
ntgagttgggaggtttgtttgattttgtttttggtggtaggagatangtactttgagggagtaagcttcattcatctgacaagtttatttgccccgatattttcatcccatacttcacaaaggcaaagtgtcttagggtcatcagggaggcctgccgttacacatgcctgatcccatccttgtttccagctgtgggtcaggtttcnggccctgactgtggcacttctgcttcacctgcccactgggttccccctggccagcctttaaacacactgtatttttgacagcttcagcctgaagttgaaatagtttatgactctaaaactgggagactgcagggcttaactgaagatatcatacacgtaagagatacatgcacaatctcaaatggaatttgagaggacagaagggaagaatcagtcttcagctcctccctgaattacgtgtcgcaatctgagtctaataaatgtgtgtgcacatcagcatgtacagagagctgtcatgggtgctgttcgaaactttggaactctagatagaaaatatctcttggcacttaatctgctactaatttttgctgttaaatcagatggatcaaactttgtgtttaatagctaaatgttgaatctgaaatggatgacagaccaaagttaaacaagcctccggaaactcttatcactactattgattctagttccagttggtggaccaactgggtgatccctgccatctctgcagtggccgtcgccttgatgtatcgcctatacatggcagaggactgaacacctcctcagaagtcagcgcaggaagagcctgctttggacacgggagaaaagaagccattgctaactacttcaactgacagaaaccttcacttgaaaacaatgattttaatatatctctttctttttcttccgacattagaaacaaaacaaaaagaactgtcctttctgcgctcaaatttttcgagtgtgcctttttattcatctactttattttgatgtttccttaatgtgtaatttacttattataagcatgatcttttaaaaatatatttggcttttaaagtaaaaaaaaaaaaaaaaaaaaaaaaaaaaaaaaaaagggggggggggctaaaaaatttccccgggggggcccaatttaatgcggttacccggtttcttttgtcaaaggctgcgccccaaatgaggaagcggaatttataagcaaggcaaggggcgcgcgtttcaaacaacgctgctcgacgggcgaaaaccttgcctcgcgtgggcactctttcgggagaaggagacccctacactccgggggggggcgcaccactattcggggcacaacctacctactcaggagaagattttaaaagcgcttcaagaggggacacattatacagcctctttacagcggtggtactaacggctctcaacaacacgcggccataatatatgtctcgcggcttcaaaacagattttcggtacaccggaggatttaacttttgagacaatattttaccgag

SEQ ID NO: 346189 - DNA, 667 bp, Homo sapiens
tgcttgactcctgagaccgcggtgtgtggctggagcaagaacacagaggccaggcagagcagcggacgttctgcgtgggactcgcccctaacagctttggaagcatcctggtggggaagaagttttaagggaacaagctggaggtgacgctactgagaactttgaggatgtcgggcactctacagatgccagggaaatgtccaaaacattcatcattggggagctccatccagatgacagaccaaagttaaacaagcctccggaaactcttatcactactattgattctagttccagttggtggaccaactgggtgatccctgccatctctgcagtggccgtcgccttgatgtatcgcctatacatggcagaggactgaacacctcctcagaagtcagcgcaggaagagcctgctttggacacgggagaaaagaagccattgctaactacttcaactgacagaaaccttcacttgaaaacaatgattttaatatatctctttctttttcttccgacattagaaacaaaacaaaaagaactgtcctttctgcgctcaaatttttcgagtgtgcctttttattcatctactttattttgatgtttccttaatgtgtaatttacttattataagcatgatcttttaaaaatatatttggcttttaaagta

SEQ ID NO: 346190 - DNA, 707 bp, Homo sapiens
agtggggttcccggcgcggggaatgtcccgggtggagctggctgagtcgcgcgctctgctccacccgacggggctgtgtgtgctgggcctggctcgcggcgaaccgagatggcagagcagtcggacgaggccgtgaagtactacaccctagaggagattcagaagcacaaccacagcaagagcacctggctgatcctgcaccacaaggtgtacgatttgaccaaatttctggaagagtgtccaaaacattcatcattggggagctccatccagatgacagaccaaagttaaacaagcctccggaaactcttatcactactattgattctagttccagttggtggaccaactgggtgatccctgccatctctgcagtggccgtcgccttgatgtatcgcctatacatggcagaggactgaacacctcctcagaagtcagcgcaggaagagcctgctttggacacgggagaaaagaagccattgctaactacttcaactgacagaaaccttcacttgaaaacaatgattttaatatatctctttctttttcttccgacattagaaacaaaacaaaaagaactgtcctttctgcgctcaaatttttcgagtgtgcctttttattcatctactttattttgatgtttccttaatgtgtaatttacttattataagcatgatcttttaaaaatatatttggcttttaaagta

SEQ ID NO: 346191 - DNA, 1191 bp, Homo sapiens
agtggggttcccggcgcggggaatgtcccgggtggagctggctgagtcgcgcgctctgctccacccgacggggctgtgtgtgctgggcctggctcgcggcgaaccgagatggcagagcagtcggacgaggccgtgaagtactacaccctagaggagattcagaagcacaaccacagcaagagcacctggctgatcctgcaccacaaggtgtacgatttgaccaaatttctggaagagcatcctggtggggaagaagttttaagggaacaagctggaggtgacgctactgagaactttgaggatgtcgggcactctacagatgccagggaaatgtccaaaacattcatcattggggagctccatccagatgacagaccaaagttaaacaagcctccggaaactcttatcactactattgattctagttccagttggtggaccaactgggtgatccctgccatctctgcagtggccgtcgccttgatgtatcgcctatacatggcagaggactgaacacctcctcagaagtcagcgcaggaagagcctgctttggacacgggagaaaagaagccattgctaactacttcaactgacagaaaccttcacttgaaaacaatgattttaatatatctctttctttttcttccgacattagaaacaaaacaaaaagaactgtcctttctgcgctcaaatttttcgagtgtgcctttttattcatctactttattttgatgtttccttaatgtgtaatttacttattataagcatgatcttttaaaaatatatttggcttttaaagtaaaaaaacacatccccactaatatccgcggtctccaaccctatcctccctccactatgatgccgcccgcacggtaaacaaaaagagatctttccgaatcatagcttcgccaaaatcacatctcagaaatagaaagaacacaccgaaccataaaacaaacaactgagcccgcgcacatcaaccataaaatatccgcttacacctacatattgaacccactattctcctacacccacataataccacgtacatcaaatagaccacacccgtatactctttactattacgccccccccgatatcccctctatctatttcaatacccctacaccataaatacaccctgttgggaacgcgggggcgaccgcttcgacacaccactccgaaaataat

SEQ ID NO: 346192 - DNA, 948 bp, Homo sapiens
agtggggttcccggcgcggggaatgtcccgggtggagctggctgagtcgcgcgctctgctccacccgacggggctgtgtgtgctgggcctggctcgcggcgaaccgagatggcagagcagtcggacgaggccgtgaagtactacaccctagaggagattcagaagcacaaccacagcaagagcacctggctgatcctgcaccacaaggtgtacgatttgaccaaatttctggaagagcatcctggtggggaagaagttttaagggaacaagctggaggtgacgctactgagaactttgaggatgtcgggcactctacagatgccagggaaatgtccaaaacattcatcattggggagctccatccagatgacagaccaaagttaaacaagcctccggaaactcttatcactactattgattctagttccagttggtggaccaactgggtgatccctgccatctctgcagtggccgtcgccttgatgtatcgcctatacatggcagaggactgaacacctcctcagaagtcagcgcaggaagagcctgctttggacacgggagaaaagaagccattgctaactacttcaactgacagaaaccttcacttgaaaacaatgattttaatatatctctttctttttcttccgacattagaaacaaaacaaaaagaactgtcctttctgcgctcaaatttttcgagtgtgcctttttattcatctactttattttgatgtttccttaatgtgtaatttacttattataagcatgatcttttaaaaatatatttggcttttaaagtaaaacatatagaataaaactcgagggggggccccgggtcccaattcggccctattagggggccgtattacaattccattggccgttcgtttttcaaaagtttggacttgggaaaaaaccttgcggtttccccaatttaatcgttcttt

SEQ ID NO: 346193 - DNA, 822 bp, Homo sapiens
agtggggttcccggcgcggggaatgtcccgggtggagctggctgagtcgcgcgctctgctccacccgacggggctgtgtgtgctgggcctggctcgcggcgaaccgagatggcagagcagtcggacgaggccgtgaagtactacaccctagaggagattcagaagcacaaccacagcaagagcacctggctgatcctgcaccacaaggtgtacgatttgaccaaatttctggaagagcatcctggtggggaagaagttttaagggaacaagctggaggtgacgctactgagaactttgaggatgtcgggcactctacagatgccagggaaatgtccaaaacattcatcattggggagctccatccaatgacagaccaaagttacacaagcctccagaaccttacaggcggtgttcctccggctcttatcactactattgattctagttccagttggtggaccaactgggtgatccctgccatctctgcagtggccgtcgccttgatgtatcgcctatacatggcagaggactgaacacctcctcagaagtcagcgcaggaagagcctgctttggacacgggagaaaagaagccattgctaactacttcaactgacagaaaccttcacttgaaaacaatgattttaatatatctctttctttttcttccgacattagaaacaaaacaaaaagaactgtcctttctgcgctcaaatttttcgagtgtgcctttttattcatctactttattttgatgtttccttaatgtgtaatttacttattataagcatgatcttttaaaaatatatttggcttttaaagta

SEQ ID NO: 346194 - DNA, 789 bp, Homo sapiens
cttgtaatccttatgaaaggattatacttgtagtccctatgaaacacatatgtataccaagtctatttctaaagcctacacattaatttccatttttctaagaaattaagtcaaagatcaaaatctaaagattcaaatctaatttaaagattcaaatagaggccaggcgtgagccactgagcccagccaagtggggcatgagttttctcataaagccagcagggcagagtgattcctagtatagcagggcatgtgttacactcatgtcacttttagcaaatccacgttgccttttcagcaaaattcattacagagttaagaaaaacatgccctggtaattttctgttagaaggggcaaagattttgagtccaccacagtgcacatcatgtcagcatcattgctttttgtgtctttccagttggtggaccaactgggtgatccctgccatctctgcagtggccgtcgccttgatgtatcgcctatacatggcagaggactgaacacctcctcagaagtcagcgcaggaagagcctgctttggacacgggagaaaagaagccattgctaactacttcaactgacagaaaccttcacttgaaaacaatgattttaatatatctctttctttttcttccgacattagaaacaaaacaaaaagaactgtcctttctgcgctcaaatttttcgagtgtgcctttttattcatctactttattttgatgtttccttaatgtgtaatttacttattataagcatgatcttttaaaaatatatttggcttttaaagta

SEQ ID NO: 346195 - DNA, 1179 bp, Homo sapiens
cttgtaatccttatgaaaggattatacttgtagtccctatgaaacacatatgtataccaagtctatttctaaagcctacacattaatttccatttttctaagaaattaagtcaaagatcaaaatctaaagattcaaatctaatttaaagattcaaatagaggccaggcgtgagccactgagcccagccaagtggggcatgagttttctcataaagccagcagggcagagtgattcctagtatagcagggcatgtgttacactcatgtcacttttagcaaatccacgttgccttttcagcaaaattcattacagagttaagaaaaacatgccctggtaattttctgttagaaggggcaaagattttgagtccaccacagtgcacatcatgtcagcatcattgctttttgtgtctttccagttggtggaccaactgggtgatccctgccatctctgcagtggccgtcgccttgatgtatcgcctatacatggcagaggactgaacacctcctcagaagtcagcgcaggaagagcctgctttggacacgggagaaaagaagccattgctaactacttcaactgacagaaaccttcacttgaaaacaatgattttaatatatctctttctttttcttccgacattagaaacaaaacaaaaagaactgtcctttctgcgctcaaatttttcgagtgtgcctttttattcatctactttattttgatgtttccttaatgtgtaatttacttattataagcatgatcttttaaaaatatatttggcttttaaagtaaaaaaacacatccccactaatatccgcggtctccaaccctatcctccctccactatgatgccgcccgcacggtaaacaaaaagagatctttccgaatcatagcttcgccaaaatcacatctcagaaatagaaagaacacaccgaaccataaaacaaacaactgagcccgcgcacatcaaccataaaatatccgcttacacctacatattgaacccactattctcctacacccacataataccacgtacatcaaatagaccacacccgtatactctttactattacgccccccccgatatcccctctatctatttcaatacccctacaccataaatacaccctgttgggaacgcgggggcgaccgcttcgacacaccactccgaaaataat

SEQ ID NO: 346196 - DNA, 471 bp, Homo sapiens
agtggggttcccggcgcggggaatgtcccgggtggagctggctgagtcgcgcgctctgctccacccgacggggctgtgtgtgctgggcctggctcgcggcgaaccgagatggcagagcagtcggacgaggccgtgaagtactacaccctagaggagattcagaagcacaaccacagcaagagcacctggctgatcctgcaccacaaggtgtacgatttgaccaaatttctggaagagcatcctggtggggaagaagttttaagggaacaagctggaggtgacgctactgagaactttgaggatgtcgggcactctacagatgccagggaaatgtccaaaacattcatcattggggagctccatccaatgacagaccaaagtgaaacaagcctccagaaactctagtcactactattgattctattccagttggtggaccaactgggtgataccgctattccggaccggctc

SEQ ID NO: 346197 - DNA, 851 bp, Homo sapiens
  misc_feature (814)..(814): n is a, c, g, or t
  misc_feature (824)..(824): n is a, c, g, or t
agtggggttcccggcgcggggaatgtcccgggtggagctggctgagtcgcgcgctctgctccacccgacggggctgtgtgtgctgggcctggctcgcggcgaaccgagatggcagagcagtcggacgaggccgtgaagtactacaccctagaggagattcagaagcacaaccacagcaagagcacctggctgatcctgcaccacaaggtgtacgatttgaccaaatttctggaagagcatcctggtggggaagaagttttaagggaacaagctggaggtgacgctactgagaactttgaggatgtcgggcactctacagatgccagggaaatgtccaaaacattcatcattggggagctccatccagatgacagaccaaagttaaacaagcctccggaaactcttatcactactattgattctagttccagttggtggaccaactgggtgatccctgccatctctgcagtggccgtcgccttgatgtatcgcctatacatggcagaggactgaacacctcctcagaagtcagcgcaggaagagcctgctttggacacgggagaaaagaagccattgctaactacttcaactgacagaaaccttcacttgaaaacaatgattttaatatatctctttctttttcttccgacattagaaacaaaacaaaaagaactgtcctttctgcgctcaaatttttcgagtgtgcctttttattcatctactttattttgatgtttccttaatgtgtaatttacttattataagcatgatcttttaaaaatatatttggcttttaaagtaaaaaaaagaaganaaaaaagttntgggcgccccgcccccagaaaacttaa

SEQ ID NO: 346198 - DNA, 407 bp, Homo sapiens
  misc_feature (1)..(1): n is a, c, g, or t
  misc_feature (16)..(17): n is a, c, g, or t
  misc_feature (37)..(37): n is a, c, g, or t
ngttcggggaaaaaanncacttctttgatctattccnttggtggaccaactgggtgatccctgccatctctgcagtggccgtcgccttgatgtatcgcctatacatggcagaggactgaacacctcctcagaagtcagcgcaggaagagcctgctttggacacgggagaaaagaagccattgctaactacttcaactgacagaaaccttcacttgaaaacaatgattttaatatatctctttctttttcttccgacattagaaacaaaacaaaaagaactgtcctttctgcgctcaaatttttcgagtgtgcctttttattcatctactttattttgatgtttccttaatgtgtaatttacttattataagcatgatcttttaaaaatatatttggcttttaaagta

SEQ ID NO: 346199 - DNA, 739 bp, Homo sapiens
agtggggttcccggcgcggggaatgtcccgggtggagctggctgagtcgcgcgctctgctccacccgacggggctgtgtgtgctgggcctggctcgcggcgaaccgagatggcagagcagtcggacgaggccgtgaagtactacaccctagaggagattcagaagcacaaccacagcaagagcacctggctgatcctgcaccacaaggtgtacgatttgaccaaatttctggaagagcatcctggtggggaagaagttttaagggaacaagctggaggtgacgctactgagaactttgaggatgtcgggcactctacagatgccagggaaacctccggctcttatcactactattgattctagttccagttggtggaccaactgggtgatccctgccatctctgcagtggccgtcgccttgatgtatcgcctatacatggcagaggactgaacacctcctcagaagtcagcgcaggaagagcctgctttggacacgggagaaaagaagccattgctaactacttcaactgacagaaaccttcacttgaaaacaatgattttaatatatctctttctttttcttccgacattagaaacaaaacaaaaagaactgtcctttctgcgctcaaatttttcgagtgtgcctttttattcatctactttattttgatgtttccttaatgtgtaatttacttattataagcatgatcttttaaaaatatatttggcttttaaagta

SEQ ID NO: 346200 - DNA, 750 bp, Homo sapiens
agtggggttcccggcgcggggaatgtcccgggtggagctggctgagtcgcgcgctctgctccacccgacggggctgtgtgtgctgggcctggctcgcggcgaaccgagatggcagagcagtcggacgaggccgtgaagtactacaccctagaggagattcagaagcacaaccacagcaagagcacctggctgatcctgcaccacaaggtgtacgatttgaccaaatttctggaagagcatcctggtggggaagaagttttaagggaacaagctggaggtgacgctactgagaactttgaggatgtcgggcactctacagatgccagggaaatgtccaaaacattcatcattggggagctccatccagatgacagaccaaagttaaacaagcctccggaaactcttatcactactattgattctagttccagttggtggaccaactgggtgatccctgccatctctgcagtggccgtcgccttgatgtatcgcctatacatggcagaggactgaacacctcctcagaagtcagcgcaggaagagcctgctttggacacgggagaaaagaagccattgctaactacttcaactgacagaaaccttcacttgaaacaaaaagaactgtcctttctgcgctcaaatttttcgagtgtgcctttttattcatctactttattttgatgtttccttaatgtgtaatttacttattataagcatgatcttttaaaaatatatttggcttttaaagta

SEQ ID NO: 346201 - DNA, 1624 bp, Homo sapiens
acagagtagctttgcaactggctttggggacttccgaaagctaccagcactgcactgtgagactctcatccctgagctgaattcatctgattcgacggcaagctttggtgagaacatagatatatttctgaggaaaatggactcagacttctcacatgccttccagaaggaactcacctgcgtcatctgtttgaactacctggtagaccctgtcaccatctgctgtgggcacagcttctgtaggccctgtctctgcctttcgtgggaggaagcccaaagtcctgcaaactgccctgcatgcagggaaccatcaccgaaaatggacttcaaaaccaatattcttctgaagaatttagtgaccattgccagaaaagccagtctctggcaattcctgagctctgagaaacaaatatgtgggacccataggcaaacaaagaagatgttctgtgacatggacaagagtctcctctgcttgctgtgctccaactctcaggagcacggggctcacaaacaccatcccatcgaagaggcagctgaggaacaccgggagaaactcttaaagcaaatgaggattttatggaaaaagattcaagaaaatcagagaaatctatatgaggagggaagaacagccttcctctggaggggcaatgtggttttacgggcacagatgatcaggaatgagtataggaagctgcatccggttctccataaggaagaaaaacaacatttagagagactgaacaaggaataccaagagatttttcagcaactccagagaagttgggtcaaaatggatcaaaagagtaaacacttgaaagaaatgtatcaggaactaatggaaatgtgtcataaaccagatgtggagctgctccaggatttgggagacatcgtggcaaggagtgagtccgtgctgctgcacatgccccagcctgtgaatccagagctcactgcaggacccatcactggactggtgtacaggctcaaccgcttccgagtggaaatttccttccattttgaagtaaccaatcacaatatcaggctctttgaggatgtgagaagttggatgtttagacgtggacctttgaattctgacagatctgactattttgctgcatggggagccagggtcttctcctttgggaaacactactgggagctggatgtggacaactcttgtgactgggctctgggagtctgtaacaactcctggataaggaagaatagcacaatggttaactctgaggacatatttcttcttttgtgtctgaaggtggataatcatttcaatctcttgaccacctccccagtgtttcctcactatatagagaaacctctgggccgggttggtgtgtttcttgattttgaaagtggaagtgtgagttttttgaatgtcaccaagagttccctcatatggagttacccagctggctccttaacttttcctgtcaggcctttcttttacactggccacagatgatcaggattaagaaaacttactgtttgggaactccatatacaagggagcccttcactgttgatacaaagaaatcatactgttcaggctttttttgtactttagtgtcacttcattttattgctattaaataaaaaatttgtaaaaggc

SEQ ID NO: 346202 - DNA, 1676 bp, Homo sapiens
acagagtagctttgcaactggctttggggacttccgaaagctaccagcactgcactgtgagactctcatccctgagctgaattcatctgattcgacggcaagctttggtgagaacatagatatatttctgaggaaaatggactcagacttctcacatgccttccagaaggaactcacctgcgtcatctgtttgaactacctggtagaccctgtcaccatctgctgtgggcacagcttctgtaggccctgtctctgcctttcgtgggaggaagcccaaagtcctgcaaactgccctgcatgcagggaaccatcaccgaaaatggacttcaaaaccaatattcttctgaagaatttagtgaccattgccagaaaagccagtctctggcaattcctgagctctgagaaacaaatatgtgggacccataggcaaacaaagaagatgttctgtgacatggacaagagtctcctctgcttgctgtgctccaactctcaggagcacggggctcacaaacaccatcccatcgaagaggcagctgaggaacaccgggagaaactcttaaagcaaatgaggattttatggaaaaagattcaagaaaatcagagaaatctatatgaggagggaagaacagccttcctctggaggggcaatgtggttttacgggcacagatgatcaggaatgagtataggaagctgcatccggttctccataaggaagaaaaacaacatttagagagactgaacaaggaataccaagagatttttcagcaactccagagaagttgggtcaaaatggatcaaaagagtaaacacttgaaagaaatgtatcaggaactaatggaaatgtgtcataaaccagatgtggagctgctccaggatttgggagacatcgtggcaaggagtgagtccgtgctgctgcacatgccccagcctgtgaatccagagctcactgcaggacccatcactggactggtgtacaggctcaaccgcttccgagtggaaatttccttccattttgaagtaaccaatcacaatatcaggctctttgaggatgtgagaagttggatgtttagacgtggacctttgaattctgacagatctgactattttgctgcatggggagccagggtcttctcctttgggaaacactactgggagctggatgtggacaactcttgtgactgggctctgggagtctgtaacaactcctggataaggaagaatagcacaatggttaactctgaggacatatttcttcttttgtgtctgaaggtggataatcatttcaatctcttgaccacctccccagtgtttcctcactatatagagaaacctctgggccgggttggtgtgtttcttgattttgaaagtggaagtgtgagttttttgaatgtcaccaagagttccctcatatggagttacccagctggctccttaacttttcctgtcaggcctttcttttacactggccacagatgatcaggattaagaaaacttactgtttgggaactccatatacaagggagcccttcactgttgatacaaagaaatcatactgttcaggctttttttgtactttagtgtcacttcattttattgctattaaataaaaaatttgtaaaaggcaaaactttttgtacattttcttacaattaaaataatctcttatggaccatta

SEQ ID NO: 346203 - DNA, 561 bp, Homo sapiens
ggttgcagtaagctgagatcatgccactgcactccagcctgcagcctgggcgacagagcgagagactccatctcagaaaaaaaaaaaaaaaaaggatttgcatactatgtttatgaattgaaattcatcctaaatgtgtcacttttctgttgggtggggtgactcatgcctgtaataccaggacgtataatcgtgccactgccctccagcctgggtgacagagtgagaccgtgtctttatttatttgagacagaatctctctctgtcactggagggaagtggtgtgatcatggcttcctgcagcctcaatcccctgggctcaagtgatcttcccacctcagcttcctgagtggctggaactataggcacctgtcatcatgcctggctaattttattgtctttttgtagagatgggatttcaccatcttgccctggctgttcttgaactcctgggctcaagctgtcctcccgcctcaagcctcccgaagtgctgggattacagactcgagccactgtgcccagccatagattccccaagtgggattgctaggtaaaagggtt

SEQ ID NO: 346204 - DNA, 337 bp, Homo sapiens
ttaaattataaaaattggctctcattgacttccaattaccaagatactgttgttggagcacagacctagctagatagcctcttttattgcattgcatatgagttaaaataaatgtcaggtaactaaggaaaatgccatgttatttttatacaacaacctagagaaagtattgtgagccaagagtagactttgtgattttcagtctctttctagacattccaactttagaatggattttagcagtgccttttgtgtaaatatacctttggtagataagaaatcctttcattcctgagcctggagtgtagggtcagttaactgaggagtagctgttatg

SEQ ID NO: 346205 - DNA, 446 bp, Homo sapiens
aatatatttttgtttactttgttttgactttccatgagttcatacctatacatgtctatactttgcatttgctgtttactctctttctggaatgtttttcctcaaaatatttctgaggcttagttccttacctctcttaggccttatccagacatctccttttattaagacatttcctaattactctattaaaactgaaacttcctctcctatacctatttcctgcctatccttgctcatggcttatctgttttcagagtttttatcaccttataaataacatatattttatgtttttgttgtcatgttctcactagagtacgagattcatctaggcagatttttttttttgtctggtttatttactactatgttctatcactgagaagagtgcctgacacgtggaagtagttgatgtgttaatgaataaatactatggtgactaa

SEQ ID NO: 346206 - DNA, 613 bp, Homo sapiens
tgagatagggtctcactctgtcaccggggttggagtgcagtggcacgatcttggctcactgcagccttgacctcccagggctcaagtaatcctcctacctcagtccccaccgggtagctgggactacatgcacgcaccaccatgccctgctaattttttttttcctgtattgtagagacgaggtctcactatgttgcccaggctggtctcgaactcctgggctcaagcaatctgcccgcctcaacctcccaaaatgttgggattacagacatgagccactgcgtccggccacgtacaaggtctctttaaatgatgaattggaaacatcagtatttcttcttttgcttaaattccagtcccctgccaacgtacactgccataccaagattaaatagagaagggcacccagaagcatctggttcgctgtaagcacttgacagctatcagctatgatcatcatttcttcttgctgatgttactggaacattgtggatgaagcagtgtttgccttaatcaatgggggcgagtttggaaggcctgccctccagggatgtcttagttccaggtgctgcaatttgcagtcctggaaatggagaaaggagataagcctgca

SEQ ID NO: 346207 - DNA, 729 bp, Homo sapiens
agttgcttgtgattaaataaccccaactgacgtggaaatcaaataaagcaacaaagaactgctttttcaactaacaaaatatacagctggatgtttgtcacaattctaatgtccctgcaaagatgagatgcatgaatcacacagcaatctcatcaaaaagtttatcttatgaggcataggagaagagaatcctggaaaaagcaagaagcaggaagataagaggcaaagaagaagagagccccacccactggggcaagctggggccccagatgatgaaactgtggcccagaaagtttaagggatgtgtcaaatgtcacacagctcacagatccagggacatggcttaaatccagatatcttgattctaacttcagttgaggaagagaaagagtgctgccccacgctgcctgatttacaacgtgaagtgaaatctttgaaaagaaaaataagacaatgtcactcaagctcttatctgaggatttcctgggtttgaagacagagctcaaactcatacaaggggtcatctgagtctgcagataggcttgctttatgctgctccgtcagatctcttctaaagattagtgcgcaattctggacattacattttaatggtaacatggattcaactaaagggtaagcaaaggacaccgacaggaatagggagggtgccatttatagagaaaagactgagaggtccatattgttattttacctgaaagatataataaa

SEQ ID NO: 346208 - DNA, 727 bp, Homo sapiens
aggaacagaaaaaaaaaggaatttgagacgggatctcagcatgtttgccaggatggtctcagtctcttgacctcgtgatccgcctaccttggactcccaaagtgttggaattacaggtgtgagccactgcgcccagccatcagaacaaaatatacagctggatgtttgtcacaattctaatgtccctgcaaagatgagatgcatgaatcacacagcaatctcatcaaaaagccctagcactacctctcagtatcttcatatccttcaatgatgaaactgtggcccagaaagtttaagggatgtgtcaaatgtcacacagctcacagatccagggacatggcttaaatccagatatcttgattctaacttcagttgaggaagagaaagagtgctgccccacgctgcctgatttacaacgtgaagtgaaatctttgaaaagaaaaataagacaatgtcactcaagctcttatctgaggatttcctgggtttgaagacagagctcaaactcatacaaggggtcatctgagtctgcagataggcttgctttatgctgctccgtcagatctcttctaaagattagtgcgcaattctggacattacattttaatggtaacatggattcaactaaagggtaagcaaaggacaccgacaggaatagggagggtgccatttatagagaaaagactgagaggtccatattgttattttacctgaaagatataataaa

SEQ ID NO: 346209 - DNA, 410 bp, Homo sapiens
gagattaagagacatgaggactaaaagagtcccattaggtgccctagcaagaagtaacatcacagggtcagtcaattacagggtattgtcaccataagtgcctgatatacatattaagggaaggcaagcgacactaccaaagtctactcacatccagccaaaagtcaaagtgaattcttaaaatagtgagtctttatattattatggttctttgcagttttcaaatgatttttacaatgtaagttatcatacctgattcaataagcccgcaagttcacccacatatgacgtccactttacagatgatgaaactgtggcccagaaagtttaagggatgtgtcaaatgtcacacagctcacagatccagggacatggcttaaatccagatatcttgattctaacttcagttg

SEQ ID NO: 346210 - DNA, 3451 bp, Homo sapiens
  misc_feature (799)..(799): n is a, c, g, or t
  misc_feature (825)..(825): n is a, c, g, or t
  misc_feature (1192)..(1192): n is a, c, g, or t
  misc_feature (2381)..(2381): n is a, c, g, or t
cctaatgttattcattaacacattttcatattatttaaattcttacaagcaacatttttaatgactgcatattttccatagtcattcctatatctccacttctttactgttataaataaagccataggacacgtttatgtataatcttatttttcacatttcaggtcatttttaacatggattcttagatgctgacaaatattgccaaattccattccaaaagaggttacacttatttcctttcatcagtgaatgagtatgcttattttcactgcacctttgacagctttatagtgtaatgattttttaaaaaattctatatagatgaaaaacaatgcttcggatgtttgggtttcgttttaatgtcactttaactgaagctatcttgtaaaattaaaagattgaaattaaagttatcagagtacattgctgatagttttccattgttttgaagtctgtatcctaaatgattaggtaataattccaaaaaatgccatacacactgtgtaattataaaaagaaatataataaaattttggggccatggtaatacctgtaataaattgagatcttacccctaaagtgggaacatggtagtttctaagtgacagtataacttgaccaacataatcgtacatcttttgaaattgctggtgatagagaattttatgtcagcggaaggaattaggatttaattatattatgtgtggcacagatatattttaaggctgaggttacctctccccattgtggtaaggaattcatgccgtttcctttttcagcttgcttgttagtgtgntagatctcagtttctaggtttttggnttttgttttttttttgtatttgtgtctttagattgtgccttgccagtacatgctgcagacaatgaaggatgagcaagttttctacattcaatacttgaagtccatggcattttcagtgtactgccagtgcaggcgaccactgcctacacagatccacattaaatccctcacgggatttgggcctgcagccagcattgagatgaccctcaagaaccctgaggtaggtattggcaggacagaaacttagaaaatttatactaaaatgcaagctagaagaggtattttatctaacccagagattggctggttgcttagttggtcttctacattgatataagagttgctaggctggatgtgttggctcacncctgtagtcttagcactttcggaggctgaggtggaaggattgcttaagcctaggagtttgagaccacactgggcaacatagcaagaccccatctctacaaattttcttttaaaaattatccaggtgtgatgtgtgccggtagtcctggctgtttgggaggctgaggtggaaggatcacttgagcccaggagtttgagatggcagtgagctgtgatcacataaccacttccgcctggagagcaagaccctgtctcaggggggaataaaaacgagttggcaggtttctttaactcttaggtttaaatagaggagatacttctctgaactttaaaacatttttgagaagagaggcaagcaaattcttactgttttttttatgtaggactttaggcaataataaatgtatcccttttagtttttaatgttttaatttcctaaatttattttctttatttttctaagctaatctgtgtcttagatcagaaatcctttgcgttttccagctctggtctgtatcctgggacaacagttgtagttgtgtttactctgcaggggtccctcgttttgtgatgcacatacttagaggaagttgatttctcctttccttgcctcagtgcttccgtatataaatgaatgcattttcactccatcttttaaaacctacttcctacagatatgtgtggatctcaaagggaattttacaacaccaaagctaaacatgttttaaacaaaagttttacacttcctttgtttttctaatcaccttatcttgaagataggtataaaaagcaatgttcagaattttcaaagccttcaaaaatcagttcccacaattttattgcatgaaaagtatcccattagtaaaagccagcatacacctctttaccataagagagctccttaaaacaccaattgctatttttagttggtaatgttgttctgaacaactctatgaaatgcttgcacttttataagtaaaatgcttgggagtgaaaaatgatgcaagtagttaacactgtgtttgttgtaacttggtgcaggtcagcttagtcccaagggagaaaagctgctcagccaatgacctacattcactccagtgttatataaaatttctattttaggcagttttagtttagtttattctttgagtttgaatttttcacttctatgagcaattcatctgttttcnctgttaaatttttctagaatttcaaaaataaatgtctctacttgttttttattttgtttccagaaattatgaattattgcctttctaaaggttattatgctcaggcagaacaccatcaggagctcataagataaagtgaggtttagattaaaataaatggcaaaaagacttcgagtaatatcgtttttctccattttgcttggaacaggaagagagaagtaaatgattttactttattaaaaacaaaagaaccaaatgttataaatatttgctgaagtttatacattttaatctgcattaaggtaatggttagttggtcaatgctgcctctgcctcagtctgcagcgagaacattgtgttttcatttggtaaatacagttgagcatctacggtgtgccaggtgctgtattaggtgctaaggatgcaggggtgaacaaaacaggcccctgcctccatgcaattctcattctctgggtggcacagttttatgcaagttatcacatgtgaaagaatttatagtttttattatgcaagttttcaaataaatccaattgctgttatcttttgtttttcatggaatatctcgcatctcagaacacagtttgggaatcatattttatttagtgttttcagatgctatctattatatctaagatatttcacatttagccattcgttttataaaaaactccaggcaaactcagctggacttttcttgctttaataacagctttattgagatacaattcacatatcacgaaattctttttaaaaattttacagttcaggccgggcgcggtggctcatgcctataatcccaacactttgggaggctgaggctggcgggtcacctgaggtcaggagttcgagaccagcttggccagcatggcaaaatcccgtctccactaaaaataaaaaaattagccaggcgtggtggcggatgcctataatcccagctacttgggaagctgaggcgggagaattgcttgaatccatgaggtggaggttgcagtgagccaagatcacgccactgcactccagtctcggcgacagagtgagactctgtctcc

SEQ ID NO: 346211 - DNA, 9261 bp, Homo sapiens
gctgaactcacgggaatcaaatggcgtaggtacaattttggagggcatggggactgtggacccataatttcagccccagcccaagatgatccaattctgttaagtttcatccgctgtctgcaagctaacctgctttgtgtatggcgtcgtgatgtcaaaccagattgcaaagagttatggatattctggtggggagatgaacccaacctagtgggtgtaatacatcatgaactgcaggttgtggaagaaggactctgggaaaatggcctttcctatgaatgtaggacgctgctcttcaaagcgatccacaatctgttagaaaggtgcctaatggataagaacttcgttaggattgggaaatggtttgtccgaccctacgaaaaggatgaaaagccagtcaacaaaagtgagcatttgtcctgtgctttcacattctttctgcatggagaaagtaatgtatgcacaagtgtggagattgcccagcaccagccaatttatttgatcaatgaggagcatatacacatggctcagtcttcacctgcaccatttcaagtactggtaagtccttatggcttaaatgggacgctaacaggccaagcatacaagatgtcagacccagccactcgtaagttgattgaggaatggcagtatttctacccgatggtgctaaaaaagaaagaagaatcgaaagaggaagacgagttgggatatgatgatgatttccctgtggcagttgaagtaattgttggtggtgttcggatggtttacccttcagcatttgttttgatctctcagaatgacatcccggttcctcagagtgttgccagtgctggaggccacattgcagttgggcagcaagggcttggtagtgtgaaggacccaagtaactgtgggatgcctctgacccctcccacctctccagaacaggctatcctaggtgagagtggaggtatgcagagtgctgccagtcacctggtttcccaagatggagggatgataacgatgcacagtccaaagagatcggggaagattcctccaaaactccacaatcatatggtccatcgagtctggaaggaatgcatcctcaacagaacccagtccaagaggagccaaatgtcaactccaactcttgaagaagagcctgctagcaatcctgctacttgggattttgtggatccaacccaaagagtcagctgttcttgttccaggcataagcttttaaaacgttgtgcagtcgggcccaatcgacctcccacagtatctcaaccagggttcagtgcaggaccatcatcatcttcatctttaccacctcctgcttcttctaagcacaaaacagcagaaagacaggaaaaaggagacaagctgcaaaagagacccttaataccatttcaccataggccctctgtggccgaagaattatgcatggagcaagatacaccaggacagaaactagggttggcagggatagactcctccttagaggtgtctagcagtaggaaatatgataagcaaatggccgtgccttccagaaatacaagcaagcaaatgaatctgaatcctatggattcacctcattcccctatatcccctctgccaccaacactcagccctcagccacgaggtcaggaaacagagagtttggacccaccatcggtccctgtgaatccagccctttatggaaatggactagaactccagcagttgtctactctggatgacagaactgtcctcgtaggccaaagactgcctctcatggcagaggtcagcgagacagccttatattgtgggattaggccctcgaacccggagtcatcagaaaagtggtggcatagttatcgtctcccacccagtgatgatgctgagttcaggcctccagagctccagggtgagagatgtgatgccaaaatggaggtaaactcagagagcactgcattgcaaagactcttagcacaacctaacaaacggtttaaaatctggcaagacaaacagccccagttgcagccactccacttccttgacccattgcctctatcacaacaacctggagacagtttgggagaagtgaatgacccatatacctttgaagatggtgacataaaatacatctttacagccaacaagaaatgcaaacaagggacggagaaagattccctgaaaaagaataagtcagaggatggatttggtaccaaggatgtcactacaccaggtcattccacgccggtgcctgatgggaaaaatgccatgtctattttcagttctgctactaaaacagatgtccggcaggataatgctgctggcagagctggctccagtagccttacacaggtaacagatttggcaccttccctgcatgacttagacaacatctttgataattctgatgacgacgaacttggggctgtatcacctgctctgcgctcatcaaaaatgcctgcagttgggacagaagaccgacctcttgggaaggatggaagagctgctgttccttatccaccaacagttgcagacttgcaaaggatgtttcccactccaccatctttggaacagcatcctgcattttctcctgtgatgaattataaagatgggatcagctcagagacagtgacagcattaggcatgatggagagccctatggtcagtatggtttcaacacaactcacagaattcaaaatggaagtggaagatggattaggaagtcccaagcccgaggaaattaaggacttttcatatgtgcacaaagttccatcctttcaaccttttgtgggatcctccatgtttgctccactgaagatgttgccgagccattgtttgctacctctgaagatacctgatgcctgtctgtttcggccttcatgggcaattcctcctaaaattgaacaactgcccatgccccctgcagccactttcattagagatggctacaataacgtgcctagtgttgggagcctagcagatccagactatctgaacacaccacagatgaacacacccgtgacgttgaacagcgctgccccagccagcaatagtggggcaggagtcctaccatctccagcaacccctcgcttctctgtccccacaccacgaacccccaggaccccaagaactcccagaggtgggggcactgccagtggtcaagggtctgttaagtatgatagcaccgatcaaggatcaccagcctccaccccctctactacacggcccctcaactctgtggagcccgccaccatgcagccaattcccgaagcccacagcctctatgttaccctgattctctccgattccgtgatgaatatctttaaagacagaaactttgacagctgttgcatctgtgcctgcaacatgaacatcaaaggggcggatgtcgggctttacatccccgattcttccaatgaggaccagtaccgctgtacctgtgggtttagtgcgattatgaaccgcaaacttggctacaattcaggactcttccttgaagatgagttggatatttttgggaagaattctgatattggtcaggctgcagagaggcgcttaatgatgtgtcagtccaccttccttcctcaggtggaaggaaccaaaaaaccccaggagccacccataagccttctcctcctcctccagaatcaacacacacaaccttttgcttcactgaatttcctggactacatttcctctaacaatcgccaaactcttccctgtgtaagctggagttatgaccgggtgcaagcagataataatgattactggacggaatgctttaatgcgttggagcaggggcggcagtatgtggataaccccactggtggaaaagtggacgaagctctggtgagaagtgccactgtgcactcttggcctcacagcaatgtgctggacatcagcatgctctcctcccaggatgtggttcgtatgctgttgtccctgcagccctttctccaagatgccatccaaaagaagcgcacgggcaggacctgggagaacatccagcatgtgcagggaccactcacttggcagcagttccataaaatggcaggacggggaacctacggttcggaagaatctcctgagccgttgcccatccccactctgctggtaggctatgacaaggatttcctcaccatctcgccattctccttgccgttttgggagaggctcttgttggacccatatgggggccaccgtgatgttgcctatattgtggtgtgtccagaaaatgaggccttgctcgaaggagccaaaactttcttcagggacttgagtgctgtatacgagatgtgtaggcttgggcagcacaagcccatctgcaaagtgctacgtgacgggatcatgcgcgtgggaaaaactgtggcacagaagctgacagatgagcttgtgagtgagtggtttaaccagccttggagcggcgaggagaatgacaatcattccagactcaaactttatgcgcaagtttgccgccatcacctagcaccttatttagccactctgcagcttgatagcagcctattgataccacctaaataccagaccccaccagcagcagcacagggacaagctacgccagggaatgctgggcccttagctccaaatggatcagcagctcccccagctggcagtgcatttaatcccacctcgaatagtagttctacaaatcctgcagcaagtagttctgcatctggttcctctgtgccaccggtctcatcgtctgcctctgctcctggtattagccagataagcactacctcttcttcaggattcagtggtagtgttggagggcagaaccccagcactgggggcatttctgcggatagaacgcaagggaacataggctgtggtggagacactgaccctgggcagagctcttctcagccctcacaggatggacaagagagtgttacagaaagggagagaataggaattcccacggagcctgactctgcagacagccatgcccaccctccagctgttgtcatttacatggtggacccgttcacgtatgctgcagaggaggactccacttctgggaacttttggctgttgagcttgatgcgctgctacacagaaatgctggataatttacctgagcatatgagaaattctttcattctccagattgtgccttgccagtacatgctgcagacaatgaaggatgagcaagttttctacattcaatacttgaagtccatggcattttcagtgtactgccagtgcaggcgaccactgcctacacagatccacattaaatccctcacgggatttgggcctgcagccagcattgagatgaccctcaagaaccctgagcggcccagcccaatccagctttactcccctccctttatattggccccaatcaaagacaagcagacagagctgggagagacgtttggtgaggcgagccagaaatacaatgtgctcttcgtgggctattgtctgtctcacgaccagcgctggcttttggcttcctgcactgacctccatggggaattattagagacctgcgttgtaaatattgctttaccaaacaggtcacggaggagtaaagtatctgcacgtaaaattggactacagaagttatgggagtggtgcatagggattgtccaaatgacatctctaccctggagagttgtaatcgggcgacttgggcgtcttggccatggggagcttaaagattggagtatcctccttggagaatgttcactacagacaatcagcaaaaagctcaaggatgtgtgccggatgtgtggaatctctgccgcagactctccttctatccttagtgcctgcctggttgccatggagccccaggggtcctttgtagtgatgccagatgctgtcacaatgggctctgtttttggccgaagtactgcactgaacatgcagtcatctcagctcaacacccctcaagatgcttcttgtacacacatcttggtgttcccaacatcatcaaccatccaggtggctccagccaactaccccaatgaagatgggtttagccccaacaatgatgatatgtttgttgaccttccattcccagatgatatggacaatgatattggcatattaatgactgggaacctccattcctctcccaactcttccccagtaccctccccaggctctccttctggaattggtgtgggctctcacttccagcatagtcggagccagggtgagcgtcttctttctagagaagcaccagaggagctaaagcagcagcccctggcccttgggtattttgtatcaactgccaaagctgagaatcttccccagtggttttggtcatcgtgtccccaggctcaaaaccagtgccctctcttcttaaaggcttcgctgcatcaccacatttcagtagcacagacagacgaacttctgcctgccaggaattctcagcgggttccacaccctcttgactccaaaaccacgtcggatgttttaaggtttgttttggagcagtacaacgctctgtcctggctcacgtgcaatccggccacccaggaccgtacttcctgccttcccgtccactttgtggtgctcactcagttgtacaatgccatcatgaatatactttaattggaaaagcacttgttctctctggctcagttccttctccctgcaacctcagtccaaggaacctgctacactctgcaaataacccacatccttttcttcagaccactctccacagtcctgcactgtgattccttctcagcaggcacatgtcaattctgcagtgttcattaccagagtgactccttgacacttctctcatggacctggaaacttccataagtggtgactttcagccagtgcggtggtgtgtgtagccccaaccactggtccccaggaagtggtggtggttgatggcttttcagcgggaaacagaagagacagtgtccttttgcacaagagtctgtgttttcagcctctgtatacaattgagggcagtctagccctttggatgaaatcctcttagttactggtgtatggcctgtgggttacctgaactccataatctgggactttttaaaaataagaaccagctcaagtacatggtttcatactggggtttctgtctccctagtgttcccatccagattagcatgagtgctttggttgacttcaaacctgtgtgtcaatgcagaaggtctggagacagcttcattttgtttatttattttaatttgttttgtcatatggtttttgtgactttatttttttaattcacaaggaccaggtacagtagctgaaacccaattcagatccaccataggattctttgactacatacctctgtcctagaagccggaaaaggagtaaaaacacattggggagatcatgcctaaaagtaatatattcaaaaccacccagcagtaggttttgttaacaacaaactggattttaaaagttctgccatgttaagtggccagcatttcatgaaggataacatttttatacagaaggcagtcaagctcaactcagagccatggaggcaagtaccttaattagttttatatagtcacaacggaaatatattttctagtgaattcttattggaagccaggtctctcctctcattagatcaaaagggacttatgtacatacaacaattgaaagtgtttgctcatgaaatcagttataaatatggtgaattttttctggaccataggaatattatttcaaagaaatattacaacttaaccattaaattagtacttgaagttgagcctttgtggtgggactttttaaaaaaatgcctttttaaagcattaatggctaattgaagtattttatgactcctcattcctggcccagagggttgtctttgaaaccctgtttctaacccttgtgttgtgtgtttctgtctgaggacagtgggtgtgtactggcctcccgggagccactgtgaccaggcctttgagctcttgtcatctgtggagagaatcatgcaaattttaaaagttcttccaagagacttccatgtcctggttattaacaaaaaaggaaaaatgtaataattgatatgattttgtaaaagtatttttcttgaaataatctaaagtttaaaacattatattaaaaaaaaagttgtgtggtgggaatgtgaaagcagagaaataacttgtaaatggataattttgttctctgtaccaccagttgaagggggggttgactttcgcaatgtataggataaaaaatctgatatatcaaaccatttgtatctaatgtgtacagtgtaaaattgactttaaaaatattgcagtgctattttttcttaatcagaaaggaaaattctcaaggccttttgaagagcataagaagatgaagattgtaaacttgtataaaattatcttggtgagaagacaaattgtaaagtagatatttgtaatcttttaccactttggggttgcttttttcccggaattcatcagaactttgaattttttttttaaatgggctgtttttaatgcaggggcttttcttccctagaaacccaattctaagcagaaaaagaaaaaaaacacaaaaaataaaaaacccctacaaaaaaactttaaaaaaaatggcagcaaagggtagttttcatctggtgtcttttatttaagttttttaagttaagaaaagctggtgacatatttatacgtttttgtgcaaaaataaatgaatggcaatagattttaaaaaatcttattatgtacttctgtgtgaaaaagtctgtataatatttcccttaaatatgcattattttacttgtgagttttttactgaattaatctgaaatgtacaagccctggatttgctacagagtgagaagttattttatttttttttatttttaattttggaaattctgcagaaatcagaactcttaccatggtttgaacaaaaaaaggggaaatggggaggggaaaagggtgggattgtccagcatgcttgtatgtatatttcagaaccttttttaaatgtaaaagctgtacatttctgggaagttctgaatttcttttgtttccttttttccttcaagcattttgcagtgagcttcttttatatatagcaaacaatttgaaagaatacaaaaatatgtgaagttcatttaaaaaaataactacagtatagcgctggtacagtacactaaaagactttgataaaaagaaacaataataaaaggcctccattttaaatgtcattcatatataccttgtggatgagagctatatacttttacacacttttttagaggaataaattattgaattactgaagctttgagtg

SEQ ID NO: 346212 - DNA, 10024 bp, Homo sapiens
  misc_feature (2275)..(2275): n is a, c, g, or t
  misc_feature (2697)..(2698): n is a, c, g, or t
gctgaactcacgggaatcaaatggcgtaggtacaattttggagggcatggggactgtggacccataatttcagccccagcccaagatgatccaattctgttaagtttcatccgctgtctgcaagctaacctgctttgtgtatggcgtcgtgatgtcaaaccagattgcaaagagttatggatattctggtggggagatgaacccaacctagtgggtgtaatacatcatgaactgcaggttgtggaagaaggactctgggaaaatggcctttcctatgaatgtaggacgctgctcttcaaagcgatccacaatctgttagaaaggtgcctaatggataagaacttcgttaggattgggaaatggtttgtccgaccctacgaaaaggatgaaaagccagtcaacaaaagtgagcatttgtcctgtgctttcacattctttctgcatggagaaagtaatgtatgcacaagtgtggagattgcccagcaccagccaatttatttgatcaatgaggagcatatacacatggctcagtcttcacctgcaccatttcaagtactggtaagtccttatggcttaaatgggacgctaacaggccaagcatacaagatgtcagacccagccactcgtaagttgattgaggaatggcagtatttctacccgatggtgctaaaaaagaaagaagaatcgaaagaggaagacgagttgggatatgatgatgatttccctgtggcagttgaagtaattgttggtggtgttcggatggtttacccttcagcatttgttttgatctctcagaatgacatcccggttcctcagagtgttgccagtgctggaggccacattgcagttgggcagcaagggcttggtagtgtgaaggacccaagtaactgtgggatgcctctgacccctcccacctctccagaacaggctatcctaggtgagagtggaggtatgcagagtgctgccagtcacctggtttcccaagatggagggatgataacgatgcacagtccaaagagatcggggaagattcctccaaaactccacaatcatatggtccatcgagtctggaaggaatgcatcctcaacagaacccagtccaagaggagccaaatgtcaactccaactcttgaagaagagcctgctagcaatcctgctacttgggattttgtggatccaacccaaagagtcagctgttcttgttccaggcataagcttttaaaacgttgtgcagtcgggcccaatcgacctcccacagtatctcaaccagggttcagtgcaggaccatcatcatcttcatctttaccacctcctgcttcttctaagcacaaaacagcagaaagacaggaaaaaggagacaagctgcaaaagagacccttaataccatttcaccataggccctctgtggccgaagaattatgcatggagcaagatacaccaggacagaaactagggttggcagggatagactcctccttagaggtgtctagcagtaggaaatatgataagcaaatggccgtgccttccagaaatacaagcaagcaaatgaatctgaatcctatggattcacctcattcccctatatcccctctgccaccaacactcagccctcagccacgaggtcaggaaacagagagtttggacccaccatcggtccctgtgaatccagccctttatggaaatggactagaactccagcagttgtctactctggatgacagaactgtcctcgtaggccaaagactgcctctcatggcagaggtcagcgagacagccttatattgtgggattaggccctcgaacccggagtcatcagaaaagtggtggcatagttatcgtctcccacccagtgatgatgctgagttcaggcctccagagctccagggtgagagatgtgatgccaaaatggaggtaaactcagagagcactgcattgcaaaggtaagacagctctctgcaccacccacccgtccaccggaagggcatgggctccctccccatctctacctgctaaactttcagattcaaaattgaagtaggcttttctttgtccttcttgactccggatatggaaaatgtttaatggtcaaatgctttgtcctacttataggttagcacacatgtcatttgacacatgggcatataaagaactctttatgccatttaagtacactccaaatatattaatacatttttgccctactgtttgttaattaaagaatatagctttataagactttccatactgctgtcagtgccttctttgtatgttgacntttttgaggaaggctttgcctgcattcaggtgtatgtatcatgtatctagtataatatttatagctcttttgagccacccattctaaaactttacatagatgatctcatttaatcttcactgtaccatattattacgttaattttataactgagaaactagggccatgcagttagtaaatgacacagatggaatttgaaactaggcagtctgtcctgagaacctgtgctcttaagtggaattgatggacccagagacaaaaacatatatcttgacaaagtatgctaatttttatttaatcatgaatataaactgtaaaagcaaatcactatatcggtgaatttttagttgtttttacaaaaagtttaaactttgtaaatgctttaaggcataaatgctcttttttttttttttttttttgtnntttagactcttagcacaacctaacaaacggtttaaaatctggcaagacaaacagccccagttgcagccactccacttccttgacccattgcctctatcacaacaacctggagacagtttgggagaagtgaatgacccatatacctttgaagatggtgacataaaatacatctttacagccaacaagaaatgcaaacaagggacggagaaagattccctgaaaaagaataagtcagaggatggatttggtaccaaggatgtcactacaccaggtcattccacgccggtgcctgatgggaaaaatgccatgtctattttcagttctgctactaaaacagatgtccggcaggataatgctgctggcagagctggctccagtagccttacacaggtaacagatttggcaccttccctgcatgacttagacaacatctttgataattctgatgacgacgaacttggggctgtatcacctgctctgcgctcatcaaaaatgcctgcagttgggacagaagaccgacctcttgggaaggatggaagagctgctgttccttatccaccaacagttgcagacttgcaaaggatgtttcccactccaccatctttggaacagcatcctgcattttctcctgtgatgaattataaagatgggatcagctcagagacagtgacagcattaggcatgatggagagccctatggtcagtatggtttcaacacaactcacagaattcaaaatggaagtggaagatggattaggaagtcccaagcccgaggaaattaaggacttttcatatgtgcacaaagttccatcctttcaaccttttgtgggatcctccatgtttgctccactgaagatgttgccgagccattgtttgctacctctgaagatacctgatgcctgtctgtttcggccttcatgggcaattcctcctaaaattgaacaactgcccatgccccctgcagccactttcattagagatggctacaataacgtgcctagtgttgggagcctagcagatccagactatctgaacacaccacagatgaacacacccgtgacgttgaacagcgctgccccagccagcaatagtggggcaggagtcctaccatctccagcaacccctcgcttctctgtccccacaccacgaacccccaggaccccaagaactcccagaggtgggggcactgccagtggtcaagggtctgttaagtatgatagcaccgatcaaggatcaccagcctccaccccctctactacacggcccctcaactctgtggagcccgccaccatgcagccaattcccgaagcccacagcctctatgttaccctgattctctccgattccgtgatgaatatctttaaagacagaaactttgacagctgttgcatctgtgcctgcaacatgaacatcaaaggggcggatgtcgggctttacatccccgattcttccaatgaggaccagtaccgctgtacctgtgggtttagtgcgattatgaaccgcaaacttggctacaattcaggactcttccttgaagatgagttggatatttttgggaagaattctgatattggtcaggctgcagagaggcgcttaatgatgtgtcagtccaccttccttcctcaggtggaaggaaccaaaaaaccccaggagccacccataagccttctcctcctcctccagaatcaacacacacaaccttttgcttcactgaatttcctggactacatttcctctaacaatcgccaaactcttccctgtgtaagctggagttatgaccgggtgcaagcagataataatgattactggacggaatgctttaatgcgttggagcaggggcggcagtatgtggataaccccactggtggaaaagtggacgaagctctggtgagaagtgccactgtgcactcttggcctcacagcaatgtgctggacatcagcatgctctcctcccaggatgtggttcgtatgctgttgtccctgcagccctttctccaagatgccatccaaaagaagcgcacgggcaggacctgggagaacatccagcatgtgcagggaccactcacttggcagcagttccataaaatggcaggacggggaacctacggttcggaagaatctcctgagccgttgcccatccccactctgctggtaggctatgacaaggatttcctcaccatctcgccattctccttgccgttttgggagaggctcttgttggacccatatgggggccaccgtgatgttgcctatattgtggtgtgtccagaaaatgaggccttgctcgaaggagccaaaactttcttcagggacttgagtgctgtatacgagatgtgtaggcttgggcagcacaagcccatctgcaaagtgctacgtgacgggatcatgcgcgtgggaaaaactgtggcacagaagctgacagatgagcttgtgagtgagtggtttaaccagccttggagcggcgaggagaatgacaatcattccagactcaaactttatgcgcaagtttgccgccatcacctagcaccttatttagccactctgcagcttgatagcagcctattgataccacctaaataccagaccccaccagcagcagcacagggacaagctacgccagggaatgctgggcccttagctccaaatggatcagcagctcccccagctggcagtgcatttaatcccacctcgaatagtagttctacaaatcctgcagcaagtagttctgcatctggttcctctgtgccaccggtctcatcgtctgcctctgctcctggtattagccagataagcactacctcttcttcaggattcagtggtagtgttggagggcagaaccccagcactgggggcatttctgcggatagaacgcaagggaacataggctgtggtggagacactgaccctgggcagagctcttctcagccctcacaggatggacaagagagtgttacagaaagggagagaataggaattcccacggagcctgactctgcagacagccatgcccaccctccagctgttgtcatttacatggtggacccgttcacgtatgctgcagaggaggactccacttctgggaacttttggctgttgagcttgatgcgctgctacacagaaatgctggataatttacctgagcatatgagaaattctttcattctccagattgtgccttgccagtacatgctgcagacaatgaaggatgagcaagttttctacattcaatacttgaagtccatggcattttcagtgtactgccagtgcaggcgaccactgcctacacagatccacattaaatccctcacgggatttgggcctgcagccagcattgagatgaccctcaagaaccctgagcggcccagcccaatccagctttactcccctccctttatattggccccaatcaaagacaagcagacagagctgggagagacgtttggtgaggcgagccagaaatacaatgtgctcttcgtgggctattgtctgtctcacgaccagcgctggcttttggcttcctgcactgacctccatggggaattattagagacctgcgttgtaaatattgctttaccaaacaggtcacggaggagtaaagtatctgcacgtaaaattggactacagaagttatgggagtggtgcatagggattgtccaaatgacatctctaccctggagagttgtaatcgggcgacttgggcgtcttggccatggggagcttaaagattggagtatcctccttggagaatgttcactacagacaatcagcaaaaagctcaaggatgtgtgccggatgtgtggaatctctgccgcagactctccttctatccttagtgcctgcctggttgccatggagccccaggggtcctttgtagtgatgccagatgctgtcacaatgggctctgtttttggccgaagtactgcactgaacatgcagtcatctcagctcaacacccctcaagatgcttcttgtacacacatcttggtgttcccaacatcatcaaccatccaggtggctccagccaactaccccaatgaagatgggtttagccccaacaatgatgatatgtttgttgaccttccattcccagatgatatggacaatgatattggcatattaatgactgggaacctccattcctctcccaactcttccccagtaccctccccaggctctccttctggaattggtgtgggctctcacttccagcatagtcggagccagggtgagcgtcttctttctagagaagcaccagaggagctaaagcagcagcccctggcccttgggtattttgtatcaactgccaaagctgagaatcttccccagtggttttggtcatcgtgtccccaggctcaaaaccagtgccctctcttcttaaaggcttcgctgcatcaccacatttcagtagcacagacagacgaacttctgcctgccaggaattctcagcgggttccacaccctcttgactccaaaaccacgtcggatgttttaaggtttgttttggagcagtacaacgctctgtcctggctcacgtgcaatccggccacccaggaccgtacttcctgccttcccgtccactttgtggtgctcactcagttgtacaatgccatcatgaatatactttaattggaaaagcacttgttctctctggctcagttccttctccctgcaacctcagtccaaggaacctgctacactctgcaaataacccacatccttttcttcagaccactctccacagtcctgcactgtgattccttctcagcaggcacatgtcaattctgcagtgttcattaccagagtgactccttgacacttctctcatggacctggaaacttccataagtggtgactttcagccagtgcggtggtgtgtgtagccccaaccactggtccccaggaagtggtggtggttgatggcttttcagcgggaaacagaagagacagtgtccttttgcacaagagtctgtgttttcagcctctgtatacaattgagggcagtctagccctttggatgaaatcctcttagttactggtgtatggcctgtgggttacctgaactccataatctgggactttttaaaaataagaaccagctcaagtacatggtttcatactggggtttctgtctccctagtgttcccatccagattagcatgagtgctttggttgacttcaaacctgtgtgtcaatgcagaaggtctggagacagcttcattttgtttatttattttaatttgttttgtcatatggtttttgtgactttatttttttaattcacaaggaccaggtacagtagctgaaacccaattcagatccaccataggattctttgactacatacctctgtcctagaagccggaaaaggagtaaaaacacattggggagatcatgcctaaaagtaatatattcaaaaccacccagcagtaggttttgttaacaacaaactggattttaaaagttctgccatgttaagtggccagcatttcatgaaggataacatttttatacagaaggcagtcaagctcaactcagagccatggaggcaagtaccttaattagttttatatagtcacaacggaaatatattttctagtgaattcttattggaagccaggtctctcctctcattagatcaaaagggacttatgtacatacaacaattgaaagtgtttgctcatgaaatcagttataaatatggtgaattttttctggaccataggaatattatttcaaagaaatattacaacttaaccattaaattagtacttgaagttgagcctttgtggtgggactttttaaaaaaatgcctttttaaagcattaatggctaattgaagtattttatgactcctcattcctggcccagagggttgtctttgaaaccctgtttctaacccttgtgttgtgtgtttctgtctgaggacagtgggtgtgtactggcctcccgggagccactgtgaccaggcctttgagctcttgtcatctgtggagagaatcatgcaaattttaaaagttcttccaagagacttccatgtcctggttattaacaaaaaaggaaaaatgtaataattgatatgattttgtaaaagtatttttcttgaaataatctaaagtttaaaacattatattaaaaaaaaagttgtgtggtgggaatgtgaaagcagagaaataacttgtaaatggataattttgttctctgtaccaccagttgaagggggggttgactttcgcaatgtataggataaaaaatctgatatatcaaaccatttgtatctaatgtgtacagtgtaaaattgactttaaaaatattgcagtgctattttttcttaatcagaaaggaaaattctcaaggccttttgaagagcataagaagatgaagattgtaaacttgtataaaattatcttggtgagaagacaaattgtaaagtagatatttgtaatcttttaccactttggggttgcttttttcccggaattcatcagaactttgaattttttttttaaatgggctgtttttaatgcaggggcttttcttccctagaaacccaattctaagcagaaaaagaaaaaaaacacaaaaaataaaaaacccctacaaaaaaactttaaaaaaaatggcagcaaagggtagttttcatctggtgtcttttatttaagttttttaagttaagaaaagctggtgacatatttatacgtttttgtgcaaaaataaatgaatggcaatagattttaaaaaatcttattatgtacttctgtgtgaaaaagtctgtataatatttcccttaaatatgcattattttacttgtgagttttttactgaattaatctgaaatgtacaagccctggatttgctacagagtgagaagttattttatttttttttatttttaattttggaaattctgcagaaatcagaactcttaccatggtttgaacaaaaaaaggggaaatggggaggggaaaagggtgggattgtccagcatgcttgtatgtatatttcagaaccttttttaaatgtaaaagctgtacatttctgggaagttctgaatttcttttgtttccttttttccttcaagcattttgcagtgagcttcttttatatatagcaaacaatttgaaagaatacaaaaatatgtgaagttcatttaaaaaaataactacagtatagcgctggtacagtacactaaaagactttgataaaaagaaacaataataaaaggcctccattttaaatgtcattcatatataccttgtggatgagagctatatacttttacacacttttttagaggaataaattattgaattactgaagctttgagtg

SEQ ID NO: 346213 - DNA, 5082 bp, Homo sapiens
gagttggcgatcgtagaggaaatgtagtccgggaaatcagtgaagcaaaaggtagtgtgtgatgattctaggagcctgaccaattcaggactcttccttgaagatgagttggatatttttgggaagaattctgatattggtcaggctgcagagaggcgcttaatgatgtgtcagtccaccttccttcctcaggtggaaggaaccaaaaaaccccaggagccacccataagcaatcattccagactcaaactttatgcgcaagtttgccgccatcacctagcaccttatttagccactctgcagcttgatagcagcctattgataccacctaaataccagaccccaccagcagcagcacagggacaagctacgccagggaatgctgggcccttagctccaaatggatcagcagctcccccagctggcagtgcatttaatcccacctcgaatagtagttctacaaatcctgcagcaagtagttctgcatctggttcctctgtgccaccggtctcatcgtctgcctctgctcctggtattagccagataagcactacctcttcttcaggattcagtggtagtgttggagggcagaaccccagcactgggggcatttctgcggatagaacgcaagggaacataggctgtggtggagacactgaccctgggcagagctcttctcagccctcacaggatggacaagagagtgttacagaaagggagagaataggaattcccacggagcctgactctgcagacagccatgcccaccctccagctgttgtcatttacatggtggacccgttcacgtatgctgcagaggaggactccacttctgggaacttttggctgttgagcttgatgcgctgctacacagaaatgctggataatttacctgagcatatgagaaattctttcattctccagattgtgccttgccagtacatgctgcagacaatgaaggatgagcaagttttctacattcaatacttgaagtccatggcattttcagtgtactgccagtgcaggcgaccactgcctacacagatccacattaaatccctcacgggatttgggcctgcagccagcattgagatgaccctcaagaaccctgagcggcccagcccaatccagctttactcccctccctttatattggccccaatcaaagacaagcagacagagctgggagagacgtttggtgaggcgagccagaaatacaatgtgctcttcgtgggctattgtctgtctcacgaccagcgctggcttttggcttcctgcactgacctccatggggaattattagagacctgcgttgtaaatattgctttaccaaacaggtcacggaggagtaaagtatctgcacgtaaaattggactacagaagttatgggagtggtgcatagggattgtccaaatgacatctctaccctggagagttgtaatcgggcgacttgggcgtcttggccatggggagcttaaagattggagtatcctccttggagaatgttcactacagacaatcagcaaaaagctcaaggatgtgtgccggatgtgtggaatctctgccgcagactctccttctatccttagtgcctgcctggttgccatggagccccaggggtcctttgtagtgatgccagatgctgtcacaatgggctctgtttttggccgaagtactgcactgaacatgcagtcatctcagctcaacacccctcaagatgcttcttgtacacacatcttggtgttcccaacatcatcaaccatccaggtggctccagccaactaccccaatgaagatgggtttagccccaacaatgatgatatgtttgttgaccttccattcccagatgatatggacaatgatattggcatattaatgactgggaacctccattcctctcccaactcttccccagtaccctccccaggctctccttctggaattggtgtgggctctcacttccagcatagtcggagccagggtgagcgtcttctttctagagaagcaccagaggagctaaagcagcagcccctggcccttgggtattttgtatcaactgccaaagctgagaatcttccccagtggttttggtcatcgtgtccccaggctcaaaaccagtgccctctcttcttaaaggcttcgctgcatcaccacatttcagtagcacagacagacgaacttctgcctgccaggaattctcagcgggttccacaccctcttgactccaaaaccacgtcggatgttttaaggtttgttttggagcagtacaacgctctgtcctggctcacgtgcaatccggccacccaggaccgtacttcctgccttcccgtccactttgtggtgctcactcagttgtacaatgccatcatgaatatactttaattggaaaagcacttgttctctctggctcagttccttctccctgcaacctcagtccaaggaacctgctacactctgcaaataacccacatccttttcttcagaccactctccacagtcctgcactgtgattccttctcagcaggcacatgtcaattctgcagtgttcattaccagagtgactccttgacacttctctcatggacctggaaacttccataagtggtgactttcagccagtgcggtggtgtgtgtagccccaaccactggtccccaggaagtggtggtggttgatggcttttcagcgggaaacagaagagacagtgtccttttgcacaagagtctgtgttttcagcctctgtatacaattgagggcagtctagccctttggatgaaatcctcttagttactggtgtatggcctgtgggttacctgaactccataatctgggactttttaaaaataagaaccagctcaagtacatggtttcatactggggtttctgtctccctagtgttcccatccagattagcatgagtgctttggttgacttcaaacctgtgtgtcaatgcagaaggtctggagacagcttcattttgtttatttattttaatttgttttgtcatatggtttttgtgactttatttttttaattcacaaggaccaggtacagtagctgaaacccaattcagatccaccataggattctttgactacatacctctgtcctagaagccggaaaaggagtaaaaacacattggggagatcatgcctaaaagtaatatattcaaaaccacccagcagtaggttttgttaacaacaaactggattttaaaagttctgccatgttaagtggccagcatttcatgaaggataacatttttatacagaaggcagtcaagctcaactcagagccatggaggcaagtaccttaattagttttatatagtcacaacggaaatatattttctagtgaattcttattggaagccaggtctctcctctcattagatcaaaagggacttatgtacatacaacaattgaaagtgtttgctcatgaaatcagttataaatatggtgaattttttctggaccataggaatattatttcaaagaaatattacaacttaaccattaaattagtacttgaagttgagcctttgtggtgggactttttaaaaaaatgcctttttaaagcattaatggctaattgaagtattttatgactcctcattcctggcccagagggttgtctttgaaaccctgtttctaacccttgtgttgtgtgtttctgtctgaggacagtgggtgtgtactggcctcccgggagccactgtgaccaggcctttgagctcttgtcatctgtggagagaatcatgcaaattttaaaagttcttccaagagacttccatgtcctggttattaacaaaaaaggaaaaatgtaataattgatatgattttgtaaaagtatttttcttgaaataatctaaagtttaaaacattatattaaaaaaaaagttgtgtggtgggaatgtgaaagcagagaaataacttgtaaatggataattttgttctctgtaccaccagttgaagggggggttgactttcgcaatgtataggataaaaaatctgatatatcaaaccatttgtatctaatgtgtacagtgtaaaattgactttaaaaatattgcagtgctattttttcttaatcagaaaggaaaattctcaaggccttttgaagagcataagaagatgaagattgtaaacttgtataaaattatcttggtgagaagacaaattgtaaagtagatatttgtaatcttttaccactttggggttgcttttttcccggaattcatcagaactttgaattttttttttaaatgggctgtttttaatgcaggggcttttcttccctagaaacccaattctaagcagaaaaagaaaaaaaacacaaaaaataaaaaacccctacaaaaaaactttaaaaaaaatggcagcaaagggtagttttcatctggtgtcttttatttaagttttttaagttaagaaaagctggtgacatatttatacgtttttgtgcaaaaataaatgaatggcaatagattttaaaaaatcttattatgtacttctgtgtgaaaaagtctgtataatatttcccttaaatatgcattattttacttgtgagttttttactgaattaatctgaaatgtacaagccctggatttgctacagagtgagaagttattttatttttttttatttttaattttggaaattctgcagaaatcagaactcttaccatggtttgaacaaaaaaaggggaaatggggaggggaaaagggtgggattgtccagcatgcttgtatgtatatttcagaaccttttttaaatgtaaaagctgtacatttctgggaagttctgaatttcttttgtttccttttttccttcaagcattttgcagtgagcttcttttatatatagcaaacaatttgaaagaatacaaaaatatgtgaagttcatttaaaaaaataactacagtatagcgctggtacagtacactaaaagactttgataaaaagaaacaataataaaaggcctccattttaaatgtcattcatatataccttgtggatgagagctatatacttttacacacttttttagaggaataaattattgaattactgaagctttgagtg

SEQ ID NO: 346214 - DNA, 4724 bp, Homo sapiens
caacagtcccagttacaacagctccagtcacacagctccagttacaacagcccagttacaacagctctagttacaacagctcagttacaacataaccacagaaaagaaaggggagttgaaaaagatacctcccattttagaggagtacattgccattttccatctgccctcgatgctctctggcttggtttgcctgtattttggtaaggtgataaatgttactcttacctttaatctgtaaacattctttagggagcctgtgtgctctagaattgagcccttttgtttttcatgttcgtgtaatttatatttattttgtgcatctcacaagtgactctctctccagtgttacagaaagggagagaataggaattcccacggagcctgactctgcagacagccatgcccaccctccagctgttgtcatttacatggtggacccgttcacgtatgctgcagaggaggactccacttctgggaacttttggctgttgagcttgatgcgctgctacacagaaatgctggataatttacctgagcatatgagaaattctttcattctccagattgtgccttgccagtacatgctgcagacaatgaaggatgagcaagttttctacattcaatacttgaagtccatggcattttcagtgtactgccagtgcaggcgaccactgcctacacagatccacattaaatccctcacgggatttgggcctgcagccagcattgagatgaccctcaagaaccctgagcggcccagcccaatccagctttactcccctccctttatattggccccaatcaaagacaagcagacagagctgggagagacgtttggtgaggcgagccagaaatacaatgtgctcttcgtgggctattgtctgtctcacgaccagcgctggcttttggcttcctgcactgacctccatggggaattattagagacctgcgttgtaaatattgctttaccaaacaggtcacggaggagtaaagtatctgcacgtaaaattggactacagaagttatgggagtggtgcatagggattgtccaaatgacatctctaccctggagagttgtaatcgggcgacttgggcgtcttggccatggggagcttaaagattggagtatcctccttggagaatgttcactacagacaatcagcaaaaagctcaaggatgtgtgccggatgtgtggaatctctgccgcagactctccttctatccttagtgcctgcctggttgccatggagccccaggggtcctttgtagtgatgccagatgctgtcacaatgggctctgtttttggccgaagtactgcactgaacatgcagtcatctcagctcaacacccctcaagatgcttcttgtacacacatcttggtgttcccaacatcatcaaccatccaggtggctccagccaactaccccaatgaagatgggtttagccccaacaatgatgatatgtttgttgaccttccattcccagatgatatggacaatgatattggcatattaatgactgggaacctccattcctctcccaactcttccccagtaccctccccaggctctccttctggaattggtgtgggctctcacttccagcatagtcggagccagggtgagcgtcttctttctagagaagcaccagaggagctaaagcagcagcccctggcccttgggtattttgtatcaactgccaaagctgagaatcttccccagtggttttggtcatcgtgtccccaggctcaaaaccagtgccctctcttcttaaaggcttcgctgcatcaccacatttcagtagcacagacagacgaacttctgcctgccaggaattctcagcgggttccacaccctcttgactccaaaaccacgtcggatgttttaaggtttgttttggagcagtacaacgctctgtcctggctcacgtgcaatccggccacccaggaccgtacttcctgccttcccgtccactttgtggtgctcactcagttgtacaatgccatcatgaatatactttaattggaaaagcacttgttctctctggctcagttccttctccctgcaacctcagtccaaggaacctgctacactctgcaaataacccacatccttttcttcagaccactctccacagtcctgcactgtgattccttctcagcaggcacatgtcaattctgcagtgttcattaccagagtgactccttgacacttctctcatggacctggaaacttccataagtggtgactttcagccagtgcggtggtgtgtgtagccccaaccactggtccccaggaagtggtggtggttgatggcttttcagcgggaaacagaagagacagtgtccttttgcacaagagtctgtgttttcagcctctgtatacaattgagggcagtctagccctttggatgaaatcctcttagttactggtgtatggcctgtgggttacctgaactccataatctgggactttttaaaaataagaaccagctcaagtacatggtttcatactggggtttctgtctccctagtgttcccatccagattagcatgagtgctttggttgacttcaaacctgtgtgtcaatgcagaaggtctggagacagcttcattttgtttatttattttaatttgttttgtcatatggtttttgtgactttatttttttaattcacaaggaccaggtacagtagctgaaacccaattcagatccaccataggattctttgactacatacctctgtcctagaagccggaaaaggagtaaaaacacattggggagatcatgcctaaaagtaatatattcaaaaccacccagcagtaggttttgttaacaacaaactggattttaaaagttctgccatgttaagtggccagcatttcatgaaggataacatttttatacagaaggcagtcaagctcaactcagagccatggaggcaagtaccttaattagttttatatagtcacaacggaaatatattttctagtgaattcttattggaagccaggtctctcctctcattagatcaaaagggacttatgtacatacaacaattgaaagtgtttgctcatgaaatcagttataaatatggtgaattttttctggaccataggaatattatttcaaagaaatattacaacttaaccattaaattagtacttgaagttgagcctttgtggtgggactttttaaaaaaatgcctttttaaagcattaatggctaattgaagtattttatgactcctcattcctggcccagagggttgtctttgaaaccctgtttctaacccttgtgttgtgtgtttctgtctgaggacagtgggtgtgtactggcctcccgggagccactgtgaccaggcctttgagctcttgtcatctgtggagagaatcatgcaaattttaaaagttcttccaagagacttccatgtcctggttattaacaaaaaaggaaaaatgtaataattgatatgattttgtaaaagtatttttcttgaaataatctaaagtttaaaacattatattaaaaaaaaagttgtgtggtgggaatgtgaaagcagagaaataacttgtaaatggataattttgttctctgtaccaccagttgaagggggggttgactttcgcaatgtataggataaaaaatctgatatatcaaaccatttgtatctaatgtgtacagtgtaaaattgactttaaaaatattgcagtgctattttttcttaatcagaaaggaaaattctcaaggccttttgaagagcataagaagatgaagattgtaaacttgtataaaattatcttggtgagaagacaaattgtaaagtagatatttgtaatcttttaccactttggggttgcttttttcccggaattcatcagaactttgaattttttttttaaatgggctgtttttaatgcaggggcttttcttccctagaaacccaattctaagcagaaaaagaaaaaaaacacaaaaaataaaaaacccctacaaaaaaactttaaaaaaaatggcagcaaagggtagttttcatctggtgtcttttatttaagttttttaagttaagaaaagctggtgacatatttatacgtttttgtgcaaaaataaatgaatggcaatagattttaaaaaatcttattatgtacttctgtgtgaaaaagtctgtataatatttcccttaaatatgcattattttacttgtgagttttttactgaattaatctgaaatgtacaagccctggatttgctacagagtgagaagttattttatttttttttatttttaattttggaaattctgcagaaatcagaactcttaccatggtttgaacaaaaaaaggggaaatggggaggggaaaagggtgggattgtccagcatgcttgtatgtatatttcagaaccttttttaaatgtaaaagctgtacatttctgggaagttctgaatttcttttgtttccttttttccttcaagcattttgcagtgagcttcttttatatatagcaaacaatttgaaagaatacaaaaatatgtgaagttcatttaaaaaaataactacagtatagcgctggtacagtacactaaaagactttgataaaaagaaacaataataaaaggcctccattttaaatgtcattcatatataccttgtggatgagagctatatacttttacacacttttttagaggaataaattattgaattactgaagctttgagtg

SEQ ID NO: 346215 - DNA, 10060 bp, Homo sapiens
  misc_feature (2275)..(2275): n is a, c, g, or t
  misc_feature (2697)..(2698): n is a, c, g, or t
gctgaactcacgggaatcaaatggcgtaggtacaattttggagggcatggggactgtggacccataatttcagccccagcccaagatgatccaattctgttaagtttcatccgctgtctgcaagctaacctgctttgtgtatggcgtcgtgatgtcaaaccagattgcaaagagttatggatattctggtggggagatgaacccaacctagtgggtgtaatacatcatgaactgcaggttgtggaagaaggactctgggaaaatggcctttcctatgaatgtaggacgctgctcttcaaagcgatccacaatctgttagaaaggtgcctaatggataagaacttcgttaggattgggaaatggtttgtccgaccctacgaaaaggatgaaaagccagtcaacaaaagtgagcatttgtcctgtgctttcacattctttctgcatggagaaagtaatgtatgcacaagtgtggagattgcccagcaccagccaatttatttgatcaatgaggagcatatacacatggctcagtcttcacctgcaccatttcaagtactggtaagtccttatggcttaaatgggacgctaacaggccaagcatacaagatgtcagacccagccactcgtaagttgattgaggaatggcagtatttctacccgatggtgctaaaaaagaaagaagaatcgaaagaggaagacgagttgggatatgatgatgatttccctgtggcagttgaagtaattgttggtggtgttcggatggtttacccttcagcatttgttttgatctctcagaatgacatcccggttcctcagagtgttgccagtgctggaggccacattgcagttgggcagcaagggcttggtagtgtgaaggacccaagtaactgtgggatgcctctgacccctcccacctctccagaacaggctatcctaggtgagagtggaggtatgcagagtgctgccagtcacctggtttcccaagatggagggatgataacgatgcacagtccaaagagatcggggaagattcctccaaaactccacaatcatatggtccatcgagtctggaaggaatgcatcctcaacagaacccagtccaagaggagccaaatgtcaactccaactcttgaagaagagcctgctagcaatcctgctacttgggattttgtggatccaacccaaagagtcagctgttcttgttccaggcataagcttttaaaacgttgtgcagtcgggcccaatcgacctcccacagtatctcaaccagggttcagtgcaggaccatcatcatcttcatctttaccacctcctgcttcttctaagcacaaaacagcagaaagacaggaaaaaggagacaagctgcaaaagagacccttaataccatttcaccataggccctctgtggccgaagaattatgcatggagcaagatacaccaggacagaaactagggttggcagggatagactcctccttagaggtgtctagcagtaggaaatatgataagcaaatggccgtgccttccagaaatacaagcaagcaaatgaatctgaatcctatggattcacctcattcccctatatcccctctgccaccaacactcagccctcagccacgaggtcaggaaacagagagtttggacccaccatcggtccctgtgaatccagccctttatggaaatggactagaactccagcagttgtctactctggatgacagaactgtcctcgtaggccaaagactgcctctcatggcagaggtcagcgagacagccttatattgtgggattaggccctcgaacccggagtcatcagaaaagtggtggcatagttatcgtctcccacccagtgatgatgctgagttcaggcctccagagctccagggtgagagatgtgatgccaaaatggaggtaaactcagagagcactgcattgcaaaggtaagacagctctctgcaccacccacccgtccaccggaagggcatgggctccctccccatctctacctgctaaactttcagattcaaaattgaagtaggcttttctttgtccttcttgactccggatatggaaaatgtttaatggtcaaatgctttgtcctacttataggttagcacacatgtcatttgacacatgggcatataaagaactctttatgccatttaagtacactccaaatatattaatacatttttgccctactgtttgttaattaaagaatatagctttataagactttccatactgctgtcagtgccttctttgtatgttgacntttttgaggaaggctttgcctgcattcaggtgtatgtatcatgtatctagtataatatttatagctcttttgagccacccattctaaaactttacatagatgatctcatttaatcttcactgtaccatattattacgttaattttataactgagaaactagggccatgcagttagtaaatgacacagatggaatttgaaactaggcagtctgtcctgagaacctgtgctcttaagtggaattgatggacccagagacaaaaacatatatcttgacaaagtatgctaatttttatttaatcatgaatataaactgtaaaagcaaatcactatatcggtgaatttttagttgtttttacaaaaagtttaaactttgtaaatgctttaaggcataaatgctcttttttttttttttttttttgtnntttagactcttagcacaacctaacaaacggtttaaaatctggcaagacaaacagccccagttgcagccactccacttccttgacccattgcctctatcacaacaacctggagacagtttgggagaagtgaatgacccatatacctttgaagatggtgacataaaatacatctttacagccaacaagaaatgcaaacaagggacggagaaagattccctgaaaaagaataagtcagaggatggatttggtaccaaggatgtcactacaccaggtcattccacgccggtgcctgatgggaaaaatgccatgtctattttcagttctgctactaaaacagatgtccggcaggataatgctgctggcagagctggctccagtagccttacacaggtaacagatttggcaccttccctgcatgacttagacaacatctttgataattctgatgacgacgaacttggggctgtatcacctgctctgcgctcatcaaaaatgcctgcagttgggacagaagaccgacctcttgggaaggatggaagagctgctgttccttatccaccaacagttgcagacttgcaaaggatgtttcccactccaccatctttggaacagcatcctgcattttctcctgtgatgaattataaagatgggatcagctcagagacagtgacagcattaggcatgatggagagccctatggtcagtatggtttcaacacaactcacagaattcaaaatggaagtggaagatggattaggaagtcccaagcccgaggaaattaaggacttttcatatgtgcacaaagttccatcctttcaaccttttgtgggatcctccatgtttgctccactgaagatgttgccgagccattgtttgctacctctgaagatacctgatgcctgtctgtttcggccttcatgggcaattcctcctaaaattgaacaactgcccatgccccctgcagccactttcattagagatggctacaataacgtgcctagtgttgggagcctagcagatccagactatctgaacacaccacagatgaacacacccgtgacgttgaacagcgctgccccagccagcaatagtggggcaggagtcctaccatctccagcaacccctcgcttctctgtccccacaccacgaacccccaggaccccaagaactcccagaggtgggggcactgccagtggtcaagggtctgttaagtatgatagcaccgatcaaggatcaccagcctccaccccctctactacacggcccctcaactctgtggagcccgccaccatgcagccaattcccgaagcccacagcctctatgttaccctgattctctccgattccgtgatgaatatctttaaagacagaaactttgacagctgttgcatctgtgcctgcaacatgaacatcaaaggggcggatgtcgggctttacatccccgattcttccaatgaggaccagtaccgctgtacctgtgggtttagtgcgattatgaaccgcaaacttggctacaattcaggactcttccttgaagatgagttggatatttttgggaagaattctgatattggtcaggctgcagagaggcgcttaatgatgtgtcagtccaccttccttcctcaggtggaaggaaccaaaaaaccccaggagccacccataagccttctcctcctcctccagaatcaacacacacaaccttttgcttcactgaatttcctggactacatttcctctaacaatcgccaaactcttccctgtgtaagctggagttatgaccgggtgcaagcagataataatgattactggacggaatgctttaatgcgttggagcaggggcggcagtatgtggataaccccactggtggaaaagtggacgaagctctggtgagaagtgccactgtgcactcttggcctcacagcaatgtgctggacatcagcatgctctcctcccaggatgtggttcgtatgctgttgtccctgcagccctttctccaagatgccatccaaaagaagcgcacgggcaggacctgggagaacatccagcatgtgcagggaccactcacttggcagcagttccataaaatggcaggacggggaacctacggttcggaagaatctcctgagccgttgcccatccccactctgctggtaggctatgacaaggatttcctcaccatctcgccattctccttgccgttttgggagaggctcttgttggacccatatgggggccaccgtgatgttgcctatattgtggtgtgtccagaaaatgaggccttgctcgaaggagccaaaactttcttcagggacttgagtgctgtatacgagatgtgtaggcttgggcagcacaagcccatctgcaaagtgctacgtgacgggatcatgcgcgtgggaaaaactgtggcacagaagctgacagatgagcttgtgagtgagtggtttaaccagccttggagcggcgaggagaatgacaatcattccagactcaaactttatgcgcaagtttgccgccatcacctagcaccttatttagccactctgcagcttgatagcagcctattgataccacctaaataccagaccccaccagcagcagcacagggacaagctacgccagggaatgctgggcccttagctccaaatggatcagcagctcccccagctggcagtgcatttaatcccacctcgaatagtagttctacaaatcctgcagcaagtagttctgcatctggttcctctgtgccaccggtctcatcgtctgcctctgctcctggtattagccagataagcactacctcttcttcaggattcagtggtagtgttggagggcagaaccccagcactgggggcatttctgcggatagaacgcaagggaacataggctgtggtggagacactgaccctgggcagagctcttctcagccctcacaggatggacaagagagtgttacagaaagggagagaataggaattcccacggagcctgactctgcagacagccatgcccaccctccagctgttgtcatttacatggtggacccgttcacgtatgctgcagaggaggactccacttctgggaacttttggctgttgagcttgatgcgctgctacacagaaatgctggataatttacctgagcatatgagaaattctttcattctccagattgtgccttgccagtacatgctgcagacaatgaaggatgagcaagttttctacattcaatacttgaagtccatggcattttcagtgtactgccagtgcaggcgaccactgcctacacagatccacattaaatccctcacgggatttgggcctgcagccagcattgagatgaccctcaagaaccctgagcggcccagcccaatccagctttactcccctccctttatattggccccaatcaaagacaagcagacagagctgggagagacgtttggtgaggcgagccagaaatacaatgtgctcttcgtgggctattgtctgtctcacgaccagcgctggcttttggcttcctgcactgacctccatggggaattattagagacctgcgttgtaaatattgctttaccaaacagggaccccttccccttccccatttctttatttgttaggtcacggaggagtaaagtatctgcacgtaaaattggactacagaagttatgggagtggtgcatagggattgtccaaatgacatctctaccctggagagttgtaatcgggcgacttgggcgtcttggccatggggagcttaaagattggagtatcctccttggagaatgttcactacagacaatcagcaaaaagctcaaggatgtgtgccggatgtgtggaatctctgccgcagactctccttctatccttagtgcctgcctggttgccatggagccccaggggtcctttgtagtgatgccagatgctgtcacaatgggctctgtttttggccgaagtactgcactgaacatgcagtcatctcagctcaacacccctcaagatgcttcttgtacacacatcttggtgttcccaacatcatcaaccatccaggtggctccagccaactaccccaatgaagatgggtttagccccaacaatgatgatatgtttgttgaccttccattcccagatgatatggacaatgatattggcatattaatgactgggaacctccattcctctcccaactcttccccagtaccctccccaggctctccttctggaattggtgtgggctctcacttccagcatagtcggagccagggtgagcgtcttctttctagagaagcaccagaggagctaaagcagcagcccctggcccttgggtattttgtatcaactgccaaagctgagaatcttccccagtggttttggtcatcgtgtccccaggctcaaaaccagtgccctctcttcttaaaggcttcgctgcatcaccacatttcagtagcacagacagacgaacttctgcctgccaggaattctcagcgggttccacaccctcttgactccaaaaccacgtcggatgttttaaggtttgttttggagcagtacaacgctctgtcctggctcacgtgcaatccggccacccaggaccgtacttcctgccttcccgtccactttgtggtgctcactcagttgtacaatgccatcatgaatatactttaattggaaaagcacttgttctctctggctcagttccttctccctgcaacctcagtccaaggaacctgctacactctgcaaataacccacatccttttcttcagaccactctccacagtcctgcactgtgattccttctcagcaggcacatgtcaattctgcagtgttcattaccagagtgactccttgacacttctctcatggacctggaaacttccataagtggtgactttcagccagtgcggtggtgtgtgtagccccaaccactggtccccaggaagtggtggtggttgatggcttttcagcgggaaacagaagagacagtgtccttttgcacaagagtctgtgttttcagcctctgtatacaattgagggcagtctagccctttggatgaaatcctcttagttactggtgtatggcctgtgggttacctgaactccataatctgggactttttaaaaataagaaccagctcaagtacatggtttcatactggggtttctgtctccctagtgttcccatccagattagcatgagtgctttggttgacttcaaacctgtgtgtcaatgcagaaggtctggagacagcttcattttgtttatttattttaatttgttttgtcatatggtttttgtgactttatttttttaattcacaaggaccaggtacagtagctgaaacccaattcagatccaccataggattctttgactacatacctctgtcctagaagccggaaaaggagtaaaaacacattggggagatcatgcctaaaagtaatatattcaaaaccacccagcagtaggttttgttaacaacaaactggattttaaaagttctgccatgttaagtggccagcatttcatgaaggataacatttttatacagaaggcagtcaagctcaactcagagccatggaggcaagtaccttaattagttttatatagtcacaacggaaatatattttctagtgaattcttattggaagccaggtctctcctctcattagatcaaaagggacttatgtacatacaacaattgaaagtgtttgctcatgaaatcagttataaatatggtgaattttttctggaccataggaatattatttcaaagaaatattacaacttaaccattaaattagtacttgaagttgagcctttgtggtgggactttttaaaaaaatgcctttttaaagcattaatggctaattgaagtattttatgactcctcattcctggcccagagggttgtctttgaaaccctgtttctaacccttgtgttgtgtgtttctgtctgaggacagtgggtgtgtactggcctcccgggagccactgtgaccaggcctttgagctcttgtcatctgtggagagaatcatgcaaattttaaaagttcttccaagagacttccatgtcctggttattaacaaaaaaggaaaaatgtaataattgatatgattttgtaaaagtatttttcttgaaataatctaaagtttaaaacattatattaaaaaaaaagttgtgtggtgggaatgtgaaagcagagaaataacttgtaaatggataattttgttctctgtaccaccagttgaagggggggttgactttcgcaatgtataggataaaaaatctgatatatcaaaccatttgtatctaatgtgtacagtgtaaaattgactttaaaaatattgcagtgctattttttcttaatcagaaaggaaaattctcaaggccttttgaagagcataagaagatgaagattgtaaacttgtataaaattatcttggtgagaagacaaattgtaaagtagatatttgtaatcttttaccactttggggttgcttttttcccggaattcatcagaactttgaattttttttttaaatgggctgtttttaatgcaggggcttttcttccctagaaacccaattctaagcagaaaaagaaaaaaaacacaaaaaataaaaaacccctacaaaaaaactttaaaaaaaatggcagcaaagggtagttttcatctggtgtcttttatttaagttttttaagttaagaaaagctggtgacatatttatacgtttttgtgcaaaaataaatgaatggcaatagattttaaaaaatcttattatgtacttctgtgtgaaaaagtctgtataatatttcccttaaatatgcattattttacttgtgagttttttactgaattaatctgaaatgtacaagccctggatttgctacagagtgagaagttattttatttttttttatttttaattttggaaattctgcagaaatcagaactcttaccatggtttgaacaaaaaaaggggaaatggggaggggaaaagggtgggattgtccagcatgcttgtatgtatatttcagaaccttttttaaatgtaaaagctgtacatttctgggaagttctgaatttcttttgtttccttttttccttcaagcattttgcagtgagcttcttttatatatagcaaacaatttgaaagaatacaaaaatatgtgaagttcatttaaaaaaataactacagtatagcgctggtacagtacactaaaagactttgataaaaagaaacaataataaaaggcctccattttaaatgtcattcatatataccttgtggatgagagctatatacttttacacacttttttagaggaataaattattgaattactgaagctttgagtg

SEQ ID NO: 346216 - DNA, 9970 bp, Homo sapiens
  misc_feature (2275)..(2275): n is a, c, g, or t
  misc_feature (2697)..(2698): n is a, c, g, or t
gctgaactcacgggaatcaaatggcgtaggtacaattttggagggcatggggactgtggacccataatttcagccccagcccaagatgatccaattctgttaagtttcatccgctgtctgcaagctaacctgctttgtgtatggcgtcgtgatgtcaaaccagattgcaaagagttatggatattctggtggggagatgaacccaacctagtgggtgtaatacatcatgaactgcaggttgtggaagaaggactctgggaaaatggcctttcctatgaatgtaggacgctgctcttcaaagcgatccacaatctgttagaaaggtgcctaatggataagaacttcgttaggattgggaaatggtttgtccgaccctacgaaaaggatgaaaagccagtcaacaaaagtgagcatttgtcctgtgctttcacattctttctgcatggagaaagtaatgtatgcacaagtgtggagattgcccagcaccagccaatttatttgatcaatgaggagcatatacacatggctcagtcttcacctgcaccatttcaagtactggtaagtccttatggcttaaatgggacgctaacaggccaagcatacaagatgtcagacccagccactcgtaagttgattgaggaatggcagtatttctacccgatggtgctaaaaaagaaagaagaatcgaaagaggaagacgagttgggatatgatgatgatttccctgtggcagttgaagtaattgttggtggtgttcggatggtttacccttcagcatttgttttgatctctcagaatgacatcccggttcctcagagtgttgccagtgctggaggccacattgcagttgggcagcaagggcttggtagtgtgaaggacccaagtaactgtgggatgcctctgacccctcccacctctccagaacaggctatcctaggtgagagtggaggtatgcagagtgctgccagtcacctggtttcccaagatggagggatgataacgatgcacagtccaaagagatcggggaagattcctccaaaactccacaatcatatggtccatcgagtctggaaggaatgcatcctcaacagaacccagtccaagaggagccaaatgtcaactccaactcttgaagaagagcctgctagcaatcctgctacttgggattttgtggatccaacccaaagagtcagctgttcttgttccaggcataagcttttaaaacgttgtgcagtcgggcccaatcgacctcccacagtatctcaaccagggttcagtgcaggaccatcatcatcttcatctttaccacctcctgcttcttctaagcacaaaacagcagaaagacaggaaaaaggagacaagctgcaaaagagacccttaataccatttcaccataggccctctgtggccgaagaattatgcatggagcaagatacaccaggacagaaactagggttggcagggatagactcctccttagaggtgtctagcagtaggaaatatgataagcaaatggccgtgccttccagaaatacaagcaagcaaatgaatctgaatcctatggattcacctcattcccctatatcccctctgccaccaacactcagccctcagccacgaggtcaggaaacagagagtttggacccaccatcggtccctgtgaatccagccctttatggaaatggactagaactccagcagttgtctactctggatgacagaactgtcctcgtaggccaaagactgcctctcatggcagaggtcagcgagacagccttatattgtgggattaggccctcgaacccggagtcatcagaaaagtggtggcatagttatcgtctcccacccagtgatgatgctgagttcaggcctccagagctccagggtgagagatgtgatgccaaaatggaggtaaactcagagagcactgcattgcaaaggtaagacagctctctgcaccacccacccgtccaccggaagggcatgggctccctccccatctctacctgctaaactttcagattcaaaattgaagtaggcttttctttgtccttcttgactccggatatggaaaatgtttaatggtcaaatgctttgtcctacttataggttagcacacatgtcatttgacacatgggcatataaagaactctttatgccatttaagtacactccaaatatattaatacatttttgccctactgtttgttaattaaagaatatagctttataagactttccatactgctgtcagtgccttctttgtatgttgacntttttgaggaaggctttgcctgcattcaggtgtatgtatcatgtatctagtataatatttatagctcttttgagccacccattctaaaactttacatagatgatctcatttaatcttcactgtaccatattattacgttaattttataactgagaaactagggccatgcagttagtaaatgacacagatggaatttgaaactaggcagtctgtcctgagaacctgtgctcttaagtggaattgatggacccagagacaaaaacatatatcttgacaaagtatgctaatttttatttaatcatgaatataaactgtaaaagcaaatcactatatcggtgaatttttagttgtttttacaaaaagtttaaactttgtaaatgctttaaggcataaatgctcttttttttttttttttttttgtnntttagactcttagcacaacctaacaaacggtttaaaatctggcaagacaaacagccccagttgcagccactccacttccttgacccattgcctctatcacaacaacctggagacagtttgggagaagtgaatgacccatatacctttgaagatggtgacataaaatacatctttacagccaacaagaaatgcaaacaagggacggagaaagattccctgaaaaagaataagtcagaggatggatttggtaccaaggatgtcactacaccaggtcattccacgccggtgcctgatgggaaaaatgccatgtctattttcagttctgctactaaaacagatgtccggcaggataatgctgctggcagagctggctccagtagccttacacaggtaacagatttggcaccttccctgcatgacttagacaacatctttgataattctgatgacgacgaacttggggctgtatcacctgctctgcgctcatcaaaaatgcctgcagttgggacagaagaccgacctcttgggaaggatggaagagctgctgttccttatccaccaacagttgcagacttgcaaaggatgtttcccactccaccatctttggaacagcatcctgcattttctcctgtgatgaattataaagatgggatcagctcagagacagtgacagcattaggcatgatggagagccctatggtcagtatggtttcaacacaactcacagaattcaaaatggaagtggaagatggattaggaagtcccaagcccgaggaaattaaggacttttcatatgtgcacaaagttccatcctttcaaccttttgtgggatcctccatgtttgctccactgaagatgttgccgagccattgtttgctacctctgaagatacctgatgcctgtctgtttcggccttcatgggcaattcctcctaaaattgaacaactgcccatgccccctgcagccactttcattagagatggctacaataacgtgcctagtgttgggagcctagcagatccagactatctgaacacaccacagatgaacacacccgtgacgttgaacagcgctgccccagccagcaatagtggggcaggagtcctaccatctccagcaacccctcgcttctctgtccccacaccacgaacccccaggaccccaagaactcccagaggtgggggcactgccagtggtcaagggtctgttaagtatgatagcaccgatcaaggatcaccagcctccaccccctctactacacggcccctcaactctgtggagcccgccaccatgcagccaattcccgaagcccacagcctctatgttaccctgattctctccgattccgtgatgaatatctttaaagacagaaactttgacagctgttgcatctgtgcctgcaacatgaacatcaaaggggcggatgtcgggctttacatccccgattcttccaatgaggaccagtaccgctgtacctgtgggtttagtgcgattatgaaccgcaaacttggctacaattcaggactcttccttgaagatgagttggatatttttgggaagaattctgatattggtcaggctgcagagaggcgcttaatgatgtgtcagtccaccttccttcctcaggtggaaggaaccaaaaaaccccaggagccacccataagccttctcctcctcctccagaatcaacacacacaaccttttgcttcactgaatttcctggactacatttcctctaacaatcgccaaactcttccctgtgtaagctggagttatgaccgggtgcaagcagataataatgattactggacggaatgctttaatgcgttggagcaggggcggcagtatgtggataaccccactggtggaaaagtggacgaagctctggtgagaagtgccactgtgcactcttggcctcacagcaatgtgctggacatcagcatgctctcctcccaggatgtggttcgtatgctgttgtccctgcagccctttctccaagatgccatccaaaagaagcgcacgggcaggacctgggagaacatccagcatgtgcagggaccactcacttggcagcagttccataaaatggcaggacggggaacctacggttcggaagaatctcctgagccgttgcccatccccactctgctggtaggctatgacaaggatttcctcaccatctcgccattctccttgccgttttgggagaggctcttgttggacccatatgggggccaccgtgatgttgcctatattgtggtgtgtccagaaaatgaggccttgctcgaaggagccaaaactttcttcagggacttgagtgctgtatacgagatgtgtaggcttgggcagcacaagcccatctgcaaagtgctacgtgacgggatcatgcgcgtgggaaaaactgtggcacagaagctgacagatgagcttgtgagtgagtggtttaaccagccttggagcggcgaggagaatgacaatcattccagactcaaactttatgcgcaagtttgccgccatcacctagcaccttatttagccactctgcagcttgatagcagcctattgataccacctaaataccagaccccaccagcagcagcacagggacaagctacgccagggaatgctgggcccttagctccaaatggatcagcagctcccccagctggcagtgcatttaatcccacctcgaatagtagttctacaaatcctgcagcaagtagttctgcatctggttcctctgtgccaccggtctcatcgtctgcctctgctcctggtattagccagataagcactacctcttcttcaggattcagtggtagtgttggagggcagaaccccagcactgggggcatttctgcggatagaacgcaagggaacataggctgtggtggagacactgaccctgggcagagctcttctcagccctcacaggatggacaagagagtgttacagaaagggagagaataggaattcccacggagcctgactctgcagacagccatgcccaccctccagctgttgtcatttacatggtggacccgttcacgtatgctgcagaggaggactccacttctgggaacttttggctgttgagcttgatgcgctgctacacagaaatgctggataatttacctgagcatatgagaaattctttcattctccagattgtgccttgccagtacatgctgcagacaatgaaggatgagcaagttttctacattcaatacttgaagtccatggcattttcagtgtactgccagtgcaggcgaccactgcctacacagatccacattaaatccctcacgggatttgggcctgcagccagcattgagatgaccctcaagaaccctgagcggcccagcccaatccagctttactcccctccctttatattggccccaatcaaagacaagcagacagagctgggagagacgtttggtgaggcgagccagaaatacaatgtgctcttcgtgggctattgtctgtctcacgaccagcgctggcttttggcttcctgcactgacctccatggggaattattagagacctgcgttgtaaatattgctttaccaaacaggtcacggaggagtaaagtatctgcacgtaaaattggactacagaagttatgggagtggtgcatagggattgtccaaatgacatctctaccctggagagttgtaatcgggcgacttgggcgtcttggccatggggagcttaaagattggagtatcctccttggagaatgttcactacagacaatcagcaaaaagctcaaggatgtgtgccggatgtgtggaatctctgccgcagactctccttctatccttagtgcctgcctggttgccatggagccccaggggtcctttgtagtgatgccagatgctgtcacaatgggctctgtttttggccgaagtactgcactgaacatgcagtcatctcagctcaacacccctcaagatgcttcttgtacacacatcttggtgttcccaacatcatcaaccatccaggtggctccagccaactaccccaatgaagatgggtttagccccaacaatgatgatatgtttgttgaccttccattcccagatgatatggacaatgatattggcatattaatgactgggaacctccattcctctcccaactcttccccagtaccctccccaggctctccttctggaattggtgtgggctctcacttccagcatagtcggagccagggtgagcgtcttctttctagagaagcaccagaggagctaaagcagcagcccctggcccttgggtattttgtatcaactgccaaagctgagaatcttccccagtggttttggtcatcgtgtccccaggctcaaaaccagtgccctctcttcttaaaggcttcgctgcatcaccacatttcagtagcacagacagacgaacttctgcctgccaggaattctcagcgggttccacaccctcttgactccaaaaccacgtcggatgttttaaggtttgttttggagcagtacaacgctctgtcctggctcacgtgcaatccggccacccaggaccgtacttcctgccttcccgtccactttgtggtgctcactcagttgtacaatgccatcatgaatatactttaattgggaacctgctacactctgcaaataacccacatccttttcttcagaccactctccacagtcctgcactgtgattccttctcagcaggcacatgtcaattctgcagtgttcattaccagagtgactccttgacacttctctcatggacctggaaacttccataagtggtgactttcagccagtgcggtggtgtgtgtagccccaaccactggtccccaggaagtggtggtggttgatggcttttcagcgggaaacagaagagacagtgtccttttgcacaagagtctgtgttttcagcctctgtatacaattgagggcagtctagccctttggatgaaatcctcttagttactggtgtatggcctgtgggttacctgaactccataatctgggactttttaaaaataagaaccagctcaagtacatggtttcatactggggtttctgtctccctagtgttcccatccagattagcatgagtgctttggttgacttcaaacctgtgtgtcaatgcagaaggtctggagacagcttcattttgtttatttattttaatttgttttgtcatatggtttttgtgactttatttttttaattcacaaggaccaggtacagtagctgaaacccaattcagatccaccataggattctttgactacatacctctgtcctagaagccggaaaaggagtaaaaacacattggggagatcatgcctaaaagtaatatattcaaaaccacccagcagtaggttttgttaacaacaaactggattttaaaagttctgccatgttaagtggccagcatttcatgaaggataacatttttatacagaaggcagtcaagctcaactcagagccatggaggcaagtaccttaattagttttatatagtcacaacggaaatatattttctagtgaattcttattggaagccaggtctctcctctcattagatcaaaagggacttatgtacatacaacaattgaaagtgtttgctcatgaaatcagttataaatatggtgaattttttctggaccataggaatattatttcaaagaaatattacaacttaaccattaaattagtacttgaagttgagcctttgtggtgggactttttaaaaaaatgcctttttaaagcattaatggctaattgaagtattttatgactcctcattcctggcccagagggttgtctttgaaaccctgtttctaacccttgtgttgtgtgtttctgtctgaggacagtgggtgtgtactggcctcccgggagccactgtgaccaggcctttgagctcttgtcatctgtggagagaatcatgcaaattttaaaagttcttccaagagacttccatgtcctggttattaacaaaaaaggaaaaatgtaataattgatatgattttgtaaaagtatttttcttgaaataatctaaagtttaaaacattatattaaaaaaaaagttgtgtggtgggaatgtgaaagcagagaaataacttgtaaatggataattttgttctctgtaccaccagttgaagggggggttgactttcgcaatgtataggataaaaaatctgatatatcaaaccatttgtatctaatgtgtacagtgtaaaattgactttaaaaatattgcagtgctattttttcttaatcagaaaggaaaattctcaaggccttttgaagagcataagaagatgaagattgtaaacttgtataaaattatcttggtgagaagacaaattgtaaagtagatatttgtaatcttttaccactttggggttgcttttttcccggaattcatcagaactttgaattttttttttaaatgggctgtttttaatgcaggggcttttcttccctagaaacccaattctaagcagaaaaagaaaaaaaacacaaaaaataaaaaacccctacaaaaaaactttaaaaaaaatggcagcaaagggtagttttcatctggtgtcttttatttaagttttttaagttaagaaaagctggtgacatatttatacgtttttgtgcaaaaataaatgaatggcaatagattttaaaaaatcttattatgtacttctgtgtgaaaaagtctgtataatatttcccttaaatatgcattattttacttgtgagttttttactgaattaatctgaaatgtacaagccctggatttgctacagagtgagaagttattttatttttttttatttttaattttggaaattctgcagaaatcagaactcttaccatggtttgaacaaaaaaaggggaaatggggaggggaaaagggtgggattgtccagcatgcttgtatgtatatttcagaaccttttttaaatgtaaaagctgtacatttctgggaagttctgaatttcttttgtttccttttttccttcaagcattttgcagtgagcttcttttatatatagcaaacaatttgaaagaatacaaaaatatgtgaagttcatttaaaaaaataactacagtatagcgctggtacagtacactaaaagactttgataaaaagaaacaataataaaaggcctccattttaaatgtcattcatatataccttgtggatgagagctatatacttttacacacttttttagaggaataaattattgaattactgaagctttgagtg

SEQ ID NO: 346217 - DNA, 1814 bp, Homo sapiens
ctgaggatcccatgccaataacctcccatggaggcaagtaccttaattagttttatatagtcacaacggaaatatattttctagtgaattcttattggaagccaggtctctcctctcattagatcaaaagggacttatgtacatacaacaattgaaagtgtttgctcatgaaatcagttataaatatggtgaattttttctggaccataggaatattatttcaaagaaatattacaacttaaccattaaattagtacttgaagttgagcctttgtggtgggactttttaaaaaaatgcctttttaaagcattaatggctaattgaagtattttatgactcctcattcctggcccagagggttgtctttgaaaccctgtttctaacccttgtgttgtgtgtttctgtctgaggacagtgggtgtgtactggcctcccgggagccactgtgaccaggcctttgagctcttgtcatctgtggagagaatcatgcaaattttaaaagttcttccaagagacttccatgtcctggttattaacaaaaaaggaaaaatgtaataattgatatgattttgtaaaagtatttttcttgaaataatctaaagtttaaaacattatattaaaaaaaaagttgtgtggtgggaatgtgaaagcagagaaataacttgtaaatggataattttgttctctgtaccaccagttgaagggggggttgactttcgcaatgtataggataaaaaatctgatatatcaaaccatttgtatctaatgtgtacagtgtaaaattgactttaaaaatattgcagtgctattttttcttaatcagaaaggaaaattctcaaggccttttgaagagcataagaagatgaagattgtaaacttgtataaaattatcttggtgagaagacaaattgtaaagtagatatttgtaatcttttaccactttggggttgcttttttcccggaattcatcagaactttgaattttttttttaaatgggctgtttttaatgcaggggcttttcttccctagaaacccaattctaagcagaaaaagaaaaaaaacacaaaaaataaaaaacccctacaaaaaaactttaaaaaaaatggcagcaaagggtagttttcatctggtgtcttttatttaagttttttaagttaagaaaagctggtgacatatttatacgtttttgtgcaaaaataaatgaatggcaatagattttaaaaaatcttattatgtacttctgtgtgaaaaagtctgtataatatttcccttaaatatgcattattttacttgtgagttttttactgaattaatctgaaatgtacaagccctggatttgctacagagtgagaagttattttatttttttttatttttaattttggaaattctgcagaaatcagaactcttaccatggtttgaacaaaaaaaggggaaatggggaggggaaaagggtgggattgtccagcatgcttgtatgtatatttcagaaccttttttaaatgtaaaagctgtacatttctgggaagttctgaatttcttttgtttccttttttccttcaagcattttgcagtgagcttcttttatatatagcaaacaatttgaaagaatacaaaaatatgtgaagttcatttaaaaaaataactacagtatagcgctggtacagtacactaaaagactttgataaaaagaaacaataataaaaggcctccattttaaatgtcattcatatataccttgtggatgagagctatatacttttacacacttttttagaggaataaattattgaattactgaagctttgagtg

SEQ ID NO: 346218 - DNA, 1617 bp, Homo sapiens
tcatagtatcatacgttaggcgccgcggtccctattatgtagttgaacctgggcgtagctgtttcctaggagatcgtgttcatgactagtgcttggctactcgccatttaaaataggctccgtcgatcctggacccgtactgaagacttccgagatccatgttctcgaagccattgacgtgggttctatcactcgtgcgtagattccacgcgagctcgtaaggtatcgaattacggcgcagccccatgtgtgaccaggcctttgagctcttgtcatctgtggagagaatcatgcaaattttaaaagttcttccaagagacttccatgtcctggttattaacaaaaaaggaaaaatgtaataattgatatgattttgtaaaagtatttttcttgaaataatctaaagtttaaaacattatattaaaaaaaaagttgtgtggtgggaatgtgaaagcagagaaataacttgtaaatggataattttgttctctgtaccaccagttgaagggggggttgactttcgcaatgtataggataaaaaatctgatatatcaaaccatttgtatctaatgtgtacagtgtaaaattgactttaaaaatattgcagtgctattttttcttaatcagaaaggaaaattctcaaggccttttgaagagcataagaagatgaagattgtaaacttgtataaaattatcttggtgagaagacaaattgtaaagtagatatttgtaatcttttaccactttggggttgcttttttcccggaattcatcagaactttgaattttttttttaaatgggctgtttttaatgcaggggcttttcttccctagaaacccaattctaagcagaaaaagaaaaaaaacacaaaaaataaaaaacccctacaaaaaaactttaaaaaaaatggcagcaaagggtagttttcatctggtgtcttttatttaagttttttaagttaagaaaagctggtgacatatttatacgtttttgtgcaaaaataaatgaatggcaatagattttaaaaaatcttattatgtacttctgtgtgaaaaagtctgtataatatttcccttaaatatgcattattttacttgtgagttttttactgaattaatctgaaatgtacaagccctggatttgctacagagtgagaagttattttatttttttttatttttaattttggaaattctgcagaaatcagaactcttaccatggtttgaacaaaaaaaggggaaatggggaggggaaaagggtgggattgtccagcatgcttgtatgtatatttcagaaccttttttaaatgtaaaagctgtacatttctgggaagttctgaatttcttttgtttccttttttccttcaagcattttgcagtgagcttcttttatatatagcaaacaatttgaaagaatacaaaaatatgtgaagttcatttaaaaaaataactacagtatagcgctggtacagtacactaaaagactttgataaaaagaaacaataataaaaggcctccattttaaatgtcattcatatataccttgtggatgagagctatatacttttacacacttttttagaggaataaattattgaattactgaagctttgagtg

SEQ ID NO: 346219 - DNA, 6870 bp, Homo sapiens
  misc_feature (2275)..(2275): n is a, c, g, or t
  misc_feature (2697)..(2698): n is a, c, g, or t
gctgaactcacgggaatcaaatggcgtaggtacaattttggagggcatggggactgtggacccataatttcagccccagcccaagatgatccaattctgttaagtttcatccgctgtctgcaagctaacctgctttgtgtatggcgtcgtgatgtcaaaccagattgcaaagagttatggatattctggtggggagatgaacccaacctagtgggtgtaatacatcatgaactgcaggttgtggaagaaggactctgggaaaatggcctttcctatgaatgtaggacgctgctcttcaaagcgatccacaatctgttagaaaggtgcctaatggataagaacttcgttaggattgggaaatggtttgtccgaccctacgaaaaggatgaaaagccagtcaacaaaagtgagcatttgtcctgtgctttcacattctttctgcatggagaaagtaatgtatgcacaagtgtggagattgcccagcaccagccaatttatttgatcaatgaggagcatatacacatggctcagtcttcacctgcaccatttcaagtactggtaagtccttatggcttaaatgggacgctaacaggccaagcatacaagatgtcagacccagccactcgtaagttgattgaggaatggcagtatttctacccgatggtgctaaaaaagaaagaagaatcgaaagaggaagacgagttgggatatgatgatgatttccctgtggcagttgaagtaattgttggtggtgttcggatggtttacccttcagcatttgttttgatctctcagaatgacatcccggttcctcagagtgttgccagtgctggaggccacattgcagttgggcagcaagggcttggtagtgtgaaggacccaagtaactgtgggatgcctctgacccctcccacctctccagaacaggctatcctaggtgagagtggaggtatgcagagtgctgccagtcacctggtttcccaagatggagggatgataacgatgcacagtccaaagagatcggggaagattcctccaaaactccacaatcatatggtccatcgagtctggaaggaatgcatcctcaacagaacccagtccaagaggagccaaatgtcaactccaactcttgaagaagagcctgctagcaatcctgctacttgggattttgtggatccaacccaaagagtcagctgttcttgttccaggcataagcttttaaaacgttgtgcagtcgggcccaatcgacctcccacagtatctcaaccagggttcagtgcaggaccatcatcatcttcatctttaccacctcctgcttcttctaagcacaaaacagcagaaagacaggaaaaaggagacaagctgcaaaagagacccttaataccatttcaccataggccctctgtggccgaagaattatgcatggagcaagatacaccaggacagaaactagggttggcagggatagactcctccttagaggtgtctagcagtaggaaatatgataagcaaatggccgtgccttccagaaatacaagcaagcaaatgaatctgaatcctatggattcacctcattcccctatatcccctctgccaccaacactcagccctcagccacgaggtcaggaaacagagagtttggacccaccatcggtccctgtgaatccagccctttatggaaatggactagaactccagcagttgtctactctggatgacagaactgtcctcgtaggccaaagactgcctctcatggcagaggtcagcgagacagccttatattgtgggattaggccctcgaacccggagtcatcagaaaagtggtggcatagttatcgtctcccacccagtgatgatgctgagttcaggcctccagagctccagggtgagagatgtgatgccaaaatggaggtaaactcagagagcactgcattgcaaaggtaagacagctctctgcaccacccacccgtccaccggaagggcatgggctccctccccatctctacctgctaaactttcagattcaaaattgaagtaggcttttctttgtccttcttgactccggatatggaaaatgtttaatggtcaaatgctttgtcctacttataggttagcacacatgtcatttgacacatgggcatataaagaactctttatgccatttaagtacactccaaatatattaatacatttttgccctactgtttgttaattaaagaatatagctttataagactttccatactgctgtcagtgccttctttgtatgttgacntttttgaggaaggctttgcctgcattcaggtgtatgtatcatgtatctagtataatatttatagctcttttgagccacccattctaaaactttacatagatgatctcatttaatcttcactgtaccatattattacgttaattttataactgagaaactagggccatgcagttagtaaatgacacagatggaatttgaaactaggcagtctgtcctgagaacctgtgctcttaagtggaattgatggacccagagacaaaaacatatatcttgacaaagtatgctaatttttatttaatcatgaatataaactgtaaaagcaaatcactatatcggtgaatttttagttgtttttacaaaaagtttaaactttgtaaatgctttaaggcataaatgctcttttttttttttttttttttgtnntttagactcttagcacaacctaacaaacggtttaaaatctggcaagacaaacagccccagttgcagccactccacttccttgacccattgcctctatcacaacaacctggagacagtttgggagaagtgaatgacccatatacctttgaagatggtgacataaaatacatctttacagccaacaagaaatgcaaacaagggacggagaaagattccctgaaaaagaataagtcagaggatggatttggtaccaaggatgtcactacaccaggtcattccacgccggtgcctgatgggaaaaatgccatgtctattttcagttctgctactaaaacagatgtccggcaggataatgctgctggcagagctggctccagtagccttacacaggtaacagatttggcaccttccctgcatgacttagacaacatctttgataattctgatgacgacgaacttggggctgtatcacctgctctgcgctcatcaaaaatgcctgcagttgggacagaagaccgacctcttgggaaggatggaagagctgctgttccttatccaccaacagttgcagacttgcaaaggatgtttcccactccaccatctttggaacagcatcctgcattttctcctgtgatgaattataaagatgggatcagctcagagacagtgacagcattaggcatgatggagagccctatggtcagtatggtttcaacacaactcacagaattcaaaatggaagtggaagatggattaggaagtcccaagcccgaggaaattaaggacttttcatatgtgcacaaagttccatcctttcaaccttttgtgggatcctccatgtttgctccactgaagatgttgccgagccattgtttgctacctctgaagatacctgatgcctgtctgtttcggccttcatgggcaattcctcctaaaattgaacaactgcccatgccccctgcagccactttcattagagatggctacaataacgtgcctagtgttgggagcctagcagatccagactatctgaacacaccacagatgaacacacccgtgacgttgaacagcgctgccccagccagcaatagtggggcaggagtcctaccatctccagcaacccctcgcttctctgtccccacaccacgaacccccaggaccccaagaactcccagaggtgggggcactgccagtggtcaagggtctgttaagtatgatagcaccgatcaaggatcaccagcctccaccccctctactacacggcccctcaactctgtggagcccgccaccatgcagccaattcccgaagcccacagcctctatgttaccctgattctctccgattccgtgatgaatatctttaaagacagaaactttgacagctgttgcatctgtgcctgcaacatgaacatcaaaggggcggatgtcgggctttacatccccgattcttccaatgaggaccagtaccgctgtacctgtgggtttagtgcgattatgaaccgcaaacttggctacaattcaggactcttccttgaagatgagttggatatttttgggaagaattctgatattggtcaggctgcagagaggcgcttaatgatgtgtcagtccaccttccttcctcaggtggaaggaaccaaaaaaccccaggagccacccataagccttctcctcctcctccagaatcaacacacacaaccttttgcttcactgaatttcctggactacatttcctctaacaatcgccaaactcttccctgtgtaagctggagttatgaccgggtgcaagcagataataatgattactggacggaatgctttaatgcgttggagcaggggcggcagtatgtggataaccccactggtggaaaagtggacgaagctctggtgagaagtgccactgtgcactcttggcctcacagcaatgtgctggacatcagcatgctctcctcccaggatgtggttcgtatgctgttgtccctgcagccctttctccaagatgccatccaaaagaagcgcacgggcaggacctgggagaacatccagcatgtgcagggaccactcacttggcagcagttccataaaatggcaggacggggaacctacggttcggaagaatctcctgagccgttgcccatccccactctgctggtaggctatgacaaggatttcctcaccatctcgccattctccttgccgttttgggagaggctcttgttggacccatatgggggccaccgtgatgttgcctatattgtggtgtgtccagaaaatgaggccttgctcgaaggagccaaaactttcttcagggacttgagtgctgtatacgagatgtgtaggcttgggcagcacaagcccatctgcaaagtgctacgtgacgggatcatgcgcgtgggaaaaactgtggcacagaagctgacagatgagcttgtgagtgagtggtttaaccagccttggagcggcgaggagaatgacaatcattccagactcaaactttatgcgcaagtttgccgccatcacctagcaccttatttagccactctgcagcttgatagcagcctattgataccacctaaataccagaccccaccagcagcagcacagggacaagctacgccagggaatgctgggcccttagctccaaatggatcagcagctcccccagctggcagtgcatttaatcccacctcgaatagtagttctacaaatcctgcagcaagtagttctgcatctggttcctctgtgccaccggtctcatcgtctgcctctgctcctggtattagccagataagcactacctcttcttcaggattcagtggtagtgttggagggcagaaccccagcactgggggcatttctgcggatagaacgcaagggaacataggctgtggtggagacactgaccctgggcagagctcttctcagccctcacaggatggacaagagagtgttacagaaagggagagaataggaattcccacggagcctgactctgcagacagccatgcccaccctccagctgttgtcatttacatggtggacccgttcacgtatgctgcagaggaggactccacttctgggaacttttggctgttgagcttgatgcgctgctacacagaaatgctggataatttacctgagcatatgagaaattctttcattctccagattgtgccttgccagtacatgctgcagacaatgaaggatgagcaagttttctacattcaatacttgaagtccatggcattttcagtgtactgccagtgcaggcgaccactgcctacacagatccacattaaatccctcacgggatttgggcctgcagccagcattgagatgaccctcaagaaccctgagcggcccagcccaatccagctttactcccctccctttatattggccccaatcaaagacaagcagacagagctgggagagacgtttggtgaggcgagccagaaatacaatgtgctcttcgtgggctattgtctgtctcacgaccagcgctggcttttggcttcctgcactgacctccatggggaattattagagacctgcgttgtaaatattgctttaccaaacaggtcacggaggagtaaagtatctgcacgtaaaattggactacagaagttatgggagtggtgcatagggattgtccaaatgacatctctaccctggagagttgtaatcgggcgacttgggcgtcttggccatggggagcttaaagattggagtatcctccttggagaatgttcactacagacaatcagcaaaaagctcaaggatgtgtgccggatgtgtggaatctctgccgcagactctccttctatccttagtgcctgcctggttgccatggagccccaggggtcctttgtagtgatgccagatgctgtcacaatgggctctgtttttggccgaagtactgcactgaacatgcagtcatctcagctcaacacccctcaagatgcttcttgtacacacatcttggtgttcccaacatcatcaaccatccaggtggctccagccaactaccccaatgaagatgggtttagccccaacaatgatgatatgtttgttgaccttccattcccagatgatatggacaatgatattggcatattaatgactgggaacctccattcctctccccgggatacgggggatactctagagtc

SEQ ID NO: 346220 - DNA, 8461 bp, Homo sapiens
  misc_feature (2275)..(2275): n is a, c, g, or t
  misc_feature (2697)..(2698): n is a, c, g, or t
  misc_feature (6202)..(6202): n is a, c, g, or t
  misc_feature (7391)..(7391): n is a, c, g, or t
gctgaactcacgggaatcaaatggcgtaggtacaattttggagggcatggggactgtggacccataatttcagccccagcccaagatgatccaattctgttaagtttcatccgctgtctgcaagctaacctgctttgtgtatggcgtcgtgatgtcaaaccagattgcaaagagttatggatattctggtggggagatgaacccaacctagtgggtgtaatacatcatgaactgcaggttgtggaagaaggactctgggaaaatggcctttcctatgaatgtaggacgctgctcttcaaagcgatccacaatctgttagaaaggtgcctaatggataagaacttcgttaggattgggaaatggtttgtccgaccctacgaaaaggatgaaaagccagtcaacaaaagtgagcatttgtcctgtgctttcacattctttctgcatggagaaagtaatgtatgcacaagtgtggagattgcccagcaccagccaatttatttgatcaatgaggagcatatacacatggctcagtcttcacctgcaccatttcaagtactggtaagtccttatggcttaaatgggacgctaacaggccaagcatacaagatgtcagacccagccactcgtaagttgattgaggaatggcagtatttctacccgatggtgctaaaaaagaaagaagaatcgaaagaggaagacgagttgggatatgatgatgatttccctgtggcagttgaagtaattgttggtggtgttcggatggtttacccttcagcatttgttttgatctctcagaatgacatcccggttcctcagagtgttgccagtgctggaggccacattgcagttgggcagcaagggcttggtagtgtgaaggacccaagtaactgtgggatgcctctgacccctcccacctctccagaacaggctatcctaggtgagagtggaggtatgcagagtgctgccagtcacctggtttcccaagatggagggatgataacgatgcacagtccaaagagatcggggaagattcctccaaaactccacaatcatatggtccatcgagtctggaaggaatgcatcctcaacagaacccagtccaagaggagccaaatgtcaactccaactcttgaagaagagcctgctagcaatcctgctacttgggattttgtggatccaacccaaagagtcagctgttcttgttccaggcataagcttttaaaacgttgtgcagtcgggcccaatcgacctcccacagtatctcaaccagggttcagtgcaggaccatcatcatcttcatctttaccacctcctgcttcttctaagcacaaaacagcagaaagacaggaaaaaggagacaagctgcaaaagagacccttaataccatttcaccataggccctctgtggccgaagaattatgcatggagcaagatacaccaggacagaaactagggttggcagggatagactcctccttagaggtgtctagcagtaggaaatatgataagcaaatggccgtgccttccagaaatacaagcaagcaaatgaatctgaatcctatggattcacctcattcccctatatcccctctgccaccaacactcagccctcagccacgaggtcaggaaacagagagtttggacccaccatcggtccctgtgaatccagccctttatggaaatggactagaactccagcagttgtctactctggatgacagaactgtcctcgtaggccaaagactgcctctcatggcagaggtcagcgagacagccttatattgtgggattaggccctcgaacccggagtcatcagaaaagtggtggcatagttatcgtctcccacccagtgatgatgctgagttcaggcctccagagctccagggtgagagatgtgatgccaaaatggaggtaaactcagagagcactgcattgcaaaggtaagacagctctctgcaccacccacccgtccaccggaagggcatgggctccctccccatctctacctgctaaactttcagattcaaaattgaagtaggcttttctttgtccttcttgactccggatatggaaaatgtttaatggtcaaatgctttgtcctacttataggttagcacacatgtcatttgacacatgggcatataaagaactctttatgccatttaagtacactccaaatatattaatacatttttgccctactgtttgttaattaaagaatatagctttataagactttccatactgctgtcagtgccttctttgtatgttgacntttttgaggaaggctttgcctgcattcaggtgtatgtatcatgtatctagtataatatttatagctcttttgagccacccattctaaaactttacatagatgatctcatttaatcttcactgtaccatattattacgttaattttataactgagaaactagggccatgcagttagtaaatgacacagatggaatttgaaactaggcagtctgtcctgagaacctgtgctcttaagtggaattgatggacccagagacaaaaacatatatcttgacaaagtatgctaatttttatttaatcatgaatataaactgtaaaagcaaatcactatatcggtgaatttttagttgtttttacaaaaagtttaaactttgtaaatgctttaaggcataaatgctcttttttttttttttttttttgtnntttagactcttagcacaacctaacaaacggtttaaaatctggcaagacaaacagccccagttgcagccactccacttccttgacccattgcctctatcacaacaacctggagacagtttgggagaagtgaatgacccatatacctttgaagatggtgacataaaatacatctttacagccaacaagaaatgcaaacaagggacggagaaagattccctgaaaaagaataagtcagaggatggatttggtaccaaggatgtcactacaccaggtcattccacgccggtgcctgatgggaaaaatgccatgtctattttcagttctgctactaaaacagatgtccggcaggataatgctgctggcagagctggctccagtagccttacacaggtaacagatttggcaccttccctgcatgacttagacaacatctttgataattctgatgacgacgaacttggggctgtatcacctgctctgcgctcatcaaaaatgcctgcagttgggacagaagaccgacctcttgggaaggatggaagagctgctgttccttatccaccaacagttgcagacttgcaaaggatgtttcccactccaccatctttggaacagcatcctgcattttctcctgtgatgaattataaagatgggatcagctcagagacagtgacagcattaggcatgatggagagccctatggtcagtatggtttcaacacaactcacagaattcaaaatggaagtggaagatggattaggaagtcccaagcccgaggaaattaaggacttttcatatgtgcacaaagttccatcctttcaaccttttgtgggatcctccatgtttgctccactgaagatgttgccgagccattgtttgctacctctgaagatacctgatgcctgtctgtttcggccttcatgggcaattcctcctaaaattgaacaactgcccatgccccctgcagccactttcattagagatggctacaataacgtgcctagtgttgggagcctagcagatccagactatctgaacacaccacagatgaacacacccgtgacgttgaacagcgctgccccagccagcaatagtggggcaggagtcctaccatctccagcaacccctcgcttctctgtccccacaccacgaacccccaggaccccaagaactcccagaggtgggggcactgccagtggtcaagggtctgttaagtatgatagcaccgatcaaggatcaccagcctccaccccctctactacacggcccctcaactctgtggagcccgccaccatgcagccaattcccgaagcccacagcctctatgttaccctgattctctccgattccgtgatgaatatctttaaagacagaaactttgacagctgttgcatctgtgcctgcaacatgaacatcaaaggggcggatgtcgggctttacatccccgattcttccaatgaggaccagtaccgctgtacctgtgggtttagtgcgattatgaaccgcaaacttggctacaattcaggactcttccttgaagatgagttggatatttttgggaagaattctgatattggtcaggctgcagagaggcgcttaatgatgtgtcagtccaccttccttcctcaggtggaaggaaccaaaaaaccccaggagccacccataagccttctcctcctcctccagaatcaacacacacaaccttttgcttcactgaatttcctggactacatttcctctaacaatcgccaaactcttccctgtgtaagctggagttatgaccgggtgcaagcagataataatgattactggacggaatgctttaatgcgttggagcaggggcggcagtatgtggataaccccactggtggaaaagtggacgaagctctggtgagaagtgccactgtgcactcttggcctcacagcaatgtgctggacatcagcatgctctcctcccaggatgtggttcgtatgctgttgtccctgcagccctttctccaagatgccatccaaaagaagcgcacgggcaggacctgggagaacatccagcatgtgcagggaccactcacttggcagcagttccataaaatggcaggacggggaacctacggttcggaagaatctcctgagccgttgcccatccccactctgctggtaggctatgacaaggatttcctcaccatctcgccattctccttgccgttttgggagaggctcttgttggacccatatgggggccaccgtgatgttgcctatattgtggtgtgtccagaaaatgaggccttgctcgaaggagccaaaactttcttcagggacttgagtgctgtatacgagatgtgtaggcttgggcagcacaagcccatctgcaaagtgctacgtgacgggatcatgcgcgtgggaaaaactgtggcacagaagctgacagatgagcttgtgagtgagtggtttaaccagccttggagcggcgaggagaatgacaatcattccagactcaaactttatgcgcaagtttgccgccatcacctagcaccttatttagccactctgcagcttgatagcagcctattgataccacctaaataccagaccccaccagcagcagcacagggacaagctacgccagggaatgctgggcccttagctccaaatggatcagcagctcccccagctggcagtgcatttaatcccacctcgaatagtagttctacaaatcctgcagcaagtagttctgcatctggttcctctgtgccaccggtctcatcgtctgcctctgctcctggtattagccagataagcactacctcttcttcaggattcagtggtagtgttggagggcagaaccccagcactgggggcatttctgcggatagaacgcaagggaacataggctgtggtggagacactgaccctgggcagagctcttctcagccctcacaggatggacaagagagtgttacagaaagggagagaataggaattcccacggagcctgactctgcagacagccatgcccaccctccagctgttgtcatttacatggtggacccgttcacgtatgctgcagaggaggactccacttctgggaacttttggctgttgagcttgatgcgctgctacacagaaatgctggataatttacctgagcatatgagaaattctttcattctccagattgtgccttgccagtacatgctgcagacaatgaaggatgagcaagttttctacattcaatacttgaagtccatggcattttcagtgtactgccagtgcaggcgaccactgcctacacagatccacattaaatccctcacgggatttgggcctgcagccagcattgagatgaccctcaagaaccctgaggtaggtattggcaggacagaaacttagaaaatttatactaaaatgcaagctagaagaggtattttatctaacccagagattggctggttgcttagttggtcttctacattgatataagagttgctaggctggatgtgttggctcacncctgtagtcttagcactttcggaggctgaggtggaaggattgcttaagcctaggagtttgagaccacactgggcaacatagcaagaccccatctctacaaattttcttttaaaaattatccaggtgtgatgtgtgccggtagtcctggctgtttgggaggctgaggtggaaggatcacttgagcccaggagtttgagatggcagtgagctgtgatcacataaccacttccgcctggagagcaagaccctgtctcaggggggaataaaaacgagttggcaggtttctttaactcttaggtttaaatagaggagatacttctctgaactttaaaacatttttgagaagagaggcaagcaaattcttactgttttttttatgtaggactttaggcaataataaatgtatcccttttagtttttaatgttttaatttcctaaatttattttctttatttttctaagctaatctgtgtcttagatcagaaatcctttgcgttttccagctctggtctgtatcctgggacaacagttgtagttgtgtttactctgcaggggtccctcgttttgtgatgcacatacttagaggaagttgatttctcctttccttgcctcagtgcttccgtatataaatgaatgcattttcactccatcttttaaaacctacttcctacagatatgtgtggatctcaaagggaattttacaacaccaaagctaaacatgttttaaacaaaagttttacacttcctttgtttttctaatcaccttatcttgaagataggtataaaaagcaatgttcagaattttcaaagccttcaaaaatcagttcccacaattttattgcatgaaaagtatcccattagtaaaagccagcatacacctctttaccataagagagctccttaaaacaccaattgctatttttagttggtaatgttgttctgaacaactctatgaaatgcttgcacttttataagtaaaatgcttgggagtgaaaaatgatgcaagtagttaacactgtgtttgttgtaacttggtgcaggtcagcttagtcccaagggagaaaagctgctcagccaatgacctacattcactccagtgttatataaaatttctattttaggcagttttagtttagtttattctttgagtttgaatttttcacttctatgagcaattcatctgttttcnctgttaaatttttctagaatttcaaaaataaatgtctctacttgttttttattttgtttccagaaattatgaattattgcctttctaaaggttattatgctcaggcagaacaccatcaggagctcataagataaagtgaggtttagattaaaataaatggcaaaaagacttcgagtaatatcgtttttctccattttgcttggaacaggaagagagaagtaaatgattttactttattaaaaacaaaagaaccaaatgttataaatatttgctgaagtttatacattttaatctgcattaaggtaatggttagttggtcaatgctgcctctgcctcagtctgcagcgagaacattgtgttttcatttggtaaatacagttgagcatctacggtgtgccaggtgctgtattaggtgctaaggatgcaggggtgaacaaaacaggcccctgcctccatgcaattctcattctctgggtggcacagttttatgcaagttatcacatgtgaaagaatttatagtttttattatgcaagttttcaaataaatccaattgctgttatcttttgtttttcatggaatatctcgcatctcagaacacagtttgggaatcatattttatttagtgttttcagatgctatctattatatctaagatatttcacatttagccattcgttttataaaaaactccaggcaaactcagctggacttttcttgctttaataacagctttattgagatacaattcacatatcacgaaattctttttaaaaattttacagttcaggccgggcgcggtggctcatgcctataatcccaacactttgggaggctgaggctggcgggtcacctgaggtcaggagttcgagaccagcttggccagcatggcaaaatcccgtctccactaaaaataaaaaaattagccaggcgtggtggcggatgcctataatcccagctacttgggaagctgaggcgggagaattgcttgaatccatgaggtggaggttgcagtgagccaagatcacgccactgcactccagtctcggcgacagagtgagactctgtctcc

SEQ ID NO: 346221 - DNA, 6309 bp, Homo sapiens
  misc_feature (2275)..(2275): n is a, c, g, or t
  misc_feature (2697)..(2698): n is a, c, g, or t
gctgaactcacgggaatcaaatggcgtaggtacaattttggagggcatggggactgtggacccataatttcagccccagcccaagatgatccaattctgttaagtttcatccgctgtctgcaagctaacctgctttgtgtatggcgtcgtgatgtcaaaccagattgcaaagagttatggatattctggtggggagatgaacccaacctagtgggtgtaatacatcatgaactgcaggttgtggaagaaggactctgggaaaatggcctttcctatgaatgtaggacgctgctcttcaaagcgatccacaatctgttagaaaggtgcctaatggataagaacttcgttaggattgggaaatggtttgtccgaccctacgaaaaggatgaaaagccagtcaacaaaagtgagcatttgtcctgtgctttcacattctttctgcatggagaaagtaatgtatgcacaagtgtggagattgcccagcaccagccaatttatttgatcaatgaggagcatatacacatggctcagtcttcacctgcaccatttcaagtactggtaagtccttatggcttaaatgggacgctaacaggccaagcatacaagatgtcagacccagccactcgtaagttgattgaggaatggcagtatttctacccgatggtgctaaaaaagaaagaagaatcgaaagaggaagacgagttgggatatgatgatgatttccctgtggcagttgaagtaattgttggtggtgttcggatggtttacccttcagcatttgttttgatctctcagaatgacatcccggttcctcagagtgttgccagtgctggaggccacattgcagttgggcagcaagggcttggtagtgtgaaggacccaagtaactgtgggatgcctctgacccctcccacctctccagaacaggctatcctaggtgagagtggaggtatgcagagtgctgccagtcacctggtttcccaagatggagggatgataacgatgcacagtccaaagagatcggggaagattcctccaaaactccacaatcatatggtccatcgagtctggaaggaatgcatcctcaacagaacccagtccaagaggagccaaatgtcaactccaactcttgaagaagagcctgctagcaatcctgctacttgggattttgtggatccaacccaaagagtcagctgttcttgttccaggcataagcttttaaaacgttgtgcagtcgggcccaatcgacctcccacagtatctcaaccagggttcagtgcaggaccatcatcatcttcatctttaccacctcctgcttcttctaagcacaaaacagcagaaagacaggaaaaaggagacaagctgcaaaagagacccttaataccatttcaccataggccctctgtggccgaagaattatgcatggagcaagatacaccaggacagaaactagggttggcagggatagactcctccttagaggtgtctagcagtaggaaatatgataagcaaatggccgtgccttccagaaatacaagcaagcaaatgaatctgaatcctatggattcacctcattcccctatatcccctctgccaccaacactcagccctcagccacgaggtcaggaaacagagagtttggacccaccatcggtccctgtgaatccagccctttatggaaatggactagaactccagcagttgtctactctggatgacagaactgtcctcgtaggccaaagactgcctctcatggcagaggtcagcgagacagccttatattgtgggattaggccctcgaacccggagtcatcagaaaagtggtggcatagttatcgtctcccacccagtgatgatgctgagttcaggcctccagagctccagggtgagagatgtgatgccaaaatggaggtaaactcagagagcactgcattgcaaaggtaagacagctctctgcaccacccacccgtccaccggaagggcatgggctccctccccatctctacctgctaaactttcagattcaaaattgaagtaggcttttctttgtccttcttgactccggatatggaaaatgtttaatggtcaaatgctttgtcctacttataggttagcacacatgtcatttgacacatgggcatataaagaactctttatgccatttaagtacactccaaatatattaatacatttttgccctactgtttgttaattaaagaatatagctttataagactttccatactgctgtcagtgccttctttgtatgttgacntttttgaggaaggctttgcctgcattcaggtgtatgtatcatgtatctagtataatatttatagctcttttgagccacccattctaaaactttacatagatgatctcatttaatcttcactgtaccatattattacgttaattttataactgagaaactagggccatgcagttagtaaatgacacagatggaatttgaaactaggcagtctgtcctgagaacctgtgctcttaagtggaattgatggacccagagacaaaaacatatatcttgacaaagtatgctaatttttatttaatcatgaatataaactgtaaaagcaaatcactatatcggtgaatttttagttgtttttacaaaaagtttaaactttgtaaatgctttaaggcataaatgctcttttttttttttttttttttgtnntttagactcttagcacaacctaacaaacggtttaaaatctggcaagacaaacagccccagttgcagccactccacttccttgacccattgcctctatcacaacaacctggagacagtttgggagaagtgaatgacccatatacctttgaagatggtgacataaaatacatctttacagccaacaagaaatgcaaacaagggacggagaaagattccctgaaaaagaataagtcagaggatggatttggtaccaaggatgtcactacaccaggtcattccacgccggtgcctgatgggaaaaatgccatgtctattttcagttctgctactaaaacagatgtccggcaggataatgctgctggcagagctggctccagtagccttacacaggtaacagatttggcaccttccctgcatgacttagacaacatctttgataattctgatgacgacgaacttggggctgtatcacctgctctgcgctcatcaaaaatgcctgcagttgggacagaagaccgacctcttgggaaggatggaagagctgctgttccttatccaccaacagttgcagacttgcaaaggatgtttcccactccaccatctttggaacagcatcctgcattttctcctgtgatgaattataaagatgggatcagctcagagacagtgacagcattaggcatgatggagagccctatggtcagtatggtttcaacacaactcacagaattcaaaatggaagtggaagatggattaggaagtcccaagcccgaggaaattaaggacttttcatatgtgcacaaagttccatcctttcaaccttttgtgggatcctccatgtttgctccactgaagatgttgccgagccattgtttgctacctctgaagatacctgatgcctgtctgtttcggccttcatgggcaattcctcctaaaattgaacaactgcccatgccccctgcagccactttcattagagatggctacaataacgtgcctagtgttgggagcctagcagatccagactatctgaacacaccacagatgaacacacccgtgacgttgaacagcgctgccccagccagcaatagtggggcaggagtcctaccatctccagcaacccctcgcttctctgtccccacaccacgaacccccaggaccccaagaactcccagaggtgggggcactgccagtggtcaagggtctgttaagtatgatagcaccgatcaaggatcaccagcctccaccccctctactacacggcccctcaactctgtggagcccgccaccatgcagccaattcccgaagcccacagcctctatgttaccctgattctctccgattccgtgatgaatatctttaaagacagaaactttgacagctgttgcatctgtgcctgcaacatgaacatcaaaggggcggatgtcgggctttacatccccgattcttccaatgaggaccagtaccgctgtacctgtgggtttagtgcgattatgaaccgcaaacttggctacaattcaggactcttccttgaagatgagttggatatttttgggaagaattctgatattggtcaggctgcagagaggcgcttaatgatgtgtcagtccaccttccttcctcaggtggaaggaaccaaaaaaccccaggagccacccataagccttctcctcctcctccagaatcaacacacacaaccttttgcttcactgaatttcctggactacatttcctctaacaatcgccaaactcttccctgtgtaagctggagttatgaccgggtgcaagcagataataatgattactggacggaatgctttaatgcgttggagcaggggcggcagtatgtggataaccccactggtggaaaagtggacgaagctctggtgagaagtgccactgtgcactcttggcctcacagcaatgtgctggacatcagcatgctctcctcccaggatgtggttcgtatgctgttgtccctgcagccctttctccaagatgccatccaaaagaagcgcacgggcaggacctgggagaacatccagcatgtgcagggaccactcacttggcagcagttccataaaatggcaggacggggaacctacggttcggaagaatctcctgagccgttgcccatccccactctgctggtaggctatgacaaggatttcctcaccatctcgccattctccttgccgttttgggagaggctcttgttggacccatatgggggccaccgtgatgttgcctatattgtggtgtgtccagaaaatgaggccttgctcgaaggagccaaaactttcttcagggacttgagtgctgtatacgagatgtgtaggcttgggcagcacaagcccatctgcaaagtgctacgtgacgggatcatgcgcgtgggaaaaactgtggcacagaagctgacagatgagcttgtgagtgagtggtttaaccagccttggagcggcgaggagaatgacaatcattccagactcaaactttatgcgcaagtttgccgccatcacctagcaccttatttagccactctgcagcttgatagcagcctattgataccacctaaataccagaccccaccagcagcagcacagggacaagctacgccagggaatgctgggcccttagctccaaatggatcagcagctcccccagctggcagtgcatttaatcccacctcgaatagtagttctacaaatcctgcagcaagtagttctgcatctggttcctctgtgccaccggtctcatcgtctgcctctgctcctggtattagccagataagcactacctcttcttcaggattcagtggtagtgttggagggcagaaccccagcactgggggcatttctgcggatagaacgcaagggaacataggctgtggtggagacactgaccctgggcagagctcttctcagccctcacaggatggacaagagagtgttacagaaagggagagaataggaattcccacggagcctgactctgcagacagccatgcccaccctccagctgttgtcatttacatggtggacccgttcacgtatgctgcagaggaggactccacttctgggaacttttggctgttgagcttgatgcgctgctacacagaaatgctggataatttacctgagcatatgagaaattctttcattctccagattgtgccttgccagtacatgctgcagacaatgaaggatgagcaagttttctacattcaatacttgaagtccatggcattttcagtgtactgccagtgcaggcgaccactgcctacacagatccacattaaatccctcacgggatttgggcctgcagccagcattgagatgaccctcaagaaccctgagcggcccagcccaatccagctttactcccctccctttatattggccccaatcaaagacaagcagacagagctgggagagacgtttggtgaggcgagccagaaatacaatgtgctcttcgtgggctattgtctgtctcacgaccagcgctggcttttggcttcctgcactgacctccatggggaattattagagacctgcgttgtaaatattgctttaccaaacaggtgagaagacttgatgtttatggtgcatgt

SEQ ID NO: 346222 - DNA, 3973 bp, Homo sapiens
  misc_feature (2275)..(2275): n is a, c, g, or t
  misc_feature (2697)..(2698): n is a, c, g, or t
gctgaactcacgggaatcaaatggcgtaggtacaattttggagggcatggggactgtggacccataatttcagccccagcccaagatgatccaattctgttaagtttcatccgctgtctgcaagctaacctgctttgtgtatggcgtcgtgatgtcaaaccagattgcaaagagttatggatattctggtggggagatgaacccaacctagtgggtgtaatacatcatgaactgcaggttgtggaagaaggactctgggaaaatggcctttcctatgaatgtaggacgctgctcttcaaagcgatccacaatctgttagaaaggtgcctaatggataagaacttcgttaggattgggaaatggtttgtccgaccctacgaaaaggatgaaaagccagtcaacaaaagtgagcatttgtcctgtgctttcacattctttctgcatggagaaagtaatgtatgcacaagtgtggagattgcccagcaccagccaatttatttgatcaatgaggagcatatacacatggctcagtcttcacctgcaccatttcaagtactggtaagtccttatggcttaaatgggacgctaacaggccaagcatacaagatgtcagacccagccactcgtaagttgattgaggaatggcagtatttctacccgatggtgctaaaaaagaaagaagaatcgaaagaggaagacgagttgggatatgatgatgatttccctgtggcagttgaagtaattgttggtggtgttcggatggtttacccttcagcatttgttttgatctctcagaatgacatcccggttcctcagagtgttgccagtgctggaggccacattgcagttgggcagcaagggcttggtagtgtgaaggacccaagtaactgtgggatgcctctgacccctcccacctctccagaacaggctatcctaggtgagagtggaggtatgcagagtgctgccagtcacctggtttcccaagatggagggatgataacgatgcacagtccaaagagatcggggaagattcctccaaaactccacaatcatatggtccatcgagtctggaaggaatgcatcctcaacagaacccagtccaagaggagccaaatgtcaactccaactcttgaagaagagcctgctagcaatcctgctacttgggattttgtggatccaacccaaagagtcagctgttcttgttccaggcataagcttttaaaacgttgtgcagtcgggcccaatcgacctcccacagtatctcaaccagggttcagtgcaggaccatcatcatcttcatctttaccacctcctgcttcttctaagcacaaaacagcagaaagacaggaaaaaggagacaagctgcaaaagagacccttaataccatttcaccataggccctctgtggccgaagaattatgcatggagcaagatacaccaggacagaaactagggttggcagggatagactcctccttagaggtgtctagcagtaggaaatatgataagcaaatggccgtgccttccagaaatacaagcaagcaaatgaatctgaatcctatggattcacctcattcccctatatcccctctgccaccaacactcagccctcagccacgaggtcaggaaacagagagtttggacccaccatcggtccctgtgaatccagccctttatggaaatggactagaactccagcagttgtctactctggatgacagaactgtcctcgtaggccaaagactgcctctcatggcagaggtcagcgagacagccttatattgtgggattaggccctcgaacccggagtcatcagaaaagtggtggcatagttatcgtctcccacccagtgatgatgctgagttcaggcctccagagctccagggtgagagatgtgatgccaaaatggaggtaaactcagagagcactgcattgcaaaggtaagacagctctctgcaccacccacccgtccaccggaagggcatgggctccctccccatctctacctgctaaactttcagattcaaaattgaagtaggcttttctttgtccttcttgactccggatatggaaaatgtttaatggtcaaatgctttgtcctacttataggttagcacacatgtcatttgacacatgggcatataaagaactctttatgccatttaagtacactccaaatatattaatacatttttgccctactgtttgttaattaaagaatatagctttataagactttccatactgctgtcagtgccttctttgtatgttgacntttttgaggaaggctttgcctgcattcaggtgtatgtatcatgtatctagtataatatttatagctcttttgagccacccattctaaaactttacatagatgatctcatttaatcttcactgtaccatattattacgttaattttataactgagaaactagggccatgcagttagtaaatgacacagatggaatttgaaactaggcagtctgtcctgagaacctgtgctcttaagtggaattgatggacccagagacaaaaacatatatcttgacaaagtatgctaatttttatttaatcatgaatataaactgtaaaagcaaatcactatatcggtgaatttttagttgtttttacaaaaagtttaaactttgtaaatgctttaaggcataaatgctcttttttttttttttttttttgtnntttagactcttagcacaacctaacaaacggtttaaaatctggcaagacaaacagccccagttgcagccactccacttccttgacccattgcctctatcacaacaacctggagacagtttgggagaagtgaatgacccatatacctttgaagatggtgacataaaatacatctttacagccaacaagaaatgcaaacaagggacggagaaagattccctgaaaaagaataagtcagaggatggatttggtaccaaggatgtcactacaccaggtcattccacgccggtgcctgatgggaaaaatgccatgtctattttcagttctgctactaaaacagatgtccggcaggataatgctgctggcagagctggctccagtagccttacacaggtaacagatttggcaccttccctgcatgacttagacaacatctttgataattctgatgacgacgaacttggggctgtatcacctgctctgcgctcatcaaaaatgcctgcagttgggacagaagaccgacctcttgggaaggatggaagagctgctgttccttatccaccaacagttgcagacttgcaaaggatgtttcccactccaccatctttggaacagcatcctgcattttctcctgtgatgaattataaagatgggatcagctcagagacagtgacagcattaggcatgatggagagccctatggtcagtatggtttcaacacaactcacagaattcaaaatggaagtggaagatggattaggaagtcccaagcccgaggaaattaaggacttttcatatgtgcacaaagttccatcctttcaaccttttgtgggatcctccatgtttgctccactgaagatgttgccgagccattgtttgctacctctgaagatacctgatgcctgtctgtttcggccttcatgggcaattcctcctaaaattgaacaactgcccatgccccctgcagccactttcattagagatggctacaataacgtgcctagtgttgggagcctagcagatccagactatctgaacacaccacagatgaacacacccgtgacgttgaacagcgctgccccagccagcaatagtggggcaggagtcctaccatctccagcaacccctcgcttctctgtccccacaccacgaacccccaggaccccaagaactcccagaggtgggggcactgccagtggtcaagggtctgttaagtatgatagcaccgatcaaggatcaccagccaaccgtggactagtgggatcctctagatcacca

SEQ ID NO: 346223 - DNA, 567 bp, Homo sapiens
aagaattaaaagataagaaaagtgtcagttgcagcaaaacatagcctcttccaggagtctcttattaaggggaatgctgcaaatgaaaacatggcttctctgtgagcagatcttgcactactggcagctcaggaacttttgtgctgtgcacatactggtgtcacattgtcctggtcaggctggtgcgcttgtgtgtctttggctggttgctggtgaaagagcacctgcgtgtggtagagccttctgctgtcagagattgtaatctttccattttagtttgttacatcataatgccatgaaatagatcttacatcccttagaaaagaaacccaagcaaataaatctgtacttacttgactgaggctgtcagttttgctggtatcttctctatgtgtgcagcaaagacgatgctggccccgcttacctttctcagtcacctgttgttttctgtgagatgctgccacaaaggggatcactcactgcagtgtgcagagtgaactgatgaaagttcatttttcaagctttaagataaatgctgatcatgtttttgggatttttgtttttcag

SEQ ID NO: 346224 - DNA, 9933 bp, Homo sapiens
  misc_feature (2275)..(2275): n is a, c, g, or t
  misc_feature (2697)..(2698): n is a, c, g, or t
gctgaactcacgggaatcaaatggcgtaggtacaattttggagggcatggggactgtggacccataatttcagccccagcccaagatgatccaattctgttaagtttcatccgctgtctgcaagctaacctgctttgtgtatggcgtcgtgatgtcaaaccagattgcaaagagttatggatattctggtggggagatgaacccaacctagtgggtgtaatacatcatgaactgcaggttgtggaagaaggactctgggaaaatggcctttcctatgaatgtaggacgctgctcttcaaagcgatccacaatctgttagaaaggtgcctaatggataagaacttcgttaggattgggaaatggtttgtccgaccctacgaaaaggatgaaaagccagtcaacaaaagtgagcatttgtcctgtgctttcacattctttctgcatggagaaagtaatgtatgcacaagtgtggagattgcccagcaccagccaatttatttgatcaatgaggagcatatacacatggctcagtcttcacctgcaccatttcaagtactggtaagtccttatggcttaaatgggacgctaacaggccaagcatacaagatgtcagacccagccactcgtaagttgattgaggaatggcagtatttctacccgatggtgctaaaaaagaaagaagaatcgaaagaggaagacgagttgggatatgatgatgatttccctgtggcagttgaagtaattgttggtggtgttcggatggtttacccttcagcatttgttttgatctctcagaatgacatcccggttcctcagagtgttgccagtgctggaggccacattgcagttgggcagcaagggcttggtagtgtgaaggacccaagtaactgtgggatgcctctgacccctcccacctctccagaacaggctatcctaggtgagagtggaggtatgcagagtgctgccagtcacctggtttcccaagatggagggatgataacgatgcacagtccaaagagatcggggaagattcctccaaaactccacaatcatatggtccatcgagtctggaaggaatgcatcctcaacagaacccagtccaagaggagccaaatgtcaactccaactcttgaagaagagcctgctagcaatcctgctacttgggattttgtggatccaacccaaagagtcagctgttcttgttccaggcataagcttttaaaacgttgtgcagtcgggcccaatcgacctcccacagtatctcaaccagggttcagtgcaggaccatcatcatcttcatctttaccacctcctgcttcttctaagcacaaaacagcagaaagacaggaaaaaggagacaagctgcaaaagagacccttaataccatttcaccataggccctctgtggccgaagaattatgcatggagcaagatacaccaggacagaaactagggttggcagggatagactcctccttagaggtgtctagcagtaggaaatatgataagcaaatggccgtgccttccagaaatacaagcaagcaaatgaatctgaatcctatggattcacctcattcccctatatcccctctgccaccaacactcagccctcagccacgaggtcaggaaacagagagtttggacccaccatcggtccctgtgaatccagccctttatggaaatggactagaactccagcagttgtctactctggatgacagaactgtcctcgtaggccaaagactgcctctcatggcagaggtcagcgagacagccttatattgtgggattaggccctcgaacccggagtcatcagaaaagtggtggcatagttatcgtctcccacccagtgatgatgctgagttcaggcctccagagctccagggtgagagatgtgatgccaaaatggaggtaaactcagagagcactgcattgcaaaggtaagacagctctctgcaccacccacccgtccaccggaagggcatgggctccctccccatctctacctgctaaactttcagattcaaaattgaagtaggcttttctttgtccttcttgactccggatatggaaaatgtttaatggtcaaatgctttgtcctacttataggttagcacacatgtcatttgacacatgggcatataaagaactctttatgccatttaagtacactccaaatatattaatacatttttgccctactgtttgttaattaaagaatatagctttataagactttccatactgctgtcagtgccttctttgtatgttgacntttttgaggaaggctttgcctgcattcaggtgtatgtatcatgtatctagtataatatttatagctcttttgagccacccattctaaaactttacatagatgatctcatttaatcttcactgtaccatattattacgttaattttataactgagaaactagggccatgcagttagtaaatgacacagatggaatttgaaactaggcagtctgtcctgagaacctgtgctcttaagtggaattgatggacccagagacaaaaacatatatcttgacaaagtatgctaatttttatttaatcatgaatataaactgtaaaagcaaatcactatatcggtgaatttttagttgtttttacaaaaagtttaaactttgtaaatgctttaaggcataaatgctcttttttttttttttttttttgtnntttagactcttagcacaacctaacaaacggtttaaaatctggcaagacaaacagccccagttgcagccactccacttccttgacccattgcctctatcacaacaacctggagacagtttgggagaagtgaatgacccatatacctttgaagatggtgacataaaatacatctttacagccaacaagaaatgcaaacaagggacggagaaagattccctgaaaaagaataagtcagaggatggatttggtaccaaggatgtcactacaccaggtcattccacgccggtgcctgatgggaaaaatgccatgtctattttcagttctgctactaaaacagatgtccggcaggataatgctgctggcagagctggctccagtagccttacacaggtaacagatttggcaccttccctgcatgacttagacaacatctttgataattctgatgacgacgaacttggggctgtatcacctgctctgcgctcatcaaaaatgcctgcagttgggacagaagaccgacctcttgggaaggatggaagagctgctgttccttatccaccaacagttgcagacttgcaaaggatgtttcccactccaccatctttggaacagcatcctgcattttctcctgtgatgaattataaagatgggatcagctcagagacagtgacagcattaggcatgatggagagccctatggtcagtatggtttcaacacaactcacagaattcaaaatggaagtggaagatggattaggaagtcccaagcccgaggaaattaaggacttttcatatgtgcacaaagttccatcctttcaaccttttgtgggatcctccatgtttgctccactgaagatgttgccgagccattgtttgctacctctgaagatacctgatgcctgtctgtttcggccttcatgggcaattcctcctaaaattgaacaactgcccatgccccctgcagccactttcattagagatggctacaataacgtgcctagtgttgggagcctagcagatccagactatctgaacacaccacagatgaacacacccgtgacgttgaacagcgctgccccagccagcaatagtggggcaggagtcctaccatctccagcaacccctcgcttctctgtccccacaccacgaacccccaggaccccaagaactcccagaggtgggggcactgccagtggtcaagggtctgttaagtatgatagcaccgatcaaggatcaccagcctccaccccctctactacacggcccctcaactctgtggagcccgccaccatgcagccaattcccgaagcccacagcctctatgttaccctgattctctccgattccgtgatgaatatctttaaagacagaaactttgacagctgttgcatctgtgcctgcaacatgaacatcaaaggggcggatgtcgggctttacatccccgattcttccaatgaggaccagtaccgctgtacctgtgggtttagtgcgattatgaaccgcaaacttggctacaattcaggactcttccttgaagatgagttggatatttttgggaagaattctgatattggtcaggctgcagagaggcgcttaatgatgtgtcagtccaccttccttcctcaggtggaaggaaccaaaaaaccccaggagccacccataagccttctcctcctcctccagaatcaacacacacaaccttttgcttcactgaatttcctggactacatttcctctaacaatcgccaaactcttccctgtgtaagctggagttatgaccgggtgcaagcagataataatgattactggacggaatgctttaatgcgttggagcaggggcggcagtatgtggataaccccactggtggaaaagtggacgaagctctggtgagaagtgccactgtgcactcttggcctcacagcaatgtgctggacatcagcatgctctcctcccaggatgtggttcgtatgctgttgtccctgcagccctttctccaagatgccatccaaaagaagcgcacgggcaggacctgggagaacatccagcatgtgcagggaccactcacttggcagcagttccataaaatggcaggacggggaacctacggttcggaagaatctcctgagccgttgcccatccccactctgctggtaggctatgacaaggatttcctcaccatctcgccattctccttgccgttttgggagaggctcttgttggacccatatgggggccaccgtgatgttgcctatattgtggtgtgtccagaaaatgaggccttgctcgaaggagccaaaactttcttcagggacttgagtgctgtatacgagatgtgtaggcttgggcagcacaagcccatctgcaaagtgctacgtgacgggatcatgcgcgtgggaaaaactgtggcacagaagctgacagatgagcttgtgagtgagtggtttaaccagccttggagcggcgaggagaatgacaatcattccagactcaaactttatgcgcaagtttgccgccatcacctagcaccttatttagccactctgcagcttgatagcagcctattgataccacctaaataccagaccccaccagcagcagcacagggacaagctacgccagggaatgctgggcccttagctccaaatggatcagcagctcccccagctggcagtgcatttaatcccacctcgaatagtagttctacaaatcctgcagcaagtagttctgcatctggttcctctgtgccaccggtctcatcgtctgcctctgctcctggtattagccagataagcactacctcttcttcaggattcagtggtagtgttggagggcagaaccccagcactgggggcatttctgcggatagaacgcaagggaacataggctgtggtggagacactgaccctgggcagagctcttctcagccctcacaggatggacaagagagtgttacagaaagggagagaataggaattcccacggagcctgactctgcagacagccatgcccaccctccagctgttgtcatttacatggtggacccgttcacgtatgctgcagaggaggactccacttctgggaacttttggctgttgagcttgatgcgctgctacacagaaatgctggataatttacctgagcatatgagaaattctttcattctccagattgtgccttgccagtacatgctgcagacaatgaaggatgagcaagttttctacattcaatacttgaagtccatggcattttcagtgtactgccagtgcaggcgaccactgcctacacagatccacattaaatccctcacgggatttgggcctgcagccagcattgagatgaccctcaagaaccctgagcggcccagcccaatccagctttactcccctccctttatattggccccaatcaaagacaagcagacagagctgggagagacgtttggtgaggcgagccagaaatacaatgtgctcttcgtgggctattgtctgtctcacgaccagcgctggcttttggcttcctgcactgacctccatggggaattattagagacctgcgttgtaaatattgctttaccaaacaggtcacggaggagtaaagtatctgcacgtaaaattggactacagaagttatgggagtggtgcatagggattgtccaaatgacatctctaccctggagagttgtaatcgggcgacttgggcgtcttggccatggggagcttaaagattggagtatcctccttggagaatgttcactacagacaatcagcaaaaagctcaaggatgtgtgccggatgtgtggaatctctgccgcagactctccttctatccttagtgcctgcctggttgccatggagccccaggggtcctttgtagtgatgccagatgctgtcacaatgggctctgtttttggccgaagtactgcactgaacatgcagtcatctcagctcaacacccctcaagatgcttcttgtacacacatcttggtgttcccaacatcatcaaccatccaggtggctccagccaactaccccaatgaagatgggtttagccccaacaatgatgatatgtttgttgaccttccattcccagatgatatggacaatgatattggcatattaatgactgggaacctccattcctctcccaactcttccccagtaccctccccaggctctccttctggaattggtgtgggctctcacttccagcatagtcggagccagggtgagcgtcttctttctagagaagcaccagaggagctaaagcagcagcccctggcccttgggtattttgtatcaactgccaaagctgagaatcttccccagtggttttggtcatcgtgtccccaggctcaaaaccagtgccctctcttcttaaaggcttcgctgcatcaccacatttcagtagcacagacagacgaacttctgcctgccaggaattctcagcgggttccacaccctcttgactccaaaaccacgtcggatgttttaaggtttgttttggagcagtacaacgctctgtcctggctcacgtgcaatccggccacccaggaccgtacttcctgccttcccgtccactttgtggtgctcactcagttgtacaatgccatcatgaatatactttaattggaaaagcacttgttctctctggctcagttccttctccctgcaacctcagtccaaggaacctgctacactctgcaaataacccacatccttttcttcagaccactctccacagtcctgcactgtgattccttctcagcaggcacatgtcaattctgcagtgttcattaccagagtgactccttgacacttctctcatggacctggaaacttccataagtggtgactttcagccagtgcggtggtgtgtgtagccccaaccactggtccccaggaagtggtggtggttgatggcttttcagcgggaaacagaagagacagtgtccttttgcacaagagtctgtgttttcagcctctgtatacaattgagggcagtctagccctttggatgaaatcctcttagttactggtgtatggcctgtgggttacctgaactccataatctgggactttttaaaaataagaaccagctcaagtacatggtttcatactggggtttctgtctccctagtgttcccatccagattagcatgagtgctttggttgacttcaaacctgtgtgtcaatgcagaaggtctggagacagcttcattttgtttatttattttaatttgttttgtcatatggtttttgtgactttatttttttaattcacaaggaccaggtacagtagctgaaacccaattcagatccaccataggattctttgactacatacctctgtcctagaagccggaaaaggagtaaaaacacattggggagatcatgcctaaaagtaatatattcaaaaccacccagcagtaggttttgttaacaacaaactggattttaaaagttctgccatgttaagtggccagcatttcatgaaggataacatttttatacagaaggcagtcaagctcaactcagagccatggaggcaagtaccttaattagttttatatagtcacaacggaaatatattttctagtgaattcttattggaagccaggtctctcctctcattagatcaaaagggacttatgtacatacaacaattgaaagtgtttgctcatgaaatcagttataaatatggtgaattttttctggaccataggaatattatttcaaagaaatattacaacttaaccattaaattagtacttgaagttgagcctttgtggtgggactttttaaaaaaatgcctttttaaagcattaatggctaattgaagtattttatgactcctcattcctggcccagagggttgtctttgaaaccctgtttctaacccttgtgttgtgtgtttctgtctgaggacagtgggtgtgtactggcctcccgggagccactgtgaccaggcctttgagctcttgtcatctgtggagagaatcatgcaaattttaaaagttcttccaagagacttccatgtcctggttattaacaaaaaaggaaaaatgtaataattgatatgattttgtaaaagtatttttcttgaaataatctaaagtttaaaacattatattaaaaaaaaagttgtgtggtgggaatgtgaaagcagagaaataacttgtaaatggataattttgttctctgtaccaccagttgaagggggggttgactttcgcaatgtataggataaaaaatctgatatatcaaaccatttgtatctaatgtgtacagtgtaaaattgactttaaaaatattgcagtgctattttttcttaatcagaaaggaaaattctcaaggccttttgaagagcataagaagatgaagattgtaaacttgtataaaattatcttggtgagaagacaaattgtaaagtagatatttgtaatcttttaccactttggggttgcttttttcccggaattcatcagaactttgaattttttttttaaatgggctgtttttaatgcaggggcttttcttccctagaaacccaattctaagcagaaaaagaaaaaaaacacaaaaaataaaaaacccctacaaaaaaactttaaaaaaaatggcagcaaagggtagttttcatctggtgtcttttatttaagttttttaagttaagaaaagctggtgacatatttatacgtttttgtgcaaaaataaatgaatggcaatagattttaaaaaatcttattatgtacttctgtgtgaaaaagtctgtataatatttcccttaaatatgcattattttacttgtgagttttttactgaattaatctgaaatgtacaagccctggatttgctacagagtgagaagttattttatttttttttatttttaattttggaaattctgcagaaatcagaactcttaccatggtttgaacaaaaaaaggggaaatggggaggggaaaagggtgggattgtccagcatgcttgtatgtatatttcagaaccttttttaaatgtaaaagctgtacatttctgggaagttctgaatttcttttgtttccttttttccttcaagcattttgcagtgagcttcttttatatatagcaaacaatttgaaagaatacaaaaatatgtgaagttcatttaaaaaaataactacagtatagcgctggtacagtacacttatatacttgcggatgaaagctataacttttacactttttagaggatt

SEQ ID NO: 346225 - DNA, 5014 bp, Homo sapiens
  misc_feature (799)..(799): n is a, c, g, or t
  misc_feature (825)..(825): n is a, c, g, or t
cctaatgttattcattaacacattttcatattatttaaattcttacaagcaacatttttaatgactgcatattttccatagtcattcctatatctccacttctttactgttataaataaagccataggacacgtttatgtataatcttatttttcacatttcaggtcatttttaacatggattcttagatgctgacaaatattgccaaattccattccaaaagaggttacacttatttcctttcatcagtgaatgagtatgcttattttcactgcacctttgacagctttatagtgtaatgattttttaaaaaattctatatagatgaaaaacaatgcttcggatgtttgggtttcgttttaatgtcactttaactgaagctatcttgtaaaattaaaagattgaaattaaagttatcagagtacattgctgatagttttccattgttttgaagtctgtatcctaaatgattaggtaataattccaaaaaatgccatacacactgtgtaattataaaaagaaatataataaaattttggggccatggtaatacctgtaataaattgagatcttacccctaaagtgggaacatggtagtttctaagtgacagtataacttgaccaacataatcgtacatcttttgaaattgctggtgatagagaattttatgtcagcggaaggaattaggatttaattatattatgtgtggcacagatatattttaaggctgaggttacctctccccattgtggtaaggaattcatgccgtttcctttttcagcttgcttgttagtgtgntagatctcagtttctaggtttttggnttttgttttttttttgtatttgtgtctttagattgtgccttgccagtacatgctgcagacaatgaaggatgagcaagttttctacattcaatacttgaagtccatggcattttcagtgtactgccagtgcaggcgaccactgcctacacagatccacattaaatccctcacgggatttgggcctgcagccagcattgagatgaccctcaagaaccctgagcggcccagcccaatccagctttactcccctccctttatattggccccaatcaaagacaagcagacagagctgggagagacgtttggtgaggcgagccagaaatacaatgtgctcttcgtgggctattgtctgtctcacgaccagcgctggcttttggcttcctgcactgacctccatggggaattattagagacctgcgttgtaaatattgctttaccaaacaggtcacggaggagtaaagtatctgcacgtaaaattggactacagaagttatgggagtggtgcatagggattgtccaaatgacatctctaccctggagagttgtaatcgggcgacttgggcgtcttggccatggggagcttaaagattggagtatcctccttggagaatgttcactacagacaatcagcaaaaagctcaaggatgtgtgccggatgtgtggaatctctgccgcagactctccttctatccttagtgcctgcctggttgccatggagccccaggggtcctttgtagtgatgccagatgctgtcacaatgggctctgtttttggccgaagtactgcactgaacatgcagtcatctcagctcaacacccctcaagatgcttcttgtacacacatcttggtgttcccaacatcatcaaccatccaggtggctccagccaactaccccaatgaagatgggtttagccccaacaatgatgatatgtttgttgaccttccattcccagatgatatggacaatgatattggcatattaatgactgggaacctccattcctctcccaactcttccccagtaccctccccaggctctccttctggaattggtgtgggctctcacttccagcatagtcggagccagggtgagcgtcttctttctagagaagcaccagaggagctaaagcagcagcccctggcccttgggtattttgtatcaactgccaaagctgagaatcttccccagtggttttggtcatcgtgtccccaggctcaaaaccagtgccctctcttcttaaaggcttcgctgcatcaccacatttcagtagcacagacagacgaacttctgcctgccaggaattctcagcgggttccacaccctcttgactccaaaaccacgtcggatgttttaaggtttgttttggagcagtacaacgctctgtcctggctcacgtgcaatccggccacccaggaccgtacttcctgccttcccgtccactttgtggtgctcactcagttgtacaatgccatcatgaatatactttaattggaaaagcacttgttctctctggctcagttccttctccctgcaacctcagtccaaggaacctgctacactctgcaaataacccacatccttttcttcagaccactctccacagtcctgcactgtgattccttctcagcaggcacatgtcaattctgcagtgttcattaccagagtgactccttgacacttctctcatggacctggaaacttccataagtggtgactttcagccagtgcggtggtgtgtgtagccccaaccactggtccccaggaagtggtggtggttgatggcttttcagcgggaaacagaagagacagtgtccttttgcacaagagtctgtgttttcagcctctgtatacaattgagggcagtctagccctttggatgaaatcctcttagttactggtgtatggcctgtgggttacctgaactccataatctgggactttttaaaaataagaaccagctcaagtacatggtttcatactggggtttctgtctccctagtgttcccatccagattagcatgagtgctttggttgacttcaaacctgtgtgtcaatgcagaaggtctggagacagcttcattttgtttatttattttaatttgttttgtcatatggtttttgtgactttatttttttaattcacaaggaccaggtacagtagctgaaacccaattcagatccaccataggattctttgactacatacctctgtcctagaagccggaaaaggagtaaaaacacattggggagatcatgcctaaaagtaatatattcaaaaccacccagcagtaggttttgttaacaacaaactggattttaaaagttctgccatgttaagtggccagcatttcatgaaggataacatttttatacagaaggcagtcaagctcaactcagagccatggaggcaagtaccttaattagttttatatagtcacaacggaaatatattttctagtgaattcttattggaagccaggtctctcctctcattagatcaaaagggacttatgtacatacaacaattgaaagtgtttgctcatgaaatcagttataaatatggtgaattttttctggaccataggaatattatttcaaagaaatattacaacttaaccattaaattagtacttgaagttgagcctttgtggtgggactttttaaaaaaatgcctttttaaagcattaatggctaattgaagtattttatgactcctcattcctggcccagagggttgtctttgaaaccctgtttctaacccttgtgttgtgtgtttctgtctgaggacagtgggtgtgtactggcctcccgggagccactgtgaccaggcctttgagctcttgtcatctgtggagagaatcatgcaaattttaaaagttcttccaagagacttccatgtcctggttattaacaaaaaaggaaaaatgtaataattgatatgattttgtaaaagtatttttcttgaaataatctaaagtttaaaacattatattaaaaaaaaagttgtgtggtgggaatgtgaaagcagagaaataacttgtaaatggataattttgttctctgtaccaccagttgaagggggggttgactttcgcaatgtataggataaaaaatctgatatatcaaaccatttgtatctaatgtgtacagtgtaaaattgactttaaaaatattgcagtgctattttttcttaatcagaaaggaaaattctcaaggccttttgaagagcataagaagatgaagattgtaaacttgtataaaattatcttggtgagaagacaaattgtaaagtagatatttgtaatcttttaccactttggggttgcttttttcccggaattcatcagaactttgaattttttttttaaatgggctgtttttaatgcaggggcttttcttccctagaaacccaattctaagcagaaaaagaaaaaaaacacaaaaaataaaaaacccctacaaaaaaactttaaaaaaaatggcagcaaagggtagttttcatctggtgtcttttatttaagttttttaagttaagaaaagctggtgacatatttatacgtttttgtgcaaaaataaatgaatggcaatagattttaaaaaatcttattatgtacttctgtgtgaaaaagtctgtataatatttcccttaaatatgcattattttacttgtgagttttttactgaattaatctgaaatgtacaagccctggatttgctacagagtgagaagttattttatttttttttatttttaattttggaaattctgcagaaatcagaactcttaccatggtttgaacaaaaaaaggggaaatggggaggggaaaagggtgggattgtccagcatgcttgtatgtatatttcagaaccttttttaaatgtaaaagctgtacatttctgggaagttctgaatttcttttgtttccttttttccttcaagcattttgcagtgagcttcttttatatatagcaaacaatttgaaagaatacaaaaatatgtgaagttcatttaaaaaaataactacagtatagcgctggtacagtacactaaaagactttgataaaaagaaacaataataaaaggcctccattttaaatgtcattcatatataccttgtggatgagagctatatacttttacacacttttttagaggaataaattattgaattactgaagctttgagtg

SEQ ID NO: 346226 - DNA, 8471 bp, Homo sapiens
  misc_feature (2275)..(2275): n is a, c, g, or t
  misc_feature (2697)..(2698): n is a, c, g, or t
gctgaactcacgggaatcaaatggcgtaggtacaattttggagggcatggggactgtggacccataatttcagccccagcccaagatgatccaattctgttaagtttcatccgctgtctgcaagctaacctgctttgtgtatggcgtcgtgatgtcaaaccagattgcaaagagttatggatattctggtggggagatgaacccaacctagtgggtgtaatacatcatgaactgcaggttgtggaagaaggactctgggaaaatggcctttcctatgaatgtaggacgctgctcttcaaagcgatccacaatctgttagaaaggtgcctaatggataagaacttcgttaggattgggaaatggtttgtccgaccctacgaaaaggatgaaaagccagtcaacaaaagtgagcatttgtcctgtgctttcacattctttctgcatggagaaagtaatgtatgcacaagtgtggagattgcccagcaccagccaatttatttgatcaatgaggagcatatacacatggctcagtcttcacctgcaccatttcaagtactggtaagtccttatggcttaaatgggacgctaacaggccaagcatacaagatgtcagacccagccactcgtaagttgattgaggaatggcagtatttctacccgatggtgctaaaaaagaaagaagaatcgaaagaggaagacgagttgggatatgatgatgatttccctgtggcagttgaagtaattgttggtggtgttcggatggtttacccttcagcatttgttttgatctctcagaatgacatcccggttcctcagagtgttgccagtgctggaggccacattgcagttgggcagcaagggcttggtagtgtgaaggacccaagtaactgtgggatgcctctgacccctcccacctctccagaacaggctatcctaggtgagagtggaggtatgcagagtgctgccagtcacctggtttcccaagatggagggatgataacgatgcacagtccaaagagatcggggaagattcctccaaaactccacaatcatatggtccatcgagtctggaaggaatgcatcctcaacagaacccagtccaagaggagccaaatgtcaactccaactcttgaagaagagcctgctagcaatcctgctacttgggattttgtggatccaacccaaagagtcagctgttcttgttccaggcataagcttttaaaacgttgtgcagtcgggcccaatcgacctcccacagtatctcaaccagggttcagtgcaggaccatcatcatcttcatctttaccacctcctgcttcttctaagcacaaaacagcagaaagacaggaaaaaggagacaagctgcaaaagagacccttaataccatttcaccataggccctctgtggccgaagaattatgcatggagcaagatacaccaggacagaaactagggttggcagggatagactcctccttagaggtgtctagcagtaggaaatatgataagcaaatggccgtgccttccagaaatacaagcaagcaaatgaatctgaatcctatggattcacctcattcccctatatcccctctgccaccaacactcagccctcagccacgaggtcaggaaacagagagtttggacccaccatcggtccctgtgaatccagccctttatggaaatggactagaactccagcagttgtctactctggatgacagaactgtcctcgtaggccaaagactgcctctcatggcagaggtcagcgagacagccttatattgtgggattaggccctcgaacccggagtcatcagaaaagtggtggcatagttatcgtctcccacccagtgatgatgctgagttcaggcctccagagctccagggtgagagatgtgatgccaaaatggaggtaaactcagagagcactgcattgcaaaggtaagacagctctctgcaccacccacccgtccaccggaagggcatgggctccctccccatctctacctgctaaactttcagattcaaaattgaagtaggcttttctttgtccttcttgactccggatatggaaaatgtttaatggtcaaatgctttgtcctacttataggttagcacacatgtcatttgacacatgggcatataaagaactctttatgccatttaagtacactccaaatatattaatacatttttgccctactgtttgttaattaaagaatatagctttataagactttccatactgctgtcagtgccttctttgtatgttgacntttttgaggaaggctttgcctgcattcaggtgtatgtatcatgtatctagtataatatttatagctcttttgagccacccattctaaaactttacatagatgatctcatttaatcttcactgtaccatattattacgttaattttataactgagaaactagggccatgcagttagtaaatgacacagatggaatttgaaactaggcagtctgtcctgagaacctgtgctcttaagtggaattgatggacccagagacaaaaacatatatcttgacaaagtatgctaatttttatttaatcatgaatataaactgtaaaagcaaatcactatatcggtgaatttttagttgtttttacaaaaagtttaaactttgtaaatgctttaaggcataaatgctcttttttttttttttttttttgtnntttagactcttagcacaacctaacaaacggtttaaaatctggcaagacaaacagccccagttgcagccactccacttccttgacccattgcctctatcacaacaacctggagacagtttgggagaagtgaatgacccatatacctttgaagatggtgacataaaatacatctttacagccaacaagaaatgcaaacaagggacggagaaagattccctgaaaaagaataagtcagaggatggatttggtaccaaggatgtcactacaccaggtcattccacgccggtgcctgatgggaaaaatgccatgtctattttcagttctgctactaaaacagatgtccggcaggataatgctgctggcagagctggctccagtagccttacacaggtaacagatttggcaccttccctgcatgacttagacaacatctttgataattctgatgacgacgaacttggggctgtatcacctgctctgcgctcatcaaaaatgcctgcagttgggacagaagaccgacctcttgggaaggatggaagagctgctgttccttatccaccaacagttgcagacttgcaaaggatgtttcccactccaccatctttggaacagcatcctgcattttctcctgtgatgaattataaagatgggatcagctcagagacagtgacagcattaggcatgatggagagccctatggtcagtatggtttcaacacaactcacagaattcaaaatggaagtggaagatggattaggaagtcccaagcccgaggaaattaaggacttttcatatgtgcacaaagttccatcctttcaaccttttgtgggatcctccatgtttgctccactgaagatgttgccgagccattgtttgctacctctgaagatacctgatgcctgtctgtttcggccttcatgggcaattcctcctaaaattgaacaactgcccatgccccctgcagccactttcattagagatggctacaataacgtgcctagtgttgggagcctagcagatccagactatctgaacacaccacagatgaacacacccgtgacgttgaacagcgctgccccagccagcaatagtggggcaggagtcctaccatctccagcaacccctcgcttctctgtccccacaccacgaacccccaggaccccaagaactcccagaggtgggggcactgccagtggtcaagggtctgttaagtatgatagcaccgatcaaggatcaccagcctccaccccctctactacacggcccctcaactctgtggagcccgccaccatgcagccaattcccgaagcccacagcctctatgttaccctgattctctccgattccgtgatgaatatctttaaagacagaaactttgacagctgttgcatctgtgcctgcaacatgaacatcaaaggggcggatgtcgggctttacatccccgattcttccaatgaggaccagtaccgctgtacctgtgggtttagtgcgattatgaaccgcaaacttggctacaattcaggactcttccttgaagatgagttggatatttttgggaagaattctgatattggtcaggctgcagagaggcgcttaatgatgtgtcagtccaccttccttcctcaggtggaaggaaccaaaaaaccccaggagccacccataagccttctcctcctcctccagaatcaacacacacaaccttttgcttcactgaatttcctggactacatttcctctaacaatcgccaaactcttccctgtgtaagctggagttatgaccgggtgcaagcagataataatgattactggacggaatgctttaatgcgttggagcaggggcggcagtatgtggataaccccactggtggaaaagtggacgaagctctggtgagaagtgccactgtgcactcttggcctcacagcaatgtgctggacatcagcatgctctcctcccaggatgtggttcgtatgctgttgtccctgcagccctttctccaagatgccatccaaaagaagcgcacgggcaggacctgggagaacatccagcatgtgcagggaccactcacttggcagcagttccataaaatggcaggacggggaacctacggttcggaagaatctcctgagccgttgcccatccccactctgctggtaggctatgacaaggatttcctcaccatctcgccattctccttgccgttttgggagaggctcttgttggacccatatgggggccaccgtgatgttgcctatattgtggtgtgtccagaaaatgaggccttgctcgaaggagccaaaactttcttcagggacttgagtgctgtatacgagatgtgtaggcttgggcagcacaagcccatctgcaaagtgctacgtgacgggatcatgcgcgtgggaaaaactgtggcacagaagctgacagatgagcttgtgagtgagtggtttaaccagccttggagcggcgaggagaatgacaatcattccagactcaaactttatgcgcaagtttgccgccatcacctagcaccttatttagccactctgcagcttgatagcagcctattgataccacctaaataccagaccccaccagcagcagcacagggacaagctacgccagggaatgctgggcccttagctccaaatggatcagcagctcccccagctggcagtgcatttaatcccacctcgaatagtagttctacaaatcctgcagcaagtagttctgcatctggttcctctgtgccaccggtctcatcgtctgcctctgctcctggtattagccagataagcactacctcttcttcaggattcagtggtagtgttggagggcagaaccccagcactgggggcatttctgcggatagaacgcaagggaacataggctgtggtggagacactgaccctgggcagagctcttctcagccctcacaggatggacaagagagtgttacagaaagggagagaataggaattcccacggagcctgactctgcagacagccatgcccaccctccagctgttgtcatttacatggtggacccgttcacgtatgctgcagaggaggactccacttctgggaacttttggctgttgagcttgatgcgctgctacacagaaatgctggataatttacctgagcatatgagaaattctttcattctccagattgtgccttgccagtacatgctgcagacaatgaaggatgagcaagttttctacattcaatacttgaagtccatggcattttcagtgtactgccagtgcaggcgaccactgcctacacagatccacattaaatccctcacgggatttgggcctgcagccagcattgagatgaccctcaagaaccctgagcggcccagcccaatccagctttactcccctccctttatattggccccaatcaaagacaagcagacagagctgggagagacgtttggtgaggcgagccagaaatacaatgtgctcttcgtgggctattgtctgtctcacgaccagcgctggcttttggcttcctgcactgacctccatggggaattattagagacctgcgttgtaaatattgctttaccaaacaggtcacggaggagtaaagtatctgcacgtaaaattggactacagaagttatgggagtggtgcatagggattgtccaaatgacatctctaccctggagagttgtaatcgggcgacttgggcgtcttggccatggggagcttaaagattggagtatcctccttggagaatgttcactacagacaatcagcaaaaagctcaaggatgtgtgccggatgtgtggaatctctgccgcagactctccttctatccttagtgcctgcctggttgccatggagccccaggggtcctttgtagtgatgccagatgctgtcacaatgggctctgtttttggccgaagtactgcactgaacatgcagtcatctcagctcaacacccctcaagatgcttcttgtacacacatcttggtgttcccaacatcatcaaccatccaggtggctccagccaactaccccaatgaagatgggtttagccccaacaatgatgatatgtttgttgaccttccattcccagatgatatggacaatgatattggcatattaatgactgggaacctccattcctctcccaactcttccccagtaccctccccaggctctccttctggaattggtgtgggctctcacttccagcatagtcggagccagggtgagcgtcttctttctagagaagcaccagaggagctaaagcagcagcccctggcccttgggtattttgtatcaactgccaaagctgagaatcttccccagtggttttggtcatcgtgtccccaggctcaaaaccagtgccctctcttcttaaaggcttcgctgcatcaccacatttcagtagcacagacagacgaacttctgcctgccaggaattctcagcgggttccacaccctcttgactccaaaaccacgtcggatgttttaaggtttgttttggagcagtacaacgctctgtcctggctcacgtgcaatccggccacccaggaccgtacttcctgccttcccgtccactttgtggtgctcactcagttgtacaatgccatcatgaatatactttaattggaaaagcacttgttctctctggctcagttccttctccctgcaacctcagtccaaggaacctgctacactctgcaaataacccacatccttttcttcagaccactctccacagtcctgcactgtgattccttctcagcaggcacatgtcaattctgcagtgttcattaccagagtgactccttgacacttctctcatggacctggaaacttccataagtggtgactttcagccagtgcggtggtgtgtgtagccccaaccactggtccccaggaagtggtggtggttgatggcttttcagcgggaaacagaagagacagtgtccttttgcacaagagtctgtgttttcagcctctgtatacaattgagggcagtctagccctttggatgaaatcctcttagttactggtgtatggcctgtgggttacctgaactccataatctgggactttttaaaaataagaaccagctcaagtacatggtttcatactggggtttctgtctccctagtgttcccatccagattagcatgagtgctttggttgacttcaaacctgtgtgtcaatgcagaaggtctggagacagcttcattttgtttatttattttaatttgttttgtcatatggtttttgtgactttatttttttaattcacaaggaccaggtacagtagctgaaacccaattcagatccaccataggattctttgactacatacctctgtcctagaagccggaaaaggagtaaaaacacattggggagatcatgcctaaaagtaatatattcaaaaccacccagcagtaggttttgttaacaacaaactggattttaaaagttctgccatgttaagtggccagcatttcatgaaggataacatttttatacagaaggcagtcaagctcaactcagagccatggaggctggtgacgggagtttggcatctgatacaccacacgcaagtccctgttggctgcacaccatctaccatgctgttcccttcttgggtccatcagctaggaaaagccacatgttctagcaggagttgcgagggtatatttcgtatactgcccttgcaaaatctctcattaaaaatggttaaaccccaggacttggcagagcttacaataaacatttgaataattggaaa

SEQ ID NO: 346227 - DNA, 6032 bp, Homo sapiens
  misc_feature (2275)..(2275): n is a, c, g, or t
  misc_feature (2697)..(2698): n is a, c, g, or t
gctgaactcacgggaatcaaatggcgtaggtacaattttggagggcatggggactgtggacccataatttcagccccagcccaagatgatccaattctgttaagtttcatccgctgtctgcaagctaacctgctttgtgtatggcgtcgtgatgtcaaaccagattgcaaagagttatggatattctggtggggagatgaacccaacctagtgggtgtaatacatcatgaactgcaggttgtggaagaaggactctgggaaaatggcctttcctatgaatgtaggacgctgctcttcaaagcgatccacaatctgttagaaaggtgcctaatggataagaacttcgttaggattgggaaatggtttgtccgaccctacgaaaaggatgaaaagccagtcaacaaaagtgagcatttgtcctgtgctttcacattctttctgcatggagaaagtaatgtatgcacaagtgtggagattgcccagcaccagccaatttatttgatcaatgaggagcatatacacatggctcagtcttcacctgcaccatttcaagtactggtaagtccttatggcttaaatgggacgctaacaggccaagcatacaagatgtcagacccagccactcgtaagttgattgaggaatggcagtatttctacccgatggtgctaaaaaagaaagaagaatcgaaagaggaagacgagttgggatatgatgatgatttccctgtggcagttgaagtaattgttggtggtgttcggatggtttacccttcagcatttgttttgatctctcagaatgacatcccggttcctcagagtgttgccagtgctggaggccacattgcagttgggcagcaagggcttggtagtgtgaaggacccaagtaactgtgggatgcctctgacccctcccacctctccagaacaggctatcctaggtgagagtggaggtatgcagagtgctgccagtcacctggtttcccaagatggagggatgataacgatgcacagtccaaagagatcggggaagattcctccaaaactccacaatcatatggtccatcgagtctggaaggaatgcatcctcaacagaacccagtccaagaggagccaaatgtcaactccaactcttgaagaagagcctgctagcaatcctgctacttgggattttgtggatccaacccaaagagtcagctgttcttgttccaggcataagcttttaaaacgttgtgcagtcgggcccaatcgacctcccacagtatctcaaccagggttcagtgcaggaccatcatcatcttcatctttaccacctcctgcttcttctaagcacaaaacagcagaaagacaggaaaaaggagacaagctgcaaaagagacccttaataccatttcaccataggccctctgtggccgaagaattatgcatggagcaagatacaccaggacagaaactagggttggcagggatagactcctccttagaggtgtctagcagtaggaaatatgataagcaaatggccgtgccttccagaaatacaagcaagcaaatgaatctgaatcctatggattcacctcattcccctatatcccctctgccaccaacactcagccctcagccacgaggtcaggaaacagagagtttggacccaccatcggtccctgtgaatccagccctttatggaaatggactagaactccagcagttgtctactctggatgacagaactgtcctcgtaggccaaagactgcctctcatggcagaggtcagcgagacagccttatattgtgggattaggccctcgaacccggagtcatcagaaaagtggtggcatagttatcgtctcccacccagtgatgatgctgagttcaggcctccagagctccagggtgagagatgtgatgccaaaatggaggtaaactcagagagcactgcattgcaaaggtaagacagctctctgcaccacccacccgtccaccggaagggcatgggctccctccccatctctacctgctaaactttcagattcaaaattgaagtaggcttttctttgtccttcttgactccggatatggaaaatgtttaatggtcaaatgctttgtcctacttataggttagcacacatgtcatttgacacatgggcatataaagaactctttatgccatttaagtacactccaaatatattaatacatttttgccctactgtttgttaattaaagaatatagctttataagactttccatactgctgtcagtgccttctttgtatgttgacntttttgaggaaggctttgcctgcattcaggtgtatgtatcatgtatctagtataatatttatagctcttttgagccacccattctaaaactttacatagatgatctcatttaatcttcactgtaccatattattacgttaattttataactgagaaactagggccatgcagttagtaaatgacacagatggaatttgaaactaggcagtctgtcctgagaacctgtgctcttaagtggaattgatggacccagagacaaaaacatatatcttgacaaagtatgctaatttttatttaatcatgaatataaactgtaaaagcaaatcactatatcggtgaatttttagttgtttttacaaaaagtttaaactttgtaaatgctttaaggcataaatgctcttttttttttttttttttttgtnntttagactcttagcacaacctaacaaacggtttaaaatctggcaagacaaacagccccagttgcagccactccacttccttgacccattgcctctatcacaacaacctggagacagtttgggagaagtgaatgacccatatacctttgaagatggtgacataaaatacatctttacagccaacaagaaatgcaaacaagggacggagaaagattccctgaaaaagaataagtcagaggatggatttggtaccaaggatgtcactacaccaggtcattccacgccggtgcctgatgggaaaaatgccatgtctattttcagttctgctactaaaacagatgtccggcaggataatgctgctggcagagctggctccagtagccttacacaggtaacagatttggcaccttccctgcatgacttagacaacatctttgataattctgatgacgacgaacttggggctgtatcacctgctctgcgctcatcaaaaatgcctgcagttgggacagaagaccgacctcttgggaaggatggaagagctgctgttccttatccaccaacagttgcagacttgcaaaggatgtttcccactccaccatctttggaacagcatcctgcattttctcctgtgatgaattataaagatgggatcagctcagagacagtgacagcattaggcatgatggagagccctatggtcagtatggtttcaacacaactcacagaattcaaaatggaagtggaagatggattaggaagtcccaagcccgaggaaattaaggacttttcatatgtgcacaaagttccatcctttcaaccttttgtgggatcctccatgtttgctccactgaagatgttgccgagccattgtttgctacctctgaagatacctgatgcctgtctgtttcggccttcatgggcaattcctcctaaaattgaacaactgcccatgccccctgcagccactttcattagagatggctacaataacgtgcctagtgttgggagcctagcagatccagactatctgaacacaccacagatgaacacacccgtgacgttgaacagcgctgccccagccagcaatagtggggcaggagtcctaccatctccagcaacccctcgcttctctgtccccacaccacgaacccccaggaccccaagaactcccagaggtgggggcactgccagtggtcaagggtctgttaagtatgatagcaccgatcaaggatcaccagcctccaccccctctactacacggcccctcaactctgtggagcccgccaccatgcagccaattcccgaagcccacagcctctatgttaccctgattctctccgattccgtgatgaatatctttaaagacagaaactttgacagctgttgcatctgtgcctgcaacatgaacatcaaaggggcggatgtcgggctttacatccccgattcttccaatgaggaccagtaccgctgtacctgtgggtttagtgcgattatgaaccgcaaacttggctacaattcaggactcttccttgaagatgagttggatatttttgggaagaattctgatattggtcaggctgcagagaggcgcttaatgatgtgtcagtccaccttccttcctcaggtggaaggaaccaaaaaaccccaggagccacccataagccttctcctcctcctccagaatcaacacacacaaccttttgcttcactgaatttcctggactacatttcctctaacaatcgccaaactcttccctgtgtaagctggagttatgaccgggtgcaagcagataataatgattactggacggaatgctttaatgcgttggagcaggggcggcagtatgtggataaccccactggtggaaaagtggacgaagctctggtgagaagtgccactgtgcactcttggcctcacagcaatgtgctggacatcagcatgctctcctcccaggatgtggttcgtatgctgttgtccctgcagccctttctccaagatgccatccaaaagaagcgcacgggcaggacctgggagaacatccagcatgtgcagggaccactcacttggcagcagttccataaaatggcaggacggggaacctacggttcggaagaatctcctgagccgttgcccatccccactctgctggtaggctatgacaaggatttcctcaccatctcgccattctccttgccgttttgggagaggctcttgttggacccatatgggggccaccgtgatgttgcctatattgtggtgtgtccagaaaatgaggccttgctcgaaggagccaaaactttcttcagggacttgagtgctgtatacgagatgtgtaggcttgggcagcacaagcccatctgcaaagtgctacgtgacgggatcatgcgcgtgggaaaaactgtggcacagaagctgacagatgagcttgtgagtgagtggtttaaccagccttggagcggcgaggagaatgacaatcattccagactcaaactttatgcgcaagtttgccgccatcacctagcaccttatttagccactctgcagcttgatagcagcctattgataccacctaaataccagaccccaccagcagcagcacagggacaagctacgccagggaatgctgggcccttagctccaaatggatcagcagctcccccagctggcagtgcatttaatcccacctcgaatagtagttctacaaatcctgcagcaagtagttctgcatctggttcctctgtgccaccggtctcatcgtctgcctctgctcctggtattagccagataagcactacctcttcttcaggattcagtggtagtgttggagggcagaaccccagcactgggggcatttctgcggatagaacgcaagggaacataggctgtggtggagacactgaccctgggcagagctcttctcagccctcacaggatggacaagagagtgttacagaaagggagagaataggaattcccacggagcctgactctgcagacagccatgcccaccctccagctgttgtcatttacatggtggacccgttcacgtatgctgcagaggaggactccacttctgggaacttttggctgttgagcttgatgcgctgctacacagaaatgctggataatttacctgagcatatgagaaattctttcattctccaggttactgtttgcaagtttattatttacttttgatgttgttatttttgttgttatgaaaataaatacaggcctatgatttttcttaaaaaatggaagtacaggttaattatcccctaaccaaaatactaggaaccagagtgttttggatttccgattttggaatatt

SEQ ID NO: 346228 - DNA, 3833 bp, Homo sapiens
  misc_feature (2275)..(2275): n is a, c, g, or t
  misc_feature (2697)..(2698): n is a, c, g, or t
  misc_feature (3092)..(3092): n is a, c, g, or t
  misc_feature (3094)..(3094): n is a, c, g, or t
gctgaactcacgggaatcaaatggcgtaggtacaattttggagggcatggggactgtggacccataatttcagccccagcccaagatgatccaattctgttaagtttcatccgctgtctgcaagctaacctgctttgtgtatggcgtcgtgatgtcaaaccagattgcaaagagttatggatattctggtggggagatgaacccaacctagtgggtgtaatacatcatgaactgcaggttgtggaagaaggactctgggaaaatggcctttcctatgaatgtaggacgctgctcttcaaagcgatccacaatctgttagaaaggtgcctaatggataagaacttcgttaggattgggaaatggtttgtccgaccctacgaaaaggatgaaaagccagtcaacaaaagtgagcatttgtcctgtgctttcacattctttctgcatggagaaagtaatgtatgcacaagtgtggagattgcccagcaccagccaatttatttgatcaatgaggagcatatacacatggctcagtcttcacctgcaccatttcaagtactggtaagtccttatggcttaaatgggacgctaacaggccaagcatacaagatgtcagacccagccactcgtaagttgattgaggaatggcagtatttctacccgatggtgctaaaaaagaaagaagaatcgaaagaggaagacgagttgggatatgatgatgatttccctgtggcagttgaagtaattgttggtggtgttcggatggtttacccttcagcatttgttttgatctctcagaatgacatcccggttcctcagagtgttgccagtgctggaggccacattgcagttgggcagcaagggcttggtagtgtgaaggacccaagtaactgtgggatgcctctgacccctcccacctctccagaacaggctatcctaggtgagagtggaggtatgcagagtgctgccagtcacctggtttcccaagatggagggatgataacgatgcacagtccaaagagatcggggaagattcctccaaaactccacaatcatatggtccatcgagtctggaaggaatgcatcctcaacagaacccagtccaagaggagccaaatgtcaactccaactcttgaagaagagcctgctagcaatcctgctacttgggattttgtggatccaacccaaagagtcagctgttcttgttccaggcataagcttttaaaacgttgtgcagtcgggcccaatcgacctcccacagtatctcaaccagggttcagtgcaggaccatcatcatcttcatctttaccacctcctgcttcttctaagcacaaaacagcagaaagacaggaaaaaggagacaagctgcaaaagagacccttaataccatttcaccataggccctctgtggccgaagaattatgcatggagcaagatacaccaggacagaaactagggttggcagggatagactcctccttagaggtgtctagcagtaggaaatatgataagcaaatggccgtgccttccagaaatacaagcaagcaaatgaatctgaatcctatggattcacctcattcccctatatcccctctgccaccaacactcagccctcagccacgaggtcaggaaacagagagtttggacccaccatcggtccctgtgaatccagccctttatggaaatggactagaactccagcagttgtctactctggatgacagaactgtcctcgtaggccaaagactgcctctcatggcagaggtcagcgagacagccttatattgtgggattaggccctcgaacccggagtcatcagaaaagtggtggcatagttatcgtctcccacccagtgatgatgctgagttcaggcctccagagctccagggtgagagatgtgatgccaaaatggaggtaaactcagagagcactgcattgcaaaggtaagacagctctctgcaccacccacccgtccaccggaagggcatgggctccctccccatctctacctgctaaactttcagattcaaaattgaagtaggcttttctttgtccttcttgactccggatatggaaaatgtttaatggtcaaatgctttgtcctacttataggttagcacacatgtcatttgacacatgggcatataaagaactctttatgccatttaagtacactccaaatatattaatacatttttgccctactgtttgttaattaaagaatatagctttataagactttccatactgctgtcagtgccttctttgtatgttgacntttttgaggaaggctttgcctgcattcaggtgtatgtatcatgtatctagtataatatttatagctcttttgagccacccattctaaaactttacatagatgatctcatttaatcttcactgtaccatattattacgttaattttataactgagaaactagggccatgcagttagtaaatgacacagatggaatttgaaactaggcagtctgtcctgagaacctgtgctcttaagtggaattgatggacccagagacaaaaacatatatcttgacaaagtatgctaatttttatttaatcatgaatataaactgtaaaagcaaatcactatatcggtgaatttttagttgtttttacaaaaagtttaaactttgtaaatgctttaaggcataaatgctcttttttttttttttttttttgtnntttagactcttagcacaacctaacaaacggtttaaaatctggcaagacaaacagccccagttgcagccactccacttccttgacccattgcctctatcacaacaacctggagacagtttgggagaagtgaatgacccatatacctttgaagatggtgacataaaatacatctttacagccaacaagaaatgcaaacaagggacggagaaagattccctgaaaaagaataaggtaccatttaacagagagagagtccagcatggtgtgggtttctatctatgtcagtacaacatgtgtgggaagactttggaggcagaacgtttgagatagtcttgcctgattgctctgtccccatattcatgctcttggtactattgtattgaacagcgtattntncctttttatgtcatggctcacctttgtttaaaagtcagccgaacataaatgaagcctcatattttccaggctatagcttgtacagtgcatgttttctctcatatgctaattcttgttggcctatgctccctatttcttttaaaatattattccgaactacccaaaatgtaaaggaaaaaatgtttgtaacagtaggtatacacaatttatcgagcgcttcttatccttactgtgctgagcgctgtacctatatattctctgggttaatatcaactctacccatagactatcagtattaattttactggtttcatcatcataaaaatgagtactggttgtgtctgctgtctttaatttcaaattttcagacattctaaaatatgggccattgaaataggtattcttgagaatcaaggaaataaaacaattataagaggccccttcgccctattcttcatagccgaatacacaaacattattataataaacaccctcaccactacaatcttcctaggaacaacatatgacgcactctcccctgaactctacacaacatattttgtcaccaagaccctacttctaacctccctgttcttatgaattcgaacagcatacccccgattccgctacgaccaactcatacacctcctatgaaaaaacttcctaccactcaccctagcattacttatatgatatgtctccatacccattacaatctccagcatcccccctcaaacct

SEQ ID NO: 346229 - DNA, 1017 bp, Homo sapiens
gctgaactcacgggaatcaaatggcgtaggtacaattttggagggcatggggactgtggacccataatttcagccccagcccaagatgatccaattctgttaagtttcatccgctgtctgcaagctaacctgctttgtgtatggcgtcgtgatgtcaaaccagattgcaaagagttatggatattctggtggggagatgaacccaacctagtgggtgtaatacatcatgaactgcaggttgtggaagaaggactctgggaaaatggcctttcctatgaatgtaggacgctgctcttcaaagcgatccacaatctgttagaaaggtgcctaatggataagaacttcgttaggattgggaaatggtttgtccgaccctacgaaaaggatgaaaagccagtcaacaaaagtgagcatttgtcctgtgctttcacattctttctgcatggagaaagtaatgtatgcacaagtgtggagattgcccagcaccagccaatttatttgatcaatgaggagcatatacacatggctcagtcttcacctgcaccatttcaagtactggtaagtccttatggcttaaatgggacgctaacaggccaagcatacaagatgtcagacccagccactcgtaagttgattgaggaatggcagtatttctacccgatggtgctaaaaaagaaagaagaatcgaaagaggaagacgagttgggatatgatgatgatttccctgtggcagttgaagtaattgttggtggtgttcggatggtttacccttcagcatttgttttgatctctcagaatgacatcccggttcctcagagtgttgccagtgctggaggccacattgcagttgggcagcaagggcttggtagtgtgaaggacccaagtaactgtgggatgcctctgacccctcccacctctccagaacaggctatcctaggtgagagtggaggtatgcagagtgctgtaagtgtcctgcctcccacctccccgccgagtttacacctgcagttcctgcct

SEQ ID NO: 346230 - DNA, 277 bp, Homo sapiens
cgcctggctagtttttgtacttttagtagagacggggtttcgccatgttggccaggctggtctcaaactcctgacctcaggtgatctgcccaccttggcctcccaaagtgctgggattacaggcatgagccaccgcgcccggcccacacattacttttaaagtcatgagaaaggacactgaattgcatggacagagtaaggaaccaagccagaccccccgcccaaggacagaggccctggggaccagcactgggctgggcccacccctccagaagcc

SEQ ID NO: 346231 - DNA, 166 bp, Homo sapiens
atggaatccaataatgaagtatagttcatgtgccttcagcctacagattctattcattttcaaagtttttacctagatttgtgtcttagtccattttgtgcttctgtaacagaatacctgaggctgcgtaatttataagtaaaaaagtttcatttggttcacaata

SEQ ID NO: 346232 - DNA, 1997 bp, Homo sapiens
atcatagcactattttattttctgtaactgatgaatgagccttgttttctgcctttgtatttcagaggaaagagataatatcttctacttaatcctggatactatatctgaagtcagagcatccactccaaagcagagaatttctgaaaaacaaaataatgtcatcatatgatgttagaattttttttcaaatgatggttcctaatacttcacattagaagaactcgaatttgatgaccagtttgagaaacaccagtatatccagattacaagaaaaagcgagtcaaaaggatgatcatgaatataacaacttcgaggaaacatttaaccaaagaccaaagctttttaaacaactgagagtttttataagaaaaagacctcatacagtagtccccacttattcatgggggatacatttcaagacccacagagaaggcctgaaatcactgatgtaccaaaccctaaccaggttcttaggatgagctactaaatgacaaatgggtgggtagtacatagagtgtagatacaccagacaaagaaatgattcacagcccaggcaggacagagcagatcacacaagatttcatcacagtactcagaaaaccacaccatttaaaagttatgaattgtttatttctggaattttccatataatatttttgaccacagtttcccatggataactgaaaccatgggaagtggaactgtggataaggcaggactactgtaactatgacatcaatggtaggaacctgaagcataattctgctgtagtggattttttcaaaagaaactcatgaatgaaaaataatttattagatataagaaaggatgcatttgtatctcaaactttacttattctggaaataaatgaaaagccaacacctattacataccgacaaaaatgaaaaaataaataaatgtaaagccatagttcagtactgatggaatctgagaaaatttatatgaccgcgaacccatatctctgtactgaatgtgggaaaggctacacttgtcttgcatccctgacccagcatcagaaaacacatattggagaaaaaccttatgaatgtaaaatatgtggtaagtcctttacccggaacagtaatcttgttcaacatcaaagaatacatactggagagaaaccttatgaatgtaatgaatgtgggaaagcttttagtcagagcactaatcttattcagcatcaaagagtccatactggggagaaaccttatgagtgtaatgaatgtgaaaaaacctttagtcataggtcatcccttagaaatcatgagagaatccatactggagaaaaaccctatccttgtaatgaatgtgggaaagctttcagccatatctctgcccttactcaacatcatagaattcatactggaaagaaaccatatgaatgtactgaatgtggaaaaaccttcagccgcagcacacacctaattgaacatcagggaattcattctgaggaaaaatcctaccagtgtaagcaatgtcggaaagttttttgccacagtacatcactaatccgacatcagagaacccacacaggagagaaaccatatgaatgtaatgaatgtgggaaagctttcagccataccccagccttcattcaacatcaaagaattcatactggagaaaaaccctatgagtgtaatgcatgtggaaaggccttcaatcggagtgcacatcttactgaacaccagagaactcatactggagagaagccctatgtttgtaaagaatgtggaaaaaccttcagtcgaagtacacaccttactgaacatctaaaaattcattcttgtgtgaaaccctatcaatgtaatgaatgtcagaaactgttttgctatagaacatcactaattcgacatcagaggacgcatacaggagagaaaccctaccagtgtaatgaatgtgggaaatccttcagcttaagctcagctctaactaaacataagcgaatacatacaagggagagaccctatcaatgt

SEQ ID NO: 346233 - DNA, 2333 bp, Homo sapiens
ttccttgcggccgcgtgcgcaggcgtacttcctggcttgggaaccacatcgcccgaccgtgctctttatttttcggtggagcagctctgctttctcaggtctctacttacttatataagatggcatcaagaagaaggacctgaccactggcccctgactacatggtctttggaacccgtggcattggaagatgtcagagacatggcacatggatgtgatcttcaaaaactgttacagcctcatctcattggattggtctacacatcaaggtgctggaagtgtcgcatgcccagagatgatgtggaagctctatacccctttcccttctgcccaccttgccctgtgcatctcttcctgaatggcttctcctgaattgtatcctttataataaactggtaaataggaaagagataatatcttctacttaatcctggatactatatctgaagtcagagcatccactccaaagcagagaatttctgaaaaacaaaataatgtcatcatatgatgttagaattttttttcaaatgatggttcctaatacttcacattagaagaactcgaatttgatgaccagtttgagaaacaccagtatatccagattacaagaaaaagcgagtcaaaaggatgatcatgaatataacaacttcgaggaaacatttaaccaaagaccaaagctttttaaacaactgagagtttttataagaaaaagacctcatacagtagtccccacttattcatgggggatacatttcaagacccacagagaaggcctgaaatcactgatgtaccaaaccctaaccaggttcttaggatgagctactaaatgacaaatgggtgggtagtacatagagtgtagatacaccagacaaagaaatgattcacagcccaggcaggacagagcagatcacacaagatttcatcacagtactcagaaaaccacaccatttaaaagttatgaattgtttatttctggaattttccatataatatttttgaccacagtttcccatggataactgaaaccatgggaagtggaactgtggataaggcaggactactgtaactatgacatcaatggtaggaacctgaagcataattctgctgtagtggattttttcaaaagaaactcatgaatgaaaaataatttattagatataagaaaggatgcatttgtatctcaaactttacttattctggaaataaatgaaaagccaacacctattacataccgacaaaaatgaaaaaataaataaatgtaaagccatagttcagtactgatggaatctgagaaaatttatatgaccgcgaacccatatctctgtactgaatgtgggaaaggctacacttgtcttgcatccctgacccagcatcagaaaacacatattggagaaaaaccttatgaatgtaaaatatgtggtaagtcctttacccggaacagtaatcttgttcaacatcaaagaatacatactggagagaaaccttatgaatgtaatgaatgtgggaaagcttttagtcagagcactaatcttattcagcatcaaagagtccatactggggagaaaccttatgagtgtaatgaatgtgaaaaaacctttagtcataggtcatcccttagaaatcatgagagaatccatactggagaaaaaccctatccttgtaatgaatgtgggaaagctttcagccatatctctgcccttactcaacatcatagaattcatactggaaagaaaccatatgaatgtactgaatgtggaaaaaccttcagccgcagcacacacctaattgaacatcagggaattcattctgaggaaaaatcctaccagtgtaagcaatgtcggaaagttttttgccacagtacatcactaatccgacatcagagaacccacacaggagagaaaccatatgaatgtaatgaatgtgggaaagctttcagccataccccagccttcattcaacatcaaagaattcatactggagaaaaaccctatgagtgtaatgcatgtggaaaggccttcaatcggagtgcacatcttactgaacaccagagaactcatactggagagaagccctatgtttgtaaagaatgtggaaaaaccttcagtcgaagtacacaccttactgaacatctaaaaattcattcttgtgtgaaaccctatcaatgtaatgaatgtcagaaactgttttgctatagaacatcactaattcgacatcagaggacgcatacaggagagaaaccctaccagtgtaatgaatgtgggaaatccttcagcttaagctcagctctaactaaacataagcgaatacatacaagggagagaccctatcaatgt

SEQ ID NO: 346234 - DNA, 579 bp, Homo sapiens
ttccttgcggccgcgtgcgcaggcgtacttcctggcttgggaaccacatcgcccgaccgtgctctttatttttcggtggagcagctctgctttctcaggtctctacttacttatataagatggcatcaagaagaaggacctgaccactggcccctgactacatggtctttggaacccgtggcattggaagatgtcagagacatggcacatggatgtgatcttcaaaaactgttacagcctcatctcattggattggtctacacatcaaggtgctggaagtgtcgcatgcccagagatgatgtggaagctctatacccctttcccttctgcccaccttgccctgtgcatctcttcctgaatggcttctcctgaattgtatcctttataataaactggtaaatgtaagtaaagtgttttcctgagttctgtgagccattctagcaaattattgaaccagagaaagaggggttataggaaccctcaacttgtagccagttggtcagaagtatgggaggaccagcttgtgattatcatctgaagtggaggcagtcttgtgggactgagccctttaacttgagg

SEQ ID NO: 346235 - DNA, 493 bp, Homo sapiens
  misc_feature (13)..(13): n is a, c, g, or t
  misc_feature (20)..(20): n is a, c, g, or t
  misc_feature (57)..(57): n is a, c, g, or t
tgataactgcccnattcccntccccccttatcattgcgtttcgcgtctccgggtccntacccattgtcagatgactcttgccatgttgtgctggctggactcgaactcctggattcaagcaatcctcctgcggactcagatgatccttctgcctcagcttcctgagtagctggggtaaagcttaaagtaaaaacatatccccagcagaatcataacttttcacagaggcatctaatttcttaaccttaaagcagaagagaaacgtctttcaaattttcctatgacggtcaaggagtgggggttgtggaatgtatatacttagatgaattaaactcagaccttctccggttggatgtttgagccgcccagacaaagatgaagattaacacagtttaaggatgaaatatagaccatcctgtgcaaaaccaccgtgttgcagtttaattaaaagaattcattaaagtggtgccccatccagggtaattagtatgcg

SEQ ID NO: 346236 - DNA, 796 bp, Homo sapiens
agcggaaggcgattgtcatatgatagctaagaagtggcacattaatgaagcgccgctacaggggtcttttctgctcctgtcaccgcttaaaactatcagatggttcgagggaggacatggaggcagccacctagctcagcggagacgcggagcccacagcagcgccctccggagccctaacacgtcgctgccaccatccgcgccgggactccgcagccgagctcggccgcccgcaggacgctccaggagcgtcgcggaccgggcggcacgggacgctgcggggctgacctcaagagccgaggttcgcgccgagtccaaccggacccggacgctgcgcgcggagtgcgcgtcgagtgcgcgccgagagagaagcggcgcgcagcggcgtcctcccggatgcggacgcgcaacttgaagcaactttaagcagagaatgtggatttaaatgggataaagcaacaaagtcgacttagggtcagaaagcccatcggaaccttccacttcctttgcaagcagagataactggctacagtcagcctccccaggacctgatgccaatggataactgcaagatcagaaggagatgactcttgccatgttgtgctggctggactcgaactcctggattcaagcaatcctcctgcggactcagatgatccttctgcctcagcttcctgagtagctggggtaaagcttaaagtaaaaacaataacatcattattgccaaaacctaagattggatgcaagatatttttggacctttgcattctgcctaccaactgactccacccagacc

SEQ ID NO: 346237 - DNA, 1006 bp, Homo sapiens
agcggaaggcgattgtcatatgatagctaagaagtggcacattaatgaagcgccgctacaggggtcttttctgctcctgtcaccgcttaaaactatcagatggttcgagggaggacatggaggcagccacctagctcagcggagacgcggagcccacagcagcgccctccggagccctaacacgtcgctgccaccatccgcgccgggactccgcagccgagctcggccgcccgcaggacgctccaggagcgtcgcggaccgggcggcacgggacgctgcggggctgacctcaagagccgaggttcgcgccgagtccaaccggacccggacgctgcgcgcggagtgcgcgtcgagtgcgcgccgagagagaagcggcgcgcagcggcgtcctcccggatgcggacgcgcaacttgaagcaactttaagcagagaatgtggatttaaatgggataaagcaacaaagtcgacttagggtcagaaagcccatcggaaccttccacttcctttgcaagcagagataactggctacagtcagcctccccaggacctgatgccaatggataactgcaagatcagaaggagatgactcttgccatgttgtgctggctggactcgaactcctggattcaagcaatcctcctgcggactcagatgatccttctgcctcagcttcctgagtagctggggtaaagcttaaagtaaaaacatatccccagcagaatcataacttttcacagaggcatctaatttcttaaccttaaagcagaagagaaacgtctttcaaattttcctatgacggtcaaggagtgggggttgtggaatgtatatacttagatgaattaaactcagaccttctccggttggatgtttgagccgcccagacaaagatgaagattaacacagtttaaggatgaaatatagaccatcctgtgcaaaaccaccgtgttgcagtttaattaaaagaattcattaaagtggtgccccatccagggtaattagtatgcg

SEQ ID NO: 346238 - DNA, 654 bp, Homo sapiens
gggttgggcaggcagccgcaggccccatcctcggcggcccctgaggcgctggcggttgcagccccgggggtccgttccgaacctcgactcctagtggtgccggcgcccaggccgcctctcagcggcggcagcgtgaagcccggcggcgagggcggaggtggcggccctgcgggcggcgagctggcggccaacatgttccccatggtcgctggcggtggcacctgctcccggcctggtctccgctcccacccggtgcgccacgcgcaaccgaactcgctgccgccgccgccacccccgtcgccagcatggtgtatcttttggacatgtccattttggaagaaacttttgtgttaaaataaactaatatattatgggctagaacataaaattcaccaagaatttcaagataaaaatactaatgttttgcttgtttgggttatttcaaacaataactttgtctataattttttcaccaccgaccctctacctccttgcatgctcattctcctgtgtggctagatgcatttcgggtgttttgaatattatttcagagcgtatcattccagaaaataagtttaaagtttgaaatgtttattttttgtaacccatgaatcttcagcttaagtatcttctgacataaaagcattttcataa

SEQ ID NO: 346239 - DNA, 333 bp, Homo sapiens
tcctgcctgatccaagtgcatcaggtctgagactgttctttgttccacgcttctatctgccagaagaatctttttaggtaaggaggctatcataggaggcaatggagcttctagctgttgtccaaggaatgaaagcaggcgcctccagctgagccacttcccatgaacataattcctgtaatcagtcaaaacactccatgggcctcttcaagggaagattccaaactcattccaaaagcaacttccattactccaaagagcgaaagagagaaggttcttatggtcagctgtagattcaacttcattatcacgttacagtggctgtccagattg

SEQ ID NO: 346240 - DNA, 319 bp, Homo sapiens
acataaacacacacacacagatcagtaatcacaggaaatatttatggttggctgctcgaagaggcccacacctgttaagccacagcactttgagattacttgagacaaggagtttgagaccaccatgggcaacatgcaagactctgtctctacaaaaaaaaaaaaaattttaaatagtctatggcggtgcatgtctgtagtcccagctacacagcaagctgaggcaggaggactacttgagcccaggagttggaccttacagtgagccatgatcatgccactgcacttcagcctgggcaacacagtaagaccctgtctc

SEQ ID NO: 346241 - DNA, 646 bp, Homo sapiens
ctcccccagcctggctgccgccttgcagtttgatctcagactgctgtgctagcaatcagcgagactccgtgggcgtaggaccctccgagccagctccagtcagcccggtcaagcatgacagcaactcaaactcggcaaacttccaagacgtggaggacatgcctgacagatgtgccttggaagagtctgagagtccaggtgagccaaggcatcattcatggatagcaaaggtctgcccctgcaaggtgtcttaaatggaatctcatcagtaggagctgaatttggacaaattaagaaatccaaaagatgccatttgtttattactgtataaaagcattgttgttattggtcaagttattaggctgtagtggatttgctaatactttagccaacatgtattaaagtgattttaatacatgctgattacaatgcaatacatactgattgaaaatattcatattcatctaattttagaaaaatattgcctagatcattctctattcctgtttcttactttttctgttaatatttccaacagggaatgccagtccacagacacaaatttaatactgctttaaattttctcctatccttttagtccctgaattatataataaacaatgttaaaaccaagaagtacacaata

SEQ ID NO: 346242 - DNA, 601 bp, Homo sapiens
ccggtccgaaaagctcaatattcgggtgggagtgacccgattttccagctccagtcagcccggtcaagcatgacagcaactcaaactcggcaaacttccaagacgtggaggacatgcctgacagatgtgccttggaagagtctgagagtccaggtgagccaaggcatcattcatggatagcaaaggtctgcccctgcaaggtgtcttaaatggaatctcatcagtaggagctgaatttggacaaattaagaaatccaaaagatgccatttgtttattactgtataaaagcattgttgttattggtcaagttattaggctgtagtggatttgctaatactttagccaacatgtattaaagtgattttaatacatgctgattacaatgcaatacatactgattgaaaatattcatattcatctaattttagaaaaatattgcctagatcattctctattcctgtttcttactttttctgttaatatttccaacagggaatgccagtccacagacacaaatttaatactgctttaaattttctcctatccttttagtccctgaattatataataaacaatgttaaaaccaagaagtacacaata

SEQ ID NO: 346243 - DNA, 609 bp, Homo sapiens
gtgcagaaatcacccgtcttctgcgtcgctcacgctgggagctgtagaccggagctctccagtcagcccggtcaagcatgacagcaactcaaactcggcaaacttccaagacgtggaggacatgcctgacagatgtgccttggaagagtctgagagtccaggtgagccaaggcatcattcatggatagcaaaggtctgcccctgcaaggtgtcttaaatggaatctcatcagtaggagctgaatttggacaaattaagaaatccaaaagatgccatttgtttattactgtataaaagcattgttgttattggtcaagttattaggctgtagtggatttgctaatactttagccaacatgtattaaagtgattttaatacatgctgattacaatgcaatacatactgattgaaaatattcatattcatctaattttagaaaaatattgcctagatcattctctattcctgtttcttactttttctgttaatatttccaacagggaatgccagtccacagacacaaatttaatactgctttaaattttctcctatccttttagtccctgaattatataataaacaatgttaaaaccaagaagtacacaata

SEQ ID NO: 346244 - DNA, 159 bp, Homo sapiens
aaagggttatgttcagctaggcctctttgttgttctgggcaatccacttacaggtctgtgcctctctttccttaccaagtaagggctgccttggaacgtgcaaggatgtggtgagcagtaactaagatgagcagagggctgggggatatttggttgaaa

SEQ ID NO: 346245 - DNA, 807 bp, Homo sapiens
  misc_feature (728)..(728): n is a, c, g, or t
  misc_feature (730)..(730): n is a, c, g, or t
  misc_feature (733)..(733): n is a, c, g, or t
  misc_feature (735)..(735): n is a, c, g, or t
  misc_feature (738)..(738): n is a, c, g, or t
  misc_feature (741)..(741): n is a, c, g, or t
  misc_feature (745)..(745): n is a, c, g, or t
  misc_feature (764)..(764): n is a, c, g, or t
  misc_feature (766)..(766): n is a, c, g, or t
  misc_feature (771)..(771): n is a, c, g, or t
ggacgacctaagtcgcgtcacgctaccggcgcgtcacgcgaccttgccgcaatgctcctcccgcgcagctcttatccccgtagactgcggccgagacggggagggggaagcctcgcctggggggcggcagtggcctgggcggctctccggctgctgttgtatggctgcacgttggcgctaccggacgggatgctgtatccccgagagagcccgtcgtggcagcgcaagcagctggacggcctctgaagcttccgcgccgacttctccgacaaccgacgccggggcttcgaggagcagagtcaggccccaccgtggacatgccggttccctccagcttcaacgacatcggccagggctggcggctgcggcattttgtcagctggttgtggtatgaacgggaggtgaccctgctggagcgatggatccaggacctgtgcacaagagtggtgctgaggattggcagtgcccacttctatgccatcgtggtatcccaagggttactttgtccagaacacagactttgacttcttcagctacgcaggactgctgtggtctctgcttctatacacgacaccccccacctacatcgatgacgtcaccgtcaccaccggcgtgaagcgagacagtggtgagggcttctggactggatggaggacctgaagacatgaggtggaggcacaggtagaagagaagattctcaccatcgctgattcacacaaaagcatttntncangnggntgngatnaatgattcccaagtggtanancgaantgtgtcctgggtattatacggggtccttatcctcac

SEQ ID NO: 346246 - DNA, 1082 bp, Homo sapiens
ggacgacctaagtcgcgtcacgctaccggcgcgtcacgcgaccttgccgcaatgctcctcccgcgcagctcttatccccgtagactgcggccgagacggggagggggaagcctcgcctggggggcggcagtggcctgggcggctctccggctgctgttgtatggctgcacgttggcgctaccggacgggatgctgtatccccgagagagcccgtcgtggcagcgcaagcagctggacggcctctgaagcttccgcgccgacttctccgacaaccgacgccggggcttcgaggagcagaggtaccggcgaccgctgtcggaggcgcggactcggggcagggccaggagtcgcccggaagcccggcggtgggaatgggtcaggccccaccgtggacatgccggttccctccagcttcaacgacatcggccagggctggcggctgcggcattttgtcagctggttgtggtatgaacgggaggtgaccctgctggagcgatggatccaggacctgtgcacaagagtggtgctgaggattggcagtgcccacttctatgccatcgtggtatcccaagggttactttgtccagaacacagactttgacttcttcagctacgcaggactgctgtggtctctgcttctatacacgacaccccccacctacatcgatgacgtcaccgtcaccaccggcgtgaagcgagacagtggtgagggcttctggactggatggaggacctgaagacatgaggtggaggcacaggtagaagagaagattctcaccatcgctgattcacacaaaagcatttctccaagtggttgcagatgacatgatttcccaaagtgttagagctgaagtgtgtttccttgtgtatatatactgtggttcctttatcccttcatctgtggatagacaggtgcaaccgtgtggttccccacgatatgatttcattgtggttttctgtctgaagagtatcccagtatgtacctgtggagcagcttctttatcccttcatctgtggataagcaggtcatgtcctccaggtttctgcacgttgctgcagatgacatgatttcatgaatttct

SEQ ID NO: 346247 - DNA, 740 bp, Homo sapiens
ggacgacctaagtcgcgtcacgctaccggcgcgtcacgcgaccttgccgcaatgctcctcccgcgcagctcttatccccgtagactgcggccgagacggggagggggaagcctcgcctggggggcggcagtggcctgggcggctctccggctgctgttgtatggctgcacgttggcgctaccggacgggatgctgtatccccgagagagcccgtcgtggcagcgcaagcagctggacggcctctgaagcttccgcgccgacttctccgacaaccgacgccggggcttcgaggagcagaggtaccggcgaccgctgtcggaggcgcggactcggggcagggccaggagtcgcccggaagcccggcggtgggaatggggactggatggaggacctgaagacatgaggtggaggcacaggtagaagagaagattctcaccatcgctgattcacacaaaagcatttctccaagtggttgcagatgacatgatttcccaaagtgttagagctgaagtgtgtttccttgtgtatatatactgtggttcctttatcccttcatctgtggatagacaggtgcaaccgtgtggttccccacgatatgatttcattgtggttttctgtctgaagagtatcccagtatgtacctgtggagcagcttctttatcccttcatctgtggataagcaggtcatgtcctccaggtttctgcacgttgctgcagatgacatgatttcatgaatttct

SEQ ID NO: 346248 - DNA, 949 bp, Homo sapiens
ggacgacctaagtcgcgtcacgctaccggcgcgtcacgcgaccttgccgcaatgctcctcccgcgcagctcttatccccgtagactgcggccgagacggggagggggaagcctcgcctggggggcggcagtggcctgggcggctctccggctgctgttgtatggctgcacgttggcgctaccggacgggatgctgtatccccgagagagcccgtcgtggcagcgcaagcagctggacggcctctgaagcttccgcgccgacttctccgacaaccgacgccggggcttcgaggagcagagtcaggccccaccgtggacatgccggttccctccagcttcaacgacatcggccagggctggcggctgcggcattttgtcagctggttgtggtatgaacgggaggtgaccctgctggagcgatggatccaggacctgtgcacaagagtggtgctgaggattggcagtgcccacttctatgccatcgtggactgctgtggtctctgcttctatacacgacaccccccacctacatcgatgacgtcaccgtcaccaccggcgtgaagcgagacagtggtgagggcttctggactggatggaggacctgaagacatgaggtggaggcacaggtagaagagaagattctcaccatcgctgattcacacaaaagcatttctccaagtggttgcagatgacatgatttcccaaagtgttagagctgaagtgtgtttccttgtgtatatatactgtggttcctttatcccttcatctgtggatagacaggtgcaaccgtgtggttccccacgatatgatttcattgtggttttctgtctgaagagtatcccagtatgtacctgtggagcagcttctttatcccttcatctgtggataagcaggtcatgtcctccaggtttctgcacgttgctgcagatgacatgatttcatgaatttct

SEQ ID NO: 346249 - DNA, 539 bp, Homo sapiens
ctgagattgtgccattgaactccagcatgggggacagagcaagactccatcccaaaaaacataaataaataaatgtgacattcagaatagtaaatagtggaaatggaaataattattagtaaaaaattagtagttcataataaacaagacatgcaaagcactttttaaatatactaatgtacaatgaaagaaggtatttcaataaacacctggcaaagaatattaaaactaaatacagaaagatacttcctcatgttcatttgaaaaaaaaaaatactaactcccatttgaattgatttacagtttataaaatgctttgacatttagctatctcatttaggggaggttttagagcttaattttacagggcatgaagctcagatgaggtttccttagcgaaatacagacccagcccctggacttctatttattactgatctttaagctttatcagcccaatagtcaccaagagagctgctctgtatgttttttaaaaatcacagaaagtacaaaataaaggtgatattaaacgactgtct

SEQ ID NO: 346250 - DNA, 227 bp, Homo sapiens
ggcattgcacgtgatggggtgtgagagggatctcagagatgactacggtttttggcctaagcagctaggtgttggagttgtcattttcgctggtggggaaggctgaagggcaggcatttcttgaggggatgggaattaattggaatcaagattcaaatgtaggtgcttgttagacatctaagtggaagtgttgtggaggcggttgaatacctgaggttcggggaaag

SEQ ID NO: 346251 - DNA, 569 bp, Homo sapiens
tctgtatctttgaaattcaaagtatacgtggaaaccaaaataagattatatcaagaggccaggtgcagtggcgcatgcctgtaatctcagcactttgagcggctgaggcaggcagattgcttgagctcaggagttcaagacctgggctacatggcaaaaatgtttctacaaaaaaaatacaggcagggatcacgcctgtaatcccagcacattgggaagtggaggttgggggggatcagctgaggtcacgggttcgagaccagcctggctaacttggtgaacccctgtctctactaaaaatacaaaaattagctgggcgtggtggagcgtgcctgtaatcccagctacttgagaggctgaggcagaattgcttgaacataggaggtggaggttgcagtgagctgagattgtgccactgtactccagactgggcaacaaagtgagactctgtctccaaaaaataaaaaataaggccgggcgcagtagctcacgcctgtaatcccagcactttgggaggctgaggccagcggatcatctgaggtcaggagttcaagaccagtctggccaac

SEQ ID NO: 346252 - DNA, 385 bp, Homo sapiens
ctgcccagcatctgaacccacttgctagattcgggacatctcccattatctaggtcttggtgggaagtaggctctgacctctaactttagaagcctaagggatgagattcaccctctactaactcccctgacagccttgtgacccagatttagccactatgtactttgtgtcttgagtaagcaatgccaagatgaagggatgataagtgatattggatctgtggtagctctagtattagcagtttggcattgaggctgtgtttattgtgagtagtggctgcctacagtggccattatgtcaaatactagagatgtcctatgttggtggtggcagcagcatctccaccagactgttcctgccactcctactcccttggtcccagcc

SEQ ID NO: 346253 - DNA, 631 bp, Homo sapiens
ttgtttgtttgttttttgagatgaagttttgttctgtcacccaggctggagtgcagtggcacgatctcggctcactgcaacctctgcctcctgggttcaagcgattctttcacctcagcctcctgagtagctgggattataggcacacgccaccatgcccagttaattttttgtatttttagtagagacggggtttcactatgttggccaggctggtctcgaactcctgacctcaagtgatctgcccactttggcctctcaaagtgctgggattacagggaccatgcccggccacaacaggcactttagaatgcaggctcagtaaccaactttatgaagggagaaacagaggcatgaacagttgaaactatttccttaaagacagccagttccatcttgccatacagagtgcccacattttcagataatccgaagaggcatcacttagtgtccccagggaaatgaaaaacaaaaaacaaaaaacaaaaaaacctgtaaatagtctggtcatcttctcctaactatcatcttggaccagattgcatctggagtactagtttattaggcatacccgagactgggtaatttataaagaaagaggtttaatggactcacagttccacatgattgg

SEQ ID NO: 346254 - DNA, 402 bp, Homo sapiens
cgcctggtcttggccctggcccttgtccgcccccgggctgtggggtgggccccggtccgagcccccatctatgtcagcagctgggccgtccaggtgtcccagggtaaccgggaggtcgagcgcctggcacgcaaattcggcttcgtcaacctggggccggtgggtgggaccgggatagacgggaagtgggggcttggaggggactgaacaaccctagaccccgacaagggggagggagcccacaaggtcttctaaatatcaagagtcccagcccacccctgcctcagccaagctcagcttctgggactcccagagagcacctgctggggaaggacaaagaagggggctgttaccggccctcgggggcttcagcaggggagccgggtcccatcggtgcggccg

SEQ ID NO: 346255 - DNA, 848 bp, Homo sapiens
cgcctggtcttggccctggcccttgtccgcccccgggctgtggggtgggccccggtccgagcccccatctatgtcagcagctgggccgtccaggtgtcccagggtaaccgggaggtcgagcgcctggcacgcaaattcggcttcgtcaacctggggccgatcttccctgacgggcagtactttcacctgcggcaccggggcgtggtccagcagtccctgaccccgcactggggccaccgcctgcacctgaagaaaaaccccaaggtgcagtggttccagcagcagacgctgcagcggcgggtgaaacgctctgtcgtggtgcccacggacccctggttctccaagcagtggtacatgaacagcgaggcccaaccagacctgagcatcctgcaggcctggagtcaggggctgtcaggccagggcatcgtggtctctgtgctggacgatggcatcgagaaggaccacccggacctctgggccaactacgaccccctggccagctatgacttcaatgactacgacccggacccccagccccgctacacccccagcaaagagaaccggcacgggacccgctgtgctggggaggtggccgcgatggccaacaatggcttctgtggtgtgggggtcgctttcaacgcccgaatcggaggcgtacggatgctggacggtaccatcaccgatgtcatcgaggcccagtcgctgagcctgcagccgcagcacatccacatttacagcgccagctggggtcccgaggacgacggccgcacggtggacggccccggcatcctcacccgcgaggccttccggcgtggtgtgaccaaggtgagtggcagcccgaggagggc

SEQ ID NO: 346256 - DNA, 951 bp, Homo sapiens
cgcctggtcttggccctggcccttgtccgcccccgggctgtggggtgggccccggtccgagcccccatctatgtcagcagctgggccgtccaggtgtcccagggtaaccgggaggtcgagcgcctggcacgcaaattcggcttcgtcaacctggggccgatcttccctgacgggcagtactttcacctgcggcaccggggcgtggtccagcagtccctgaccccgcactggggccaccgcctgcacctgaagaaaaaccccaagctgtgtgctttctgtggctcagacccgcccgggccccaagtctatacagcaagaggaggcaggaagacccagatacggaaatcatggcgcctgccagggcctggtgcagtggttccagcagcagacgctgcagcggcgggtgaaacgctctgtcgtggtgcccacggacccctggttctccaagcagtggtacatgaacagcgaggcccaaccagacctgagcatcctgcaggcctggagtcaggggctgtcaggccagggcatcgtggtctctgtgctggacgatggcatcgagaaggaccacccggacctctgggccaactacgaccccctggccagctatgacttcaatgactacgacccggacccccagccccgctacacccccagcaaagagaaccggcacgggacccgctgtgctggggaggtggccgcgatggccaacaatggcttctgtggtgtgggggtcgctttcaacgcccgaatcggaggcgtacggatgctggacggtaccatcaccgatgtcatcgaggcccagtcgctgagcctgcagccgcagcacatccacatttacagcgccagctggggtcccgaggacgacggccgcacggtggacggccccggcatcctcacccgcgaggccttccggcgtggtgtgaccaaggtgagtggcagcccgaggagggc

SEQ ID NO: 346257 - DNA, 485 bp, Homo sapiens
gaatgcctgacccgcccgcccgcctttggttttcctgcggcacatcctcgcctggctccatcaggttcaagttcaggtttgacccagccccctcaagcctctgcccttcgtggactgaggatgcacccagtctccaccatcagccttctccccgggaagtcggtgtactctgctctcctctgcctctatttgttctccctccatgtgcccccggagactatcatcttatttaaccaccatctatcggtggacaacttaaaactctgccttcagccaagagctccctctgcggctccagcccatcttccccccaatagtctgagggatctttctaaaattccatctgagggacactctttctcgttgtacttcctagtggtgactgtcccttgaccctatgctttgacatgagacctgtggaaaaaaattctacaactatttggtatgttggagggaagcatgaataaatgaagtcagattgtgct

SEQ ID NO: 346258 - DNA, 90 bp, Homo sapiens
ttcattatcagtccaaacatcttaatttatggttagaaacttttcacagtgtgcctgtttcacactatgtaattttccagaatgctttcc

SEQ ID NO: 346259 - DNA, 1629 bp, Homo sapiens
ctaaatgctccacttaaaagatacagaactgcagaatggataagaactcaccaaccaactatctgctgccttcaggagactcacctaacacataaggactcacataaacttaaaggggtagaaaaaggcatttcatgcaaatggacaccaaaagcgagtagagcaacggtagctattctcatatcagacaaaacaaatcgtaaagcaacagcagttaaaagagacaaagaggggccgggcgtggtggctcatgcctgtaatctcagcactttggatcacaaggtcaggagttcgtgaccagtgtggccaacacagtgaaaccccgtctctactaaaaatacaaaaaaaaaaaaaaaaaaaaaaaaaattagaggggtgtggtggtaggtgcctgtagtcccagctacttgggaggctgaggcaggcgaatcacttaaatctgggaggtggaggttgcagtgagctgagattgcaccactgcactctagcctgtgtgacacagcaagactctttctcaaaaaaataaaaaaaagagagagacaaagagggacattatagaatggtaaaaggccttgtccaacagtaaaatatcacagtcttaaacatatatgcacctaaaactggagcttccaaatttacaaaacaattaaaataggcctaagaaatgtggtagacagcaacacaataatagtggcagatttcaatattccaccgacagcaccagacaggttagcaagacagaaagtcagcaaagaaacaatggatttaaactataccttggaacaaatggacctaacagatatatacagaacatttcatccaataaccgcagaatacacattctattcaacatcatatggaactttctccaagatcgaccatatgataggccataaaacaagcctcaataaatttaagaaaattgaaattgtatcaagcactctctcagaccacaacagaataaaactggaaatcatctccaaaaggaactttcaaaaccatgcaaacacatggaaattgttaaataacctgcttctgaatgagcattgggtaaaaaacaaaatcaagatggaaattaaaaaattcttctaactgaatgacaataatgacaaaacctatcaaaacctctgggatatagctaaggcagtgctaagaggaaagttcatagccctaaacacctacatcaaaaagtctgaaagagcacaaacggacaatctaaggtcacacctcaaggaactagagaaatagaaacaaactgaacccaaacccagtagaagaaaggaaataaccaagatcagagcagaaataaataaaattgatagaccattagcaagattaaccaagaaaggaagagagaaaacccaaataacgtcactgagaaatgcaacaggaggtattacaactgacaccactaaaatacaaaagatcattcaaggctactatgaacacctttacgcacataaactaaaaaacctagttgagatggataaattcctggaaaaatacaatcctcctagcttaaatcaggaagcattagataccctgaacagaccaatacaagcagtgagattgaaatggtaattaaaaaattaccaacaaaaaaaagtccaggaccataaggattcacag

SEQ ID NO: 346260 - DNA, 185 bp, Homo sapiens
aacatggaggggtaagctaggctgcaccctgaaatcacacagacacacagccctcaagccacaaatatcctcttacacaactgctgcctataaaggagcagagatacaactgcaacaggggtcatttgttaccctattggtaacaaatttcttttttacttaattgttttggtacttgccagcat

SEQ ID NO: 346261 - DNA, 1632 bp, Homo sapiens
taaatagaaggtgagtttatttctccagtcttgaaattaacaattttcaagaaaacaaattattagaataactaggggactacacaggtggagaacagtgctttcagacatgtgaagcgctcttcgagaaaatgagccctctctgggagaatggttcaggataggcattgacctcaagagcttctaaggtggcacccaacacttagaaagaaatagggcccgtgaacattgtggtgctgagtcttggcgcccttctgtgccttcaccaacccggttgcacaaccaagaacaacctttgtttaacaccttagtgtggaatgcctcatagaactgtggatcatagaacccaggttggaacttctcaggaaatcttcagttcacaccttcttatttgacgaagaaacaacgaagaaaaacgtgagttttgccccatagactttcagagttccctgtgggtgtggtggacgcactctcccccgcaaatatatcatatacatcagagagcttccttataaaagcgttggtgtgtgggcacccattttattttccaacgtcccccgaagaggcccattaagagagacacctactttgcgcagtgactccacataattgtggccatgcccattgtgcggccaccaaacttccgttgtgtgtccctccctgtgggagaagaaggcagaaagaaaggccacagagaaggtggaacaacccaagtaaataggaacaagttcacttcatcattagggagactccaacggggagaaccccaatgagaataagtctccttacatcagttgggagcaccataaatacgtggcaacgttcactcgagagggagatcctacatcctgagcacatagtcgatagcactaccggagtcttgtggaacccccaacagactgttgcgtatttgaacagccacgatcaagatggactatttaatatgcacgaccttgttcacaagtcggtaaatctatctcttcaccgtggtataggcctcacccaaaaaggggcctaaattacagcttagcatataattttagaccatgtggcgaggcaccacggacgttggtggaagtttggcaccaaggtattccattaaacaaagggggcataggccacacacctatatttcgtaccaccctctgagattccacggtgtatttgcccttttacccgcatttgggaagcatataattgatgaagacgtaagcaaaacaatcatgtttctcgtggtagactccacagcgaggagatgtaattattcaatacgaaaactagccagcacgtcacaaacaatcgtgtcctatatcacactacaaacgtgtgatagaataataaccacacgcactttattatttatagagacacaacaatacaacaacagcaccatcatacattatctctatagcatagccactactactagcacccactaaagctcaataataactacctatcaagacagcactgccacaatttagatccgaaacacaatcactactcactaatacagctcgcagtacatattagcaggagaacctaaccaacaacacaatataatcagcagcatcaaccaccaccaaatctactgtcgttaacctactatactgtaactatatatatgaccaa

SEQ ID NO: 346262 - DNA, 883 bp, Homo sapiens
  misc_feature (640)..(640): n is a, c, g, or t
  misc_feature (699)..(699): n is a, c, g, or t
  misc_feature (708)..(708): n is a, c, g, or t
  misc_feature (727)..(728): n is a, c, g, or t
  misc_feature (731)..(731): n is a, c, g, or t
  misc_feature (744)..(744): n is a, c, g, or t
tgggccccaggctcccggaagtgctgcccggcgctccggaagcgattcatcgggccgcgagcgccctccccgtcgttttccgtgagagacgtagagctgagcgacccagcccgcgagcgaggtgagatgccggtggccgtgggtccctacggacagtcccagccaagctgcttcgaccgtgtcaaaatgggcttcgtgatgggttgcgccgtgggcatggcggccggggcgctcttcggcaccttttcctgtctcaggatcggaatgcggggtcgagagctgatgggcggcattgggaaaaccatgatgcagagtggcggcacctttggcacattcatggccattgggatgggcatccgatgctaaccatggttgccaactacatctgtcccttcccatcaatcccagcccatgtactaataaaagaaagtctttgagtagtcaaaaaaaaaaaaaaaaaaaaaaaaaaaaaaaaaaaaaaaaaaaaaaaaaaaaaaaaaaaaaaaaaaaaaaaaaaaaaaaaaaaaaaaaaaaaaaaaaaaaaaaaaaaaaacatgcggccgaatttggggttaattgggccaattggccttatggggggcggttttccaattaattggccgcgggtttaacaacgtcnggactggaaaaacctgggggttacccaactaaatggcttggaagaaaatccccttttgncaagttggngaaataggaaaaaggcccnnacngatggcctttccnaacagtggccaacctgattggcaaagggaatttggaggcgtaaaaattgggtaaaatatcggggtaaaattttggtaaagggattagcccggaattggttaaatggttgttcaatttggaacaagagttcctttttaaa

SEQ ID NO: 346263 - DNA, 840 bp, Homo sapiens
  misc_feature (493)..(493): n is a, c, g, or t
  misc_feature (495)..(497): n is a, c, g, or t
  misc_feature (500)..(500): n is a, c, g, or t
  misc_feature (504)..(504): n is a, c, g, or t
ttcgctacctaaggtagcgaaggtagagctgagcgacccagcccgcgagcgaggtgagatgccggtggccgtgggtccctacggacagtcccagccaagctgcttcgaccgtgtcaaaatgggcttcgtgatgggttgcgccgtgggcatggcggccggggcgctcttcggcaccttttcctgtctcaggatcggaatgcggggtcgagagctgatgggcggcattgggaaaaccatgatgcagagtggcggcacctttggcacattcatggccattgggatgggcatccgatgctaaccatggttgccaactacatctgtcccttcccatcaatcccagcccatgtactaataaaagaaagtctttgagtagtcaaaaaaaaaaaaaaaaaaaaaaaaaaaaaaaaaaaaaaaaaaaaaaaaaaaaaaaaaaaaaaaaaaaaaaaaaaaaaaaaaaaaaaaaaaaaaaaaaaaaaaaaaaaaaaaaaaaaanannnaanaaanaaaaaaaaaaaaaaaaaaaaaaatttgggccccctttgccccaatgtattttaaatttggaacagttttttttgggggcccgaaattgggttcatttgggaattttcccttttagggggtgttttaaaaataaaagggggcggtttattaaaactgtggtctgtgaaaaaccctggggtctcccaatttaaacccttttgaaaaaaatcccctttttccccgtgtgggaaaacacaaagggccccccccggaggcctttttcaaaaggtgtgcacctctttatgggcgaagggaaaattgtgcgcgcgtaaattttttgtaacccgggattttttt

SEQ ID NO: 346264 - DNA, 928 bp, Homo sapiens
  misc_feature (78)..(78): n is a, c, g, or t
  misc_feature (581)..(581): n is a, c, g, or t
  misc_feature (583)..(585): n is a, c, g, or t
  misc_feature (588)..(588): n is a, c, g, or t
  misc_feature (592)..(592): n is a, c, g, or t
taagttgtttctatgaaacaaacatatttagttcactattatatagtgggttatattaaaaaaaaaaaaaaaaataangtccgaattggcacgaggtttccgtgagagacgtagagctgagcgacccagcccgcgagcgaggtgagatgccggtggccgtgggtccctacggacagtcccagccaagctgcttcgaccgtgtcaaaatgggcttcgtgatgggttgcgccgtgggcatggcggccggggcgctcttcggcaccttttcctgtctcaggatcggaatgcggggtcgagagctgatgggcggcattgggaaaaccatgatgcagagtggcggcacctttggcacattcatggccattgggatgggcatccgatgctaaccatggttgccaactacatctgtcccttcccatcaatcccagcccatgtactaataaaagaaagtctttgagtagtcaaaaaaaaaaaaaaaaaaaaaaaaaaaaaaaaaaaaaaaaaaaaaaaaaaaaaaaaaaaaaaaaaaaaaaaaaaaaaaaaaaaaaaaaaaaaaaaaaaaaaaaaaaaaaaaaaaaaanannnaanaaanaaaaaaaaaaaaaaaaaaaaaaatttgggccccctttgccccaatgtattttaaatttggaacagttttttttgggggcccgaaattgggttcatttgggaattttcccttttagggggtgttttaaaaataaaagggggcggtttattaaaactgtggtctgtgaaaaaccctggggtctcccaatttaaacccttttgaaaaaaatcccctttttccccgtgtgggaaaacacaaagggccccccccggaggcctttttcaaaaggtgtgcacctctttatgggcgaagggaaaattgtgcgcgcgtaaattttttgtaacccgggattttttt

SEQ ID NO: 346265 - DNA, 650 bp, Homo sapiens
tgggccccaggctcccggaagtgctgcccggcgctccggaagcgattcatcgggccgcgagcgccctccccgtcgttttccgtgagagacgtagagctgagcgacccagcccgcgagcgaggtgagatgccggtggccgtgggtccctacggacagtcccagccaagctgcttcgaccgtgtcaaaatgggcttcgtgatgggttgcgccgtgggcatggcggccggggcgctcttcggcaccttttcctgtctcaggatcggaatgcggggtcgagagctgatgggcggcattgggaaaaccatgatgcagagtggcggcacctttggcacattcatggccattgggatgggcatccgatgctaaccatggttgccaactacatctgtcccttcccatcaatcccagcccatgtactaataaaagaaagtctttgagtaaaaaaaaaaaaaaaaaaaaaaaaaaaaaaaaaaaaaaaaaaaaaaaaaaaaaacctgcattcagaatcctcaacccaggttatattgtttgagccatgcttatttttggagtggcccttgaggctaatccgggaatcaatcctagtatagcgggtgtttttgggacttttgttgggactcttactctttgcacctgcgggacgggtctcc

SEQ ID NO: 346266 - DNA, 1084 bp, Homo sapiens
  misc_feature (737)..(737): n is a, c, g, or t
  misc_feature (739)..(741): n is a, c, g, or t
  misc_feature (744)..(744): n is a, c, g, or t
  misc_feature (748)..(748): n is a, c, g, or t
tgggccccaggctcccggaagtgctgcccggcgctccggaagcgattcatcgggccgcgagcgccctccccgtcgttttccgtgagagacgtagagctgagcgacccagcccgcgagcgaggtgaggtaggcgccgggcgacgcggggccggaacgcgaagagggtggtggagtcgggctacccactgattttccttcccttacttcccctgagcccttgggcccacttcccagcctaccgcttccgtccccgcccgactcttgggccagcgcctgggcccacactttcctatcccccgcagatgccggtggccgtgggtccctacggacagtcccagccaagctgcttcgaccgtgtcaaaatgggcttcgtgatgggttgcgccgtgggcatggcggccggggcgctcttcggcaccttttcctgtctcaggatcggaatgcggggtcgagagctgatgggcggcattgggaaaaccatgatgcagagtggcggcacctttggcacattcatggccattgggatgggcatccgatgctaaccatggttgccaactacatctgtcccttcccatcaatcccagcccatgtactaataaaagaaagtctttgagtagtcaaaaaaaaaaaaaaaaaaaaaaaaaaaaaaaaaaaaaaaaaaaaaaaaaaaaaaaaaaaaaaaaaaaaaaaaaaaaaaaaaaaaaaaaaaaaaaaaaaaaaaaaaaaaaaaaaaaaanannnaanaaanaaaaaaaaaaaaaaaaaaaaaaatttgggccccctttgccccaatgtattttaaatttggaacagttttttttgggggcccgaaattgggttcatttgggaattttcccttttagggggtgttttaaaaataaaagggggcggtttattaaaactgtggtctgtgaaaaaccctggggtctcccaatttaaacccttttgaaaaaaatcccctttttccccgtgtgggaaaacacaaagggccccccccggaggcctttttcaaaaggtgtgcacctctttatgggcgaagggaaaattgtgcgcgcgtaaattttttgtaacccgggattttttt

SEQ ID NO: 346267 - DNA, 793 bp, Homo sapiens
caccagtcaaaaaagctggtttctctatgtattttacactgcatctgctgcctcccacaaactgaaggcagttaatacgacatccaccagaaaaataccctggagacccagatggatctttttccttctcattacccaccccaggtagtaagatataatatccagtaagtggaaaatcagatgtaggggttgctagactagtgttagcaaaaaattggaaaggagcagttaatactctttctgatatttttgttaccaaatagctccatcttggtttcctcctcaggatcggaatgcggggtcgagagctgatgggcggcattgggaaaaccatgatgcagagtggcggcacctttggcacattcatggccattgggatgggcatccgatgctaaccatggttgccaactacatctgtcccttcccatcaatcccagcccatgtactaataaaagaaagtctttgagtagtcaaaaaaaaaaaaaaaaaaaaaaaaaaaaaattttggggcggcccgggccccaaaaaatttttaaacccttctttgggggggggggccccggggatccggcgaagacaatggggccataacgcgggtccccaaaagagagaacccggcggccgacgaaatacagtgcgctgggagtttccccccacatataaaaaaacgccccggggggaaacgcagcgccggtcgcgagaaaaccccagaaggggagcccggaggggcaatcagcgggcgctcctccacaccggaggccccacgcggacgcagatataaaataaccgccgg

SEQ ID NO: 346268 - DNA, 877 bp, Homo sapiens
  misc_feature (634)..(634): n is a, c, g, or t
  misc_feature (693)..(693): n is a, c, g, or t
  misc_feature (702)..(702): n is a, c, g, or t
  misc_feature (721)..(722): n is a, c, g, or t
  misc_feature (725)..(725): n is a, c, g, or t
  misc_feature (738)..(738): n is a, c, g, or t
caccagtcaaaaaagctggtttctctatgtattttacactgcatctgctgcctcccacaaactgaaggcagttaatacgacatccaccagaaaaataccctggagacccagatggatctttttccttctcattacccaccccaggtagtaagatataatatccagtaagtggaaaatcagatgtaggggttgctagactagtgttagcaaaaaattggaaaggagcagttaatactctttctgatatttttgttaccaaatagctccatcttggtttcctcctcaggatcggaatgcggggtcgagagctgatgggcggcattgggaaaaccatgatgcagagtggcggcacctttggcacattcatggccattgggatgggcatccgatgctaaccatggttgccaactacatctgtcccttcccatcaatcccagcccatgtactaataaaagaaagtctttgagtagtcaaaaaaaaaaaaaaaaaaaaaaaaacccatgtcggccgcttgggccaagtcaactttaaattcgggcaggttattcatgcggccgaatttggggttaattgggccaattggccttatggggggcggttttccaattaattggccgcgggtttaacaacgtcnggactggaaaaacctgggggttacccaactaaatggcttggaagaaaatccccttttgncaagttggngaaataggaaaaaggcccnnacngatggcctttccnaacagtggccaacctgattggcaaagggaatttggaggcgtaaaaattgggtaaaatatcggggtaaaattttggtaaagggattagcccggaattggttaaatggttgttcaatttggaacaagagttcctttttaaa

SEQ ID NO: 346269 - DNA, 961 bp, Homo sapiens
tgggccccaggctcccggaagtgctgcccggcgctccggaagcgattcatcgggccgcgagcgccctccccgtcgttttccgtgagagacgtagagctgagcgacccagcccgcgagcgaggtgaggtaggcgccgggcgacgcggggccggaacgcgaagagggtggtggagtcgggctacccactgattttccttcccttacttcccctgagcccttgggcccacttcccagcctaccgcttccgtccccgcccgactcttgggccagcgcctgggcccacactttcctatcccccgcagatgccggtggccgtgggtccctacggacagtcccagccaagctgcttcgaccgtgtcaaaatgggcttcgtgatgggttgcgccgtgggcatggcggccggggcgctcttcggcaccttttcctgttagctccatcttggtttcctcctcaggatcggaatgcggggtcgagagctgatgggcggcattgggaaaaccatgatgcagagtggcggcacctttggcacattcatggccattgggatgggcatccgatgctaaccatggttgccaactacatctgtcccttcccatcaatcccagcccatgtactaataaaagaaagtctttgagtagtcaaaaaaaaaaaaaaaaaaaaaaaaaaaaaattttggggcggcccgggccccaaaaaatttttaaacccttctttgggggggggggccccggggatccggcgaagacaatggggccataacgcgggtccccaaaagagagaacccggcggccgacgaaatacagtgcgctgggagtttccccccacatataaaaaaacgccccggggggaaacgcagcgccggtcgcgagaaaaccccagaaggggagcccggaggggcaatcagcgggcgctcctccacaccggaggccccacgcggacgcagatataaaataaccgccgg

SEQ ID NO: 346270 - DNA, 616 bp, Homo sapiens
  misc_feature (269)..(269): n is a, c, g, or t
  misc_feature (271)..(273): n is a, c, g, or t
  misc_feature (276)..(276): n is a, c, g, or t
  misc_feature (280)..(280): n is a, c, g, or t
taaatagaaggtgagtttatttctccagtcttgaaattaacaattttcaagaaaacaaattattagaataactggtggagtcacagacatatttctagctccattaggtcaaaggaaaggaaagaggacaagggtagaaaggagacaagccctctaagaaactgtccattcagtctgtgactccaccagttattctaactaatttgttttcttgaaaattgttaactttcaagactggagaaataaactcaccttctatttaaaaaaanannnaanaaanaaaaaaaaaaaaaaaaaaaaaaatttgggccccctttgccccaatgtattttaaatttggaacagttttttttgggggcccgaaattgggttcatttgggaattttcccttttagggggtgttttaaaaataaaagggggcggtttattaaaactgtggtctgtgaaaaaccctggggtctcccaatttaaacccttttgaaaaaaatcccctttttccccgtgtgggaaaacacaaagggccccccccggaggcctttttcaaaaggtgtgcacctctttatgggcgaagggaaaattgtgcgcgcgtaaattttttgtaacccgggattttttt

SEQ ID NO: 346271 - DNA, 1069 bp, Homo sapiens
  misc_feature (78)..(78): n is a, c, g, or t
taagttgtttctatgaaacaaacatatttagttcactattatatagtgggttatattaaaaaaaaaaaaaaaaataangtccgaattggcacgaggtttccgtgagagacgtagagctgagcgacccagcccgcgagcgaggtgagatgccggtggccgtgggtccctacggacagtcccagccaagctgcttcgaccgtgtcaaaatgggcttcgtgatgggttgcgccgtgggcatggcggccggggcgctcttcggcaccttttcctgtctcaggatcggaatgcggggtcgagagctgatgggcggcattgggaaaaccatgatgcagagtggcggcacctttggcacattcatggccattgggatgggcatccgatgctaaccatggttgccaactacatctgtcccttcccatcaatcccagcccatgtactaataaaagaaagtctttgagtaaaaaaaaaaaaaaaaaaaaaaaaaaaaaaaaaaaaaaaaaaaaaaaaaaaaaagaacaagagaggggggcgcgcgcgccatagaagaatatcccccgcgcgagggggggcgccccaagtttagcagcgcgcggacccgcagttatttgagaccgaagggtggccgcccaatagaaaggaggcagccacatataaaagacgctaggacgcgatgggcgccgcagcattacaacacagagcgcgcgagagacacggggggacaaacaacagcatgacaaagctaggggagaacacacgttgggggaaagagaagcaccccaacaactcgacagggagggggggggagagcaccaacaatgggggggcccaacaactttcacgcctcaaaggagggacatatattgaagacgcgcctccttgagagggggcaccatatagtacgacacactgttaagagagcggcgatctactcagtgctgtggtttccaaacaacaatcgccccgctaataaatggtacttgcagctcgtgcgtgggaaagagcattttgcggcgagacaacacggaggatcgatagtttcgagaagacaattttttttcccccgggaggt

SEQ ID NO: 346272 - DNA, 908 bp, Homo sapiens
  misc_feature (561)..(561): n is a, c, g, or t
  misc_feature (563)..(565): n is a, c, g, or t
  misc_feature (568)..(568): n is a, c, g, or t
  misc_feature (572)..(572): n is a, c, g, or t
tgggccccaggctcccggaagtgctgcccggcgctccggaagcgattcatcgggccgcgagcgccctccccgtcgttttccgtgagagacgtagagctgagcgacccagcccgcgagcgaggtgagatgccggtggccgtgggtccctacggacagtcccagccaagctgcttcgaccgtgtcaaaatgggcttcgtgatgggttgcgccgtgggcatggcggccggggcgctcttcggcaccttttcctgtctcaggatcggaatgcggggtcgagagctgatgggcggcattgggaaaaccatgatgcagagtggcggcacctttggcacattcatggccattgggatgggcatccgatgctaaccatggttgccaactacatctgtcccttcccatcaatcccagcccatgtactaataaaagaaagtctttgagtagtcaaaaaaaaaaaaaaaaaaaaaaaaaaaaaaaaaaaaaaaaaaaaaaaaaaaaaaaaaaaaaaaaaaaaaaaaaaaaaaaaaaaaaaaaaaaaaaaaaaaaaaaaaaaaaaaaaaaaanannnaanaaanaaaaaaaaaaaaaaaaaaaaaaatttgggccccctttgccccaatgtattttaaatttggaacagttttttttgggggcccgaaattgggttcatttgggaattttcccttttagggggtgttttaaaaataaaagggggcggtttattaaaactgtggtctgtgaaaaaccctggggtctcccaatttaaacccttttgaaaaaaatcccctttttccccgtgtgggaaaacacaaagggccccccccggaggcctttttcaaaaggtgtgcacctctttatgggcgaagggaaaattgtgcgcgcgtaaattttttgtaacccgggattttttt

SEQ ID NO: 346273 - DNA, 764 bp, Homo sapiens
tgggccccaggctcccggaagtgctgcccggcgctccggaagcgattcatcgggccgcgagcgccctccccgtcgttttccgtgagagacgtagagctgagcgacccagcccgcgagcgaggtgagatgccggtggccgtgggtccctacggacagtcccagccaagctgcttcgaccgtgtcaaaatgggcttcgtgatgggttgcgccgtgggcatggcggccggggcgctcttcggcaccttttcctgtctcaggatcggaatgcggggtcgagagctgatgggcggcattgggaaaaccatgatgcagagtggcggcacctttggcacattcatggccattgggatgggcatccgatgctaaccatggttgccaactacatctgtcccttcccatcaatcccagcccatgtactaataaaagaaagtctttgagtagtcaaaaaaaaaaaaaaaaaaaaaaaaaaaaaattttggggcggcccgggccccaaaaaatttttaaacccttctttgggggggggggccccggggatccggcgaagacaatggggccataacgcgggtccccaaaagagagaacccggcggccgacgaaatacagtgcgctgggagtttccccccacatataaaaaaacgccccggggggaaacgcagcgccggtcgcgagaaaaccccagaaggggagcccggaggggcaatcagcgggcgctcctccacaccggaggccccacgcggacgcagatataaaataaccgccgg

SEQ ID NO: 346274 - DNA, 855 bp, Homo sapiens
  misc_feature (612)..(612): n is a, c, g, or t
  misc_feature (671)..(671): n is a, c, g, or t
  misc_feature (680)..(680): n is a, c, g, or t
  misc_feature (699)..(700): n is a, c, g, or t
  misc_feature (703)..(703): n is a, c, g, or t
  misc_feature (716)..(716): n is a, c, g, or t
tgggccccaggctcccggaagtgctgcccggcgctccggaagcgattcatcgggccgcgagcgccctccccgtcgttttccgtgagagacgtagagctgagcgacccagcccgcgagcgaggtgagatgccggtggccgtgggtccctacggacagtcccagccaagctgcttcgaccgtgtcaaaatgggcttcgtgatgggttgcgccgtgggcatggcggccggggcgctcttcggcaccttttcctgtctcaggatcggaatgcggggtcgagagctgatgggcggcattgggaaaaccatgatgcagagtggcggcacctttggcacattcatggccattgggatgggcatccgatgctaaccatggttgccaactacatctgtcccttcccatcaatcccagcccatgtactaataaaagaaagtctttgagtaaaaaaaaaaaaaaaaaaaaaaaaaaaaaaaaaaaaaaaaaaaaaaaaaaaaaaaaaaaaaaaaaaaaaaaaaaaaaaaaaaaaaacatgcggccgaatttggggttaattgggccaattggccttatggggggcggttttccaattaattggccgcgggtttaacaacgtcnggactggaaaaacctgggggttacccaactaaatggcttggaagaaaatccccttttgncaagttggngaaataggaaaaaggcccnnacngatggcctttccnaacagtggccaacctgattggcaaagggaatttggaggcgtaaaaattgggtaaaatatcggggtaaaattttggtaaagggattagcccggaattggttaaatggttgttcaatttggaacaagagttcctttttaaa

SEQ ID NO: 346275 - DNA, 875 bp, Homo sapiens
  misc_feature (78)..(78): n is a, c, g, or t
  misc_feature (632)..(632): n is a, c, g, or t
  misc_feature (691)..(691): n is a, c, g, or t
  misc_feature (700)..(700): n is a, c, g, or t
  misc_feature (719)..(720): n is a, c, g, or t
  misc_feature (723)..(723): n is a, c, g, or t
  misc_feature (736)..(736): n is a, c, g, or t
taagttgtttctatgaaacaaacatatttagttcactattatatagtgggttatattaaaaaaaaaaaaaaaaataangtccgaattggcacgaggtttccgtgagagacgtagagctgagcgacccagcccgcgagcgaggtgagatgccggtggccgtgggtccctacggacagtcccagccaagctgcttcgaccgtgtcaaaatgggcttcgtgatgggttgcgccgtgggcatggcggccggggcgctcttcggcaccttttcctgtctcaggatcggaatgcggggtcgagagctgatgggcggcattgggaaaaccatgatgcagagtggcggcacctttggcacattcatggccattgggatgggcatccgatgctaaccatggttgccaactacatctgtcccttcccatcaatcccagcccatgtactaataaaagaaagtctttgagtaaaaaaaaaaaaaaaaaaaaaaaaaaaaaaaaaaaaaaaaaaaaaaaaaaaaaaaaaaaaaaaaaaaaaaaaaaaaaaaaaaaaaacatgcggccgaatttggggttaattgggccaattggccttatggggggcggttttccaattaattggccgcgggtttaacaacgtcnggactggaaaaacctgggggttacccaactaaatggcttggaagaaaatccccttttgncaagttggngaaataggaaaaaggcccnnacngatggcctttccnaacagtggccaacctgattggcaaagggaatttggaggcgtaaaaattgggtaaaatatcggggtaaaattttggtaaagggattagcccggaattggttaaatggttgttcaatttggaacaagagttcctttttaaa

SEQ ID NO: 346276 - DNA, 1053 bp, Homo sapiens
tgggccccaggctcccggaagtgctgcccggcgctccggaagcgattcatcgggccgcgagcgccctccccgtcgttttccgtgagagacgtagagctgagcgacccagcccgcgagcgaggtgagatgccggtggccgtgggtccctacggacagtcccagccaagctgcttcgaccgtgtcaaaatgggcttcgtgatgggttgcgccgtgggcatggcggccggggcgctcttcggcaccttttcctgtctcaggatcggaatgcggggtcgagagctgatgggcggcattgggaaaaccatgatgcagagtggcggcacctttggcacattcatggccattgggatgggcatccgatgctaaccatggttgccaactacatctgtcccttcccatcaatcccagcccatgtactaaaaaaaaaaaaaaaaaaaaaaaaaaaatttttgggcggttggcctggaaaatttttaaaaccatggtttgggggcggggccacaggaggtagcggtgacagtggctctaaagcctggtaccaaggaagcaaccgggcgacagggcatagtcgggctgggaattctccccaataaaaaacgccccggggggaaccaccgagggtttcggacacaaacatacaagagggagttcccgggcggaccaaaaggggattctacaacaacggagttcccagggacgctggaatataaaattaaaggcccgccggggaagagagagtgagaggaagaaagaaaacaaagaagaagaaaaagcaaggaggacgacacggagcagaggggagaaagcagacagagatcacagaaagggcaacaaaagaaggcaaaaggagggacgggaggcggagggaggagaagagaagaagctgagacgcgaaaagagaagcagccgcacaacggagaagaaggaaggagagaaggagaagagaagagcagagggagaaggaaaacgaagagaggaagcaggcagaggtaagcgacaacagaagaaggacgaaaacaggaagagaaaaagcagaagaacgaagcaaaaagc

SEQ ID NO: 346277 - DNA, 468 bp, Homo sapiens
aacaaatccggagatgcggtcagggaagagaagcgctccaccaacttagcagccaacacccctgggaagggggggcgcctgagatttgccagcccctcgggccctcaggtctctgcagcccctctgtgccctgatgacccagtcaccttcacccggccaggatgcatcgccgccttaggttcccacctgctgtggcagcacctctcgtgctgctcaactctggcttgtctggaatgtctccctcacacctctcaaccttccagaaactggctaaatggaggctcgcttagcaagtgaatgtctaagcccactgaatccctagaaccagaagccaagttctttacaaatctttcatgggtattaggttggtctttaaaaagaatgttatgaaccagccaaaaatgtgtgtgtggtgtttaatccctgacaggccagttgagaggtatgtatgtcggacaagagttgctg

SEQ ID NO: 346278 - DNA, 97 bp, Homo sapiens
acacacacacactcttaattacccagggcaattacttactcttcccactagatagctcttggagagactggcctaaaacacacacacacacacgcgc

SEQ ID NO: 346279 - DNA, 438 bp, Homo sapiens
catgttagcaaataagtatatagtgtggaaaggtctgtagtcaatagcagtcattttgacaataggaaaaggaatgtgtgaaacttctgggtctgtgtgtgtgttggggttggtgggtcaagggaggggatccaaagatggtttcactaagaagggaaaaacaccggacctgagacttgaatgcaagtagaattttgccaggcagatgatctgttcttccaggtagataatccatcctgggcagacaaaaccaggctgtagaaggaacaccatgtgtggagcaatagaaatatctcattgttactggagtataatgcatgcaagaagcaggcaaggtagacaggggccaccgtgaaggaaactctgaataggggaatgatatcatcacatttccatgttaggacaaataggagaagtttaatatcaagatgtaagaaa

SEQ ID NO: 346280 - DNA, 868 bp, Homo sapiens
gatggttcttgtagcagcaaagtttcagtaatgcttcggacacaggatgaacactgagttgccactatcaacaggattgccctaggaatctcctgaagctcatcaccagagccagacccgaatgaacactgtcctggttctttggtcttctgggcagtcagcctcccgtttttttcctttggagcttcctgaatacccatctcctgggaattgtggaaacagctggctaagcccatgaggctcaccctgtagagccatttatttgaatggatcaaatcctattccatgggaagggcctccagccagtgcaattccaaatcccaatgagtccctaagagaggtgcagggcccttacctctgtaagagacccctctgagatgccattagagcctatccttaatgaatagtattagaagcctccaagctagagcagtcaggtgggggcactgagaaattctggacattggaacagacattatctccagccaaaaatttgagtcagcatcatagatgtctccagccctttgttttgaacctgtttgtaccatgtcagggccaacctcctggcctcgaggtagcaatcactactctttcccaggctgaatcttttataattaatcattaatgattcacggcatgccatgcactagcttctttttgtttttttttgtttgtttgtttgtttttagacggagttttgctcttgttgcccaggctagagtacaatggcactatctcagctcactgcaacctcctcccgggttcaggcaattctcctgcctcagcactttgggaggccaagacaggaggatcactcgagcccaggaatttgagaccagcctgggcaacatagtgagaccctgtctct

SEQ ID NO: 346281 - DNA, 628 bp, Homo sapiens
tttagagaggctgctcacggcagtgcctctgagcaggtagcactggagccgatcctctgctgcgatgaggtggcaagccaagaacatcatgagggagggaagggcagtcccagaagagagagcacagtgcaggtgccaggtggggaccacgggacactggaactgccttggtgtgtttatttccaaatagtgtctggcattacactgagatgaggagacttttttgtttttcattttttgtttttttttcccggggtaggggtgcatattggatttcttcaggagattcagcctcttgaaaaatatgaaatatagacaagtatatatacataaagatatatttgagtattttaaactttatatagccaagtatcttaaactctgcacacttgaatttttaatcctcgtgtatatccattatgattatttctattagttccagtttgaggttggtgatgatattgtcatagaagctttgtcaggcttcacattgtagcagctggtcttgaaggtggggcatatccttgttcaatgtgactactttagttgcctgtccaatatgaagtagaaaagcagatttctggattacagtatttgtcaacatagaatttgccgatttaaaaaaaaa

SEQ ID NO: 346282 - DNA, 500 bp, Homo sapiens
atcattcatccttaagctatatttttatcaaaatgaaaagtactaggaaggaatggcccttttgaagttacatattttgtaaaagcagatcatcattacttaggatttttttggcttcacctgaaacatgaaagcaaatattgattagacatgaggaagttcagaactagaagcaagtttggattatgaaggaaaattatggctccacagattttatctgttactgaaatgagtttacatggggaactcatatttctggttcactgaggccttgacagccaatttatttggatgcctttccatggaagtacgttgcatgggaattcagctgtgtagatgagaggggaaaactaaccactcagccacaccatagcaagcatactcatctctgggagatttaaaaaactgaatcgcaaactcattatattgtatacattaatatgtgcagtttttgtatatcaatgatacttaataaagctgtttaaaaaaaaaaaacaaca

SEQ ID NO: 346283 - DNA, 1192 bp, Homo sapiens
gacccgcgtggccggcggaaaggagcagcgggagccgcggccgtagggaagccacgggaagacgggcggctgcgctgcgatgcgcggccctctccctgaagccctcggctcaggcgccacaggaaaggctccttcgggcaggcctcagctttcagcttaagtttttttcctttggccgagtcaactgcggtgccgagttgtattttcctttcagaggtgtgtccgagaaccattcttaggagacgcctgccggccgctttgggatagggcctgtctgcccatgctggcttccaaaggcctctgtgtgttcctgtatgtgggcgtgcacgtacctgtcacatgtgtacgcgcagaccacaggatgtccacactggcttccaaacacatctctgtgtttctgtctgtgagtgtgtacgcaggtgtcaaatgtgtacgcacagatcacagggtgtccacactggcttccaaacacgtctctgggttcctttatgtgcgtgtgtatgcacttgtcatgtgtacacacagatcacagggcatccacactggcttccaaacatgtctctgtgtttctgtctgtgggtatgtacacacatatcacatgtggaagaggtaggaagaggctggaacaggtaagggtcatgaaggtgcagtgcactattgtactgtttgcgctttatatgtgtttggttagttttgcaagaacatgctggtgaaggagagagaaccccaaacaattgattagcagtgctactgaaactcagatatacacaggaatggcaaagaaacatctatgaaaaaaagcagattctggaactccatctccctgagattgtcactcatggggtctgcaggaagtttcaggaatctgcattttcttctaataaacgtggtccacaggttataagttgagatacaaatagaatatataaagtaaaaaaggaaaatttgaagtttcctgcctagcccaactcttctcattggtagtgtctgttaaattggaaacatatctctttccagacatattaataccttttatacagttgactcttgaacaacattagtttgaactgcgtgagtacacttatatgtggatttttttcagtaaatggaatatttttggcgatggcaacaattttgtgaaaaacctcacagatgagtcgcttagccaagaaatatggaaaaaaaaagaaaa

SEQ ID NO: 346284 - DNA, 381 bp, Homo sapiens
tgcagaacggcagaaacaacgggggctctagaaacctcatttttggaagttggtatcgttaatggcattatatcagaggaagaataaaggaatccattgtgaactaatgtgaaggaatggaggtaatgattagatcgcacaggtaggttgataacaacttaacctctgatggtttcccatccttatctcttttgtttagttaaattttttttaaaaaaatcaaagttcttcctctaatgctgaatccctctggcttccaaatctagagcaccaagaaactttgccagtgactttgggatgcccacaccttgctgattttgtgtgggtaccacttcctgcttatgtttgatttcataaatgtgtccacttttcagctcaaaa

SEQ ID NO: 346285 - DNA, 598 bp, Homo sapiens
gtcatattgctctccccaagaccaggccccaaattcccctaatatgaaacacaaaggctgtcagtcctcagagctctccaagctcctgcagaggcttaagccatggatgtggcatggtgtgcagcaagaacacgggaatccgcccacaaaccccgcgctgggtcctgccactccctagctgcaagaccttgggccaatcatgcaacttcacagggcctcagcgtttcaccatcaacaaaggaaagctctgggcctggccaaatgacttctaagattattaagagggtcaaatgagcacatatgagaacagcgccaattgaaaacacaaataaacgtcggtattttccagctgcccagggccttaggctccagaatttctcgatgttctgctcaggaggcactgtcctatcttggtaattatgaaggcatattcatacgttcttttactgccaggtgcggtggctcacgtctgtaatcccaacactttgggacaccaaggcgggtggatcacctgaggtcaggagttccagaccagcctggccaacacagtaaaaccctgtctctactaaacacacacacacacacacacacacacacg

SEQ ID NO: 346286 - DNA, 764 bp, Homo sapiens
tccaccccttcactttcagtctacctgtgtctttagaggtgaaatgggtttcttgaaggtagcatatagttggtttttgcttctttatccattcagccactcatgttttctagctggagaagtgagaacatttacattcagtgttattattgataagtaaggacttactactgctattttgttgcttgttttctggttgttttgagacttgtctcttcctttcttactgtcttccttatcttgtagtatgttttaatttgttgctttttacttgtagtggatctattataaaaactgctgtggttaccatgaagcttacaaaaatgtttttatagatatgagttatttaaaagagatgacaacttatcttagatcccaaataatagaaacaaacaaagccaaaaaaacccccacaagttttacagtttaattcctacccccacgttttaacttttagttgtctcaatttatactttttttttttttgcgatggagtttcactccattttgagatggagtgccgtggtgcaatcgcagcttactgcaacctctgcctcccgggttaaagcaattcttctgcatcagcctcctgagtagctgggattacagttgcctgcaaccacatgcatctaatttttgtacttttagtagagatggggttttgccatgttggccgggctggtctcaaacttgtgacttcaggtgatccacaagcctcaacctcccaagctgcttggattacaggcatgaaccaatgctccagc

SEQ ID NO: 346287 - DNA, 600 bp, Homo sapiens
tgtcgacgaagccgtagaacccgagcctcggagacgtggcctagtactgttctattaatgatagtgctctgtgatgacaggaatatgcactctccttggcaggcatactttatgggttggttggagaacaggaggtttgcagggggaggtgactgtccgaaggacagaatggtacgaggctttcttcactgcgtagcttgtgtgttcagttctgtatcagggcttattctacggagtatggactttatcgggaaaatttgtttttaacttttaagttcaagagtacatgtgcagatttgttatataggtaaacatgtgttatgggggtttgttgtagagattatttcatcacccaggtactaagcttagtacccattagttatttttcataatcttctccctcctcccaccctccaccctgcgaaaggccccagtgtgtgttgttcccttctatgtgtccatgtgttctcatcatttagcttccacttataagtgagaacaagtagtatttggtttttctgttcctacgttagttttccaaggatggtagcctcctgcttcatccatgtccctgcgaggacatagtttcgttctttttta

SEQ ID NO: 346288 - DNA, 309 bp, Homo sapiens
ggggatgtcctaggcagagtcccccactccaatgaggctataaaaatcatcatttgcaagtctccagaacaagactctggaccctcatgcctagcagtttaacaccaacaaaaggatccattcttcaacatcttctttgatgtgaactattctcagggagctaagatggacagaggtgtgctccttccttcacctcagctctttctggctctatggccctgggcaagttacccagcctctctaaacttagagttctctctctctctctccctctttttttctttctttttttttttttttttttttttt

SEQ ID NO: 346289 - DNA, 419 bp, Homo sapiens
tggagtaaggaggccaaaagttaatgaggagagcatcccagagagaagaaatggtagagccagtggtgtgaaggcaaaagccagtaggacgtatgcagagaagtccatgcagttcagtggtgccagaatgcaaaatgagaagcaaggagtggtaagagacagcaggaaagcttagcttactttttaagtcagccatgctgagcagcttgggcttcaacttgacaatgatgaacacatatttggcaagatttggcagaggacaggttggatatgaagtttagaaaaatccctacagctggtgtggatttgaatggaattggacagaagaccagcccaagttaggaagctgatggagagtcccagcaaaatacaggaatctgagcaattttatagttttataaatataggaacatgaatga

SEQ ID NO: 346290 - DNA, 895 bp, Homo sapiens
ggctagacgtatcagaacttgaactcctgacctcaggtgatctgcccgactcggcctcccaaagtgctgggattacaggccaccgcgcctggcctacaaagggataatttaaaataccactatagtgttagggaaagcctcttttaatcctggcacttccccatccatttccttaagagagatatttccaataaagttgcttttttttttatgttatcagggtatattttttggccaaccatatgctggtaataattatacatttaaaagaatgagataatcagttttactttaaaatgttactgtgatgttctagaaattcaccctttgcaattatttaatcttatggtgatattttttaaatgtcatcttaatgggtaaagggtatgcaattttaaaaagcacttttggtggtttgcgagcaaaaaaaaaaggttgaaataccaccatgttaatttgttcagcagcaaaagaaaaagaaaagagaaagaaatactgccgtatcactatagtaagctgtttgctagaaatgggattgctagatcaaggggtatgaatgatcagctttacaaaataatgtcagattactttctgaaggggttgtatcagtttgtactttggccagcagttttgtctgtttatatactttgatcaacagtgtgtaagagttacagttgatctacaacctctccaacacttgttattgtcagacttaatatttgccaatggaatgggtatgaaatgatgcatcattgtggttttaatttgcattttttgttattaatgagattgagcatcttttgtatgtttatgaactgtctttgtttcctttttatgaaatatctagtcatatattttaccctttgttctgatgagttgtcttttaaaactggta

SEQ ID NO: 346291 - DNA, 492 bp, Homo sapiens
ctgcacgaggggttctcatcatcatttgaccactcaagttcagctaccttggtcatacaacccgttaaatctatccccagccctaccagttattttgtatattatgtcactttttatttttatttatgtatatattttttgagactgggcaacagaccgagactctgtctcaaaaaaaaaaaaaaaaaaaattgatagcatgaaaatttgaagtaaagagtcaattatgttaaagaaaaaaacactccaaaatctaacatgatgctaggctacgttaacaagagcctggcattaaaaactgagtcaccatattcagcattaataagatactagcaaagctctcattcagctgccatgcctaggttgtgcttctgcatgttcagaggatgtggaaagcaattgaaatgattaaaagcatggaaaatcacatctctgaagagcgatgaaagtaggctatttaactaaaagaaaagaagattgaaggaagaaaat

SEQ ID NO: 346292 - DNA, 521 bp, Homo sapiens
aaactgctgatgctgacctgtgcctcaagaggcttgcctgtttgggggagaagcctgatgtggagaccattggaagaggctaaggcaagctacctgttccttaaacagattgttcaacctattccagtttttggtcctctacctcacacattccttccacttccaaatcctgttgttagaggatgttacctgccaaatttgtactttggaatcctcctctgcatgttcataagtttttgggttttcctttctgctcacttgccaatcctctatctactttcaatcttctaaaaattgctgaaacttcttgtctcactgttaattctttaacatcaatttgttggtattttaggataaaatataagtaagtgtatatcttcaaccagctatcattaaatggaaaatttctggtattattttatactttcatctattttcctgtagacatttaaacaagaagtctctgtgtgtatgtgcacatattcaatgttttaactacaaaatataaatttcttcttgta

SEQ ID NO: 346293 - DNA, 669 bp, Homo sapiens
caaacttctggagaaattaccaaattgctaacatgccatgtgaaatccttgaacactattaagataattacaggagattgatgtgtttgccttagtttaaaatcttaattagcattgacaccaaaagcaacatccctatgttaaaaacacaatgtgaatactattttattattaccatggaaccttgacctttctttccttcacctatagctcaatccttgtcttcctccagtcccagggctccttatcacaaccatcattttgattttacactggatttacatgataccttttactgaagtgcttaaatctaggaaagaataaatttctattgactaggagtcagaaacttagggtagaatgatggagcattgttttataacaggagcagtttccagcttggattcaaaatactgattaaaaaaatttgttttctattatgattggatctgtactttctaacgccaaatattttaatccagatactttttatcttgatcccacgcttgccctttaacctttaccagaaattcagagaaacagagtacatatttcgccacacaatggtcatcctcactgaatacttttatccagaggtctacaaactatgaccctccagtcaaatcctaccttgcccttgtttttgtaaataaagttttattggaacat

SEQ ID NO: 346294 - DNA, 586 bp, Homo sapiens
agtgactggtccaaggggtggacacatgacccactccaggccggtatggatccttcattgggatttctacatggatgctggggtgaaaagctctgactttctcctggagctgctaaactgagaatatattaatctagggctgatggcagccatttttgtaccacatggagagagccggtctgcagaaggagctaatagagaccagcagagatttcagatagacagactgcctacaaagcacaatatagagtccaaactttcctcctgcagctcttcattccatcctcctagcttacattagttagtttgtgctaaagttagtttgtgttgggtttcccataatttgaaatcaggaagtcctaactagtatggtgcccctttttcttctcaaccttgtgaattcccagtgccattctgcctctcaaagcttacttccctagaagggcctgatcttggtattgcacaaaggtgtgaatgtgaggcagtgtcttcctgctccctgaggtggcatgggtcctggagattaatatgcaacagcttagcaggtgggatccgggttcatccagccataccactcacacagaaa

SEQ ID NO: 346295 - DNA, 335 bp, Homo sapiens
ttactgtgtatgtgtgtgaatcccttgcttaaaaatatttcatccattggttaggttgtggagaaactggaacacttacgcattgctcgtagtaatataaaatggtatagctgctctcgggtgtggatggcaagatggctgaataggaaccactctggtctacagctcccagtgagattaatgaagaaggcgggtgatttctgcatttccagctgaggtacccagcttatctcattgggactggttagacagtgggtgcagcccacggagggcaagccgaagcagggtggggcgttccctcaccaggaatagcaaggggtcagggaactccctcc

SEQ ID NO: 346296 - DNA, 407 bp, Homo sapiens
gcctcaaaaaaagaaaaaaaaatgttttggtaacacatcagttctgtaaaaccaggtgattactaacaaacttctcatcctgatgtagagcaggaatctgcagactaagaaggctgtgttccggaggctacctagacacactatacacatgatagccaggggcatctggacagaggacgggaccgagagctgagcttagcaaggccacagagggtagagtgtacattctttgcatgcctgcccaggtccgcttcccaggtttgttcttgttggcattgtttactggttcagcagcaacacaaatgaactatctcatagaccccatcgcttgcctctgaatgttaacgttttgtttgttttttgagacgaagtcttgctttatcacccaggctggagtgcagtgggca

SEQ ID NO: 346297 - DNA, 557 bp, Homo sapiens
gggtagcagaatcttggtaacccctgaatgatcaggaatctaatcggtaaaaacatgtgactttggccccttgatatataaagtgtctaaaagcattacaacaggactcacaaagctcctaagtttcacttttgcaaacaaggtatctgtgactcccgcttgtggtgttttaaatttacctttattccatagccctgagtttctgtgagtccaggacatctcctcaatacaaagtagccactgtgttcctatgtgttgcaaccaggagtcagtacagacttcattcacctcaaagttgcaagcgctcgatgcagtcacaatgtccatcaccagtgctcatgcactgcctgtttttaggaagtatccacatctaagtggtgtgtatatttcttaggaacacttagtatttttaaaacctgattaacataaaaacaattagtttttaagcagacccacttaaggtattaaaggccaactgcaagtaacaccctgcgaggctctgtagatggatctattgaaataccattaaaaaaagtgttcaaacctaaaaaaaaagc

SEQ ID NO: 346298 - DNA, 700 bp, Homo sapiens
tagatacagctagtaaatgctgtatatttagtgcagatagtaaaatagcagtaaaattataataatgggactgaacacacaatccctgctttgtcagagcttatcatctcttacaggagacagacatcaagcaggtgattacaaataaatgtaacattacaattctggtaagtgttgtgaagaaggacaggtatttggtgataggaatatcattgagaaataattgcagtcatttaggggaaaacgtagaagagtaccattagttgaggtttttgaaaacacctttattgatacgtaattcccatatcatacagtttactcatttaaagtatacaattcagtggtttttactatgttcacagatgtgtataattgttcgacaggtggttttagaacattttcatcagaaagaacctgtagcctttagctattcctcttgtccttccatttgccttcctcttctgccctgtgttgatttgtttttaaacaaattattgtgtacatagtcaaacaaaaaattagtttgactaattttgagtgttaataagcgccacttctctgttgctaattccttctcattcctaggtcacttcctggagagaataatttttaattttatttggtttaggtcatgccacagtaatgagatgccactattcttaaaatttgtactaatatgtattttagtggaaaagaaaaa

SEQ ID NO: 346299 - DNA, 702 bp, Homo sapiens
  misc_feature (225)..(225): n is a, c, g, or t
atgtccgagactgcgcctgccgcgcccgctgctccggcccctgccgagaagactcccgtgaagaagaaggcccgcaagtctgcaggtgcggccaagcgcaaagcgtctgggcccccggtgtccgagctcattactaaagctgttgccgcctccaaggagcgcagcggcgtatctttggccgctctcaagaaagcgctggcagccgctggctatgacgtggagaanaacaacagccgcatcaagctgggtctcaagagcctggtgagcaagggcaccctggtgcagaccaagggcaccggcgcgtcgggttccttcaaactcaacaagaaggcggcctctggggaagccaagcctaaggctaaaaaggcaggcgcggccaaggccaagaagccagcaggagcggcgaagaagcccaagaaggcgacgggggcggccacccccaagaagagcgccaagaagaccccaaagaaggcgaagaagccggctgcagctgctggagccaaaaaagcgaaaagcccgaaaaaggcgaaagcagccaagccaaaaaaggcgcccaagagcccagcgaaggccaaagcagttaaacccaaggcggctaaaccaaagaccgccaagcccaaggcagccaagccaaagaaggcggcagccaagaaaaagtagaaagttcctttggccaactgcttagaagcccaacacaaccca

SEQ ID NO: 346300 - DNA, 184 bp, Homo sapiens
atgtccgagactgcgcctgccgcgcccgctgctccggcccctgccgagaagactcccgtgaagaagaaggcccgcaagtctgcaggtgcggccaagccccaaggcagccaagccaaagaaggcggcagccaagaaaaagtagaaagttcctttggccaactgcttagaagcccaacacaaccca

SEQ ID NO: 346301 - DNA, 393 bp, Homo sapiens
cttcttttagctctcccagaactctccacattgatcccactctggctactagcaccagctggacagtaacgactttcagaggtgaacacaatgtgcttcaacatgccttcctgaaagttcagttagcaactggacagcatctgaattccagttctgcaaagctcttctctgaatacctgaggtaccagcatgatcctggcactgcccctgcctccgctgtcttgtctaattctagctctctggggccactcttgtgagtttctaggttccgagaaccttaatcttttccattgtttcccagccctagacaggtagctgctacctgatgttgtcatcctgtgttagctcagtgttcatttttaccattaaaacacctgctttaaataatcttca

SEQ ID NO: 346302 - DNA, 608 bp, Homo sapiens
gctaggtgaaatagagaagttgccagaggacttctgggaaaaaacatttgaaaaggaaggactgaaaagagaagaaatgggcacaacggggactccgggtctggccataacagccaggagaaacaagggcttaagccaggaggtctgaaaagagaacagaaggtagaccacctagaatggggacaaggcacttccactctgcaaaggtgagtgtgtttgcagtgcaaagcaagaaacgtgaactttaaaattcttcaggcacatgtgttcaaaaggcaaagatacatgagaatgcaagatgaaaaactccagcgcaagatcaggctttttaaactgccacagctcccctgtctccccagctagcttctattcgccttcccaggctcctaagcccagtgacaggagagactctggaatgatcagagattctggaatgaaaagagctatgcccactgcttaggaggccaaggattctgcaaactgatccccgcagataccacagcgctttactctggtctccaaggccatggcacaccctaaaagattaaaatgccttaaggtaaatgaccattcccagatgaaggcacagaatgtaaacaaagtgtggg

SEQ ID NO: 346303 - DNA, 554 bp, Homo sapiens
gctaggtgaaatagagaagttgccagaggacttctgggaaaaaacatttgaaaaggaaggactgaaaagagaagaaatgggcacaacggggactccgggtctggccataacagccaggagaaacaagggcttaagccaggaggtctgaaaagagaacagaaggtagaccacctagaatggggacaaggcacttccactctgcaaaggtgagtgtgtttgcagtgcaaagcaagaaacgtgaactttaaaattcttcaggcacatgtgttcaaaagtaaactgccacagctcccctgtctccccagctagcttctattcgccttcccaggctcctaagcccagtgacaggagagactctggaatgatcagagattctggaatgaaaagagctatgcccactgcttaggaggccaaggattctgcaaactgatccccgcagataccacagcgctttactctggtctccaaggccatggcacaccctaaaagattaaaatgccttaaggtaaatgaccattcccagatgaaggcacagaatgtaaacaaagtgtggg

SEQ ID NO: 346304 - DNA, 260 bp, Homo sapiens
cttggcgtcccaaagtgctaggattacaggtgtgagccactacatccagccttgagtagacatttggatcaaaggcctatagttacaagagtggctgggctggagatacaaacttgtgtactatcatcatattattaatcctacattataggtgaggttatataattttctcagagtcatgcagtgctggagtctctcctgtaccttatataatatctctctctctctctgtctgtctttctgtctctgtctctctcata

SEQ ID NO: 346305 - DNA, 3205 bp, Homo sapiens
cagagagagacacaggaacaagaacagcaaagggtagagcagacctgcgccaggggcgcacaacggccgtgtccacctcccggccccaagatggtgcttcccacaggcagccacgcgtagcagccagagacagctccagacatgtggctcttcttcgggatcactggattgctgacggcagccctctcaggtcatccatctccagccccacctgaccagctcaacaccagcagtgcagagagtgagctctgggagccaggggagcggcttccggtccgtctgacaaacgggagcagcagctgcagcgggacggtggaggtgcggctcgaggcgtcctgggagcccgcgtgcggggcgctctgggacagccgcgccgccgaggccgtgtgccgagcactgggctgcggcggggcggaggccgcctctcagctcgccccgccgacccctgagctgccgcccccgcctgcagccgggaacaccagcgtagcagctaatgccactctggccggggcgcccgccctcctgtgcagcggcgccgagtggcggctctgcgaggtggtggagcacgcgtgccgcagcgacgggaggcgggcccgtgtcacctgtgcagagaaccgcgcgctgcgcctggtggacggtggcggcgcctgcgccggccgcgtggagatgctggagcatggcgagtggggatcagtgtgcgatgacacttgggacctggaggacgcccacgtggtgtgcaggcaactgggctgcggctgggcagtccaggccctgcccggcttgcacttcacgcccggccgcgggcctatccaccgggaccaggtgaactgctcgggggccgaagcttacctgtgggactgcccggggctgccaggacagcactactgcggccacaaagaggacgcgggcgtggtgtgctcagagcaccagtcctggcgcctgacagggggcgctgaccgctgcgaggggcaggtggaggtacacttccgaggggtctggaacacagtgtgtgacagtgagtggtacccatcggaggccaaggtgctctgccagtccttgggctgtggaactgcggttgagaggcccaaggggctgccccactccttgtccggcaggatgtactactcatgcaatggggaggagctcaccctctccaactgctcctggcggttcaacaactccaacctctgcagccagtcgctggcagccagggtcctctgctcagcttcccggagtttgcacaatctgtccactcccgaagtccctgcaagtgttcagacagtcactatagaatcttctgtgacagtgaaaatagagaacaaggaatctcgggagctaatgctcctcatcccctccatcgttctgggaattctcctccttggctccctcatcttcatagccttcatcctcttgagaattaaaggaaaatatgccctccccgtaatggtgaaccaccagcacctacccaccaccatcccggcagggagcaatagctatcaaccggtccccatcaccatccccaaagaagttttcatgctgcccatccaggtccaggccccgccccctgaggactcagactctggctcggactcagactatgagcactatgacttcagcgcccagcctcctgtggccctgaccaccttctacaattcccagcggcatcgggtcacagatgaggaggtccagcaaagcaggttccagatgccacccttggaggaaggacttgaagagttgcatgcctcccacatcccaactgccaaccctggacactgcattacagacccgccatccctgggccctcagtatcacccgaggagcaacagtgagtcgagcacctcttcaggggaggattactgcaatagtcccaaaagcaagctgcctccatggaacccccaggtgttttcttcagagaggagttccttcctggagcagcccccaaacttggagctggccggcacccagccagccttttcagcagggcccccggctgatgacagctccagcacctcatccggggagtggtaccagaacttccagccaccaccccagcccccttcggaggagcagtttggctgtccagggtcccccagccctcagcctgactccaccgacaacgatgactacgatgacatcagcgcagcctaggccggggccagccgaggctcctggggtggctctgaccctctggcctcctgctctacctactccctttcccctttcccaccctcccagctcacctccccatggagctgagaggcctcccttggagagatggaaggaaacgttataccttgtacccctcggtctccatccatcaagccaaacctgctgccacagccctcccccggccccagatagcagccccagggaggatgctgcctccaagaggtgtgagccctctgtctcggggatgaacaagcagagtctgggctacctcttgacagctggtggaggggagttggggagctggactggatgactctggaggccccttccaaacctcaagtgtccggcgctttgattgcctgagtttctgacacttcagggcccagaggtcctgcgaggggcagaactggacccccatgccagtgctgctgcaggagggcccatatactagggtctgctgagctgttgtcactgatcggtgggcgctgggggggtagggtagcacaccagctgtcccaggctttgctccgggcggtaactgcacttgggcagggaatatagccttcctgggcacaactagctgacaatgacaggttgactgtgtacccccaaccaaggagctggggcccaaggccagtcctgccccagagacactccaagtccgccaggggcacagaccagttctgcagtgactgtccctggacaatgggtctttattctgagtttcctatggtttacaaagagggccccagcccagccccaccacagatcccagagataggggcccagtctccatgggggcaaggagcatagagatgttttccaggaaggggctcagaagctgcactaggccccgagtccccatgtgtctccttgaattgatgaggatgctcctgggagggatgcgtgactatgtggtgttgcacccggggctgcaaacgtctccgtgcagcccccagagagaggcccatgggctcagaccaggctttgttgtcctgctctgagtatcctgagattaaactgaattgctgaatga

SEQ ID NO: 346306 - DNA, 3071 bp, Homo sapiens
cagagagagacacaggaacaagaacagcaaagggtagagcagacctgcgccaggggcgcacaacggccgtgtccacctcccggccccaagatggtgcttcccacaggcagccacgcgtagcagccagagacagctccagacatgtggctcttcttcgggatcactggattgctgacggcagccctctcaggtcatccatctccagccccacctgaccagctcaacaccagcagtgcagagagtgagctctgggagccaggggagcggcttccggtccgtctgacaaacgggagcagcagctgcagcgggacggtggaggtgcggctcgaggcgtcctgggagcccgcgtgcggggcgctctgggacagccgcgccgccgaggccgtgtgccgagcactgggctgcggcggggcggaggccgcctctcagctcgccccgccgacccctgagctgccgcccccgcctgcagccgggaacaccagcgtagcagctaatgccactctggccggggcgcccgccctcctgtgcagcggcgccgagtggcggctctgcgaggtggtggagcacgcgtgccgcagcgacgggaggcgggcccgtgtcacctgtgcagagaaccgcgcgctgcgcctggtggacggtggcggcgcctgcgccggccgcgtggagatgctggagcatggcgagtggggatcagtgtgcgatgacacttgggacctggaggacgcccacgtggtgtgcaggcaactgggctgcggctgggcagtccaggccctgcccggcttgcacttcacgcccggccgcgggcctatccaccgggaccaggtgaactgctcgggggccgaagcttacctgtgggactgcccggggctgccaggacagcactactgcggccacaaagaggacgcgggcgtggtgtgctcagagcaccagtcctggcgcctgacagggggcgctgaccgctgcgaggggcaggtggaggtacacttccgaggggtctggaacacagtgtgtgacagtgagtggtacccatcggaggccaaggtgctctgccagtccttgggctgtggaactgcggttgagaggcccaaggggctgccccactccttgtccggcaggatgtactactcatgcaatggggaggagctcaccctctccaactgctcctggcggttcaacaactccaacctctgcagccagtcgctggcagccagggtcctctgctcagcttcccggagtttgcacaatctgtccactcccgaagtccctgcaagtgttcagacagtcactatagaatcttctgtgacagtgaaaatagagaacaaggaatctcgggagctaatgctcctcatcccctccatcgttctgggaattctcctccttggctccctcatcttcatagccttcatcctcttgagaattaaaggaaaatatgccctccccgtaatggtgaaccaccagcacctacccaccaccatcccggcagggagcaatagctatcaaccggtccccatcaccatccccaaagaagttttcatgctgcccatccaggtccaggccccgccccctgaggactcagactctggctcggactcagactatgagcactatgacttcagcgcccagcctcctgtggccctgaccaccttctacaattcccagcggcatcgggtcacagatgaggaggtccagcaaagcaggttccagatgccacccttggaggaaggacttgaagagttgcatgcctcccacatcccaactgccaaccctggacactgcattacagacccgccatccctgggccctcagtatcacccgaggagcaacagtgagtcgagcacctcttcaggggaggattactgcaatagtcccaaaagcaagctgcctccatggaacccccaggtgttttcttcagagaggagttccttcctggagcagcccccaaacttggagctggccggcacccagccagccttttcagcagggcccccggctgatgacagctccagcacctcatccggggagtggtaccagaacttccagccaccaccccagcccccttcggaggagcagtttggctgtccagggtcccccagccctcagcctgactccaccgacaacgatgactacgatgacatcagcgcagcctaggccggggccagccgaggctcctggggtggctctgaccctctggcctcctgctctacctactccctttcccctttcccaccctcccagctcacctccccatggagctgagaggcctcccttggagagatggaaggaaacgttataccttgtacccctcggtctccatccatcaagccaaacctgctgccacagccctcccccggccccagatagcagccccagggaggatgctgcctccaagaggtgtgagccctctgtctcggggatgaacaagcagagtctgggctacctcttgacagctggtggaggggagttggggagctggactggatgactctggaggccccttccaaacctcaagtgtccggcgctttgattgcctgagtttctgacacttcagggcccagaggtcctgcgaggggcagaactggacccccatgccagtgctgctgcaggagggcccatatactagggtctgctgagctgttgtcactgatcggtgggcgctgggggggtagggtagcacaccagctgtcccaggctttgctccgggcggtaactgcacttgggcagggaatatagccttcctgggcacaactagctgacaatgacaggttgactgtgtacccccaaccaaggcccagccccaccacagatcccagagataggggcccagtctccatgggggcaaggagcatagagatgttttccaggaaggggctcagaagctgcactaggccccgagtccccatgtgtctccttgaattgatgaggatgctcctgggagggatgcgtgactatgtggtgttgcacccggggctgcaaacgtctccgtgcagcccccagagagaggcccatgggctcagaccaggctttgttgtcctgctctgagtatcctgagattaaactgaattgctgaatga

SEQ ID NO: 346307 - DNA, 2942 bp, Homo sapiens
cagagagagacacaggaacaagaacagcaaagggtagagcagacctgcgccaggggcgcacaacggccgtgtccacctcccggccccaagatggtgcttcccacaggcagccacgcgtagcagccagagacagctccagacatgtggctcttcttcgggatcactggattgctgacggcagccctctcaggtcatccatctccagccccacctgaccagctcaacaccagcagtgcagagagtgagctctgggagccaggggagcggcttccggtccgtctgacaaacgggagcagcagctgcagcgggacggtggaggtgcggctcgaggcgtcctgggagcccgcgtgcggggcgctctgggacagccgcgccgccgaggccgtgtgccgagcactgggctgcggcggggcggaggccgcctctcagctcgccccgccgacccctgagctgccgcccccgcctgcagccgggaacaccagcgtagcagctaatgccactctggccggggcgcccgccctcctgtgcagcggcgccgagtggcggctctgcgaggtggtggagcacgcgtgccgcagcgacgggaggcgggcccgtgtcacctgtgcagagaaccgcgcgctgcgcctggtggacggtggcggcgcctgcgccggccgcgtggagatgctggagcatggcgagtggggatcagtgtgcgatgacacttgggacctggaggacgcccacgtggtgtgcaggcaactgggctgcggctgggcagtccaggccctgcccggcttgcacttcacgcccggccgcgggcctatccaccgggaccaggtgaactgctcgggggccgaagcttacctgtgggactgcccggggctgccaggacagcactactgcggccacaaagaggacgcgggcgtggtgtgctcagagcaccagtcctggcgcctgacagggggcgctgaccgctgcgaggggcaggtggaggtacacttccgaggggtctggaacacagtgtgtgacagtgagtggtacccatcggaggccaaggtgctctgccagtccttgggctgtggaactgcggttgagaggcccaaggggctgccccactccttgtccggcaggatgtactactcatgcaatggggaggagctcaccctctccaactgctcctggcggttcaacaactccaacctctgcagccagtcgctggcagccagggtcctctgctcagcttcccggagtttgcacaatctgtccactcccgaagtccctgcaagtgttcagacagtcactatagaatcttctgtgacagtgaaaatagagaacaaggaatctcgggagctaatgctcctcatcccctccatcgttctgggaattctcctccttggctccctcatcttcatagccttcatcctcttgagaattaaaggaaaatatgccctccccgtaatggtgaaccaccagcacctacccaccaccatcccggcagggagcaatagctatcaaccggtccccatcaccatccccaaagaagttttcatgctgcccatccaggtccaggccccgccccctgaggactcagactctggctcggactcagactatgagcactatgacttcagcgcccagcctcctgtggccctgaccaccttctacaattcccagcggcatcgggtcacagatgaggaggtccagcaaagcaggttccagatgccacccttggaggaaggacttgaagagttgcatgcctcccacatcccaactgccaaccctggacactgcattacagacccgccatccctgggccctcagtatcacccgaggagcaacagtgagtcgagcacctcttcaggggaggattactgcaatagtcccaaaagcaagctgcctccatggaacccccaggtgttttcttcagagaggagttccttcctggagcagcccccaaacttggagctggccggcacccagccagccttttcagcagggcccccggctgatgacagctccagcacctcatccggggagtggtaccagaacttccagccaccaccccagcccccttcggaggagcagtttggctgtccagggtcccccagccctcagcctgactccaccgacaacgatgactacgatgacatcagcgcagcctaggccggggccagccgaggctcctggggtggctctgaccctctggcctcctgctctacctactccctttcccctttcccaccctcccagctcacctccccatggagctgagaggcctcccttggagagatggaaggaaacgttataccttgtacccctcggtctccatccatcaagccaaacctgctgccacagccctcccccggccccagatagcagccccagggaggatgctgcctccaagaggtgtgagccctctgtctcggggatgaacaagcagagtctgggctacctcttgacagctggtggaggggagttggggagctggactggatgactctggaggccccttccaaacctcaagtgtccggcgctttgattgcctgagtttctgacacttcagggcccagaggtcctgcgaggggcagaactggacccccatgccagtgctgctgcaggagggcccatatactagggtctgctgagctgttgtcactgatcggtgggcgctgggggggtagggtagcacaccagctacctcttgacagctggtggaggggagttggggagctggactggatgactctgaaggggctcagaagctgcactaggccccgagtccccatgtgtctccttgaattgatgaggatgctcctgggagggatgcgtgactatgtggtgttgcacccggggctgcaaacgtctccgtgcagcccccagagagaggcccatgggctcagaccaggctttgttgtcctgctctgagtatcctgagattaaactgaattgctgaatga

SEQ ID NO: 346308 - DNA, 2977 bp, Homo sapiens
cagagagagacacaggaacaagaacagcaaagggtagagcagacctgcgccaggggcgcacaacggccgtgtccacctcccggccccaagatggtgcttcccacaggcagccacgcgtagcagccagagacagctccagacatgtggctcttcttcgggatcactggattgctgacggcagccctctcaggtcatccatctccagccccacctgaccagctcaacaccagcagtgcagagagtgagctctgggagccaggggagcggcttccggtccgtctgacaaacgggagcagcagctgcagcgggacggtggaggtgcggctcgaggcgtcctgggagcccgcgtgcggggcgctctgggacagccgcgccgccgaggccgtgtgccgagcactgggctgcggcggggcggaggccgcctctcagctcgccccgccgacccctgagctgccgcccccgcctgcagccgggaacaccagcgtagcagctaatgccactctggccggggcgcccgccctcctgtgcagcggcgccgagtggcggctctgcgaggtggtggagcacgcgtgccgcagcgacgggaggcgggcccgtgtcacctgtgcagagaaccgcgcgctgcgcctggtggacggtggcggcgcctgcgccggccgcgtggagatgctggagcatggcgagtggggatcagtgtgcgatgacacttgggacctggaggacgcccacgtggtgtgcaggcaactgggctgcggctgggcagtccaggccctgcccggcttgcacttcacgcccggccgcgggcctatccaccgggaccaggtgaactgctcgggggccgaagcttacctgtgggactgcccggggctgccaggacagcactactgcggccacaaagaggacgcgggcgtggtgtgctcagagcaccagtcctggcgcctgacagggggcgctgaccgctgcgaggggcaggtggaggtacacttccgaggggtctggaacacagtgtgtgacagtgagtggtacccatcggaggccaaggtgctctgccagtccttgggctgtggaactgcggttgagaggcccaaggggctgccccactccttgtccggcaggatgtactactcatgcaatggggaggagctcaccctctccaactgctcctggcggttcaacaactccaacctctgcagccagtcgctggcagccagggtcctctgctcagcttcccggagtttgcacaatctgtccactcccgaagtccctgcaagtgttcagacagtcactatagaatcttctgtgacagtgaaaatagagaacaaggaatctcgggagctaatgctcctcatcccctccatcgttctgggaattctcctccttggctccctcatcttcatagccttcatcctcttgagaattaaaggaaaatatgccctccccgtaatggtgaaccaccagcacctacccaccaccatcccggcagggagcaatagctatcaaccggtccccatcaccatccccaaagaagattcccagcggcatcgggtcacagatgaggaggtccagcaaagcaggttccagatgccacccttggaggaaggacttgaagagttgcatgcctcccacatcccaactgccaaccctggacactgcattacagacccgccatccctgggccctcagtatcacccgaggagcaacagtgagtcgagcacctcttcaggggaggattactgcaatagtcccaaaagcaagctgcctccatggaacccccaggtgttttcttcagagaggagttccttcctggagcagcccccaaacttggagctggccggcacccagccagccttttcagggtcccccagccctcagcctgactccaccgacaacgatgactacgatgacatcagcgcagcctaggccggggccagccgaggctcctggggtggctctgaccctctggcctcctgctctacctactccctttcccctttcccaccctcccagctcacctccccatggagctgagaggcctcccttggagagatggaaggaaacgttataccttgtacccctcggtctccatccatcaagccaaacctgctgccacagccctcccccggccccagatagcagccccagggaggatgctgcctccaagaggtgtgagccctctgtctcggggatgaacaagcagagtctgggctacctcttgacagctggtggaggggagttggggagctggactggatgactctggaggccccttccaaacctcaagtgtccggcgctttgattgcctgagtttctgacacttcagggcccagaggtcctgcgaggggcagaactggacccccatgccagtgctgctgcaggagggcccatatactagggtctgctgagctgttgtcactgatcggtgggcgctgggggggtagggtagcacaccagctgtcccaggctttgctccgggcggtaactgcacttgggcagggaatatagccttcctgggcacaactagctgacaatgacaggttgactgtgtacccccaaccaaggagctggggcccaaggccagtcctgccccagagacactccaagtccgccaggggcacagaccagttctgcagtgactgtccctggacaatgggtctttattctgagtttcctatggtttacaaagagggccccagcccagccccaccacagatcccagagataggggcccagtctccatgggggcaaggagcatagagatgttttccaggaaggggctcagaagctgcactaggccccgagtccccatgtgtctccttgaattgatgaggatgctcctgggagggatgcgtgactatgtggtgttgcacccggggctgcaaacgtctccgtgcagcccccagagagaggcccatgggctcagaccaggctttgttgtcctgctctgagtatcctgagattaaactgaattgctgaatga

SEQ ID NO: 346309 - DNA, 1500 bp, Homo sapiens
tggacagctggacagtgcagaggaggtggacagcacagaggaggctggacagcacagaggcggtggacagcacagatgaggaggtccagcaaagcaggttccagatgccacccttggaggaaggacttgaagagttgcatgcctcccacatcccaactgccaaccctggacactgcattacagacccgccatccctgggccctcagtatcacccgaggagcaacagtgagtcgagcacctcttcaggggaggattactgcaatagtcccaaaagcaagctgcctccatggaacccccaggtgttttcttcagagaggagttccttcctggagcagcccccaaacttggagctggccggcacccagccagccttttcagggtcccccagccctcagcctgactccaccgacaacgatgactacgatgacatcagcgcagcctaggccggggccagccgaggctcctggggtggctctgaccctctggcctcctgctctacctactccctttcccctttcccaccctcccagctcacctccccatggagctgagaggcctcccttggagagatggaaggaaacgttataccttgtacccctcggtctccatccatcaagccaaacctgctgccacagccctcccccggccccagatagcagccccagggaggatgctgcctccaagaggtgtgagccctctgtctcggggatgaacaagcagagtctgggctacctcttgacagctggtggaggggagttggggagctggactggatgactctggaggccccttccaaacctcaagtgtccggcgctttgattgcctgagtttctgacacttcagggcccagaggtcctgcgaggggcagaactggacccccatgccagtgctgctgcaggagggcccatatactagggtctgctgagctgttgtcactgatcggtgggcgctgggggggtagggtagcacaccagctgtcccaggctttgctccgggcggtaactgcacttgggcagggaatatagccttcctgggcacaactagctgacaatgacaggttgactgtgtacccccaaccaaggagctggggcccaaggccagtcctgccccagagacactccaagtccgccaggggcacagaccagttctgcagtgactgtccctggacaatgggtctttattctgagtttcctatggtttacaaagagggccccagcccagccccaccacagatcccagagataggggcccagtctccatgggggcaaggagcatagagatgttttccaggaaggggctcagaagctgcactaggccccgagtccccatgtgtctccttgaattgatgaggatgctcctgggagggatgcgtgactatgtggtgttgcacccggggctgcaaacgtctccgtgcagcccccagagagaggcccatgggctcagaccaggctttgttgtcctgctctgagtatcctgagattaaactgaattgctgaatga

SEQ ID NO: 346310 - DNA, 256 bp, Homo sapiens
tgcagtgtgccattgtggagaccatagccctgaaccagacagacgaggctattccctcagtgctgatgttctagtcagggacatggccggaagcaagatgatcagatggcttcatgcagcatcccacggggatagtgatgtggagccagaaccactcagctccgtcctgtggggcagcagggcaatgactgggtctcccactaatctgggcctctctgcccacagggtcccccagccctcagcctgactccaccga

SEQ ID NO: 346311 - DNA, 266 bp, Homo sapiens
cagaaaagaaagaaaaaaaaagggggctacttggtgctcccctgctactctgcctctcacctctgctgttcatactctaccatctctccctacgcctttccgcccaccactttgccatgccctcgactctgttctctccccagttttcatgctgcccatccaggtccaggccccgccccctgaggactcagactctggctcggactcagactatgagcactatgacttcagcgcccagcctcctgtggccctgaccaccttctaca

SEQ ID NO: 346312 - DNA, 3080 bp, Homo sapiens
cagagagagacacaggaacaagaacagcaaagggtagagcagacctgcgccaggggcgcacaacggccgtgtccacctcccggccccaagatggtgcttcccacaggcagccacgcgtagcagccagagacagctccagacatgtggctcttcttcgggatcactggattgctgacggcagccctctcaggtcatccatctccagccccacctgaccagctcaacaccagcagtgcagagagtgagctctgggagccaggggagcggcttccggtccgtctgacaaacgggagcagcagctgcagcgggacggtggaggtgcggctcgaggcgtcctgggagcccgcgtgcggggcgctctgggacagccgcgccgccgaggccgtgtgccgagcactgggctgcggcggggcggaggccgcctctcagctcgccccgccgacccctgagctgccgcccccgcctgcagccgggaacaccagcgtagcagctaatgccactctggccggggcgcccgccctcctgtgcagcggcgccgagtggcggctctgcgaggtggtggagcacgcgtgccgcagcgacgggaggcgggcccgtgtcacctgtgcagagaaccgcgcgctgcgcctggtggacggtggcggcgcctgcgccggccgcgtggagatgctggagcatggcgagtggggatcagtgtgcgatgacacttgggacctggaggacgcccacgtggtgtgcaggcaactgggctgcggctgggcagtccaggccctgcccggcttgcacttcacgcccggccgcgggcctatccaccgggaccaggtgaactgctcgggggccgaagcttacctgtgggactgcccggggctgccaggacagcactactgcggccacaaagaggacgcgggcgtggtgtgctcagagcaccagtcctggcgcctgacagggggcgctgaccgctgcgaggggcaggtggaggtacacttccgaggggtctggaacacagtgtgtgacagtgagtggtacccatcggaggccaaggtgctctgccagtccttgggctgtggaactgcggttgagaggcccaaggggctgccccactccttgtccggcaggatgtactactcatgcaatggggaggagctcaccctctccaactgctcctggcggttcaacaactccaacctctgcagccagtcgctggcagccagggtcctctgctcagcttcccggagtttgcacaatctgtccactcccgaagtccctgcaagtgttcagacagtcactatagaatcttctgtgacagtgaaaatagagaacaaggaatctcgggagctaatgctcctcatcccctccatcgttctgggaattctcctccttggctccctcatcttcatagccttcatcctcttgagaattaaaggaaaatatgccctccccgtaatggtgaaccaccagcacctacccaccaccatcccggcagggagcaatagctatcaaccggtccccatcaccatccccaaagaaggtccaggccccgccccctgaggactcagactctggctcggactcagactatgagcactatgacttcagcgcccagcctcctgtggccctgaccaccttctacaattcccagcggcatcgggtcacagatgaggaggtccagcaaagcaggttccagatgccacccttggaggaaggacttgaagagttgcatgcctcccacatcccaactgccaaccctggacactgcattacagacccgccatccctgggccctcagtatcacccgaggagcaacagtgagtcgagcacctcttcaggggaggattactgcaatagtcccaaaagcaagctgcctccatggaacccccaggtgttttcttcagagaggagttccttcctggagcagcccccaaacttggagctggccggcacccagccagccttttcagggtcccccagccctcagcctgactccaccgacaacgatgactacgatgacatcagcgcagcctaggccggggccagccgaggctcctggggtggctctgaccctctggcctcctgctctacctactccctttcccctttcccaccctcccagctcacctccccatggagctgagaggcctcccttggagagatggaaggaaacgttataccttgtacccctcggtctccatccatcaagccaaacctgctgccacagccctcccccggccccagatagcagccccagggaggatgctgcctccaagaggtgtgagccctctgtctcggggatgaacaagcagagtctgggctacctcttgacagctggtggaggggagttggggagctggactggatgactctggaggccccttccaaacctcaagtgtccggcgctttgattgcctgagtttctgacacttcagggcccagaggtcctgcgaggggcagaactggacccccatgccagtgctgctgcaggagggcccatatactagggtctgctgagctgttgtcactgatcggtgggcgctgggggggtagggtagcacaccagctgtcccaggctttgctccgggcggtaactgcacttgggcagggaatatagccttcctgggcacaactagctgacaatgacaggttgactgtgtacccccaaccaaggagctggggcccaaggccagtcctgccccagagacactccaagtccgccaggggcacagaccagttctgcagtgactgtccctggacaatgggtctttattctgagtttcctatggtttacaaagagggccccagcccagccccaccacagatcccagagataggggcccagtctccatgggggcaaggagcatagagatgttttccaggaaggggctcagaagctgcactaggccccgagtccccatgtgtctccttgaattgatgaggatgctcctgggagggatgcgtgactatgtggtgttgcacccggggctgcaaacgtctccgtgcagcccccagagagaggcccatgggctcagaccaggctttgttgtcctgctctgagtatcctgagattaaactgaattgctgaatga

SEQ ID NO: 346313 - DNA, 3259 bp, Homo sapiens
cagagagagacacaggaacaagaacagcaaagggtagagcagacctgcgccaggggcgcacaacggccgtgtccacctcccggccccaagatggtgcttcccacaggcagccacgcgtagcagccagagacagctccagacatgtggctcttcttcgggatcactggattgctgacggcagccctctcaggtcatccatctccagccccacctgaccagctcaacaccagcagtgcagagagtgagctctgggagccaggggagcggcttccggtccgtctgacaaacgggagcagcagctgcagcgggacggtggaggtgcggctcgaggcgtcctgggagcccgcgtgcggggcgctctgggacagccgcgccgccgaggccgtgtgccgagcactgggctgcggcggggcggaggccgcctctcagctcgccccgccgacccctgagctgccgcccccgcctgcagccgggaacaccagcgtagcagctaatgccactctggccggggcgcccgccctcctgtgcagcggcgccgagtggcggctctgcgaggtggtggagcacgcgtgccgcagcgacgggaggcgggcccgtgtcacctgtgcagagaaccgcgcgctgcgcctggtggacggtggcggcgcctgcgccggccgcgtggagatgctggagcatggcgagtggggatcagtgtgcgatgacacttgggacctggaggacgcccacgtggtgtgcaggcaactgggctgcggctgggcagtccaggccctgcccggcttgcacttcacgcccggccgcgggcctatccaccgggaccaggtgaactgctcgggggccgaagcttacctgtgggactgcccggggctgccaggacagcactactgcggccacaaagaggacgcgggcgtggtgtgctcagagcaccagtcctggcgcctgacagggggcgctgaccgctgcgaggggcaggtggaggtacacttccgaggggtctggaacacagtgtgtgacagtgagtggtacccatcggaggccaaggtgctctgccagtccttgggctgtggaactgcggttgagaggcccaaggggctgccccactccttgtccggcaggatgtactactcatgcaatggggaggagctcaccctctccaactgctcctggcggttcaacaactccaacctctgcagccagtcgctggcagccagggtcctctgctcagcttcccggagtttgcacaatctgtccactcccgaagtccctgcaagtgttcagacagtcactatagaatcttctgtgacagtgaaaatagagaacaaggaatctcgggagctaatgctcctcatcccctccatcgttctgggaattctcctccttggctccctcatcttcatagccttcatcctcttgagaattaaaggaaaatatgccctccccgtaatggtgaaccaccagcacctacccaccaccatcccggcagggagcaatagctatcaaccggtccccatcaccatccccaaagaagttttcatgctgcccatccaggtccaggccccgccccctgaggactcagactctggctcggactcagactatgagcactatgacttcagcgcccagcctcctgtggccctgaccaccttctacaattcccagcggcatcgggtcacagatgaggaggtccagcaaagcaggttccagatgccacccttggaggaaggacttgaagagttgcatgcctcccacatcccaactgccaaccctggacactgcattacagacccgccatccctgggccctcagtatcacccgaggagcaacagtgagtcgagcacctcttcaggggaggattactgcaatagtcccaaaagcaagctgcctccatggaacccccaggtgttttcttcagagaggagttccttcctggagcagcccccaaacttggagctggccggcacccagccagccttttcagcagggcccccggctgatgacagctccagcacctcatccggggagtggtaccagaacttccagccaccaccccagcccccttcggaggagcagtttggctgtccagggtcccccagccctcagcctgactccaccgacaacgatgactacgatgacatcagcgcagcctaggccggggccagccgaggctcctggggtggctctgaccctctggcctcctgctctacctactccctttcccctttcccaccctcccagctcacctccccatggagctgagaggcctcccttggagagatggaaggaaacgttataccttgtacccctcggtctccatccatcaagccaaacctgctgccacagccctcccccggccccagatagcagccccagggaggatgctgcctccaagaggtgtgagccctctgtctcggggatgaacaagcagagtctgggctacctcttgacagctggtggaggggagttggggagctggactggatgactctggaggccccttccaaacctcaagtgtccggcgctttgattgcctgagtttctgacacttcagggcccagaggtcctgcgaggggcagaactggacccccatgccagtgctgctgcaggagggcccatatactagggtctgctgagctgttgtcactgatcggtgggcgctgggggggtagggtagcacaccagctgtcccaggctttgctccgggcggtaactgcacttgggcagggaatatagccttcctgggcacaactagctgacaatgacaggttgactgtgtacccccaaccaaggagctggggcccaaggccagtcctgccccagagacactccaagtccgccaggggcacagaccagttctgcagtgactgtccctggacaatgggtctttattctgagtttcctatggtttacaaagagggccccagcccagccccaccacagatcccagagataggggcccagtctccatgggggcaaggagcatagagatgttttccaggaaggggctcagaagctgcactaggccccgagtccccatgtgtctccttgaattgatgaggatgctcctgggagggatgcgtgactatgtggtgttgcacccggggctgcaaacgtctccgtgcagcccccagagagaggcccatgggctcagaccaggctttgttgtcctgctctgagtatcctgagattaaactgaattgctgaatgattttagttatggtctggcaactctaggggggaccctgtacctaatcctcccttt

SEQ ID NO: 346314 - DNA, 3004 bp, Homo sapiens
cagagagagacacaggaacaagaacagcaaagggtagagcagacctgcgccaggggcgcacaacggccgtgtccacctcccggccccaagatggtgcttcccacaggcagccacgcgtagcagccagagacagctccagacatgtggctcttcttcgggatcactggattgctgacggcagccctctcaggtcatccatctccagccccacctgaccagctcaacaccagcagtgcagagagtgagctctgggagccaggggagcggcttccggtccgtctgacaaacgggagcagcagctgcagcgggacggtggaggtgcggctcgaggcgtcctgggagcccgcgtgcggggcgctctgggacagccgcgccgccgaggccgtgtgccgagcactgggctgcggcggggcggaggccgcctctcagctcgccccgccgacccctgagctgccgcccccgcctgcagccgggaacaccagcgtagcagctaatgccactctggccggggcgcccgccctcctgtgcagcggcgccgagtggcggctctgcgaggtggtggagcacgcgtgccgcagcgacgggaggcgggcccgtgtcacctgtgcagagaaccgcgcgctgcgcctggtggacggtggcggcgcctgcgccggccgcgtggagatgctggagcatggcgagtggggatcagtgtgcgatgacacttgggacctggaggacgcccacgtggtgtgcaggcaactgggctgcggctgggcagtccaggccctgcccggcttgcacttcacgcccggccgcgggcctatccaccgggaccaggtgaactgctcgggggccgaagcttacctgtgggactgcccggggctgccaggacagcactactgcggccacaaagaggacgcgggcgtggtgtgctcagagcaccagtcctggcgcctgacagggggcgctgaccgctgcgaggggcaggtggaggtacacttccgaggggtctggaacacagtgtgtgacagtgagtggtacccatcggaggccaaggtgctctgccagtccttgggctgtggaactgcggttgagaggcccaaggggctgccccactccttgtccggcaggatgtactactcatgcaatggggaggagctcaccctctccaactgctcctggcggttcaacaactccaacctctgcagccagtcgctggcagccagggtcctctgctcagcttcccggagtttgcacaatctgtccactcccgaagtccctgcaagtgttcagacagtcactatagaatcttctgtgacagtgaaaatagagaacaaggaatctcgggagctaatgctcctcatcccctccatcgttctgggaattctcctccttggctccctcatcttcatagccttcatcctcttgagaattaaaggaaaatatgttttcatgctgcccatccaggtccaggccccgccccctgaggactcagactctggctcggactcagactatgagcactatgacttcagcgcccagcctcctgtggccctgaccaccttctacaattcccagcggcatcgggtcacagatgaggaggtccagcaaagcaggttccagatgccacccttggaggaaggacttgaagagttgcatgcctcccacatcccaactgccaaccctggacactgcattacagacccgccatccctgggccctcagtatcacccgaggagcaacagtgagtcgagcacctcttcaggggaggattactgcaatagtcccaaaagcaagctgcctccatggaacccccaggtgttttcttcagagaggagttccttcctggagcagcccccaaacttggagctggccggcacccagccagccttttcagggtcccccagccctcagcctgactccaccgacaacgatgactacgatgacatcagcgcagcctaggccggggccagccgaggctcctggggtggctctgaccctctggcctcctgctctacctactccctttcccctttcccaccctcccagctcacctccccatggagctgagaggcctcccttggagagatggaaggaaacgttataccttgtacccctcggtctccatccatcaagccaaacctgctgccacagccctcccccggccccagatagcagccccagggaggatgctgcctccaagaggtgtgagccctctgtctcggggatgaacaagcagagtctgggctacctcttgacagctggtggaggggagttggggagctggactggatgactctggaggccccttccaaacctcaagtgtccggcgctttgattgcctgagtttctgacacttcagggcccagaggtcctgcgaggggcagaactggacccccatgccagtgctgctgcaggagggcccatatactagggtctgctgagctgttgtcactgatcggtgggcgctgggggggtagggtagcacaccagctgtcccaggctttgctccgggcggtaactgcacttgggcagggaatatagccttcctgggcacaactagctgacaatgacaggttgactgtgtacccccaaccaaggagctggggcccaaggccagtcctgccccagagacactccaagtccgccaggggcacagaccagttctgcagtgactgtccctggacaatgggtctttattctgagtttcctatggtttacaaagagggccccagcccagccccaccacagatcccagagataggggcccagtctccatgggggcaaggagcatagagatgttttccaggaaggggctcagaagctgcactaggccccgagtccccatgtgtctccttgaattgatgaggatgctcctgggagggatgcgtgactatgtggtgttgcacccggggctgcaaacgtctccgtgcagcccccagagagaggcccatgggctcagaccaggctttgttgtcctgctctgagtatcctgagattaaactgaattgctgaatga

SEQ ID NO: 346315 - DNA, 444 bp, Homo sapiens
ttcctgaattggaattcttgtttccagaatcttctgtgacagtgaaaatagagaacaaggaatctcgggagctaatgctcctcatcccctccatcgttctgggaattctcctccttggctccctcatcttcatagccttcatcctcttgagaattaaaggaaaatatggtaagtgcaaggttctgggagccatggccatcccagggggatgtgagccttggcagaaccccagcagcagtggcgtggtccagcaatgaccacccggccctggccctggggagatccccaaggtggaaaggattttcccagcatgcccagcagtcatggacgcaccagcggggagaaccagactgtgcatgtgtgtgtgtgcctgtgtttgtgtgtgtgtttgtgcgcgcgcacatgtgcctgcaagtgttgggggaatgaggagggtggtgtgtc

SEQ ID NO: 346316 - DNA, 973 bp, Homo sapiens
tgtgcatgtgtgtgtgcgtgcatccatccattggttattgtagcccacttttgtggttagctgatactgcttatagctttcagatgctttgacatttgctgtttcctcacagaattttgtgtagatcttagcacactgagcactgttgtggttcaggacacagttggtttattggcttttagggtcagatatacagctggctgtttggactctaactgtcaaaatgctaaatattgggcgcctactcccagatccttctcctgggtgttcagaaagctgtaatgagcactggggacttaagaaaccatgtagacatgcagcacctctttcaaagccattgcccaaaaagcttgaggggatttctgtggctaaaacttgtattgactgctgaaataaggaaataatgaaatgcaaattctgttttactgaagcctagttttagttattttaggttatgactataaaacaacattacaaagggttgatagtcttgtacatttctgcagtgtggtctatggttgccatgtttctgtttatgaactactggggctaacgtttttggtgagaaccagaatgatctatactcacagtttgacttctgtcagttttttgtaacctctaggcattttattagttctttcacttttggtttcttttgttaggtaagagcatacaggctgggcgcagtggctcatgcctgtaatcccagcactttggaaggctaaggtgggtggatcacaaagtcaggagtttgagaccatcctgaccaacatggtgaaaccccatctctactaaaaatacaaaaattagccaggtgtggtggtgcatgcctgtaatcgcagctacaggaggctgaggcaggagaatcgcttgaacccgggaggcggaggttgcagtgagccgagatcacaccactgcactccagcctagacgacagagcgagactccttctcaaaaaaaaaaaaaaaaaaaa

SEQ ID NO: 346317 - DNA, 243 bp, Homo sapiens
gagattgcgccactgccctccagcctgggcgacagagcaagactctgtctccaaaaaaaaaaaattggaaatttaacaaaaatatataaatgtgaagagatatttctgtggttccttttttggaaggtaccccttcaattaagtttcatagttattctgcctctgacctagctttcttgattttttggattcttgaatgaggtaaagcagacttgggaagttgttagacacttaataagtaat

SEQ ID NO: 346318 - DNA, 233 bp, Homo sapiens
ggaatgagttgttgctgttggtagctcacttttccctcctgaaatttttagtgaatttctaagatgaaggaataagcaagagtaatcaatttaaaatctaccaattgagtcctctttggtgattgtcaaccactgaagtggcatgtgaggaaactgatgggtcctgctttgtctcaccaccagtcatttaaatagcgaaagtaccattgaggtgaatagaaagtgcatagtta

SEQ ID NO: 346319 - DNA, 302 bp, Homo sapiens
agttgtcatgttttccttagtctccttcaatttccacacactgaacatgacattttaccctttactagttcagtatatcccaaaaataaggataagaaacaagttatcacaccaaaaaaattaaaaacaattctctatattgtctacttcctagtcctttttgttcttaaggtatcatttatggctattttttccatcaaggttgcaatcaaatttcatacattgcatttagttattgattctctttagttagctttattctagaactgcactatgcagtatggtagcactagtccacctgg

SEQ ID NO: 346320 - DNA, 2233 bp, Homo sapiens
cgcgtcctggcaggaccgggcggcggcggcggcggggccggcggcggccagggacccgggcttaggctcggccaggccggctgaggggcgcgggcggccagcgggcggcggacgccgtcatgaacgcggcggtggtgaggcggacgcaggaggcgctggggaaagtgattcggaggccgccgctgaccgagaagctgctgagcaagcccccgttccgctacctgcacgacatcatcacggaggtgattagaatgactggtttcatgaagggcctctacacagacgccgagatgaagtctgataatgtgaaggataaagatgcaaaaattagcttcctacaaaaggccatagacgtggttgtaatggtgtcgggagagccactgttggccaaaccagcccgaatcgtggcggggcatgagcctgaaagaacaaacgagctgctccagataattggaaaatgctgtctcaacaagctctctagtgacgatgcggtgcggagggttttagctggagagaagggagaagtgaaaggccgggcctcactgacctcaagatctcaggaattggataataagaatgtgcgagaagaagagtccagagttcacaaaaatacagaggatagaggagacgctgaaataaaagagagaagtacaagcagagatcgaaaacagaaggaagaattgaaagaagaccgcaagccaagagaaaaggacaaggacaaggagaaggccaaggagaatggcggaaacagacacagagaaggggagagagagagagccaaagcccgggccaggccagacaacgagcgacagaaagacagaggcaacagggagcgggacagagactccgagcgcaagaaggagacagagagaaagagtgagggggggaaagagaaggagagactgagagacagggaccgagagcgcgaccgggacaaagggaaggacagggacagacggagagtgaaaaacggggagcactcctgggacctggacagggagaagaacagagagcatgacaaacctgagaaaaagtcagcaagctcaggggagatgtctaaaaagttatcagatggaacttttaaagactccaaggctgaaacagagactgagatttccactagagcttccaagtcattgacaacaaaaacatcaaaacggcgatccaaaaattcagtggaaggtgactccaccagtgatgcagaaggagatgctggacctgctggccaagataagtctgaggtgccagagactccagaaattcctaatgagctttcatccaacatcagaagaattcctcggcctgggagtgcaagaccagcccctccccgggtcaaacggcaagacagcatggaggcgctacaaatggataggtcagggagtggtaaaaccgtttcaaatgtgattacagagtcacacaattctgacaatgaagaggatgatcaatttgtggtggaagctgcccctcagctctctgaaatgtcagaaattgaaatggtaacagcagtggaactagaagaagaggagaagcatggtggacttgtgaaaaaaattttggagacgaagaaagattatgagaaattgcagcagtcacccaaacctggggagaaggagcgatctctctttgagtcggcatggaagaaggagaaggacatcgtttccaaggagatagagaagctccgcacgtccatccagaccctgtgcaagagcgcacttcccctggggaagatcatggactacatccaggaagacgtggatgccatgcagaatgagctgcagatgtggcacagcgagaacaggcagcacgccgaggccctgcagcaggagcagaggatcacagactgtgccgtggagcccttaaaggctgagctcgcggagctggagcagctgatcaaagaccagcaagacaagatctgtgctgtgaaggccaacatcctcaagaatgaagaaaaaatccagaaaatggtatatagtatcaatttgacttcgagaaggtgaacactcaaaagtttcagagatgaaaagtcacctcagtttaaaagcaaaaaggaagatagaaaatcattactcttttaagttccagtttgctaagaaaatgaacagtttacaatgttattatccagctaattttcagagctttaaaactgtaagcatgttaagtgtattaaaaaaaccatgttttcttacctccttccagatggaatactggctagttataaatagcgcttccaaac

SEQ ID NO: 346321 - DNA, 2261 bp, Homo sapiens
cgcgtcctggcaggaccgggcggcggcggcggcggggccggcggcggccagggacccgggcttaggctcggccaggccggctgaggggcgcgggcggccagcgggcggcggacgccgtcatgaacgcggcggtggtgaggcggacgcaggaggcgctggggaaagtgattcggaggccgccgctgaccgagaagctgctgagcaagcccccgttccgctacctgcacgacatcatcacggaggtgggcgccggggaccgggcccggccaggtgattagaatgactggtttcatgaagggcctctacacagacgccgagatgaagtctgataatgtgaaggataaagatgcaaaaattagcttcctacaaaaggccatagacgtggttgtaatggtgtcgggagagccactgttggccaaaccagcccgaatcgtggcggggcatgagcctgaaagaacaaacgagctgctccagataattggaaaatgctgtctcaacaagctctctagtgacgatgcggtgcggagggttttagctggagagaagggagaagtgaaaggccgggcctcactgacctcaagatctcaggaattggataataagaatgtgcgagaagaagagtccagagttcacaaaaatacagaggatagaggagacgctgaaataaaagagagaagtacaagcagagatcgaaaacagaaggaagaattgaaagaagaccgcaagccaagagaaaaggacaaggacaaggagaaggccaaggagaatggcggaaacagacacagagaaggggagagagagagagccaaagcccgggccaggccagacaacgagcgacagaaagacagaggcaacagggagcgggacagagactccgagcgcaagaaggagacagagagaaagagtgagggggggaaagagaaggagagactgagagacagggaccgagagcgcgaccgggacaaagggaaggacagggacagacggagagtgaaaaacggggagcactcctgggacctggacagggagaagaacagagagcatgacaaacctgagaaaaagtcagcaagctcaggggagatgtctaaaaagttatcagatggaacttttaaagactccaaggctgaaacagagactgagatttccactagagcttccaagtcattgacaacaaaaacatcaaaacggcgatccaaaaattcagtggaaggtgactccaccagtgatgcagaaggagatgctggacctgctggccaagataagtctgaggtgccagagactccagaaattcctaatgagctttcatccaacatcagaagaattcctcggcctgggagtgcaagaccagcccctccccgggtcaaacggcaagacagcatggaggcgctacaaatggataggtcagggagtggtaaaaccgtttcaaatgtgattacagagtcacacaattctgacaatgaagaggatgatcaatttgtggtggaagctgcccctcagctctctgaaatgtcagaaattgaaatggtaacagcagtggaactagaagaagaggagaagcatggtggacttgtgaaaaaaattttggagacgaagaaagattatgagaaattgcagcagtcacccaaacctggggagaaggagcgatctctctttgagtcggcatggaagaaggagaaggacatcgtttccaaggagatagagaagctccgcacgtccatccagaccctgtgcaagagcgcacttcccctggggaagatcatggactacatccaggaagacgtggatgccatgcagaatgagctgcagatgtggcacagcgagaacaggcagcacgccgaggccctgcagcaggagcagaggatcacagactgtgccgtggagcccttaaaggctgagctcgcggagctggagcagctgatcaaagaccagcaagacaagatctgtgctgtgaaggccaacatcctcaagaatgaagaaaaaatccagaaaatggtatatagtatcaatttgacttcgagaaggtgaacactcaaaagtttcagagatgaaaagtcacctcagtttaaaagcaaaaaggaagatagaaaatcattactcttttaagttccagtttgctaagaaaatgaacagtttacaatgttattatccagctaattttcagagctttaaaactgtaagcatgttaagtgtattaaaaaaaccatgttttcttacctccttccagatggaatactggctagttataaatagcgcttccaaac

SEQ ID NO: 346322 - DNA, 171 bp, Homo sapiens
ctctctagtgacgatgcggtgcggagggttttagctggagagaagggagaagtgaaaggccgggcctcactgacctcaagatctcaggaattggataataagaatgtgcgagaagaagagtccagagttcacaaaaatacagaggtgaattccaagtcgcacatctttgaa

SEQ ID NO: 346323 - DNA, 375 bp, Homo sapiens
gcagggaaggagcggcccctccctggcagtgctgtgtcctctgatggcgtgcagcacttcagagttactctgttaggcagcatggctctccctttgcatgggagtgagtgtcccacaaccagcactgtctctgcctgcgcctttcctcccagccccatggccgtgtgctgagtgcaccggccctgttctgcctttggactgaggaggcgtgttcctcttcctatgtctccctgactgtaggagcgatctctctttgagtcggcatggaagaaggagaaggacatcgtttccaaggagatagagaagctccgcacgtccatccagaccctgtgcaagagcgcacttcccctggggaagatcatggactacatccag

SEQ ID NO: 346324 - DNA, 2340 bp, Homo sapiens
cgcgtcctggcaggaccgggcggcggcggcggcggggccggcggcggccagggacccgggcttaggctcggccaggccggctgaggggcgcgggcggccagcgggcggcggacgccgtcatgaacgcggcggtggtgaggcggacgcaggaggcgctggggaaagtgattcggaggccgccgctgaccgagaagctgctgagcaagcccccgttccgctacctgcacgacatcatcacggaggtgattagaatgactggtttcatgaagggcctctacacagacgccgagatgaagtctgataatgtgaaggataaagatgcaaaaattagcttcctacaaaaggccatagacgtggttgtaatggtgtcgggagagccactgttggccaaaccagcccgaatcgtggcggggcatgagcctgaaagaacaaacgagctgctccagataattggaaaatgctgtctcaacaagctctctagtgacgatgcggtgcggagggttttagctggagagaagggagaagtgaaaggccgggcctcactgacctcaagatctcaggaattggataataagaatgtgcgagaagaagagtccagagttcacaaaaatacagaggatagaggagacgctgaaataaaagagagaagtacaagcagagatcgaaaacagaaggaagaattgaaagaagaccgcaagccaagagaaaaggacaaggacaaggagaaggccaaggagaatggcggaaacagacacagagaaggggagagagagagagccaaagcccgggccaggccagacaacgagcgacagaaagacagaggcaacagggagcgggacagagactccgagcgcaagaaggagacagagagaaagagtgagggggggaaagagaaggagagactgagagacagggaccgagagcgcgaccgggacaaagggaaggacagggacagacggagagtgaaaaacggggagcactcctgggacctggacagggagaagaacagagagcatgacaaacctgagaaaaagtcagcaagctcaggggagatgtctaaaaagttatcagatggaacttttaaagactccaaggctgaaacagagactgagatttccactagagcttccaagtcattgacaacaaaaacatcaaaacggcgatccaaaaattcagtggaaggtgactccaccagtgatgcagaaggagatgctggacctgctggccaagataagtctgaggtgccagagactccagaaattcctaatgagctttcatccaacatcagaagaattcctcggcctgggagtgcaagaccagcccctccccgggtcaaacggcaagacagcatggaggcgctacaaatggataggtcagggagtggtaaaaccgtttcaaatgtgattacagagtcacacaattctgacaatgaagaggatgatcaatttgtggtggaagctgcccctcagctctctgaaatgtcagaaattgaaatggtaacagcagtggaactagaagaagaggagaagcatggtggacttgtgaaaaaaattttggagacgaagaaagattatgagaaattgcagcagtcacccaaacctggggagaaggagcgatctctctttgagtcggcatggaagaaggagaaggacatcgtttccaaggagatagagaagctccgcacgtccatccagaccctgtgcaagagcgcacttcccctggggaagatcatggactacatccaggaagacgtggatgccatgcagaatgagctgcagatgtggcacagcgagaacaggcagcacgccgaggccctgcagcaggagcagaggatcacagactgtgccgtggagcccttaaaggctgagctcgcggagctggagcagctgatcaaagaccagcaagacaagatctgtgctgtgaaggccaacatcctcaagaatgaagaaaaaatccagaaaatggtatatagtatcaatttgacttcgagaaggtgaacactcaaaagtttcagagatgaaaagtcacctcagtttaaaagcaaaaaggaagatagaaaatcattactcttttaagttccagtttgctaagaaaatgaacagtttacaatgttattatccagctaattttcagagctttaaaactgtaagcatgttaagtgtattaaaaaaaccatgttttcttacctccttccagatggaatactggctagttataaatagcgcttccaaacacctctgtgaaaagtttttttgaaagcctgttctttgtgtttctgctgtaacctgtttagttctgtaccagaactctctagcaggtaagtggtgtgggcataccaag

SEQ ID NO: 346325 - DNA, 735 bp, Homo sapiens
cgcgtcctggcaggaccgggcggcggcggcggcggggccggcggcggccagggacccgggcttaggctcggccaggccggctgaggggcgcgggcggccagcgggcggcggacgccgtcatgaacgcggcggtggtgaggcggacgcaggaggcgctggggaaagtgattcggaggccgccgctgaccgagaagctgctgagcaagcccccgttccgctacctgcacgacatcatcacggaggtgggcgccggggaccgggcccggccaggtgattagaatgactggtttcatgaagggcctctacacagacgccgagatgaagtctgataatgtgaaggataaagatgcaaaaattagcttcctacaaaaggccatagacgtggttgtaatggtgtcgggagagccactgttggccaaaccagcccgaatcgtggcggggcatgagcctgaaagaacaaacgagctgctccagataattggaaaatgctgtctcaacaagctctctagtgacgatgcggtgcggagggttttagctggagagaagggagaagtgaaaggccgggcctcactgacctcaagatctcaggaattggataataagaatgtgcgagaagaagagtccagagttcacaaaaatacagaggatagaggagacgctgaaataaaagagacggtggaagatacatctatcctatagaggaacgaggatcagaaagctggattttgaagcaag

SEQ ID NO: 346326 - DNA, 368 bp, Homo sapiens
ggtaatagaaaaaaaaggaatatgatacatggaaaagtgatcaaatctgaccctaggcttataaaacaaatagaagcaattatatgaataatacttgatgatttttacttgagaggaattgcatctcagatatgtcagcaatgggagaagagagaaagcagattcaatgaataaatgaagtgaggtcaaaacaagagaggcaactcaaaaacaccaggaacctatcttctttttttttttaaaggttctttttttcttttttttttttttttttattattctcatggcaacccggcctctcagcgtctcctctaaactcgccctgcgagcatgtaggctgggcccgggccgtcacaacacaaggccgg

SEQ ID NO: 346327 - DNA, 391 bp, Homo sapiens
ctcctgatataatgaacctagaagagcatggcatcatttctgcagtattcttgccaaaaatacataagccacatctaattccaaggaaacataagaaaaattcaaagcgaagaaacttctataaagtaaccagctttatgcatcagaaatgtcaaaatcaagagacagcaggaagtgttccaaattgaagtggaccaaagagacataacagtgaaatgcaaagcatgatcctgaattggatctaaacattattggaacaatgggtgaaactggcatttggtctctggtttaaatggtaaaattgtgttgatagtaaattattaattttgatggttgtactgtggttatgtgaaagagtgtccttggttttaggaaatacacactgacatat

SEQ ID NO: 346328 - DNA, 328 bp, Homo sapiens
ctcctgatataatgaacctagaagagcatggcatcatttctgcagtattcttgccaaaaatacataagccacatctaattccaaggaaacataagaaaaattcaaagcgaagaaacttctataaagtaaccagctttatgcatcagaaatgtcaaaatcaagagacagcaggaagtgttccaaattgaagtggaccaaagagacataacagtgaaatgcaaagcatgatcctgaattggatctaaacattattggaacaatgggtgaaactggcatttggtctctggtttaaatggtaaaattgtgttgatagtaaattattaatttt

SEQ ID NO: 346329 - DNA, 484 bp, Homo sapiens
tgatgctcccacattcctagatgtctgaggaaccctcagaaggaaatcatcgaggtctttcaccatgtggccatgccaattgtctcatcctgttcttcagcatctcccatcaagatctccagtggcctcacaaattacaaccagtctctaaaagctgaatgtcaacctgcccttcaaaggccctgtgtcccagtgccaaaaggcagtagtttaaagaaacagggaacagtcttgctggggcctacttctcgttggaaggagtgtacaaaatctgaccttgccagtgggtggcctctatccagccctcaaggcatcctccaggcagttctcttgtggagcactagtcagtggctctggaggcaggattcccagtggtgcagccacaaagcttcacctgggcctggcccctgaggacaatattaaaggatctgtgttgggagcggcacatgcgttgggagcggcacatgcgttgagagcggcacat

SEQ ID NO: 346330 - DNA, 821 bp, Homo sapiens
ggttgctggctttttcaggagctgctcgctcgcagccagagacgctgctttttttttccgggttcggagccgttccggatgctttaggctgccggatgtctgatctccggataactgaggcgtttctgtacatggattatctgtgttttagagcactttgctgcaagggaccaccacctgcacgaccagaatatgacctggtttgcataggcctcacaggttctggcaaaaccagtctgttgtccaaactctgcagtgaaagccccgataacgtcgtgtcgaccacaggttttagtattaaagcagtgccattccagaatgccatcttgaatgtaaaagaacttggaggggctgataacatccggaaatactggagccgctactaccaaggatctcaaggggtaatatttgtattagacagtgcctcttcagaggatgatttagaagctgctagaaatgagctgcactcagctcttcagcatccacagttatgcactttaccctttttaatattggccaatcatcaagacaagccagcagctcgctcagtacaagagagatgcagtttcaccgtgttgcccaggatggtctcaaactcctgggctcaagccattctacctggcgtcaagcctttcccaagacgttacaagggtgcccgtacaccctgagccccgggcctaatttcattatatcatcgaacaattacgaaaattttcacaggaaacaaacgggggttatcacccagagagtatggaccacacctgggacatcgagataccgatagcacccgtgcgaattctgggcccaacataggctttcgc

SEQ ID NO: 346331 - DNA, 2769 bp, Homo sapiens
ggttgctggctttttcaggagctgctcgctcgcagccagagacgctgctttttttttccgggttcggagccgttccggatgctttaggctgccggatgtctgatctccggataactgaggcgtttctgtacatggattatctgtgttttagagcactttgctgcaagggaccaccacctgcacgaccagaatatgacctggtttgcataggcctcacaggttctggcaaaaccagtctgttgtccaaactctgcagtgaaagccccgataacgtcgtgtcgaccacaggttttagtattaaagcagtgccattccagaatgccatcttgaatgtaaaagaacttggaggggctgataacatccggaaatactggagccgctactaccaaggatctcaaggggtaatatttgtattagacagtgcctcttcagaggatgatttagaagctgctagaaatgagctgcactcagctcttcagcatccacagttatgcactttaccctttttaatattggccaatcatcaagacaagccagcagctcgctcagtacaagagatcaaaaaatattttgaacttgaaccacttgcacgtggaaaacgctggattctacagccctgctcactggatgacatggatgcactgaaagacagcttctctcagctgattaatttgttagaagaaaaagaccatgaagctgtaagaatgtgaaatctggcaaagaaaacaggctcccaaaaggccttgaacctatcatgttagtttctcattttaattttattttggtatcaagactatattggcttcagtatctattttcctctggtcatttcagactctcatctctctattaaagtgaatattctgtagatcagatgaattatcatcggcattaacgtcaagtacacactactgagagagaatttattctctgtttaccactaattatcttccccgcatgtctcttccttctgttgttctaagcatctcttctatactctgtgctgaaacggatggaattcatggcttatggaaatcaaatcccttttgaaggactcagaaagactcacaagaccttgatcattttctctgggtttgggagtggagtattatgtgactgggactccacaaaatatttatattattttcaagacctattgggggttttgttttattttatctaatttttttttttttttggtatactgagcttatagactatgagagaaaagtgagcaccaaaaacttcattaatcaccttatcaggaaggaatatcctgccatagtaaaattggctctgaagagcttagaggcaagttacacaatgttttcttgattacatctgaagtctcttctcttttaagagcaaagacattgtttcagtttctgagagtggttagaggaaatttaggtacaatgcatgcatcacagactgtatttgattgattcgagtcttcaaatattgtttaatggaatgatgagcctgcataaagtgaagctgcaatgtaacataggtatctttttctaaaaacttcaagtgtttgattaaaatagagaaaataatttttaaaataatagataaaaattttaaaaacagccagaaaaagtataatttatactggttagggtttaagatggcatggatttgacaaagataacaaagacagaatcatctatatattcattcattacgtgttactgtagtttattggaatctgttaatgccttcctctagtagttaaaggtttatcagtatttctattataaacctctattttcaggggtttcaatgtgcccttaaaattgtgctggggctgcagcaaataaataatattgggactcatattcagtctttggaactagttttttttccatttaatttaaatgacaaaattgcatagggataaatgtacagttttactaaggtttagcacctttgatcttttctaaatcaggaaaaaaatctatgcatattgaggttcacagatgaaatattctttggcatactttgtagactttgaccacttaaaatactaagtggccaaatgataaaaaaaactgctccctgcacatgagtgtaaaaacatgtttgtaattttaagtaaaatggactgatacccaaataccacagactcacactatattacagaatgatgtaatacctggtaattctccagaagatagacttcagacccttaatgccatttaaatatagtttttgtggtttaatcttatgagtagattgtaatgaaatcattacctttgaaacatcaaacacttctttaagctttttttttttaatgtcatgaatcaggaaggatacatagtgattcgtatacaattttgtctgcagcattcttgaatatttttaacactgtgtaatccctgagcagcacaaaacttttattccgatgaccagttacacaattcctgtttttattttgtcctgttgtgctcatcttctatgaaaaataaatgattattaggccttgctttccctgcaagttcattaaatgtagaatgttgtctttttaagacaccgtggctgagtgctcctaagccatctgttaaatgacttcccgtggtctgcgtgtgtgtgttcatgtgtgcgccagtgatgggcctctcctcaaacccacgactgtctgcagcgtctcagccgtcagaatgaaaacattatcaatcagtacccaacaacagctgtttttgacaagtttctgtctgacgcctaatgctttacaactgtcaataaggctccctctttgtctag

SEQ ID NO: 346332 - DNA, 2759 bp, Homo sapiens
gtgcagggcaggggtggcatgtcgcctctcggatctcggcgtgcccgatggccccctgccttgaggagcagcctttttgctttctttctttgggataggatgcctctggggttctttctcccgcagccggctgtgttttagagcactttgctgcaagggaccaccacctgcacgaccagaatatgacctggtttgcataggcctcacaggttctggcaaaaccagtctgttgtccaaactctgcagtgaaagccccgataacgtcgtgtcgaccacaggttttagtattaaagcagtgccattccagaatgccatcttgaatgtaaaagaacttggaggggctgataacatccggaaatactggagccgctactaccaaggatctcaaggggtaatatttgtattagacagtgcctcttcagaggatgatttagaagctgctagaaatgagctgcactcagctcttcagcatccacagttatgcactttaccctttttaatattggccaatcatcaagacaagccagcagctcgctcagtacaagagatcaaaaaatattttgaacttgaaccacttgcacgtggaaaacgctggattctacagccctgctcactggatgacatggatgcactgaaagacagcttctctcagctgattaatttgttagaagaaaaagaccatgaagctgtaagaatgtgaaatctggcaaagaaaacaggctcccaaaaggccttgaacctatcatgttagtttctcattttaattttattttggtatcaagactatattggcttcagtatctattttcctctggtcatttcagactctcatctctctattaaagtgaatattctgtagatcagatgaattatcatcggcattaacgtcaagtacacactactgagagagaatttattctctgtttaccactaattatcttccccgcatgtctcttccttctgttgttctaagcatctcttctatactctgtgctgaaacggatggaattcatggcttatggaaatcaaatcccttttgaaggactcagaaagactcacaagaccttgatcattttctctgggtttgggagtggagtattatgtgactgggactccacaaaatatttatattattttcaagacctattgggggttttgttttattttatctaatttttttttttttttggtatactgagcttatagactatgagagaaaagtgagcaccaaaaacttcattaatcaccttatcaggaaggaatatcctgccatagtaaaattggctctgaagagcttagaggcaagttacacaatgttttcttgattacatctgaagtctcttctcttttaagagcaaagacattgtttcagtttctgagagtggttagaggaaatttaggtacaatgcatgcatcacagactgtatttgattgattcgagtcttcaaatattgtttaatggaatgatgagcctgcataaagtgaagctgcaatgtaacataggtatctttttctaaaaacttcaagtgtttgattaaaatagagaaaataatttttaaaataatagataaaaattttaaaaacagccagaaaaagtataatttatactggttagggtttaagatggcatggatttgacaaagataacaaagacagaatcatctatatattcattcattacgtgttactgtagtttattggaatctgttaatgccttcctctagtagttaaaggtttatcagtatttctattataaacctctattttcaggggtttcaatgtgcccttaaaattgtgctggggctgcagcaaataaataatattgggactcatattcagtctttggaactagttttttttccatttaatttaaatgacaaaattgcatagggataaatgtacagttttactaaggtttagcacctttgatcttttctaaatcaggaaaaaaatctatgcatattgaggttcacagatgaaatattctttggcatactttgtagactttgaccacttaaaatactaagtggccaaatgataaaaaaaactgctccctgcacatgagtgtaaaaacatgtttgtaattttaagtaaaatggactgatacccaaataccacagactcacactatattacagaatgatgtaatacctggtaattctccagaagatagacttcagacccttaatgccatttaaatatagtttttgtggtttaatcttatgagtagattgtaatgaaatcattacctttgaaacatcaaacacttctttaagctttttttttttaatgtcatgaatcaggaaggatacatagtgattcgtatacaattttgtctgcagcattcttgaatatttttaacactgtgtaatccctgagcagcacaaaacttttattccgatgaccagttacacaattcctgtttttattttgtcctgttgtgctcatcttctatgaaaaataaatgattattaggccttgctttccctgcaagttcattaaatgtagaatgttgtctttttaagacaccgtggctgagtgctcctaagccatctgttaaatgacttcccgtggtctgcgtgtgtgtgttcatgtgtgcgccagtgatgggcctctcctcaaacccacgactgtctgcagcgtctcagccgtcagaatgaaaacattatcaatcagtacccaacaacagctgtttttgacaagtttctgtctgacgcctaatgctttacaactgtcaataaggctccctctttgtctag

SEQ ID NO: 346333 - DNA, 672 bp, Homo sapiens
ctcagcctcccgcatgccaccacactcagcaaattttttgtattttttgtagagatgaagtttcaccgtgttgcccaggatggtctcaaactcctgggctcaaacgatcctcctgcctcggcctcccaaagtgctgggattacaggtgcgaacaactgtgcccggccaggtcatttctttatttcatcccttttctcatatattccaagtctcttgctcaagctgtttaaccactcccttgtggactttttctaaagccccatatctaggctgtttgtctacagaattgatgatacttttaaactccttttagttaaaacccaagtatttgttcaaaccctgttgtgtttttggctctgtgccagacatggtggtgtttaccatgtagttctaaggccctgtaagatccctagaaggatcttaattcattttctatccttcacttgctgtgatttttatctcccatgcccatgtaacatggggtccagagttgagatgagtgtctttcttgttccttactgccacttccagaccatttatcttgcaattaaaaattccatttccttttaattttaagccattgcactattctacctactactgttctggacacattttgtacagcttcctgttgattctgaccatcattcatagaagcttttgagcgctggt

SEQ ID NO: 346334 - DNA, 2487 bp, Homo sapiens
ggttgctggctttttcaggagctgctcgctcgcagccagagacgctgctttttttttccgggttcggagccgttccggatgctttaggctgccggatgtctgatctccggataactgaggcgtttctgtacatggattatctgtgttttagagcactttgctgcaagggaccaccacctgcacgaccagaatatgacctggtttgcataggcctcacaggttctggcaaaaccagtctgttgtccaaactctgcagtgaaagccccgataacgtcgtgtcgaccacaggttttagtattaaagcagtgccattccagaatgccatcttgaatgtaaaagaacttggaggggctgataacatccggaaatactggagccgctactaccaaggatctcaaggggtaatatttgtattagacagtgcctcttcagaggatgatttagaagctgctagaaatgagctgcactcagctcttcagcatccacagttatgcactttaccctttttaatattggccaatcatcaagacaagccagcagctcgctcagtacaagagatcaaaaaatattttgaacttgaaccacttgcacgtggaaaacgctggattctacagccctgctcactggatgacatggatgcactgaaagacagcttctctcagctgattaatttgttagaagaaaaagaccatgaagctgtaagaatgtgaaatctggcaaagaaaacaggctcccaaaaggccttgaacctatcatgttagtttctcattttaattttattttggtatcaagactatattggcttcagtatctattttcctctggtcatttcagactctcatctctctattaaagtgaatattctgtagatcagatgaattatcatcggcattaacgtcaagtacacactactgagagagaatttattctctgtttaccactaattatcttccccgcatgtctcttccttctgttgttctaagcatctcttctatactctgtgctgaaacggatggaattcatggcttatggaaatcaaatcccttttgaaggactcagaaagactcacaagaccttgatcattttctctgggtttgggagtggagtattatgtgactgggactccacaaaatatttatattattttcaagacctattgggggttttgttttattttatctaatttttttttttttttggtatactgagcttatagactatgagagaaaagtgagcaccaaaaacttcattaatcaccttatcaggaaggaatatcctgccatagtaaaattggctctgaagagcttagaggcaagttacacaatgttttcttgattacatctgaagtctcttctcttttaagagcaaagacattgtttcagtttctgagagtggttagaggaaatttaggtacaatgcatgcatcacagactgtatttgattgattcgagtcttcaaatattgtttaatggaatgatgagcctgcataaagtgaagctgcaatgtaacataggtatctttttctaaaaacttcaagtgtttgattaaaatagagaaaataatttttaaaataatagataaaaattttaaaaacagccagaaaaagtataatttatactggttagggtttaagatggcatggatttgacaaagataacaaagacagaatcatctatatattcattcattacgtgttactgtagtttattggaatctgttaatgccttcctctagtagttaaaggtttatcagtatttctattataaacctctattttcaggggtttcaatgtgcccttaaaattgtgctggggctgcagcaaataaataatattgggactcatattcagtctttggaactagttttttttccatttaatttaaatgacaaaattgcatagggataaatgtacagttttactaaggtttagcacctttgatcttttctaaatcaggaaaaaaatctatgcatattgaggttcacagatgaaatattctttggcatactttgtagactttgaccacttaaaatactaagtggccaaatgataaaaaaaactgctccctgcacatgagtgtaaaaacatgtttgtaattttaagtaaaatggactgatacccaaataccacagactcacactatattacagaatgatgtaatacctggtaattctccagaagatagacttcagacccttaatgccatttaaatatagtttttgtggtttaatcttatgagtagattgtaatgaaatcattacctttgaaacatcaaacacttctttaagctttttttttttaatgtcatgaatcaggaaggatacatagtgattcgtatacaattttgtctgcagcattcttgaatatttttaacactgtgtaatccctgagcagcacaaaacttttattccgatgaccagttacacaattcctgtttttattttgtcctgttgtgctcatcttctatgaaaaataaatgattattaggc

SEQ ID NO: 346335 - DNA, 537 bp, Homo sapiens
ggttgctggctttttcaggagctgctcgctcgcagccagagacgctgctttttttttccgggttcggagccgttccggatgctttaggctgccggatgtctgatctccggataactgaggcgtttctgtacatggattatctgtgttttagagcactttgctgcaagggaccaccacctgcacgaccagaatatgacctggtttgcataggcctcacaggttctggcaaaaccagtctgttgtccaaactctgcagtgaaagccccgataacgtcgtgtcgaccacaggttttagtattaaagcagtgccattccagaatgccatcttgaatgtaaaagaacttggaggtataacatttcaaatcatttctatgtctgcccttaacttttatgaatttggtaataatgtattatatgtaattcaaacataatgataacttattttagtaggtggttcatttttatcttgataatatatttcctagaaatatttccttctcttcgtatgttttaaaaattgttgaagagttctaagta

SEQ ID NO: 346336 - DNA, 1257 bp, Homo sapiens
tgcaattttcagtaagagccatgtctactaacctttgtttctagtattcactgaaaacattcatatctaaacacagtttttggtgagtaaaatattttctatatagttttgttcaaataagagattatgtattaacatacttgttcatatttctctttttagagaaaatctcttcatgaaaacaaattgaaaagactacaagagaaagtagaagtcttggaggcaaagaaagaagaattggaaacagaaaatcaggtcttaaatagacaaaatgttccttttgaagactatacaaggcttcaaaaaagactaaaagatatacagagaagacataatgaatttcgaagtctaattttggttcctaacatgcctccaacagcatctatcaatcctgttagctttcagtcatcagccatggttccaagcatggaactaccatttcctcctcatatgcaggaggaacaacatcaaagggaactctctctacttcgcaaaagactagaagaactggaaacaacacaaagaaaacaactagaggaacttggatcttccggagaatgatgttcttggagaacaggcagatcaaaagaggtgaagttggtgactcagtaaaacttgacattttaacctgtggcatttagatactttttactgtttgccaaaacacttgaatgtgcctcaagaaaaggtacctactacatgctgtattgtatgactgtcaggattttaagattatacaagtgaagcattaaaagagaaattctcagagatatttagaatatttgacaatggtttgagaatgtaaaacaaaaaggaactagttagagtcaagttttaaaatttttactttgttgaatttttttttttggcattttgagtgaaatataactatcattaattctctcttcatctttgagatgcttggccataacagggtccatacacatcttctggtttactatatacaaaaactgtagttgaaaaaagatgacaatttaaaagtcagcctaaagaatgtaaaggtatctatatacaaaaggctaccttttctaaaatctgtgtgcacataattaaagagcttaatttttttttaatcgtgtgtttaattttacatcaaccatatagcatatatttagcaatatgacagtctactgattttggctttgttagaatagagaataagtgcaaataattaaatcctatggctgtattaacaagggggccattgattataaaacttgaactcaggtcctttta

SEQ ID NO: 346337 - DNA, 1029 bp, Homo sapiens
agcgggacagagcccgctcctccaggctggtggggcggtgcgatgaggcggcttctgggccatacgtcagcacgtggggtggcgccgcacccctgaggatcccggtccacgcggaggagtggggcttttcaccgccgccgccgccgccctcggacctctcccgggatacttcacatttccctagggacgggagcccgaggggtccgttcggccctcttcctctcgctgggccgacaccccgctgtaggaccgtaacccttagtcccaatgcctccgtaagcggagttgagtgggtgcctgtggttggagctgtggaggtgtccccggtggcgagcgcggccagaactgcggtcacttaagttttccgtgtgcgggttgcaaggagcgtgcgtgcgtctggtataatttggcttcctgagattctgccttagcaagaaaggagtgggaaatacccttggaaagaaaactaaaacagtaagaaagccaaaacttatttttacatggttgtcagcacatttaccgatatggacacttttcccaataattttcctcctggtggagacagtggattgacaggttctcagtcggagttccagaaaatgttaattgatgaaaggttacgatgtgagcatcataaagctaattatcagacactgaaggctgaacacacaaggtaaattacttaaatctagaagtggggtttggttttaaaaagttattggcattatcttggctgaatgtttgctatagaatatagtataattttgttattttgcaatgtatacatttaaaacttttttaatatagtaaaatttttactttaaaattactttgttccaaactaagtatgatatcaagtgggttatgaatttataagccttattttgaaagtagcaggacgtataagattaaatgtatccagatggctaaatgtgttccccatctcccaccaaagtaaaattgcattccaaaactacagtgttaataattaaatgaaactctgtaaataaaagatacttgtgggtttaa

SEQ ID NO: 346338 - DNA, 3138 bp, Homo sapiens
agcgggacagagcccgctcctccaggctggtggggcggtgcgatgaggcggcttctgggccatacgtcagcacgtggggtggcgccgcacccctgaggatcccggtccacgcggaggagtggggcttttcaccgccgccgccgccgccctcggacctctcccgggatacttcacatttccctagggacgggagcccgaggggtccgttcggccctcttcctctcgctgggccgacaccccgctgtaggaccgtaacccttagtcccaatgcctccgtaagcggagttgagtgggtgcctgtggttggagctgtggaggtgtccccggtggcgagcgcggccagaactgcggtcacttaagttttccgtgtgcgggttgcaaggagcgtgcgtgcgtctggtataatttggcttcctgagattctgccttagcaagaaaggagtgggaaatacccttggaaagaaaactaaaacagtaagaaagccaaaacttatttttacatggttgtcagcacatttaccgatatggacacttttcccaataattttcctcctggtggagacagtggattgacaggttctcagtcggagttccagaaaatgttaattgatgaaaggttacgatgtgagcatcataaagctaattatcagacactgaaggctgaacacacaaggttgcagaatgaacatgtaaagttacaaaatgaactcaagcacctgtttaatgaaaagcaaactcagcaggaaaaacttcagctcctgcttgaagaactaagaggagaattagtagagaaaactaaagatttagaagaaatgaaactgcagatattaactccacaaaaattggaattgctaagagcccaaatacaacaagaattagaaactccaatgagagaacgttttaggaatctagatgaagaggtagaaaagtatagagctgtatataataagcttcgctatgaacatacatttctcaagtcagaatttgaacaccagaaggaagagtatgcacgtattttagatgaaggaaaaataaaatatgaatcagagattgcaagactggaggaagataaagaagaactacgtaaccagctgcttaatgttgatctcacaaaagacagcaaacgagtggaacaacttgctcgagaaaaagtctatttgtgtcaaaaattaaaaggtttagaggctgaagtagcggaattaaaggctgaaaaggagaattctgaggctcaggtggaaaatgcccaaagaatacaggtgcggcagttggctgagatgcaggctacagtcagatccctgggggctgaaaaacaatcagctaatttacgggcagaacgcttggaaaaagagctacaatcaagcagtgaacaaaatacctttttaattaataaattgcataaagctgaacgagaaataaatacattgtccagtaaagtaaaagaacttaaacattcaaacaaactggaaataacagacatcaaactggagacagcaagagctaagagtgagctagaaagagaaaggaataagattcaaagtgaactggatggattacagtcagacaatgaaattctcaaagcagctgttgaacatcacaaagtgctcttagtagaaaaggatcgtgaattaatacgtaaagtacaagctgccaaagaagaaggttatcaaaaacttgtggtattacaagatgaaaagttagaactcgagaacagattagcagatttggagaaaatgaaagtggaacatgatgtctggaggcaatctgaaaaggatcagtatgaagagaaattgcgggcttcacagatggcagaagagatcaccaggaaggagcttcagagtgttaggttaaaacttcagcaacaaattgtgactattgaaaatgcagagaaggaaaaaaatgaaaattctgacctaaaacagcaaatcagtagtttgcagatccaagtgacttcacttgcacagtcagagaatgacttgctgaattcaaaccaaatgctgaaggaaatggtggagagattaaaacaagaatgccgaaattttagaagccaagctgaaaaagcgcaactagaagctgaaaagacattggaagagaaacagatacagtggttggaagaaaagcataagcttcatgagcgtatcacagacagagaagaaaagtacaatcaagctaaggagaaactgcagcgagctgcaattgcccagaaaaagagaaaatctcttcatgaaaacaaattgaaaagactacaagagaaagtagaagtcttggaggcaaagaaagaagaattggaaacagaaaatcaggtcttaaatagacaaaatgttccttttgaagactatacaaggcttcaaaaaagactaaaagatatacagagaagacataatgaatttcgaagtctaattttggttcctaacatgcctccaacagcatctatcaatcctgttagctttcagtcatcagccatggttccaagcatggaactaccatttcctcctcatatgcaggaggaacaacatcaaagggaactctctctacttcgcaaaagactagaagaactggaaacaacacaaagaaaacaactagaggaacttggatcttccggagaatgatgttcttggagaacaggcagatcaaaagaggtgaagttggtgactcagtaaaacttgacattttaacctgtggcatttagatactttttactgtttgccaaaacacttgaatgtgcctcaagaaaaggtacctactacatgctgtattgtatgactgtcaggattttaagattatacaagtgaagcattaaaagagaaattctcagagatatttagaatatttgacaatggtttgagaatgtaaaacaaaaaggaactagttagagtcaagttttaaaatttttactttgttgaatttttttttttggcattttgagtgaaatataactatcattaattctctcttcatctttgagatgcttggccataacagggtccatacacatcttctggtttactatatacaaaaactgtagttgaaaaaagatgacaatttaaaagtcagcctaaagaatgtaaaggtatctatatacaaaaggctaccttttctaaaatctgtgtgcacataattaaagagcttaattttttttta

SEQ ID NO: 346339 - DNA, 2388 bp, Homo sapiens
agcgggacagagcccgctcctccaggctggtggggcggtgcgatgaggcggcttctgggccatacgtcagcacgtggggtggcgccgcacccctgaggatcccggtccacgcggaggagtggggcttttcaccgccgccgccgccgccctcggacctctcccgggatacttcacatttccctagggacgggagcccgaggggtccgttcggccctcttcctctcgctgggccgacaccccgctgtaggaccgtaacccttagtcccaatgcctccgtaagcggagttgagtgggtgcctgtggttggagctgtggaggtgtccccggtggcgagcgcggccagaactgcggtcacttaagttttccgtgtgcgggttgcaaggagcgtgcgtgcgtctggtataatttggcttcctgagattctgccttagcaagaaaggagtgggaaatacccttggaaagaaaactaaaacagtaagaaagccaaaacttatttttacatggttgtcagcacatttaccgatatggacacttttcccaataattttcctcctggtggagacagtggattgacaggttctcagtcggagttccagaaaatgttaattgatgaaaggttacgatgtgagcatcataaagctaattatcagacactgaaggctgaacacacaaggttgcagaatgaacatgtaaagttacaaaatgaactcaagcacctgtttaatgaaaagcaaactcagcaggaaaaacttcagctcctgcttgaagaactaagaggagaattagtagagaaaactaaagatttagaagaaatgaaactgcagatattaactccacaaaaattggaattgctaagagcccaaatacaacaagaattagaaactccaatgagagaacgttttaggaatctagatgaagaggtagaaaagtatagagctgtatataataagcttcgctatgaacatacatttctcaagtcagaatttgaacaccagaaggaagagtatgcacgtattttagatgaaggaaaaataaaatatgaatcagagattgcaagactggaggaagataaagaagaactacgtaaccagctgcttaatgttgatctcacaaaagacagcaaacgagtggaacaacttgctcgagaaaaagtctatttgtgtcaaaaattaaaaggtttagaggctgaagtagcggaattaaaggctgaaaaggagaattctgaggctcaggtggaaaatgcccaaagaatacaggtggagagattaaaacaagaatgccgaaattttagaagccaagctgaaaaagcgcaactagaagctgaaaagacattggaagagaaacagatacagtggttggaagaaaagcataagcttcatgagcgtatcacagacagagaagaaaagtacaatcaagctaaggagaaactgcagcgagctgcaattgcccagaaaaagagaaaatctcttcatgaaaacaaattgaaaagactacaagagaaagtagaagtcttggaggcaaagaaagaagaattggaaacagaaaatcaggtcttaaatagacaaaatgttccttttgaagactatacaaggcttcaaaaaagactaaaagatatacagagaagacataatgaatttcgaagtctaattttggttcctaacatgcctccaacagcatctatcaatcctgttagctttcagtcatcagccatggttccaagcatggaactaccatttcctcctcatatgcaggaggaacaacatcaaagggaactctctctacttcgcaaaagactagaagaactggaaacaacacaaagaaaacaactagaggaacttggatcttccggagaatgatgttcttggagaacaggcagatcaaaagaggtgaagttggtgactcagtaaaacttgacattttaacctgtggcatttagatactttttactgtttgccaaaacacttgaatgtgcctcaagaaaaggtacctactacatgctgtattgtatgactgtcaggattttaagattatacaagtgaagcattaaaagagaaattctcagagatatttagaatatttgacaatggtttgagaatgtaaaacaaaaaggaactagttagagtcaagttttaaaatttttactttgttgaatttttttttttggcattttgagtgaaatataactatcattaattctctcttcatctttgagatgcttggccataacagggtccatacacatcttctggtttactatatacaaaaactgtagttgaaaaaagatgacaatttaaaagtcagcctaaagaatgtaaaggtatctatatacaaaaggctaccttttctaaaatctgtgtgcacataattaaagagcttaattttttttta

SEQ ID NO: 346340 - DNA, 2613 bp, Homo sapiens
acctctagaatggaagttgcatgagaggaggaacctttacctgttttgttcattgttatattccaagttcctagaacagattttggtatacatccagagatcaacactttcctcatactatacactttatcataatgagaaccagtgaagaaataagattaattgaatggtaatttactttttggatatcttttcaggaatgtactacttctgtatgtaggatacttgttatgaagacctttccaaattcatttgtatttctgttaaatttattttttacttttagagtggctatcattataatgtaatttaaaattatatttgtaaaagtgactattggagtgagtacgaattttgtttataaatctatgataaatgcattctccctttaggaggtagaaaagtatagagctgtatataataagcttcgctatgaacatacatttctcaagtcagaatttgaacaccagaaggaagagtatgcacgtattttagatgaaggaaaaataaaatatgaatcagagattgcaagactggaggaagataaagaagaactacgtaaccagctgcttaatgttgatctcacaaaagacagcaaacgagtggaacaacttgctcgagaaaaagtctatttgtgtcaaaaattaaaaggtttagaggctgaagtagcggaattaaaggctgaaaaggagaattctgaggctcaggtggaaaatgcccaaagaatacaggtgcggcagttggctgagatgcaggctacagtcagatccctgggggctgaaaaacaatcagctaatttacgggcagaacgcttggaaaaagagctacaatcaagcagtgaacaaaatacctttttaattaataaattgcataaagctgaacgagaaataaatacattgtccagtaaagtaaaagaacttaaacattcaaacaaactggaaataacagacatcaaactggagacagcaagagctaagagtgagctagaaagagaaaggaataagattcaaagtgaactggatggattacagtcagacaatgaaattctcaaagcagctgttgaacatcacaaagtgctcttagtagaaaaggatcgtgaattaatacgtaaagtacaagctgccaaagaagaaggttatcaaaaacttgtggtattacaagatgaaaagttagaactcgagaacagattagcagatttggagaaaatgaaagtggaacatgatgtctggaggcaatctgaaaaggatcagtatgaagagaaattgcgggcttcacagatggcagaagagatcaccaggaaggagcttcagagtgttaggttaaaacttcagcaacaaattgtgactattgaaaatgcagagaaggaaaaaaatgaaaattctgacctaaaacagcaaatcagtagtttgcagatccaagtgacttcacttgcacagtcagagaatgacttgctgaattcaaaccaaatgctgaaggaaatggtggagagattaaaacaagaatgccgaaattttagaagccaagctgaaaaagcgcaactagaagctgaaaagacattggaagagaaacagatacagtggttggaagaaaagcataagcttcatgagcgtatcacagacagagaagaaaagtacaatcaagctaaggagaaactgcagcgagctgcaattgcccagaaaaagagaaaatctcttcatgaaaacaaattgaaaagactacaagagaaagtagaagtcttggaggcaaagaaagaagaattggaaacagaaaatcaggtcttaaatagacaaaatgttccttttgaagactatacaaggcttcaaaaaagactaaaagatatacagagaagacataatgaatttcgaagtctaattttggttcctaacatgcctccaacagcatctatcaatcctgttagctttcagtcatcagccatggttccaagcatggaactaccatttcctcctcatatgcaggaggaacaacatcaaagggaactctctctacttcgcaaaagactagaagaactggaaacaacacaaagaaaacaactagaggaacttggatcttccggagaatgatgttcttggagaacaggcagatcaaaagaggtgaagttggtgactcagtaaaacttgacattttaacctgtggcatttagatactttttactgtttgccaaaacacttgaatgtgcctcaagaaaaggtacctactacatgctgtattgtatgactgtcaggattttaagattatacaagtgaagcattaaaagagaaattctcagagatatttagaatatttgacaatggtttgagaatgtaaaacaaaaaggaactagttagagtcaagttttaaaatttttactttgttgaatttttttttttggcattttgagtgaaatataactatcattaattctctcttcatctttgagatgcttggccataacagggtccatacacatcttctggtttactatatacaaaaactgtagttgaaaaaagatgacaatttaaaagtcagcctaaagaatgtaaaggtatctatatacaaaaggctaccttttctaaaatctgtgtgcacataattaaagagcttaattttttttta

SEQ ID NO: 346341 - DNA, 1093 bp, Homo sapiens
tgcaattttcagtaagagccatgtctactaacctttgtttctagtattcactgaaaacattcatatctaaacacagtttttggtgagtaaaatattttctatatagttttgttcaaataagagattatgtattaacatacttgttcatatttctctttttagagaaaatctcttcatgaaaacaaattgaaaagactacaagagaaagtagaagtcttggaggcaaagaaagaagaattggaaacagaaaatcaggtcttaaatagacaaaatgttccttttgaagactatacaaggcttcaaaaaagactaaaagatatacagagaagacataatgaatttcgaagtctaattttggttcctaacatgcctccaacagcatctatcaatcctgttagctttcagtcatcagccatggttccaagcatggaactaccatttcctcctcatatgcaggaggaacaacatcaaagggaactctctctacttcgcaaaagactagaagaactggaaacaacacaaagaaaacaactagaggaacttggatcttccggagaatgatgttcttggagaacaggcagatcaaaagaggtgaagttggtgactcagtaaaacttgacattttaacctgtggcatttagatactttttactgtttgccaaaacacttgaatgtgcctcaagaaaaggtacctactacatgctgtattgtatgactgtcaggattttaagattatacaagtgaagcattaaaagagaaattctcagagatatttagaatatttgacaatggtttgagaatgtaaaacaaaaaggaactagttagagtcaagttttaaaatttttactttgttgaatttttttttttggcattttgagtgaaatataactatcattaattctctcttcatctttgagatgcttggccataacagggtccatacacatcttctggtttactatatacaaaaactgtagttgaaaaaagatgacaatttaaaagtcagcctaaagaatgtaaaggtatctatatacaaaaggctaccttttctaaaatctgtgtgcacataattaaagagcttaattttttttta

SEQ ID NO: 346342 - DNA, 261 bp, Homo sapiens
gctaagagtgagctagaaagagaaaggaataagattcaaagtgaactggatggtaatatgtgatttcccttgctgctgctgctgctgcttattttcagatatgaactcaaattattaaaatagttgaatctgaatttttatttccaaattttcaacttaatttagttttaattttggagtacatatgaaatgtttattatatgttgagtgttttgttcattgtaagatttaataactttaaaaaaatcagtcttatgtttt

SEQ ID NO: 346343 - DNA, 765 bp, Homo sapiens
gaagaaaatagctgaactaagggtcaatggaatgtgattttagttccagctaagatacttaaaatcttgtatgaccttaggcaagtaatctaacttctcagggtttgttattttcattagtactgcctatagtaagaatactaaaaaaatcatataaagtatgcagaatagctttaaaaatataagttgttatgatgttattttaagatatcatttatatgcattttactctagtcagaagacatactgcattaagatttgataccaggcttgattttcttaaaccaaatttatgaggacagatatttgtagtttgatggttattatacttcacatctggttatcaagtgtttgtcttgccattaactagatgtgagcccttaagttcgttaactgctctaatcctcagtttcctcatttataaaatggacagaagtataaaggtgacagaaatacctaactcaggatttttgtaaagaacacatagttttctaagtccagtgccttattcataggaagtgctcagtaatggtgggatttccaaacaagtggccatacaggagggcctgcagttggataattaagaatgtggtcagacaggtagtgagtttgcttatacttgtgataatatctatttaatcctaagaacttatttaacttccatgttttacatacattcttctgacaggacattggaagagaaacagatacagtggttggaagaaaagcataagcttcatgagcgtatcacagacagagaagaaa

SEQ ID NO: 346344 - DNA, 3191 bp, Homo sapiens
agcgggacagagcccgctcctccaggctggtggggcggtgcgatgaggcggcttctgggccatacgtcagcacgtggggtggcgccgcacccctgaggatcccggtccacgcggaggagtggggcttttcaccgccgccgccgccgccctcggacctctcccgggatacttcacatttccctagggacgggagcccgaggggtccgttcggccctcttcctctcgctgggccgacaccccgctgtaggaccgtaacccttagtcccaatgcctccgtaagcggagttgagtgggtgcctgtggttggagctgtggaggtgtccccggtggcgagcgcggccagaactgcggtcacttaagttttccgtgtgcgggttgcaaggagcgtgcgtgcgtctggtatagggaggacacctctggattgaggatcttatgacctactttagaggaaggtataatttggcttcctgagattctgccttagcaagaaaggagtgggaaatacccttggaaagaaaactaaaacagtaagaaagccaaaacttatttttacatggttgtcagcacatttaccgatatggacacttttcccaataattttcctcctggtggagacagtggattgacaggttctcagtcggagttccagaaaatgttaattgatgaaaggttacgatgtgagcatcataaagctaattatcagacactgaaggctgaacacacaaggttgcagaatgaacatgtaaagttacaaaatgaactcaagcacctgtttaatgaaaagcaaactcagcaggaaaaacttcagctcctgcttgaagaactaagaggagaattagtagagaaaactaaagatttagaagaaatgaaactgcagatattaactccacaaaaattggaattgctaagagcccaaatacaacaagaattagaaactccaatgagagaacgttttaggaatctagatgaagaggtagaaaagtatagagctgtatataataagcttcgctatgaacatacatttctcaagtcagaatttgaacaccagaaggaagagtatgcacgtattttagatgaaggaaaaataaaatatgaatcagagattgcaagactggaggaagataaagaagaactacgtaaccagctgcttaatgttgatctcacaaaagacagcaaacgagtggaacaacttgctcgagaaaaagtctatttgtgtcaaaaattaaaaggtttagaggctgaagtagcggaattaaaggctgaaaaggagaattctgaggctcaggtggaaaatgcccaaagaatacaggtgcggcagttggctgagatgcaggctacagtcagatccctgggggctgaaaaacaatcagctaatttacgggcagaacgcttggaaaaagagctacaatcaagcagtgaacaaaatacctttttaattaataaattgcataaagctgaacgagaaataaatacattgtccagtaaagtaaaagaacttaaacattcaaacaaactggaaataacagacatcaaactggagacagcaagagctaagagtgagctagaaagagaaaggaataagattcaaagtgaactggatggattacagtcagacaatgaaattctcaaagcagctgttgaacatcacaaagtgctcttagtagaaaaggatcgtgaattaatacgtaaagtacaagctgccaaagaagaaggttatcaaaaacttgtggtattacaagatgaaaagttagaactcgagaacagattagcagatttggagaaaatgaaagtggaacatgatgtctggaggcaatctgaaaaggatcagtatgaagagaaattgcgggcttcacagatggcagaagagatcaccaggaaggagcttcagagtgttaggttaaaacttcagcaacaaattgtgactattgaaaatgcagagaaggaaaaaaatgaaaattctgacctaaaacagcaaatcagtagtttgcagatccaagtgacttcacttgcacagtcagagaatgacttgctgaattcaaaccaaatgctgaaggaaatggtggagagattaaaacaagaatgccgaaattttagaagccaagctgaaaaagcgcaactagaagctgaaaagacattggaagagaaacagatacagtggttggaagaaaagcataagcttcatgagcgtatcacagacagagaagaaaagtacaatcaagctaaggagaaactgcagcgagctgcaattgcccagaaaaagagaaaatctcttcatgaaaacaaattgaaaagactacaagagaaagtagaagtcttggaggcaaagaaagaagaattggaaacagaaaatcaggtcttaaatagacaaaatgttccttttgaagactatacaaggcttcaaaaaagactaaaagatatacagagaagacataatgaatttcgaagtctaattttggttcctaacatgcctccaacagcatctatcaatcctgttagctttcagtcatcagccatggttccaagcatggaactaccatttcctcctcatatgcaggaggaacaacatcaaagggaactctctctacttcgcaaaagactagaagaactggaaacaacacaaagaaaacaactagaggaacttggatcttccggagaatgatgttcttggagaacaggcagatcaaaagaggtgaagttggtgactcagtaaaacttgacattttaacctgtggcatttagatactttttactgtttgccaaaacacttgaatgtgcctcaagaaaaggtacctactacatgctgtattgtatgactgtcaggattttaagattatacaagtgaagcattaaaagagaaattctcagagatatttagaatatttgacaatggtttgagaatgtaaaacaaaaaggaactagttagagtcaagttttaaaatttttactttgttgaatttttttttttggcattttgagtgaaatataactatcattaattctctcttcatctttgagatgcttggccataacagggtccatacacatcttctggtttactatatacaaaaactgtagttgaaaaaagatgacaatttaaaagtcagcctaaagaatgtaaaggtatctatatacaaaaggctaccttttctaaaatctgtgtgcacataattaaagagcttaattttttttta

SEQ ID NO: 346345 - DNA, 901 bp, Homo sapiens
  misc_feature (50)..(50): n is a, c, g, or t
  misc_feature (53)..(53): n is a, c, g, or t
  misc_feature (701)..(701): n is a, c, g, or t
agacgaataataaagacaatagacgagagaaaaaagaggggtcctttgtnaangcccggagaggccttacagagcttcaaaaaagactaaaagatatacagagaagacataatgaatttcgaagtctaattttggttcctaacatgcctccaacagcatctatcaatcctgttagctttcagtcatcagccatggttccaagcatggaactaccatttcctcctcatatgcaggaggaacaacatcaaagggaactctctctacttcgcaaaagactagaagaactggaaacaacacaaagaaaacaactagaggaacttggatcttccggagaatgatgttcttggagaacaggcagatcaaaagaggtgaagttggtgactcagtaaaacttgacattttaacctgtggcatttagatactttttactgtttgccaaaacacttgaatgtgcctcaagaaaaggtacctactacatgctgtattgtatgactgtcaccatactacgataatgcccagtgttcattgcaaagataaattctaaatggtacctcaaataaaagacaagaaatagacaatgccaagcacaaaacagctatacttacgacaacacacaccattgtgtcttgcgtccatggtgtccttcatgaaccttgtcagtatctaagccagagattgagcgccagattaatatctggtantcaacgggcaagaccaggactactgagaatacgaccgaatgccataagtatataatcacgcgtgtaactatcatccaaccacccccgcaccccgcaaaaatcatcgtattccagaccccaaacctataatgcgtatgttggagcgccgtgcaagtagctgtcgcatgttgtttgagttgtgccgacacggagatgtacag

SEQ ID NO: 346346 - DNA, 3302 bp, Homo sapiens
agcgggacagagcccgctcctccaggctggtggggcggtgcgatgaggcggcttctgggccatacgtcagcacgtggggtggcgccgcacccctgaggatcccggtccacgcggaggagtggggcttttcaccgccgccgccgccgccctcggacctctcccgggatacttcacatttccctagggacgggagcccgaggggtccgttcggccctcttcctctcgctgggccgacaccccgctgtaggaccgtaacccttagtcccaatgcctccgtaagcggagttgagtgggtgcctgtggttggagctgtggaggtgtccccggtggcgagcgcggccagaactgcggtcacttaagttttccgtgtgcgggttgcaaggagcgtgcgtgcgtctggtataatttggcttcctgagattctgccttagcaagaaaggagtgggaaatacccttggaaagaaaactaaaacagtaagaaagccaaaacttatttttacatggttgtcagcacatttaccgatatggacacttttcccaataattttcctcctggtggagacagtggattgacaggttctcagtcggagttccagaaaatgttaattgatgaaaggttacgatgtgagcatcataaagctaattatcagacactgaaggctgaacacacaaggttgcagaatgaacatgtaaagttacaaaatgaactcaagcacctgtttaatgaaaagcaaactcagcaggaaaaacttcagctcctgcttgaagaactaagaggagaattagtagagaaaactaaagatttagaagaaatgaaactgcagatattaactccacaaaaattggaattgctaagagcccaaatacaacaagaattagaaactccaatgagagaacgttttaggaatctagatgaagaggtagaaaagtatagagctgtatataataagcttcgctatgaacatacatttctcaagtcagaatttgaacaccagaaggaagagtatgcacgtattttagatgaaggaaaaataaaatatgaatcagagattgcaagactggaggaagataaagaagaactacgtaaccagctgcttaatgttgatctcacaaaagacagcaaacgagtggaacaacttgctcgagaaaaagtctatttgtgtcaaaaattaaaaggtttagaggctgaagtagcggaattaaaggctgaaaaggagaattctgaggctcaggtggaaaatgcccaaagaatacaggtgcggcagttggctgagatgcaggctacagtcagatccctgggggctgaaaaacaatcagctaatttacgggcagaacgcttggaaaaagagctacaatcaagcagtgaacaaaatacctttttaattaataaattgcataaagctgaacgagaaataaatacattgtccagtaaagtaaaagaacttaaacattcaaacaaactggaaataacagacatcaaactggagacagcaagagctaagagtgagctagaaagagaaaggaataagattcaaagtgaactggatggattacagtcagacaatgaaattctcaaagcagctgttgaacatcacaaagtgctcttagtagaaaaggatcgtgaattaatacgtaaagtacaagctgccaaagaagaaggttatcaaaaacttgtggtattacaagatgaaaagttagaactcgagaacagattagcagatttggagaaaatgaaagtggaacatgatgtctggaggcaatctgaaaaggatcagtatgaagagaaattgcgggcttcacagatggcagaagagatcaccaggaaggagcttcagagtgttaggttaaaacttcagcaacaaattgtgactattgaaaatgcagagaaggaaaaaaatgaaaattctgacctaaaacagcaaatcagtagtttgcagatccaagtgacttcacttgcacagtcagagaatgacttgctgaattcaaaccaaatgctgaaggaaatggtggagagattaaaacaagaatgccgaaattttagaagccaagctgaaaaagcgcaactagaagctgaaaagacattggaagagaaacagatacagtggttggaagaaaagcataagcttcatgagcgtatcacagacagagaagaaaagtacaatcaagctaaggagaaactgcagcgagctgcaattgcccagaaaaagagaaaatctcttcatgaaaacaaattgaaaagactacaagagaaagtagaagtcttggaggcaaagaaagaagaattggaaacagaaaatcaggtcttaaatagacaaaatgttccttttgaagactatacaaggcttcaaaaaagactaaaagatatacagagaagacataatgaatttcgaagtctaattttggttcctaacatgcctccaacagcatctatcaatcctgttagctttcagtcatcagccatggttccaagcatggaactaccatttcctcctcatatgcaggaggaacaacatcaaagggaactctctctacttcgcaaaagactagaagaactggaaacaacacaaagaaaacaactagaggaacttggatcttccggagaatgatgttcttggagaacaggcagatcaaaagaggtgaagttggtgactcagtaaaacttgacattttaacctgtggcatttagatactttttactgtttgccaaaacacttgaatgtgcctcaagaaaaggtacctactacatgctgtattgtatgactgtcaggattttaagattatacaagtgaagcattaaaagagaaattctcagagatatttagaatatttgacaatggtttgagaatgtaaaacaaaaaggaactagttagagtcaagttttaaaatttttactttgttgaatttttttttttggcattttgagtgaaatataactatcattaattctctcttcatctttgagatgcttggccataacagggtccatacacatcttctggtttactatatacaaaaactgtagttgaaaaaagatgacaatttaaaagtcagcctaaagaatgtaaaggtatctatatacaaaaggctaccttttctaaaatctgtgtgcacataattaaagagcttaatttttttttaatcgtgtgtttaattttacatcaaccatatagcatatatttagcaatatgacagtctactgattttggctttgttagaatagagaataagtgcaaataattaaatcctatggctgtattaacaagggggccattgattataaaacttgaactcaggtcctttta

SEQ ID NO: 346347 - DNA, 3242 bp, Homo sapiens
agcgggacagagcccgctcctccaggctggtggggcggtgcgatgaggcggcttctgggccatacgtcagcacgtggggtggcgccgcacccctgaggatcccggtccacgcggaggagtggggcttttcaccgccgccgccgccgccctcggacctctcccgggatacttcacatttccctagggacgggagcccgaggggtccgttcggccctcttcctctcgctgggccgacaccccgctgtaggaccgtaacccttagtcccaatgcctccgtaagcggagttgagtgggtgcctgtggttggagctgtggaggtgtccccggtggcgagcgcggccagaactgcggtcacttaagttttccgtgtgcgggttgcaaggagcgtgcgtgcgtctggtatagggaggacacctctggattgaggatcttatgacctactttagaggaagagccagctttagagtttgcccctctgcttatgaaatccctatggaaaaaaggtataatttggcttcctgagattctgccttagcaagaaaggagtgggaaatacccttggaaagaaaactaaaacagtaagaaagccaaaacttatttttacatggttgtcagcacatttaccgatatggacacttttcccaataattttcctcctggtggagacagtggattgacaggttctcagtcggagttccagaaaatgttaattgatgaaaggttacgatgtgagcatcataaagctaattatcagacactgaaggctgaacacacaaggttgcagaatgaacatgtaaagttacaaaatgaactcaagcacctgtttaatgaaaagcaaactcagcaggaaaaacttcagctcctgcttgaagaactaagaggagaattagtagagaaaactaaagatttagaagaaatgaaactgcagatattaactccacaaaaattggaattgctaagagcccaaatacaacaagaattagaaactccaatgagagaacgttttaggaatctagatgaagaggtagaaaagtatagagctgtatataataagcttcgctatgaacatacatttctcaagtcagaatttgaacaccagaaggaagagtatgcacgtattttagatgaaggaaaaataaaatatgaatcagagattgcaagactggaggaagataaagaagaactacgtaaccagctgcttaatgttgatctcacaaaagacagcaaacgagtggaacaacttgctcgagaaaaagtctatttgtgtcaaaaattaaaaggtttagaggctgaagtagcggaattaaaggctgaaaaggagaattctgaggctcaggtggaaaatgcccaaagaatacaggtgcggcagttggctgagatgcaggctacagtcagatccctgggggctgaaaaacaatcagctaatttacgggcagaacgcttggaaaaagagctacaatcaagcagtgaacaaaatacctttttaattaataaattgcataaagctgaacgagaaataaatacattgtccagtaaagtaaaagaacttaaacattcaaacaaactggaaataacagacatcaaactggagacagcaagagctaagagtgagctagaaagagaaaggaataagattcaaagtgaactggatggattacagtcagacaatgaaattctcaaagcagctgttgaacatcacaaagtgctcttagtagaaaaggatcgtgaattaatacgtaaagtacaagctgccaaagaagaaggttatcaaaaacttgtggtattacaagatgaaaagttagaactcgagaacagattagcagatttggagaaaatgaaagtggaacatgatgtctggaggcaatctgaaaaggatcagtatgaagagaaattgcgggcttcacagatggcagaagagatcaccaggaaggagcttcagagtgttaggttaaaacttcagcaacaaattgtgactattgaaaatgcagagaaggaaaaaaatgaaaattctgacctaaaacagcaaatcagtagtttgcagatccaagtgacttcacttgcacagtcagagaatgacttgctgaattcaaaccaaatgctgaaggaaatggtggagagattaaaacaagaatgccgaaattttagaagccaagctgaaaaagcgcaactagaagctgaaaagacattggaagagaaacagatacagtggttggaagaaaagcataagcttcatgagcgtatcacagacagagaagaaaagtacaatcaagctaaggagaaactgcagcgagctgcaattgcccagaaaaagagaaaatctcttcatgaaaacaaattgaaaagactacaagagaaagtagaagtcttggaggcaaagaaagaagaattggaaacagaaaatcaggtcttaaatagacaaaatgttccttttgaagactatacaaggcttcaaaaaagactaaaagatatacagagaagacataatgaatttcgaagtctaattttggttcctaacatgcctccaacagcatctatcaatcctgttagctttcagtcatcagccatggttccaagcatggaactaccatttcctcctcatatgcaggaggaacaacatcaaagggaactctctctacttcgcaaaagactagaagaactggaaacaacacaaagaaaacaactagaggaacttggatcttccggagaatgatgttcttggagaacaggcagatcaaaagaggtgaagttggtgactcagtaaaacttgacattttaacctgtggcatttagatactttttactgtttgccaaaacacttgaatgtgcctcaagaaaaggtacctactacatgctgtattgtatgactgtcaggattttaagattatacaagtgaagcattaaaagagaaattctcagagatatttagaatatttgacaatggtttgagaatgtaaaacaaaaaggaactagttagagtcaagttttaaaatttttactttgttgaatttttttttttggcattttgagtgaaatataactatcattaattctctcttcatctttgagatgcttggccataacagggtccatacacatcttctggtttactatatacaaaaactgtagttgaaaaaagatgacaatttaaaagtcagcctaaagaatgtaaaggtatctatatacaaaaggctaccttttctaaaatctgtgtgcacataattaaagagcttaattttttttta

SEQ ID NO: 346348 - DNA, 538 bp, Homo sapiens
atttgttgccagaagaaagaaatgatttcctaaatttgtctgtatttttcttttgcagggaatgaaggggttattaacttctacaaataaccgaaaaaaagaaggaaagcaaccataaagtttgtttccttttttatgtaaaaacagtaatggtgagaatgacaaaaattttaaagagcccatacacagtgttggcaaaaatgtgcagaaataggaagtcttctatactgctggtgggaaggtaaaagagtacaatatttctggagggtgactatcaaaatgttaaaagggcatgtcctttgaatctgcaatgtcactctcaggaaatcatcctaaggaaataatcagaaagatatatttagagcacaaaaaatataatataaagtccaagggaaggagagaaaaaatataaaaatttatatactgcattattgtaattttaagtttttttaaaaaaataactgcatagaaaataactgaaaagaaaacatcaaaatgttacatagaagtggccgggcgtggtggctcatgcctgtaa

SEQ ID NO: 346349 - DNA, 342 bp, Homo sapiens
accattgtataatggatgctttctggatggtggcatattgggccgtaaatatggttttaaatatagcgccatacttgcttcaagatcttgtttcctgtttcacaaagagcgattggtcttcctcgtgctgagaaaaaataacatttgaaatgcagaatccagcctgttccccagggctggctttccaccaggttcctgtggggaggtcaagcaggtatttcagcagggcagtgtcatgttgctccatatcctggccacatctccctttagactccacatcccaatatctgctgttcaattccctgggtaattaattaccctacaggagccaatagaatcctg

SEQ ID NO: 346350 - DNA, 835 bp, Homo sapiens
tcacgcctgtaatcccagcacttcgggaggccaaggtgggtggatcacctgaggtcagaaatttgagaccagcctggccaacatggtgaaaccccgtctctactacaaatacaaaaaaattagccgggcatggtgacaggcacctgtaatcctagctacttgggaggctgaggcaggagaattgcttgaacccaggaggcagaggttgcagtgagccgagatcatgccattgcactccagcctgggtgacagagggagactgtgtctcaaaaaaaaaacaaaaagcaaagaaaagaaacccttttattctctttctcccctagaagtaaccattatatcttgaaattggtgtgaatcatttcggtgtttttgtatgtgtgtgtatacacagagatatatacatatgtatgtaaaacaatctgtatgttttattgttacactttttcttatgtagtctgatttcttaaagttcacattgtatttcgatattaatctatgttaatatatatgaattatgttattcattttaactactgtggagtcataagtccactgtatgaataaactgaacagtttattttttttctgttagcagttgcagtgatcatcctttttttgattccttatgttcatcttgagagctggtttagggagataactggaagaagaattagtaggtcttaaatcatcacatgtttagctttactaggaactgccaacagttgagttatcagacttgttaatttttgtcaatctgacggatgcaaaatgatgttttaaaattttcatttctctgagtgataaatacaagtttgagcatttcatgttacttggc

SEQ ID NO: 346351 - DNA, 908 bp, Homo sapiens
cataagcaatttctttgtgcttaagcctattacccattctcagcctggtgtgcttctggatttaatggggacagagaagttgaaaagagtaaatctctggggtgacactgtttctaatggctcaaggggacactcttaggtctggctctctttctcatctagccatggaaacaacttatacaacctctgagctgatgtgtctctaacatagcccaatggcatcacccacattctggcacttcccttttgggacaagttaagacacaactgtatggccaagttctgttctcacttagctgctgccatctccagagtaaattttctctccagtcctttgggattttctctgcttattgtggttcaagataccatccacacttcagactctaaagagttagataagactctagtttatttagtccaacagtttatttcccaaagtatgttctgctgataactgttttctgttaaaaaaaagaaaaaagaaaaaaaaagcatccctttgagctgcaactgtttgggatatgatggattaaacaatataaaacaggtttctttactgcaggacttatgggcttcagtctgctggtacgcatcctgaagtccctaaagggtgacagtgtatattaagtattttccagatcctttttttaaaccacagatcactttttaaacacagtgtgtaattaggctagtgttctggattctcccaaattgcctgtaactttgcctatggacaggtacacatttatttaccttccactttcctctaaatgttgcttcttagtgacccatctccgatttccatttcctgcttaaactttctcattcccttggcaaacaaatgttttccttccctacttacaaaacatactagaggagatgttcattcaacaacccataacttt

SEQ ID NO: 346352 - DNA, 579 bp, Homo sapiens
gtgtgttccatgcctgaacctgtgagacatggaagtatgcttggtacccttctcccgtcttcctctgtatttgaaaatattcagaataagaaagtggaagaagaaagatgatctggctaggttgtggggaataggttggagggagattgaatgccagaaacttaggttatttatctccttttcctgggtcttttaaatctacttcctggagtagagtaagttctcattcattgctgactgaatgaataacttcctgaatcaatgatgggcatataaatgggttactactattccacaaaacacaacaatttttaacttgttgactttagacatcagtagtttgaaaactactctttcaaccccacttccctctgactcttctaccttccctctctctctctccttgcttcttccctccactcctgaatgtccctctcatgtcatgccctaaaaaggggcatcttcagagtcgtgatggaggaggacaaagatagaagctgataggaaagcttcgaagaagacaagatttggagctcactcaggaacaccaaaaacaaaaataggccgggtgcggtggct

SEQ ID NO: 346353 - DNA, 479 bp, Homo sapiens
ttgcacatttccttatggaaatctaactacatgttagagaatgctcaaggtctgcaatgtttacattgttgcccctacataaggaatatatgccttaagataaaactaatagctcttagccctcttacaccattgactaggattccaattctgcaaggcccaggaggagaaattgagaattagaagtttcaccgagaagaaataaaaagatttggtttgcattatcaaaatttctgtaaattatatggaaattttgaggatggattaggctggatttattagcagtggacacgcctccaatattccttcagcatgccatctcagtggattttgattggctcttgtaggattggacttaatgctagcttatgccaaatgtcatcaaaaagccagaatgctactacagtaatgtaaaggattattgtatatagtgtaaaggattattatgtgtaatctttaatatataatgtaaagactta

SEQ ID NO: 346354 - DNA, 680 bp, Homo sapiens
ttgcacatttccttatggaaatctaactacatgttagagaatgctcaaggtctgcaatgtttacattgttgcccctacataaggaatatatgccttaagataaaactaatagctcttagccctcttacaccattgactaggattccaattctgcaaggcccaggaggagaaattgagaattagaagtttcaccgagaagaaataaaaagatttggtttgcattatcaaaatttctgtaaattatatggaaattttgaggatggattaggctggatttattagcagtggacacgcctccaatattccttcagcatgccatctcagtggattttgattggctcttgtaggattggacttaatgctagcttatgccaaatgtcatcaaaaagccagaatgctactacagtaatgtaaaggattattgtatatagtgtaaaggattattatgtgtaatctttaatatataatgtaaagacttaaaagtgacaagaatactggattggttctattccactcactctgtcccttactagcaagacaagacccaaaataatcccttctccccatgagtaatcagttgatgaagttaaaactatttcaagagctttactggcctggcaagaggagatgaagttgaaatgggatcccacgttagtactaagagaccagttaatcactgt

SEQ ID NO: 346355 - DNA, 2823 bp, Homo sapiens
aggtttgagggggaatgctggagattgtaatgggtatggagacatgtcatataagtaatgctagggtgagtggtaggaagttttttcataggaggtgtatgagttggtcgtagcggaatcgggggtatgctgttcgaattcataagaacagggaggttagaagtagggtcttggtgacaaaatatgttgtgtagagttcaggggagagtgcgtcatatgttgttcctaggaagattgtagtggtgagggtgtttattataataatgtttgtgtattcggctatgaagaatagggcgaaggggcctgcggcgtattcgatgttgaagcctgagactagttcggactccccttcggcaaggtcgaagggggttcggttggtctctgctagtgtggagataaatcatattatggccaagggtcatgatggcaggagtaatcagaggtgttcttgtgttgtgataagggtggagaggttaaaggagccacttattagtaatgttgatagtagaatgatggctagggtgacttcatatgagattgtttgggctactgctcgcagtgcgccgatcagggcgtagtttgagtttgatgctcaccctgatcagaggattgagtaaacggctaggctagaggtggctagaataaataggaggcctaggttgaggttgaccagggccggcgtgggagaccagtgccgcaaggagttcacagacctcatgacggagatgaccgacctcagcagcgacctggagggcagcgggatccccttcctggactaccgcacctacgccgagcgcgccttcttccctggccatggcggttgcccgctgcagcccaagcctgaggggccaggggaggacggccactgtgccactgtgcgccagggcctcacgcagctctccaacctgctcaacagcaagctcttcctcctcacgctcatccacaccctggaggagcagcccagcttttcccagagggatcgctgccatgtggcttcgctgctgtcgctagcgctacacggcaagctggagtacctgacggacatcatgaggaccctgctgggtgacctggcggcccattacgtgcacaggaaccccaagctcatgctacgcaggacagagaccatggtggagaaactgctcaccaactggctgtccatctgcctgtacgccttcctgagggaggtggctggtgaaccactgtacatgctcttccgggccatccagtaccaggtggacaaaggccccgtggacgccgtgacaggcaaggccaaacggaccctgaatgatagccgcttgctgcgggaggacgtggagttccagcccctgacgctgatggtgctggtggggcccggggctggcggggccgcaggcagcagcgagatgcagcgcgtgccagcccgggtgctcgacacggacaccatcacccaggtcaaggagaaggtgttggaccaagtctacaagggcacccccttctcccagaggccctcagtgcatgccctagaccttgagtggcgctcaggcctggctggtcacctgaccctatcggacgaagacttgacctccgtgacccaaaaccactggaagagactcaacaccttgcaacactacaaggtcccagatggagcaacagtggggctcgtccctcagctgcaccgtggcagcaccatctcccagagcctggcccagaggtgccccttgggagagaacatacccacgctggaggatggcgaggaggggggggtgtgcctctggcacctggtgaaagccaccgaggagccagaaggggccaaggtgcggtgcagcagcctgcgggagcgcgagccagcaagggccaaggccattccggaaatctacctcacccgtctgctgtccatgaagggcacgctgcagaagtttgtggacgacaccttccaggccattctcagcgtgaaccggcccatccccatcgccgtcaagtacctgtttgaccttctggatgagctagcagagaagcacggcatcgaggacccagggaccctgcacatctggaagaccaacagtctgctgctgcggttctgggtgaatgccttgaagaacccacagctcatctttgatgtacgggtgtcggacaatgtggacgccatccttgctgtcatcgcccagaccttcattgactcctgtaccacctcggagcataaagtgggccgggattccccagtgaacaaactgctctacgcccgggagatcccacgctacaagcagatggtggagaggtactatgcggacattcgccagagctctccggcgagctaccaggagatgaactctgctttggctgagctctccgggaactacacttctgctccccactgtctggaggctctgcaagaactctacaaccacatccacaggtactatgatcagattatcagtgccctggaggaggaccctgtgggccagaagctgcagctggcctgccgcctgcagcaggtcgccgccctggtggaaaacaaagtgactgacctgtgagctctggctcagacagcagcaagccggatccaccaacaccgcagcgccttatgaccccggaaccgagccagccactgaggggagctggcagagcctgggggcacagggtgcaaagccaggcactgtgcccagcagtgggctccctgcctgccacctcccctgccagcccacccaccttccccccacctgagattgtttctaatttataaggatccccctccttccccctctccccattgtatttatttgcctgctggaaaatcacatccggaaataaaatagaaatatgtctttttattttaaaaaaaaaaaa

SEQ ID NO: 346356 - DNA, 458 bp, Homo sapiens
gaggggcaggctcagacaggcaccctcctctgcccgggcaattatcagtgccctggaggaggaccctgtgggccagaagctgcagctggcctgccgcctgcagcaggtcgccgccctggtggaaaacaaagtgactgacctgtgagctctggctcagacagcagcaagccggatccaccaacaccgcagcgccttatgaccccggaaccgagccagccactgaggggagctggcagagcctgggggcacagggtgcaaagccaggcactgtgcccagcagtgggctccctgcctgccacctcccctgccagcccacccaccttccccccacctgagattgtttctaatttataaggatccccctccttccccctctccccattgtatttatttgcctgctggaaaatcacatccggaaataaaatagaaatatgtctttttattttaaaaaaaaaaaa

SEQ ID NO: 346357 - DNA, 1906 bp, Homo sapiens
cctccgacccctgctcagctcatccacaccctggaggagcagcccagcttttcccagagggatcgctgccatgtggcttcgctgctgtcgctagcgctacacggcaagctggagtacctgacggacatcatgaggaccctgctgggtgacctggcggcccattacgtgcacaggaaccccaagctcatgctacgcaggacagagaccatggtggagaaactgctcaccaactggctgtccatctgcctgtacgccttcctgagggaggtggctggtgaaccactgtacatgctcttccgggccatccagtaccaggtggacaaaggccccgtggacgccgtgacaggcaaggccaaacggaccctgaatgatagccgcttgctgcgggaggacgtggagttccagcccctgacgctgatggtgctggtggggcccggggctggcggggccgcaggcagcagcgagatgcagcgcgtgccagcccgggtgctcgacacggacaccatcacccaggtcaaggagaaggtgttggaccaagtctacaagggcacccccttctcccagaggccctcagtgcatgccctagaccttgagtggcgctcaggcctggctggtcacctgaccctatcggacgaagacttgacctccgtgacccaaaaccactggaagagactcaacaccttgcaacactacaaggtcccagatggagcaacagtggggctcgtccctcagctgcaccgtggcagcaccatctcccagagcctggcccagaggtgccccttgggagagaacatacccacgctggaggatggcgaggaggggggggtgtgcctctggcacctggtgaaagccaccgaggagccagaaggggccaaggtgcggtgcagcagcctgcgggagcgcgagccagcaagggccaaggccattccggaaatctacctcacccgtctgctgtccatgaagggcacgctgcagaagtttgtggacgacaccttccaggccattctcagcgtgaaccggcccatccccatcgccgtcaagtacctgtttgaccttctggatgagctagcagagaagcacggcatcgaggacccagggaccctgcacatctggaagaccaacagtctgctgctgcggttctgggtgaatgccttgaagaacccacagctcatctttgatgtacgggtgtcggacaatgtggacgccatccttgctgtcatcgcccagaccttcattgactcctgtaccacctcggagcataaagtgggccgggattccccagtgaacaaactgctctacgcccgggagatcccacgctacaagcagatggtggagaggtactatgcggacattcgccagagctctccggcgagctaccaggagatgaactctgctttggctgagctctccgggaactacacttctgctccccactgtctggaggctctgcaagaactctacaaccacatccacaggtactatgatcagattatcagtgccctggaggaggaccctgtgggccagaagctgcagctggcctgccgcctgcagcaggtcgccgccctggtggaaaacaaagtgactgacctgtgagctctggctcagacagcagcaagccggatccaccaacaccgcagcgccttatgaccccggaaccgagccagccactgaggggagctggcagagcctgggggcacagggtgcaaagccaggcactgtgcccagcagtgggctccctgcctgccacctcccctgccagcccacccaccttccccccacctgagattgtttctaatttataaggatccccctccttccccctctccccattgtatttatttgcctgctggaaaatcacatccggaaataaaatagaaatatgtctttttattttaaaaaaaaaaaa

SEQ ID NO: 346358 - DNA, 2747 bp, Homo sapiens
aggtttgagggggaatgctggagattgtaatgggtatggagacatgtcatataagtaatgctagggtgagtggtaggaagttttttcataggaggtgtatgagttggtcgtagcggaatcgggggtatgctgttcgaattcataagaacagggaggttagaagtagggtcttggtgacaaaatatgttgtgtagagttcaggggagagtgcgtcatatgttgttcctaggaagattgtagtggtgagggtgtttattataataatgtttgtgtattcggctatgaagaatagggcgaaggggcctgcggcgtattcgatgttgaagcctgagactagttcggactccccttcggcaaggtcgaagggggttcggttggtctctgctagtgtggagataaatcatattatggccaagggtcatgatggcaggagtaatcagaggtgttcttgtgttgtgataagggtggagaggttaaaggagccacttattagtaatgttgatagtagaatgatggctagggtgacttcatatgagattgtttgggctactgctcgcagtgcgccgatcagggcgtagtttgagtttgatgctcaccctgatcagaggattgagtaaacggctaggctagaggtggctagaataaataggaggcctaggttgaggttgaccagggccggcgtgggagaccagtgccgcaaggagttcacagacctcatgacggagatgaccgacctcagcagcgacctggagggcagcgggatccccttcctggactaccgcacctacgccgagcgcgccttcttccctggccatggcggttgcccgctgcagcccaagcctgaggggccaggggaggacggccactgtgccactgtgcgccagggcctcacgcagctctccaacctgctcaacagcaagctcttcctcctcacgcgctacacggcaagctggagtacctgacggacatcatgaggaccctgctgggtgacctggcggcccattacgtgcacaggaaccccaagctcatgctacgcaggacagagaccatggtggagaaactgctcaccaactggctgtccatctgcctgtacgccttcctgagggaggtggctggtgaaccactgtacatgctcttccgggccatccagtaccaggtggacaaaggccccgtggacgccgtgacaggcaaggccaaacggaccctgaatgatagccgcttgctgcgggaggacgtggagttccagcccctgacgctgatggtgctggtggggcccggggctggcggggccgcaggcagcagcgagatgcagcgcgtgccagcccgggtgctcgacacggacaccatcacccaggtcaaggagaaggtgttggaccaagtctacaagggcacccccttctcccagaggccctcagtgcatgccctagaccttgagtggcgctcaggcctggctggtcacctgaccctatcggacgaagacttgacctccgtgacccaaaaccactggaagagactcaacaccttgcaacactacaaggtcccagatggagcaacagtggggctcgtccctcagctgcaccgtggcagcaccatctcccagagcctggcccagaggtgccccttgggagagaacatacccacgctggaggatggcgaggaggggggggtgtgcctctggcacctggtgaaagccaccgaggagccagaaggggccaaggtgcggtgcagcagcctgcgggagcgcgagccagcaagggccaaggccattccggaaatctacctcacccgtctgctgtccatgaagggcacgctgcagaagtttgtggacgacaccttccaggccattctcagcgtgaaccggcccatccccatcgccgtcaagtacctgtttgaccttctggatgagctagcagagaagcacggcatcgaggacccagggaccctgcacatctggaagaccaacagtctgctgctgcggttctgggtgaatgccttgaagaacccacagctcatctttgatgtacgggtgtcggacaatgtggacgccatccttgctgtcatcgcccagaccttcattgactcctgtaccacctcggagcataaagtgggccgggattccccagtgaacaaactgctctacgcccgggagatcccacgctacaagcagatggtggagaggtactatgcggacattcgccagagctctccggcgagctaccaggagatgaactctgctttggctgagctctccgggaactacacttctgctccccactgtctggaggctctgcaagaactctacaaccacatccacaggtactatgatcagattatcagtgccctggaggaggaccctgtgggccagaagctgcagctggcctgccgcctgcagcaggtcgccgccctggtggaaaacaaagtgactgacctgtgagctctggctcagacagcagcaagccggatccaccaacaccgcagcgccttatgaccccggaaccgagccagccactgaggggagctggcagagcctgggggcacagggtgcaaagccaggcactgtgcccagcagtgggctccctgcctgccacctcccctgccagcccacccaccttccccccacctgagattgtttctaatttataaggatccccctccttccccctctccccattgtatttatttgcctgctggaaaatcacatccggaaataaaatagaaatatgtctttttattttaaaaaaaaaaaa

SEQ ID NO: 346359 - DNA, 6082 bp, Homo sapiens
gctcctggcaccgccagctgctacttggccctcgccggtggcccaccaggacaatgcccccccgcagccatctcatgcccatcgccactgccctggggcagctgaactgagcgtatgtgccacgccgcccaggagacccctctgctgcaccacttcatggcccccgtgatggctcgctggcctcccttcggcctctgcctcctcctgctgctgctgtccccaccgccactgcccttgacaggggcccatcgcttctccgcacctaataccactctcaaccacttggcactggcacctggccgaggcacactctatgtcggcgcagtgaaccgcctcttccagctcagccccgagctgcagctcgaggccgtggctgtcactggccctgtaatcgacagccctgactgcgtgcccttccgtgacccagccgagtgcccacaggcccagctcactgacaatgccaaccagctgctgctggtgagcagccgcgcccaggagctggtggcctgcgggcaggtgcggcagggcgtgtgtgagacacggcgccttggggatgtggccgaggtgctgtaccaggctgaggaccctggtgacgggcagtttgtggctgccaataccccgggagtggcaacggtggggctggtggtgcccttgcccggccgggacctcctgcttgtggccagaggcctggcgggcaagctgtcggcaggggtgccacccctggccatccgccagctggccgggtctcagcccttctccagcgagggcctgggccgcctggtggtgggcgacttctccgactacaacaacagctacgtcggggcctttgccgacgcccgctccgcctacttcgtgttccgccgccgcggggcccgggcccaggctgagtaccgctcctacgtggcccgcgtctgcctgggggacaccaacctgtactcctacgtggaggtccccctcgcctgccagggccagggcctcatccaggccgccttccttgccccgggcaccttgctaggggtgtttgccgcgggcccaaggggcacccaggcggcgctctgtgccttccccatggtggagctgggtgccagcatggagcaggcccggagactctgctacacggcgggcggccggggccccagcggcgcagaggaagccaccgtggagtacggcgtcacgtcgcgctgcgtcaccctgccccttgattcccccgagtcgtacccctgtggcgacgagcacacccccagccccattgctggccgccagcccctggaggtccagcctctgctgaagctcgggcagccggtcagcgccgtggcagctctccaggcagatgggcacatgatagccttcctgggggacacccagggccagctgtacaaggtctttctccacggctcccagggccaggtttaccactcccagcaagtggggcctccaggctcagccatcagcccagacctgctgctggacagcagtggcagtcacctctatgtcctgactgcccaccaggtggaccggatacctgtggcagcctgcccccagttccctgactgtgccagctgcctccaggcccaggacccgctgtgtggctggtgtgtcctccagggcaggtgtacccggaagggccagtgcgggcgggcaggccagctgaaccagtggctgtggagttatgaggaggacagccactgcctgcacatccagagcctgctgccgggccaccacccccgccaggagcagggccaggtcactttgtctgtcccccggctgcccatcctggatgcagatgaatacttccattgtgcgttcggggactatgacagcttggctcatgtggaagggccccacgtggcctgtgtcacccctccccaagaccaggtgccacttaaccctccaggcacagaccacgtcactgtgcccctggccctgatgttcgaggacgtgactgtggctgccaccaacttctccttttatgactgcagtgccgtccaggccttggaggcggctgccccgtgtcgcgcttgcgtgggcagcatctggcggtgtcactggtgcccgcagagtagccactgcgtgtacggagagcactgcccagagggcgagaggaccatctacagcgcccaggaggtggacatccaggtgcgtggcccaggggcttgcccacaggtcgaaggcctggcaggtccccacctggtgcctgtgggctgggagagccatttggccctacgcgtgcggaaccttcaacatttccgaggcctgcctgcctccttccactgctggctggagctgcctggagaacttcggggactgccggccaccctggaggagacagcaggggattcaggcctcatccactgccaggcccaccagttttatccctccatgtcccagcgggagctcccagtgcccatctacgtcacccagggtgaagcccagaggctggacaacacccatgctctttatgtgatcctgtacgactgcgccatgggccacccggactgcagccactgccaagcggccaacaggagcctgggctgcctgtggtgtgctgacggccagcctgcctgtcgctatgggcccttgtgcccgccgggggctgtggagctgctgtgtcctgcgcccagcattgatgcagtcgagcccctgaccggtccccctgagggaggcttggccctcaccatcctgggctccaacctgggccgggccttcgccgatgtgcagtacgccgtgagcgtggccagccggccctgcaaccctgagccctctctctaccgcacgtcggcccggattgtgtgtgtgacatctcctgcccccaatggcaccactgggcccgtccgggtggccattaagagccagccaccaggcatctcaagccagcacttcacctaccaggaccctgtcctgctgagcctgagtcctcgctggggcccccaggcagggggcacccagctcaccatccgaggtcagcacctccagacaggtggcaacaccagtgccttcgtgggtggccaaccctgtcccatcctggagccagtgtgtccggaggccatcgtgtgccgtaccaggccccaggctgccccaggagaagcagcggtccttgtggtctttggccatgcccagcgcacactgctcgccagccccttccgctacaccgccaacccccagcttgtagcggcggagcccagtgccagcttccgggggggtgggcgactgatccgtgtcaggggcaccggcctagacgtggtgcagcggcccctactgtctgtgtggctggaggctgacgcagaggtgcaggcttccagggcccagccccaggacccacagccaaggaggagctgtggagcccctgctgcggacccccaggcttgtatccagctcggtggggggctgctgcagtgctccaccgtctgctccgtcaactcgtccagcctcctcctgtgccggagccctgctgtaccagacagagcccacccgcagcgggtcttcttcaccctagacaacgtgcaagtggacttcgccagtgccagtgggggccagggcttcctgtaccagcccaacccccgcctggcacccctcagccgcgaggggcctgcccgcccctaccgcctcaagccaggccatgtcctggatgtggagggcgagggcctcaacctgggcatcagcaaggaggaggtgcgcgtgcacatcggccgcggcgagtgcctggtgaagacgctcacgcgcacccacctgtactgcgagccgcctgcgcacgccccgcagcctgccaatggctccggcctgccacagttcgtggtgcagatgggcaatgtgcagctggccctgggccctgtgcagtacgaggctgaacccccgctgtctgcctttcccgtggaggcccaggcaggcgtgggcatgggtgctgcagtgctgattgccgccgtgctcctcctcaccctcatgtacaggcacaagagcaagcaggccctgcgggactaccagaaggtgctagtgcagctggagagcctggagaccggcgtgggagaccagtgccgcaaggagttcacagacctcatgacggagatgaccgacctcagcagcgacctggagggcagcgggatccccttcctggactaccgcacctacgccgagcgcgccttcttccctggccatggcggttgcccgctgcagcccaagcctgaggggccaggggaggacggccactgtgccactgtgcgccagggcctcacgcagctctccaacctgctcaacagcaagctcttcctcctcacgctcatccacaccctggaggagcagcccagcttttcccagagggatcgctgccatgtggcttcgctgctgtcgctagcgctacacggcaagctggagtacctgacggacatcatgaggaccctgctgggtgacctggcggcccattacgtgcacaggaaccccaagctcatgctacgcaggacagagaccatggtggagaaactgctcaccaactggctgtccatctgcctgtacgccttcctgagggaggtggctggtgaaccactgtacatgctcttccgggccatccagtaccaggtggacaaaggccccgtggacgccgtgacaggcaaggccaaacggaccctgaatgatagccgcttgctgcgggaggacgtggagttccagcccctgacgctgatggtgctggtggggcccggggctggcggggccgcaggcagcagcgagatgcagcgcgtgccagcccgggtgctcgacacggacaccatcacccaggtcaaggagaaggtgttggaccaagtctacaagggcacccccttctcccagaggccctcagtgcatgccctagaccttgagtggcgctcaggcctggctggtcacctgaccctatcggacgaagacttgacctccgtgacccaaaaccactggaagagactcaacaccttgcaacactacaaggtcccagatggagcaacagtggggctcgtccctcagctgcaccgtggcagcaccatctcccagagcctggcccagaggtgccccttgggagagaacatacccacgctggaggatggcgaggaggggggggtgtgcctctggcacctggtgaaagccaccgaggagccagaaggggccaaggtgcggtgcagcagcctgcgggagcgcgagccagcaagggccaaggccattccggaaatctacctcacccgtctgctgtccatgaagggcacgctgcagaagtttgtggacgacaccttccaggccattctcagcgtgaaccggcccatccccatcgccgtcaagtacctgtttgaccttctggatgagctagcagagaagcacggcatcgaggacccagggaccctgcacatctggaagaccaacagtctgctgctgcggttctgggtgaatgccttgaagaacccacagctcatctttgatgtacgggtgtcggacaatgtggacgccatccttgctgtcatcgcccagaccttcattgactcctgtaccacctcggagcataaagtgggccgggattccccagtgaacaaactgctctacgcccgggagatcccacgctacaagcagatggtggagaggtactatgcggacattcgccagagctctccggcgagctaccaggagatgaactctgctttggctgagctctccgggattatcagtgccctggaggaggaccctgtgggccagaagctgcagctggcctgccgcctgcagcaggtcgccgccctggtggaaaacaaagtgactgacctgtgagctctggctcagacagcagcaagccggatccaccaacaccgcagcgccttatgaccccggaaccgagccagccactgaggggagctggcagagcctgggggcacagggtgcaaagccaggcactgtgcccagcagtgggctccctgcctgccacctcccctgccagcccacccaccttccccccacctgagattgtttctaatttataaggatccccctccttccccctctccccattgtatttatttgcctgctggaaaatcacatccggaaataaaatagaaatatgtctttttattttaaaaaaaaaaaa

SEQ ID NO: 346360 - DNA, 6090 bp, Homo sapiens
gctcctggcaccgccagctgctacttggccctcgccggtggcccaccaggacaatgcccccccgcagccatctcatgcccatcgccactgccctggggcagctgaactgagcgtatgtgccacgccgcccaggagacccctctgctgcaccacttcatggcccccgtgatggctcgctggcctcccttcggcctctgcctcctcctgctgctgctgtccccaccgccactgcccttgacaggggcccatcgcttctccgcacctaataccactctcaaccacttggcactggcacctggccgaggcacactctatgtcggcgcagtgaaccgcctcttccagctcagccccgagctgcagctcgaggccgtggctgtcactggccctgtaatcgacagccctgactgcgtgcccttccgtgacccagccgagtgcccacaggcccagctcactgacaatgccaaccagctgctgctggtgagcagccgcgcccaggagctggtggcctgcgggcaggtgcggcagggcgtgtgtgagacacggcgccttggggatgtggccgaggtgctgtaccaggctgaggaccctggtgacgggcagtttgtggctgccaataccccgggagtggcaacggtggggctggtggtgcccttgcccggccgggacctcctgcttgtggccagaggcctggcgggcaagctgtcggcaggggtgccacccctggccatccgccagctggccgggtctcagcccttctccagcgagggcctgggccgcctggtggtgggcgacttctccgactacaacaacagctacgtcggggcctttgccgacgcccgctccgcctacttcgtgttccgccgccgcggggcccgggcccaggctgagtaccgctcctacgtggcccgcgtctgcctgggggacaccaacctgtactcctacgtggaggtccccctcgcctgccagggccagggcctcatccaggccgccttccttgccccgggcaccttgctaggggtgtttgccgcgggcccaaggggcacccaggcggcgctctgtgccttccccatggtggagctgggtgccagcatggagcaggcccggagactctgctacacggcgggcggccggggccccagcggcgcagaggaagccaccgtggagtacggcgtcacgtcgcgctgcgtcaccctgccccttgattcccccgagtcgtacccctgtggcgacgagcacacccccagccccattgctggccgccagcccctggaggtccagcctctgctgaagctcgggcagccggtcagcgccgtggcagctctccaggcagatgggcacatgatagccttcctgggggacacccagggccagctgtacaaggtctttctccacggctcccagggccaggtttaccactcccagcaagtggggcctccaggctcagccatcagcccagacctgctgctggacagcagtggcagtcacctctatgtcctgactgcccaccaggtggaccggatacctgtggcagcctgcccccagttccctgactgtgccagctgcctccaggcccaggacccgctgtgtggctggtgtgtcctccagggcaggtgtacccggaagggccagtgcgggcgggcaggccagctgaaccagtggctgtggagttatgaggaggacagccactgcctgcacatccagagcctgctgccgggccaccacccccgccaggagcagggccaggtcactttgtctgtcccccggctgcccatcctggatgcagatgaatacttccattgtgcgttcggggactatgacagcttggctcatgtggaagggccccacgtggcctgtgtcacccctccccaagaccaggtgccacttaaccctccaggcacagaccacgtcactgtgcccctggccctgatgttcgaggacgtgactgtggctgccaccaacttctccttttatgactgcagtgccgtccaggccttggaggcggctgccccgtgtcgcgcttgcgtgggcagcatctggcggtgtcactggtgcccgcagagtagccactgcgtgtacggagagcactgcccagagggcgagaggaccatctacagcgcccaggaggtggacatccaggtgcgtggcccaggggcttgcccacaggtcgaaggcctggcaggtccccacctggtgcctgtgggctgggagagccatttggccctacgcgtgcggaaccttcaacatttccgaggcctgcctgcctccttccactgctggctggagctgcctggagaacttcggggactgccggccaccctggaggagacagcaggggattcaggcctcatccactgccaggcccaccagttttatccctccatgtcccagcgggagctcccagtgcccatctacgtcacccagggtgaagcccagaggctggacaacacccatgctctttatgtgatcctgtacgactgcgccatgggccacccggactgcagccactgccaagcggccaacaggagcctgggctgcctgtggtgtgctgacggccagcctgcctgtcgctatgggcccttgtgcccgccgggggctgtggagctgctgtgtcctgcgcccagcattgatgcagtcgagcccctgaccggtccccctgagggaggcttggccctcaccatcctgggctccaacctgggccgggccttcgccgatgtgcagtacgccgtgagcgtggccagccggccctgcaaccctgagccctctctctaccgcacgtcggcccggattgtgtgtgtgacatctcctgcccccaatggcaccactgggcccgtccgggtggccattaagagccagccaccaggcatctcaagccagcacttcacctaccaggaccctgtcctgctgagcctgagtcctcgctggggcccccaggcagggggcacccagctcaccatccgaggtcagcacctccagacaggtggcaacaccagtgccttcgtgggtggccaaccctgtcccatcctggagccagtgtgtccggaggccatcgtgtgccgtaccaggccccaggctgccccaggagaagcagcggtccttgtggtctttggccatgcccagcgcacactgctcgccagccccttccgctacaccgccaacccccagcttgtagcggcggagcccagtgccagcttccgggggggtgggcgactgatccgtgtcaggggcaccggcctagacgtggtgcagcggcccctactgtctgtgtggctggaggctgacgcagaggtgcaggcttccagggcccagccccaggacccacagccaaggaggagctgtggagcccctgctgcggacccccaggcttgtatccagctcggtggggggctgctgcagtgctccaccgtctgctccgtcaactcgtccagcctcctcctgtgccggagccctgctgtaccagacagagcccacccgcagcgggtcttcttcaccctagacaacgtgcaagtggacttcgccagtgccagtgggggccagggcttcctgtaccagcccaacccccgcctggcacccctcagccgcgaggggcctgcccgcccctaccgcctcaagccaggccatgtcctggatgtggagggcgagggcctcaacctgggcatcagcaaggaggaggtgcgcgtgcacatcggccgcggcgagtgcctggtgaagacgctcacgcgcacccacctgtactgcgagccgcctgcgcacgccccgcagcctgccaatggctccggcctgccacagttcgtggtgcagatgggcaatgtgcagctggccctgggccctgtgcagtacgaggctgaacccccgctgtctgcctttcccgtggaggcccaggcaggcgtgggcatgggtgctgcagtgctgattgccgccgtgctcctcctcaccctcatgtacaggcacaagagcaagcaggccctgcgggactaccagaaggtgctagtgcagctggagagcctggagaccggcgtgggagaccagtgccgcaaggagttcacagacctcatgacggagatgaccgacctcagcagcgacctggagggcagcgggatccccttcctggactaccgcacctacgccgagcgcgccttcttccctggccatggcggttgcccgctgcagcccaagcctgaggggccaggggaggacggccactgtgccactgtgcgccagggcctcacgcagctctccaacctgctcaacagcaagctcttcctcctcacgctcatccacaccctggaggagcagcccagcttttcccagagggatcgctgccatgtggcttcgctgctgtcgctagcgctacacggcaagctggagtacctgacggacatcatgaggaccctgctgggtgacctggcggcccattacgtgcacaggaaccccaagctcatgctacgcaggacagagaccatggtggagaaactgctcaccaactggctgtccatctgcctgtacgccttcctgagggaggtggctggtgaaccactgtacatgctcttccgggccatccagtaccaggtggacaaaggccccgtggacgccgtgacaggcaaggccaaacggaccctgaatgatagccgcttgctgcgggaggacgtggagttccagcccctgacgctgatggtgctggtggggcccggggctggcggggccgcaggcagcagcgagatgcagcgcgtgccagcccgggtgctcgacacggacaccatcacccaggtcaaggagaagagtggcgctcaggcctggctggtcacctgaccctatcggacgaagacttgacctccgtgacccaaaaccactggaagagactcaacaccttgcaacactacaaggtcccagatggagcaacagtggggctcgtccctcagctgcaccgtggcagcaccatctcccagagcctggcccagaggtgccccttgggagagaacatacccacgctggaggatggcgaggaggggggggtgtgcctctggcacctggtgaaagccaccgaggagccagaaggggccaaggtgcggtgcagcagcctgcgggagcgcgagccagcaagggccaaggccattccggaaatctacctcacccgtctgctgtccatgaagggcacgctgcagaagtttgtggacgacaccttccaggccattctcagcgtgaaccggcccatccccatcgccgtcaagtacctgtttgaccttctggatgagctagcagagaagcacggcatcgaggacccagggaccctgcacatctggaagaccaacagtctgctgctgcggttctgggtgaatgccttgaagaacccacagctcatctttgatgtacgggtgtcggacaatgtggacgccatccttgctgtcatcgcccagaccttcattgactcctgtaccacctcggagcataaagtgggccgggattccccagtgaacaaactgctctacgcccgggagatcccacgctacaagcagatggtggagaggtactatgcggacattcgccagagctctccggcgagctaccaggagatgaactctgctttggctgagctctccgggaactacacttctgctccccactgtctggaggctctgcaagaactctacaaccacatccacaggtactatgatcagattatcagtgccctggaggaggaccctgtgggccagaagctgcagctggcctgccgcctgcagcaggtcgccgccctggtggaaaacaaagtgactgacctgtgagctctggctcagacagcagcaagccggatccaccaacaccgcagcgccttatgaccccggaaccgagccagccactgaggggagctggcagagcctgggggcacagggtgcaaagccaggcactgtgcccagcagtgggctccctgcctgccacctcccctgccagcccacccaccttccccccacctgagattgtttctaatttataaggatccccctccttccccctctccccattgtatttatttgcctgctggaaaatcacatccggaaataaaatagaaatatgtctttttattttaaaaaaaaaaaa

SEQ ID NO: 346361 - DNA, 638 bp, Homo sapiens
cagtggcagcatcatgggggcaccttcacctccgagctcatgcctagcgcctcccctccctccggagcaggattccccagtgaacaaactgctctacgcccgggagatcccacgctacaagcagatggtggagaggtactatgcggacattcgccagagctctccggcgagctaccaggagatgaactctgctttggctgagctctccgggaactacacttctgctccccactgtctggaggctctgcaagaactctacaaccacatccacaggtactatgatcaggtcgccgccctggtggaaaacaaagtgactgacctgtgagctctggctcagacagcagcaagccggatccaccaacaccgcagcgccttatgaccccggaaccgagccagccactgaggggagctggcagagcctgggggcacagggtgcaaagccaggcactgtgcccagcagtgggctccctgcctgccacctcccctgccagcccacccaccttccccccacctgagattgtttctaatttataaggatccccctccttccccctctccccattgtatttatttgcctgctggaaaatcacatccggaaataaaatagaaatatgtctttttattttaaaaaaaaaaaa

SEQ ID NO: 346362 - DNA, 199 bp, Homo sapiens
gtctttctccacggctcccagggccaggtttaccactcccagcaagtggggcctccaggctcagccatcagcccagacctgctgctggacagcagtggcagtcacctctatgtcctgactgcccaccaggtgagggccatcctggggctgaaggggccagcacacgcggcccaagtctcgtgcccattgcctctctgct

SEQ ID NO: 346363 - DNA, 6157 bp, Homo sapiens
gctcctggcaccgccagctgctacttggccctcgccggtggcccaccaggacaatgcccccccgcagccatctcatgcccatcgccactgccctggggcagctgaactgagcgtatgtgccacgccgcccaggagacccctctgctgcaccacttcatggcccccgtgatggctcgctggcctcccttcggcctctgcctcctcctgctgctgctgtccccaccgccactgcccttgacaggggcccatcgcttctccgcacctaataccactctcaaccacttggcactggcacctggccgaggcacactctatgtcggcgcagtgaaccgcctcttccagctcagccccgagctgcagctcgaggccgtggctgtcactggccctgtaatcgacagccctgactgcgtgcccttccgtgacccagccgagtgcccacaggcccagctcactgacaatgccaaccagctgctgctggtgagcagccgcgcccaggagctggtggcctgcgggcaggtgcggcagggcgtgtgtgagacacggcgccttggggatgtggccgaggtgctgtaccaggctgaggaccctggtgacgggcagtttgtggctgccaataccccgggagtggcaacggtggggctggtggtgcccttgcccggccgggacctcctgcttgtggccagaggcctggcgggcaagctgtcggcaggggtgccacccctggccatccgccagctggccgggtctcagcccttctccagcgagggcctgggccgcctggtggtgggcgacttctccgactacaacaacagctacgtcggggcctttgccgacgcccgctccgcctacttcgtgttccgccgccgcggggcccgggcccaggctgagtaccgctcctacgtggcccgcgtctgcctgggggacaccaacctgtactcctacgtggaggtccccctcgcctgccagggccagggcctcatccaggccgccttccttgccccgggcaccttgctaggggtgtttgccgcgggcccaaggggcacccaggcggcgctctgtgccttccccatggtggagctgggtgccagcatggagcaggcccggagactctgctacacggcgggcggccggggccccagcggcgcagaggaagccaccgtggagtacggcgtcacgtcgcgctgcgtcaccctgccccttgattcccccgagtcgtacccctgtggcgacgagcacacccccagccccattgctggccgccagcccctggaggtccagcctctgctgaagctcgggcagccggtcagcgccgtggcagctctccaggcagatgggcacatgatagccttcctgggggacacccagggccagctgtacaaggtctttctccacggctcccagggccaggtttaccactcccagcaagtggggcctccaggctcagccatcagcccagacctgctgctggacagcagtggcagtcacctctatgtcctgactgcccaccaggtggaccggatacctgtggcagcctgcccccagttccctgactgtgccagctgcctccaggcccaggacccgctgtgtggctggtgtgtcctccagggcaggtgtacccggaagggccagtgcgggcgggcaggccagctgaaccagtggctgtggagttatgaggaggacagccactgcctgcacatccagagcctgctgccgggccaccacccccgccaggagcagggccaggtcactttgtctgtcccccggctgcccatcctggatgcagatgaatacttccattgtgcgttcggggactatgacagcttggctcatgtggaagggccccacgtggcctgtgtcacccctccccaagaccaggtgccacttaaccctccaggcacagaccacgtcactgtgcccctggccctgatgttcgaggacgtgactgtggctgccaccaacttctccttttatgactgcagtgccgtccaggccttggaggcggctgccccgtgtcgcgcttgcgtgggcagcatctggcggtgtcactggtgcccgcagagtagccactgcgtgtacggagagcactgcccagagggcgagaggaccatctacagcgcccaggaggtggacatccaggtgcgtggcccaggggcttgcccacaggtcgaaggcctggcaggtccccacctggtgcctgtgggctgggagagccatttggccctacgcgtgcggaaccttcaacatttccgaggcctgcctgcctccttccactgctggctggagctgcctggagaacttcggggactgccggccaccctggaggagacagcaggggattcaggcctcatccactgccaggcccaccagttttatccctccatgtcccagcgggagctcccagtgcccatctacgtcacccagggtgaagcccagaggctggacaacacccatgctctttatgtgatcctgtacgactgcgccatgggccacccggactgcagccactgccaagcggccaacaggagcctgggctgcctgtggtgtgctgacggccagcctgcctgtcgctatgggcccttgtgcccgccgggggctgtggagctgctgtgtcctgcgcccagcattgatgcagtcgagcccctgaccggtccccctgagggaggcttggccctcaccatcctgggctccaacctgggccgggccttcgccgatgtgcagtacgccgtgagcgtggccagccggccctgcaaccctgagccctctctctaccgcacgtcggcccggattgtgtgtgtgacatctcctgcccccaatggcaccactgggcccgtccgggtggccattaagagccagccaccaggcatctcaagccagcacttcacctaccaggaccctgtcctgctgagcctgagtcctcgctggggcccccaggcagggggcacccagctcaccatccgaggtcagcacctccagacaggtggcaacaccagtgccttcgtgggtggccaaccctgtcccatcctggagccagtgtgtccggaggccatcgtgtgccgtaccaggccccaggctgccccaggagaagcagcggtccttgtggtctttggccatgcccagcgcacactgctcgccagccccttccgctacaccgccaacccccagcttgtagcggcggagcccagtgccagcttccgggggggtgggcgactgatccgtgtcaggggcaccggcctagacgtggtgcagcggcccctactgtctgtgtggctggaggctgacgcagaggtgcaggcttccagggcccagccccaggacccacagccaaggaggagctgtggagcccctgctgcggacccccaggcttgtatccagctcggtggggggctgctgcagtgctccaccgtctgctccgtcaactcgtccagcctcctcctgtgccggagccctgctgtaccagacagagcccacccgcagcgggtcttcttcaccctagacaacgtgcaagtggacttcgccagtgccagtgggggccagggcttcctgtaccagcccaacccccgcctggcacccctcagccgcgaggggcctgcccgcccctaccgcctcaagccaggccatgtcctggatgtggagggcgagggcctcaacctgggcatcagcaaggaggaggtgcgcgtgcacatcggccgcggcgagtgcctggtgaagacgctcacgcgcacccacctgtactgcgagccgcctgcgcacgccccgcagcctgccaatggctccggcctgccacagttcgtggtgcagatgggcaatgtgcagctggccctgggccctgtgcagtacgaggctgaacccccgctgtctgcctttcccgtggaggcccaggcaggcgtgggcatgggtgctgcagtgctgattgccgccgtgctcctcctcaccctcatgtacaggcacaagagcaagcaggccctgcgggactaccagaaggtgctagtgcagctggagagcctggagaccggcgtgggagaccagtgccgcaaggagttcacagacctcatgacggagatgaccgacctcagcagcgacctggagggcagcgggatccccttcctggactaccgcacctacgccgagcgcgccttcttccctggccatggcggttgcccgctgcagcccaagcctgaggggccaggggaggacggccactgtgccactgtgcgccagggcctcacgcagctctccaacctgctcaacagcaagctcttcctcctcacgctcatccacaccctggaggagcagcccagcttttcccagagggatcgctgccatgtggcttcgctgctgtcgctagcgctacacggcaagctggagtacctgacggacatcatgaggaccctgctgggtgacctggcggcccattacgtgcacaggaaccccaagctcatgctacgcaggacagagaccatggtggagaaactgctcaccaactggctgtccatctgcctgtacgccttcctgagggaggtggctggtgaaccactgtacatgctcttccgggccatccagtaccaggtggacaaaggccccgtggacgccgtgacaggcaaggccaaacggaccctgaatgatagccgcttgctgcgggaggacgtggagttccagcccctgacgctgatggtgctggtggggcccggggctggcggggccgcaggcagcagcgagatgcagcgcgtgccagcccgggtgctcgacacggacaccatcacccaggtcaaggagaaggtgttggaccaagtctacaagggcacccccttctcccagaggccctcagtgcatgccctagaccttgagtggcgctcaggcctggctggtcacctgaccctatcggacgaagacttgacctccgtgacccaaaaccactggaagagactcaacaccttgcaacactacaaggtcccagatggagcaacagtggggctcgtccctcagctgcaccgtggcagcaccatctcccagagcctggcccagaggtgccccttgggagagaacatacccacgctggaggatggcgaggaggggggggtgtgcctctggcacctggtgaaagccaccgaggagccagaaggggccaaggtgcggtgcagcagcctgcgggagcgcgagccagcaagggccaaggccattccggaaatctacctcacccgtctgctgtccatgaagggcacgctgcagaagtttgtggacgacaccttccaggccattctcagcgtgaaccggcccatccccatcgccgtcaagtacctgtttgaccttctggatgagctagcagagaagcacggcatcgaggacccagggaccctgcacatctggaagaccaacagtctgctgctgcggttctgggtgaatgccttgaagaacccacagctcatctttgatgtacgggtgtcggacaatgtggacgccatccttgctgtcatcgcccagaccttcattgactcctgtaccacctcggagcataaagtgggccgggattccccagtgaacaaactgctctacgcccgggagatcccacgctacaagcagatggtggagaggtactatgcggacattcgccagagctctccggcgagctaccaggagatgaactctgctttggctgagctctccgggaactacacttctgctccccactgtctggaggctctgcaagaactctacaaccacatccacaggtactatgatcagattatcagtgccctggaggaggaccctgtgggccagaagctgcagctggcctgccgcctgcagcaggtcgccgccctggtggaaaacaaagtgactgacctgtgagctctggctcagacagcagcaagccggatccaccaacaccgcagcgccttatgaccccggaaccgagccagccactgaggggagctggcagagcctgggggcacagggtgcaaagccaggcactgtgcccagcagtgggctccctgcctgccacctcccctgccagcccacccaccttccccccacctgagattgtttctaatttataaggatccccctccttccccctctccccattgtatttatttgcctgctggaaaatcacatccggaaataaaatagaaatatgtctttttattttaaaaaaaaaaaa

SEQ ID NO: 346364 - DNA, 6416 bp, Homo sapiens
gctcctggcaccgccagctgctacttggccctcgccggtggcccaccaggacaatgcccccccgcagccatctcatgcccatcgccactgccctggggcagctgaactgagcgtatgtgccacgccgcccaggagacccctctgctgcaccacttcatggcccccgtgatggctcgctggcctcccttcggcctctgcctcctcctgctgctgctgtccccaccgccactgcccttgacaggggcccatcgcttctccgcacctaataccactctcaaccacttggcactggcacctggccgaggcacactctatgtcggcgcagtgaaccgcctcttccagctcagccccgagctgcagctcgaggccgtggctgtcactggccctgtaatcgacagccctgactgcgtgcccttccgtgacccagccgagtgcccacaggcccagctcactgacaatgccaaccagctgctgctggtgagcagccgcgcccaggagctggtggcctgcgggcaggtgcggcagggcgtgtgtgagacacggcgccttggggatgtggccgaggtgctgtaccaggctgaggaccctggtgacgggcagtttgtggctgccaataccccgggagtggcaacggtggggctggtggtgcccttgcccggccgggacctcctgcttgtggccagaggcctggcgggcaagctgtcggcaggggtgccacccctggccatccgccagctggccgggtctcagcccttctccagcgagggcctgggccgcctggtggtgggcgacttctccgactacaacaacagctacgtcggggcctttgccgacgcccgctccgcctacttcgtgttccgccgccgcggggcccgggcccaggctgagtaccgctcctacgtggcccgcgtctgcctgggggacaccaacctgtactcctacgtggaggtccccctcgcctgccagggccagggcctcatccaggccgccttccttgccccgggcaccttgctaggggtgtttgccgcgggcccaaggggcacccaggcggcgctctgtgccttccccatggtggagctgggtgccagcatggagcaggcccggagactctgctacacggcgggcggccggggccccagcggcgcagaggaagccaccgtggagtacggcgtcacgtcgcgctgcgtcaccctgccccttgattcccccgagtcgtacccctgtggcgacgagcacacccccagccccattgctggccgccagcccctggaggtccagcctctgctgaagctcgggcagccggtcagcgccgtggcagctctccaggcagatgggcacatgatagccttcctgggggacacccagggccagctgtacaaggtctttctccacggctcccagggccaggtttaccactcccagcaagtggggcctccaggctcagccatcagcccagacctgctgctggacagcagtggcagtcacctctatgtcctgactgcccaccaggtggaccggatacctgtggcagcctgcccccagttccctgactgtgccagctgcctccaggcccaggacccgctgtgtggctggtgtgtcctccagggcaggtgtacccggaagggccagtgcgggcgggcaggccagctgaaccagtggctgtggagttatgaggaggacagccactgcctgcacatccagagcctgctgccgggccaccacccccgccaggagcagggccaggtcactttgtctgtcccccggctgcccatcctggatgcagatgaatacttccattgtgcgttcggggactatgacagcttggctcatgtggaagggccccacgtggcctgtgtcacccctccccaagaccaggtgccacttaaccctccaggcacagaccacgtcactgtgcccctggccctgatgttcgaggacgtgactgtggctgccaccaacttctccttttatgactgcagtgccgtccaggccttggaggcggctgccccgtgtcgcgcttgcgtgggcagcatctggcggtgtcactggtgcccgcagagtagccactgcgtgtacggagagcactgcccagagggcgagaggaccatctacagcgcccaggaggtggacatccaggtgcgtggcccaggggcttgcccacaggtcgaaggcctggcaggtccccacctggtgcctgtgggctgggagagccatttggccctacgcgtgcggaaccttcaacatttccgaggcctgcctgcctccttccactgctggctggagctgcctggagaacttcggggactgccggccaccctggaggagacagcaggggattcaggcctcatccactgccaggcccaccagttttatccctccatgtcccagcgggagctcccagtgcccatctacgtcacccagggtgaagcccagaggctggacaacacccatgctctttatgtgatcctgtacgactgcgccatgggccacccggactgcagccactgccaagcggccaacaggagcctgggctgcctgtggtgtgctgacggccagcctgcctgtcgctatgggcccttgtgcccgccgggggctgtggagctgctgtgtcctgcgcccagcattgatgcagtcgagcccctgaccggtccccctgagggaggcttggccctcaccatcctgggctccaacctgggccgggccttcgccgatgtgcagtacgccgtgagcgtggccagccggccctgcaaccctgagccctctctctaccgcacgtcggcccggattgtgtgtgtgacatctcctgcccccaatggcaccactgggcccgtccgggtggccattaagagccagccaccaggcatctcaagccagcacttcacctaccaggaccctgtcctgctgagcctgagtcctcgctggggcccccaggcagggggcacccagctcaccatccgaggtcagcacctccagacaggtggcaacaccagtgccttcgtgggtggccaaccctgtcccatcctggagccagtgtgtccggaggccatcgtgtgccgtaccaggccccaggctgccccaggagaagcagcggtccttgtggtctttggccatgcccagcgcacactgctcgccagccccttccgctacaccgccaacccccagcttgtagcggcggagcccagtgccagcttccgggggggtgggcgactgatccgtgtcaggggcaccggcctagacgtggtgcagcggcccctactgtctgtgtggctggaggctgacgcagaggtgcaggcttccagggcccagccccaggacccacagccaaggaggagctgtggagcccctgctgcggacccccaggcttgtatccagctcggtggggggctgctgcagtgctccaccgtctgctccgtcaactcgtccagcctcctcctgtgccggagccctgctgtaccagacagagcccacccgcagcgggtcttcttcaccctagacaacgtgcaagtggacttcgccagtgccagtgggggccagggcttcctgtaccagcccaacccccgcctggcacccctcagccgcgaggggcctgcccgcccctaccgcctcaagccaggccatgtcctggatgtggagggcgagggcctcaacctgggcatcagcaaggaggaggtgcgcgtgcacatcggccgcggcgagtgcctggtgaagacgctcacgcgcacccacctgtactgcgagccgcctgcgcacgccccgcagcctgccaatggctccggcctgccacagttcgtggtgcagatgggcaatgtgcagctggccctgggccctgtgcagtacgaggctgaacccccgctgtctgcctttcccgtggaggcccaggcaggcgtgggcatgggtgctgcagtgctgattgccgccgtgctcctcctcaccctcatgtacaggcacaagagcaagcaggccctgcgggactaccagaaggtgctagtgcagctggagagcctggagaccggcgtgggagaccagtgccgcaaggagttcacagacctcatgacggagatgaccgacctcagcagcgacctggagggcagcgggatccccttcctggactaccgcacctacgccgagcgcgccttcttccctggccatggcggttgcccgctgcagcccaagcctgaggggccaggggaggacggccactgtgccactgtgcgccagggcctcacgcagctctccaacctgctcaacagcaagctcttcctcctcacgctcatccacaccctggaggagcagcccagcttttcccagagggatcgctgccatgtggcttcgctgctgtcgctagcgctacacggcaagctggagtacctgacggacatcatgaggaccctgctgggtgacctggcggcccattacgtgcacaggaaccccaagctcatgctacgcaggacagagaccatggtggagaaactgctcaccaactggctgtccatctgcctgtacgccttcctgagggaggtggctggtgaaccactgtacatgctcttccgggccatccagtaccaggtggacaaaggccccgtggacgccgtgacaggcaaggccaaacggaccctgaatgatagccgcttgctgcgggaggacgtggagttccagcccctgacgctgatggtgctggtggggcccggggctggcggggccgcaggcagcagcgagatgcagcgcgtgccagcccgggtgctcgacacggacaccatcacccaggtcaaggagaaggtgttggaccaagtctacaagggcacccccttctcccagaggccctcagtgcatgccctagaccttgagtggcgctcaggcctggctggtcacctgaccctatcggacgaagacttgacctccgtgacccaaaaccactggaagagactcaacaccttgcaacactacaaggtcccagatggagcaacagtggggctcgtccctcagctgcaccgtggcagcaccatctcccagagcctggcccagaggtgccccttgggagagaacatacccacgctggaggatggcgaggaggggggggtgtgcctctggcacctggtgaaagccaccgaggagccagaaggggccaaggtgcggtgcagcagcctgcgggagcgcgagccagcaagggccaaggccattccggaaatctacctcacccgtctgctgtccatgaagggcacgctgcagaagtttgtggacgacaccttccaggccattctcagcgtgaaccggcccatccccatcgccgtcaagtacctgtttgaccttctggatgagctagcagagaagcacggcatcgaggacccagggaccctgcacatctggaagaccaacaggtgcctttcctgctgccccacccctgctgtgcatatggtccactgagtcccagagagaccaggacattcccagggtggatgcgcccacctggggtttctggaacttacaggaagatctagggcccaggtcacctaggccaccaggccagcttccagcggcccctggctccgagtgtgttgccagtaggctggagtacatggggcggagatcacgatggcaggccagggcctcacgcccacgcctgccctgcgcccccagtctgctgctgcggttctgggtgaatgccttgaagaacccacagctcatctttgatgtacgggtgtcggacaatgtggacgccatccttgctgtcatcgcccagaccttcattgactcctgtaccacctcggagcataaagtgggccgggattccccagtgaacaaactgctctacgcccgggagatcccacgctacaagcagatggtggagaggtactatgcggacattcgccagagctctccggcgagctaccaggagatgaactctgctttggctgagctctccgggaactacacttctgctccccactgtctggaggctctgcaagaactctacaaccacatccacaggtactatgatcagattatcagtgccctggaggaggaccctgtgggccagaagctgcagctggcctgccgcctgcagcaggtcgccgccctggtggaaaacaaagtgactgacctgtgagctctggctcagacagcagcaagccggatccaccaacaccgcagcgccttatgaccccggaaccgagccagccactgaggggagctggcagagcctgggggcacagggtgcaaagccaggcactgtgcccagcagtgggctccctgcctgccacctcccctgccagcccacccaccttccccccacctgagattgtttctaatttataaggatccccctccttccccctctccccattgtatttatttgcctgctggaaaatcacatccggaaataaaatagaaatatgtctttttattttaaaaaaaaaaaa

SEQ ID NO: 346365 - DNA, 6542 bp, Homo sapiens
gctcctggcaccgccagctgctacttggccctcgccggtggcccaccaggacaatgcccccccgcagccatctcatgcccatcgccactgccctggggcagctgaactgagcgtatgtgccacgccgcccaggagacccctctgctgcaccacttcatggcccccgtgatggctcgctggcctcccttcggcctctgcctcctcctgctgctgctgtccccaccgccactgcccttgacaggggcccatcgcttctccgcacctaataccactctcaaccacttggcactggcacctggccgaggcacactctatgtcggcgcagtgaaccgcctcttccagctcagccccgagctgcagctcgaggccgtggctgtcactggccctgtaatcgacagccctgactgcgtgcccttccgtgacccagccgagtgcccacaggcccagctcactgacaatgccaaccagctgctgctggtgagcagccgcgcccaggagctggtggcctgcgggcaggtgcggcagggcgtgtgtgagacacggcgccttggggatgtggccgaggtgctgtaccaggctgaggaccctggtgacgggcagtttgtggctgccaataccccgggagtggcaacggtggggctggtggtgcccttgcccggccgggacctcctgcttgtggccagaggcctggcgggcaagctgtcggcaggggtgccacccctggccatccgccagctggccgggtctcagcccttctccagcgagggcctgggccgcctggtggtgggcgacttctccgactacaacaacagctacgtcggggcctttgccgacgcccgctccgcctacttcgtgttccgccgccgcggggcccgggcccaggctgagtaccgctcctacgtggcccgcgtctgcctgggggacaccaacctgtactcctacgtggaggtccccctcgcctgccagggccagggcctcatccaggccgccttccttgccccgggcaccttgctaggggtgtttgccgcgggcccaaggggcacccaggcggcgctctgtgccttccccatggtggagctgggtgccagcatggagcaggcccggagactctgctacacggcgggcggccggggccccagcggcgcagaggaagccaccgtggagtacggcgtcacgtcgcgctgcgtcaccctgccccttgattcccccgagtcgtacccctgtggcgacgagcacacccccagccccattgctggccgccagcccctggaggtccagcctctgctgaagctcgggcagccggtcagcgccgtggcagctctccaggcagatgggcacatgatagccttcctgggggacacccagggccagctgtacaaggtctttctccacggctcccagggccaggtttaccactcccagcaagtggggcctccaggctcagccatcagcccagacctgctgctggacagcagtggcagtcacctctatgtcctgactgcccaccaggtggaccggatacctgtggcagcctgcccccagttccctgactgtgccagctgcctccaggcccaggacccgctgtgtggctggtgtgtcctccagggcaggtgtacccggaagggccagtgcgggcgggcaggccagctgaaccagtggctgtggagttatgaggaggacagccactgcctgcacatccagagcctgctgccgggccaccacccccgccaggagcagggccaggtcactttgtctgtcccccggctgcccatcctggatgcagatgaatacttccattgtgcgttcggggactatgacagcttggctcatgtggaagggccccacgtggcctgtgtcacccctccccaagaccaggtgccacttaaccctccaggcacagaccacgtcactgtgcccctggccctgatgttcgaggacgtgactgtggctgccaccaacttctccttttatgactgcagtgccgtccaggccttggaggcggctgccccgtgtcgcgcttgcgtgggcagcatctggcggtgtcactggtgcccgcagagtagccactgcgtgtacggagagcactgcccagagggcgagaggaccatctacagcgcccaggaggtggacatccaggtgcgtggcccaggggcttgcccacaggtcgaaggcctggcaggtccccacctggtgcctgtgggctgggagagccatttggccctacgcgtgcggaaccttcaacatttccgaggcctgcctgcctccttccactgctggctggagctgcctggagaacttcggggactgccggccaccctggaggagacagcaggggattcaggcctcatccactgccaggcccaccagttttatccctccatgtcccagcgggagctcccagtgcccatctacgtcacccagggtgaagcccagaggctggacaacacccatgctctttatgtgatcctgtacgactgcgccatgggccacccggactgcagccactgccaagcggccaacaggagcctgggctgcctgtggtgtgctgacggccagcctgcctgtcgctatgggcccttgtgcccgccgggggctgtggagctgctgtgtcctgcgcccagcattgatgcagtcgagcccctgaccggtccccctgagggaggcttggccctcaccatcctgggctccaacctgggccgggccttcgccgatgtgcagtacgccgtgagcgtggccagccggccctgcaaccctgagccctctctctaccgcacgtcggcccggattgtgtgtgtgacatctcctgcccccaatggcaccactgggcccgtccgggtggccattaagagccagccaccaggcatctcaagccagcacttcacctaccaggaccctgtcctgctgagcctgagtcctcgctggggcccccaggcagggggcacccagctcaccatccgaggtcagcacctccagacaggtggcaacaccagtgccttcgtgggtggccaaccctgtcccatcctggagccagtgtgtccggaggccatcgtgtgccgtaccaggccccaggctgccccaggagaagcagcggtccttgtggtctttggccatgcccagcgcacactgctcgccagccccttccgctacaccgccaacccccagcttgtagcggcggagcccagtgccagcttccgggggggtgggcgactgatccgtgtcaggggcaccggcctagacgtggtgcagcggcccctactgtctgtgtggctggaggctgacgcagaggtgcaggcttccagggcccagccccaggacccacagccaaggaggagctgtggagcccctgctgcggacccccaggcttgtatccagctcggtggggggctgctgcagtgctccaccgtctgctccgtcaactcgtccagcctcctcctgtgccggagccctgctgtaccagacagagcccacccgcagcgggtcttcttcaccctagacaacgtgcaagtggacttcgccagtgccagtgggggccagggcttcctgtaccagcccaacccccgcctggcacccctcagccgcgaggggcctgcccgcccctaccgcctcaagccaggccatgtcctggatgtggagggcgagggcctcaacctgggcatcagcaaggaggaggtgcgcgtgcacatcggccgcggcgagtgcctggtgaagacgctcacgcgcacccacctgtactgcgagccgcctgcgcacgccccgcagcctgccaatggctccggcctgccacagttcgtggtgcagatgggcaatgtgcagctggccctgggccctgtgcagtacgaggctgaacccccgctgtctgcctttcccgtggaggcccaggcaggcgtgggcatgggtgctgcagtgctgattgccgccgtgctcctcctcaccctcatgtacaggcacaagagcaagcaggccctgcgggactaccagaaggtgctagtgcagctggagagcctggagaccggcgtgggagaccagtgccgcaaggagttcacagacctcatgacggagatgaccgacctcagcagcgacctggagggcagcgggatccccttcctggactaccgcacctacgccgagcgcgccttcttccctggccatggcggttgcccgctgcagcccaagcctgaggggccaggggaggacggccactgtgccactgtgcgccagggcctcacgcagctctccaacctgctcaacagcaagctcttcctcctcacgctcatccacaccctggaggagcagcccagcttttcccagagggatcgctgccatgtggcttcgctgctgtcgctagcgctacacggcaagctggagtacctgacggacatcatgaggaccctgctgggtgacctggcggcccattacgtgcacaggaaccccaagctcatgctacgcaggacagagaccatggtggagaaactgctcaccaactggctgtccatctgcctgtacgccttcctgagggaggtggctggtgaaccactgtacatgctcttccgggccatccagtaccaggtggacaaaggccccgtggacgccgtgacaggcaaggccaaacggaccctgaatgatagccgcttgctgcgggaggacgtggagttccagcccctgacgctgatggtgctggtggggcccggggctggcggggccgcaggcagcagcgagatgcagcgcgtgccagcccgggtgctcgacacggacaccatcacccaggtcaaggagaaggtgttggaccaagtctacaagggcacccccttctcccagaggccctcagtgcatgccctagaccttgagtggcgctcaggcctggctggtcacctgaccctatcggacgaagacttgacctccgtgacccaaaaccactggaagagactcaacaccttgcaacactacaaggtcccagatggagcaacagtggggctcgtccctcagctgcaccgtggcagcaccatctcccagagcctggcccagaggtgccccttgggagagaacatacccacgctggaggatggcgaggaggggggggtgtgcctctggcacctggtgaaagccaccgaggagccagaaggggccaaggtgcggtgcagcagcctgcgggagcgcgagccagcaagggccaaggccattccggaaatctacctcacccgtctgctgtccatgaagggcacgctgcagaagtttgtggacgacaccttccaggccattctcagcgtgaaccggcccatccccatcgccgtcaagtacctgtttgaccttctggatgagctagcagagaagcacggcatcgaggacccagggaccctgcacatctggaagaccaacaggtgcctttcctgctgccccacccctgctgtgcatatggtccactgagtcccagagagaccaggacattcccagggtggatgcgcccacctggggtttctggaacttacaggaagatctagggcccaggtcacctaggccaccaggccagcttccagcggcccctggctccgagtgtgttgccagtaggctggagtacatggggcggagatcacgatggcaggccagggcctcacgcccacgcctgccctgcgcccccagtctgctgctgcggttctgggtgaatgccttgaagaacccacagctcatctttgatgtacgggtgtcggacaatgtggacgccatccttgctgtcatcgcccagaccttcattgactcctgtaccacctcggagcataaagtgggccgggattccccagtgaacaaactgctctacgcccgggagatcccacgctacaagcagatggtggagaggtactatgcggacattcgccagagctctccggcgagctaccaggagatgaactctgctttggctgagctctccggggaggcatggcccggggggtgcgcctgtccacacgtgggtggaaagactagcagagcagaggggggagacttggggcttgaggaccaggctgggacctcactgcccccctccacgtggtgcccccagaactacacttctgctccccactgtctggaggctctgcaagaactctacaaccacatccacaggtactatgatcagattatcagtgccctggaggaggaccctgtgggccagaagctgcagctggcctgccgcctgcagcaggtcgccgccctggtggaaaacaaagtgactgacctgtgagctctggctcagacagcagcaagccggatccaccaacaccgcagcgccttatgaccccggaaccgagccagccactgaggggagctggcagagcctgggggcacagggtgcaaagccaggcactgtgcccagcagtgggctccctgcctgccacctcccctgccagcccacccaccttccccccacctgagattgtttctaatttataaggatccccctccttccccctctccccattgtatttatttgcctgctggaaaatcacatccggaaataaaatagaaatatgtctttttattttaaaaaaaaaaaa

SEQ ID NO: 346366 - DNA, 5911 bp, Homo sapiens
gctcctggcaccgccagctgctacttggccctcgccggtggcccaccaggacaatgcccccccgcagccatctcatgcccatcgccactgccctggggcagctgaactgagcgtatgtgccacgccgcccaggagacccctctgctgcaccacttcatggcccccgtgatggctcgctggcctcccttcggcctctgcctcctcctgctgctgctgtccccaccgccactgcccttgacaggggcccatcgcttctccgcacctaataccactctcaaccacttggcactggcacctggccgaggcacactctatgtcggcgcagtgaaccgcctcttccagctcagccccgagctgcagctcgaggccgtggctgtcactggccctgtaatcgacagccctgactgcgtgcccttccgtgacccagccgagtgcccacaggcccagctcactgacaatgccaaccagctgctgctggtgagcagccgcgcccaggagctggtggcctgcgggcaggtgcggcagggcgtgtgtgagacacggcgccttggggatgtggccgaggtgctgtaccaggctgaggaccctggtgacgggcagtttgtggctgccaataccccgggagtggcaacggtggggctggtggtgcccttgcccggccgggacctcctgcttgtggccagaggcctggcgggcaagctgtcggcaggggtgccacccctggccatccgccagctggccgggtctcagcccttctccagcgagggcctgggccgcctggtggtgggcgacttctccgactacaacaacagctacgtcggggcctttgccgacgcccgctccgcctacttcgtgttccgccgccgcggggcccgggcccaggctgagtaccgctcctacgtggcccgcgtctgcctgggggacaccaacctgtactcctacgtggaggtccccctcgcctgccagggccagggcctcatccaggccgccttccttgccccgggcaccttgctaggggtgtttgccgcgggcccaaggggcacccaggcggcgctctgtgccttccccatggtggagctgggtgccagcatggagcaggcccggagactctgctacacggcgggcggccggggccccagcggcgcagaggaagccaccgtggagtacggcgtcacgtcgcgctgcgtcaccctgccccttgattcccccgagtcgtacccctgtggcgacgagcacacccccagccccattgctggccgccagcccctggaggtccagcctctgctgaagctcgggcagccggtcagcgccgtggcagctctccaggcagatgggcacatgatagccttcctgggggacacccagggccagctgtacaaggtctttctccacggctcccagggccaggtttaccactcccagcaagtggggcctccaggctcagccatcagcccagacctgctgctggacagcagtggcagtcacctctatgtcctgactgcccaccaggtggaccggatacctgtggcagcctgcccccagttccctgactgtgccagctgcctccaggcccaggacccgctgtgtggctggtgtgtcctccagggcaggtgtacccggaagggccagtgcgggcgggcaggccagctgaaccagtggctgtggagttatgaggaggacagccactgcctgcacatccagagcctgctgccgggccaccacccccgccaggagcagggccaggtcactttgtctgtcccccggctgcccatcctggatgcagatgaatacttccattgtgcgttcggggactatgacagcttggctcatgtggaagggccccacgtggcctgtgtcacccctccccaagaccaggtgccacttaaccctccaggcacagaccacgtcactgtgcccctggccctgatgttcgaggacgtgactgtggctgccaccaacttctccttttatgactgcagtgccgtccaggccttggaggcggctgccccgtgtcgcgcttgcgtgggcagcatctggcggtgtcactggtgcccgcagagtagccactgcgtgtacggagagcactgcccagagggcgagaggaccatctacagcgcccaggaggtggacatccaggtgcgtggcccaggggcttgcccacaggtcgaaggcctggcaggtccccacctggtgcctgtgggctgggagagccatttggccctacgcgtgcggaaccttcaacatttccgaggcctgcctgcctccttccactgctggctggagctgcctggagaacttcggggactgccggccaccctggaggagacagcaggggattcaggcctcatccactgccaggcccaccagttttatccctccatgtcccagcgggagctcccagtgcccatctacgtcacccagggtgaagcccagaggctggacaacacccatgctctttatgtgatcctgtacgactgcgccatgggccacccggactgcagccactgccaagcggccaacaggagcctgggctgcctgtggtgtgctgacggccagcctgcctgtcgctatgggcccttgtgcccgccgggggctgtggagctgctgtgtcctgcgcccagcattgatgcagtcgagcccctgaccggtccccctgagggaggcttggccctcaccatcctgggctccaacctgggccgggccttcgccgatgtgcagtacgccgtgagcgtggccagccggccctgcaaccctgagccctctctctaccgcacgtcggcccggattgtgtgtgtgacatctcctgcccccaatggcaccactgggcccgtccgggtggccattaagagccagccaccaggcatctcaagccagcacttcacctaccaggaccctgtcctgctgagcctgagtcctcgctggggcccccaggcagggggcacccagctcaccatccgaggtcagcacctccagacaggtggcaacaccagtgccttcgtgggtggccaaccctgtcccatcctggagccagtgtgtccggaggccatcgtgtgccgtaccaggccccaggctgccccaggagaagcagcggtccttgtggtctttggccatgcccagcgcacactgctcgccagccccttccgctacaccgccaacccccagcttgtagcggcggagcccagtgccagcttccgggggggtgggcgactgatccgtgtcaggggcaccggcctagacgtggtgcagcggcccctactgtctgtgtggctggaggctgacgcagaggtgcaggcttccagggcccagccccaggacccacagccaaggaggagctgtggagcccctgctgcggacccccaggcttgtatccagctcggtggggggctgctgcagtgctccaccgtctgctccgtcaactcgtccagcctcctcctgtgccggagccctgctgtaccagacagagcccacccgcagcgggtcttcttcaccctagacaacgtgcaagtggacttcgccagtgccagtgggggccagggcttcctgtaccagcccaacccccgcctggcacccctcagccgcgaggggcctgcccgcccctaccgcctcaagccaggccatgtcctggatgtggagggcgagggcctcaacctgggcatcagcaaggaggaggtgcgcgtgcacatcggccgcggcgagtgcctggtgaagacgctcacgcgcacccacctgtactgcgagccgcctgcgcacgccccgcagcctgccaatggctccggcctgccacagttcgtggtgcagatgggcaatgtgcagctggccctgggccctgtgcagtacgaggctgaacccccgctgtctgcctttcccgtggaggcccaggcaggcgtgggcatgggtgctgcagtgctgattgccgccgtgctcctcctcaccctcatgtacaggcacaagagcaagcaggccctgcgggactaccagaaggtgctagtgcagctggagagcctggagaccggcgtgggagaccagtgccgcaaggagttcacagacctcatgacggagatgaccgacctcagcagcgacctggagggcagcgggatccccttcctggactaccgcacctacgccgagcgcgccttcttccctggccatggcggttgcccgctgcagcccaagcctgaggggccaggggaggacggccactgtgccactgtgcgccagggcctcacgcagctctccaacctgctcaacagcaagctcttcctcctcacgctcatccacaccctggaggagcagcccagcttttcccagagggatcgctgccatgtggcttcgctgctgtcgctagcgctacacggcaagctggagtacctgacggacatcatgaggaccctgctgggtgacctggcggcccattacgtgcacaggaaccccaagctcatgctacgcaggacagagaccatggtggagaaactgctcaccaactggctgtccatctgcctgtacgccttcctgagggaggtggctggtgaaccactgtacatgctcttccgggccatccagtaccaggtggacaaaggccccgtggacgccgtgacagagtggcgctcaggcctggctggtcacctgaccctatcggacgaagacttgacctccgtgacccaaaaccactggaagagactcaacaccttgcaacactacaaggtcccagatggagcaacagtggggctcgtccctcagctgcaccgtggcagcaccatctcccagagcctggcccagaggtgccccttgggagagaacatacccacgctggaggatggcgaggaggggggggtgtgcctctggcacctggtgaaagccaccgaggagccagaaggggccaaggtgcggtgcagcagcctgcgggagcgcgagccagcaagggccaaggccattccggaaatctacctcacccgtctgctgtccatgaagggcacgctgcagaagtttgtggacgacaccttccaggccattctcagcgtgaaccggcccatccccatcgccgtcaagtacctgtttgaccttctggatgagctagcagagaagcacggcatcgaggacccagggaccctgcacatctggaagaccaacagtctgctgctgcggttctgggtgaatgccttgaagaacccacagctcatctttgatgtacgggtgtcggacaatgtggacgccatccttgctgtcatcgcccagaccttcattgactcctgtaccacctcggagcataaagtgggccgggattccccagtgaacaaactgctctacgcccgggagatcccacgctacaagcagatggtggagaggtactatgcggacattcgccagagctctccggcgagctaccaggagatgaactctgctttggctgagctctccgggaactacacttctgctccccactgtctggaggctctgcaagaactctacaaccacatccacaggtactatgatcagattatcagtgccctggaggaggaccctgtgggccagaagctgcagctggcctgccgcctgcagcaggtcgccgccctggtggaaaacaaagtgactgacctgtgagctctggctcagacagcagcaagccggatccaccaacaccgcagcgccttatgaccccggaaccgagccagccactgaggggagctggcagagcctgggggcacagggtgcaaagccaggcactgtgcccagcagtgggctccctgcctgccacctcccctgccagcccacccaccttccccccacctgagattgtttctaatttataaggatccccctccttccccctctccccattgtatttatttgcctgctggaaaatcacatccggaaataaaatagaaatatgtctttttattttaaaaaaaaaaaa

SEQ ID NO: 346367 - DNA, 5093 bp, Homo sapiens
gctcctggcaccgccagctgctacttggccctcgccggtggcccaccaggacaatgcccccccgcagccatctcatgcccatcgccactgccctggggcagctgaactgagcgtatgtgccacgccgcccaggagacccctctgctgcaccacttcatggcccccgtgatggctcgctggcctcccttcggcctctgcctcctcctgctgctgctgtccccaccgccactgcccttgacaggggcccatcgcttctccgcacctaataccactctcaaccacttggcactggcacctggccgaggcacactctatgtcggcgcagtgaaccgcctcttccagctcagccccgagctgcagctcgaggccgtggctgtcactggccctgtaatcgacagccctgactgcgtgcccttccgtgacccagccgagtgcccacaggcccagctcactgacaatgccaaccagctgctgctggtgagcagccgcgcccaggagctggtggcctgcgggcaggtgcggcagggcgtgtgtgagacacggcgccttggggatgtggccgaggtgctgtaccaggctgaggaccctggtgacgggcagtttgtggctgccaataccccgggagtggcaacggtggggctggtggtgcccttgcccggccgggacctcctgcttgtggccagaggcctggcgggcaagctgtcggcaggggtgccacccctggccatccgccagctggccgggtctcagcccttctccagcgagggcctgggccgcctggtggtgggcgacttctccgactacaacaacagctacgtcggggcctttgccgacgcccgctccgcctacttcgtgttccgccgccgcggggcccgggcccaggctgagtaccgctcctacgtggcccgcgtctgcctgggggacaccaacctgtactcctacgtggaggtccccctcgcctgccagggccagggcctcatccaggccgccttccttgccccgggcaccttgctaggggtgtttgccgcgggcccaaggggcacccaggcggcgctctgtgccttccccatggtggagctgggtgccagcatggagcaggcccggagactctgctacacggcgggcggccggggccccagcggcgcagaggaagccaccgtggagtacggcgtcacgtcgcgctgcgtcaccctgccccttgattcccccgagtcgtacccctgtggcgacgagcacacccccagccccattgctggccgccagcccctggaggtccagcctctgctgaagctcgggcagccggtcagcgccgtggcagctctccaggcagatgggcacatgatagccttcctgggggacacccagggccagctgtacaaggtctttctccacggctcccagggccaggtttaccactcccagcaagtggggcctccaggctcagccatcagcccagacctgctgctggacagcagtggcagtcacctctatgtcctgactgcccaccaggtggaccggatacctgtggcagcctgcccccagttccctgactgtgccagctgcctccaggcccaggacccgctgtgtggctggtgtgtcctccagggcaggtgtacccggaagggccagtgcgggcgggcaggccagctgaaccagtggctgtggagttatgaggaggacagccactgcctgcacatccagagcctgctgccgggccaccacccccgccaggagcagggccaggtcactttgtctgtcccccggctgcccatcctggatgcagatgaatacttccattgtgcgttcggggactatgacagcttggctcatgtggaagggccccacgtggcctgtgtcacccctccccaagaccaggtgccacttaaccctccaggcacagaccacgtcactgtgcccctggccctgatgttcgaggacgtgactgtggctgccaccaacttctccttttatgactgcagtgccgtccaggccttggaggcggctgccccgtgtcgcgcttgcgtgggcagcatctggcggtgtcactggtgcccgcagagtagccactgcgtgtacggagagcactgcccagagggcgagaggaccatctacagcgcccaggaggtggacatccaggtgcgtggcccaggggcttgcccacaggtcgaaggcctggcaggtccccacctggtgcctgtgggctgggagagccatttggccctacgcgtgcggaaccttcaacatttccgaggcctgcctgcctccttccactgctggctggagctgcctggagaacttcggggactgccggccaccctggaggagacagcaggggattcaggcctcatccactgccaggcccaccagttttatccctccatgtcccagcgggagctcccagtgcccatctacgtcacccagggtgaagcccagaggctggacaacacccatgctctttatgtgatcctgtacgactgcgccatgggccacccggactgcagccactgccaagcggccaacaggagcctgggctgcctgtggtgtgctgacggccagcctgcctgtcgctatgggcccttgtgcccgccgggggctgtggagctgctgtgtcctgcgcccagcattgatgcagtcgagcccctgaccggtccccctgagggaggcttggccctcaccatcctgggctccaacctgggccgggccttcgccgatgtgcagtacgccgtgagcgtggccagccggccctgcaaccctgagccctctctctaccgcacgtcggcccggattgtgtgtgtgacatctcctgcccccaatggcaccactgggcccgtccgggtggccattaagagccagccaccaggcatctcaagccagcacttcacctaccaggaccctgtcctgctgagcctgagtcctcgctggggcccccaggcagggggcacccagctcaccatccgaggtcagcacctccagacaggtggcaacaccagtgccttcgtgggtggccaaccctgtcccatcctggagccagtgtgtccggaggccatcgtgtgccgtaccaggccccaggctgccccaggagaagcagcggtccttgtggtctttggccatgcccagcgcacactgctcgccagccccttccgctacaccgccaacccccagcttgtagcggcggagcccagtgccagcttccgggggggtgggcgactgatccgtgtcaggggcaccggcctagacgtggtgcagcggcccctactgtctgtgtggctggaggctgacgcagaggtgcaggcttccagggcccagccccaggacccacagccaaggaggagctgtggagcccctgctgcggacccccaggcttgtatccagctcggtggggggctgctgcagtgctccaccgtctgctccgtcaactcgtccagcctcctcctgtgccggagccctgctgtaccagacagagcccacccgcagcgggtcttcttcaccctagacaacgtgcaagtggacttcgccagtgccagtgggggccagggcttcctgtaccagcccaacccccgcctggcacccctcagccgcgaggggcctgcccgcccctaccgcctcaagccaggccatgtcctggatgtggagggcgagggcctcaacctgggcatcagcaaggaggaggtgcgcgtgcacatcggccgcggcgagtgcctggtgaagacgctcacgcgcacccacctgtactgcgagccgcctgcgcacgccccgcagcctgccaatggctccggcctgccacagttcgtggtgcagatgggcaatgtgcagctggccctgggccctgtgcagtacgaggctgaacccccgctgtctgcctttcccgtggaggcccaggcaggcgtgggcatgggtgctgcagtgctgattgccgccgtgctcctcctcaccctcatgtacaggcacaagagcaagcaggccctgcgggactaccagaaggtgctagtgcagctggagagcctggagaccggcgtgggagaccagtgccgcaaggagttcacagacctcatgacggagatgaccgacctcagcagcgacctggagggcagcgggatccccttcctggactaccgcacctacgccgagcgcgccttcttccctggccatggcggttgcccgctgcagcccaagcctgaggggccaggggaggacggccactgtgccactgtgcgccagggcctcacgcagctctccaacctgctcaacagcaagctcttcctcctcacgctcatccacaccctggaggagcagcccagcttttcccagagggatcgctgccatgtggcttcgctgctgtcgctagcgctacacggcaagctggagtacctgacggacatcatgaggaccctgctgggtgacctggcggcccattacgtgcacaggaaccccaagctcatgctacgcaggacagagaccatggtggagaaactgctcaccaactggctgtccatctgcctgtacgccttcctgagggaggtggctggtgaaccactgtacatgctcttccgggccatccagtaccaggtggacaaaggccccgtggacgccgtgacaggcaaggccaaacggaccctgaatgatagccgcttgctgcgggaggacgtggagttccagcccctgacgctgatggtgctggtggggcccggggctggcggggccgcaggcagcagcgagatgcagcgcgtgccagcccgggtgctcgacacggacaccatcacccaggtcaaggagaaggtgttggaccaagtctacaagggcacccccttctcccagaggccctcagtgcatgccctagaccttgagtggcgctcaggcctggctggtcacctgaccctatcggacgaagacttgacctccgtgacccaaaaccactggaagagactcaacaccttgcaacactacaaggtcccagatggagcaacagtggggctcgtccctcagctgcaccgtggcagcaccatctcccagagcctggcccagaggtgccccttgggagagagtgagtccctcggccctgacctggggccactggagtccaggctgggcaggca

SEQ ID NO: 346368 - DNA, 648 bp, Homo sapiens
caggctggtcttgaactcctgacctcaagtgatctgcatgccttggcatcccaaagtgctgggattataggtgtgagctactgcacctggccaatgaatctaattttaccagagactaattgatacaaacaagagttaagttcctactgcatatttctggtcacgaaaacatcaccaaacttccaaataaagaccccaaacactttaaatgttacacattaaaataaactgagctatgtatactttaaaagagattagttaagaacaagtaagaaaattacttacccagtgattccagtttagggtcataggtggccagaacctgtcttggcagttctgggtagcttaggttacaaggcggaaatctgccctgggcaggatctattctatcgcagggcacacgggcacactcactcacactggctgagactggaaccatttaaacaatgctagttaacatgttgtgcacatctttgggatgtgggagggcgctggagtacctggagaaaacccgcatagacgtggggagaacacaggaaatccacacagacagtggccccagtgggggaatcaactccactccctattaacgttttagtgaaatgacattatttgaggacctgctgtataacatgtacattaggggta

SEQ ID NO: 346369 - DNA, 131 bp, Homo sapiens
ctgcaaccattccatcacaatcattctcaggaaaaaacaataatcggtcagaaggaatttttagaatttttttgattctatatttgcttcattctttttcttttttctttttatgagttggaatttcgctc

SEQ ID NO: 346370 - DNA, 247 bp, Homo sapiens
gttaaggtgaggtatctcttcaagttcacagttctggctgtggcagcatgctacagccttcacgcagcatcagtgatggtagaaaacccagccttgggcaaggctaccactgcatggcaggaaaggacccaagctacatgctggttactccagaacactactcacattcttgaaaaaagctgcagccaggatgagtgggttgggaagaggcaggagtaccttgggctccgagtcattattcagttcc

SEQ ID NO: 346371 - DNA, 403 bp, Homo sapiens
tttttttttttttgcccatttaggattcaagatgggttttaaccttttaagttacaattaagcactttgtgtcgtacagtatgtatacaataatgctttgaaatggctagtcatgaatgtattaatggtttgtcttgcactgaaacctgaaatgtagatgaaaaagttgataaacataaggcaatcagtactgattgtcattgtcatctaccccagtacattctaagtgtggtagatacagtaattcttatatgttgctattaacgtcatttctgatttttgattagaaaaatatttaggttaatggctttcttgttggtttcaaatttatagtaaaagctatacctttatgtcttgaatctgcttgccagtctttgctttgataggtggtttttgcttaggc

SEQ ID NO: 346372 - DNA, 940 bp, Homo sapiens
tggaaacctaaggaaaaacgtctgacctgcggaggtagtttgggtggctacttggtgttggacttggctaaataaataccagaggcagataaaacaagcgaggggcctaggtcaagagttccaagtttgttcctcgataaaaaacgacaaacgcggtcgggggcggtgatgcccgcctgcagtcccaacactttaggaagctgaggcggggggatcgcaggagttcgagaccagtctgggcaacataatgagaccatccccaccacctcccgtccttaattttttttaataaaaaaaatctttaagtgagaaatgcatctgtaatgtccttattaaccaaaaacgcctaagggataaagaagcacacgctccctagccaacgctagaggaacacaccccgagagctggtgctgtaggacccagttttcccgcgaaaacgctgccgcgcagggggtcagaccatctggaccaaggggggccgagcgaggcctacttctggtttacgcacgggcgctgaaagaagcggcactgtccccccctgccgatgcgcagtggcgcctcccggaggcggagccacgtacgagcgccgctgtgattggtgaggccccgccaggggcggagacgaccttgccgccggcgggaactctgggtctcgcggtttgggagcgctactcgccaggtggactcggagtccgcgagcgtcgtcggcaagcggccgcctttccacggtactccgagcactatgtcgtccccggcgtcgaccccgagccgccgcggcagccggcgtggaagggccacccccgcccagacgcctcggagtgaggatgccaggtcatctccctctcagagacgtagaggcgaggattccacctccacgggggagttgcagccgatgccttcctttcttgtagtttttttttttatccctgctgttcccccc

SEQ ID NO: 346373 - DNA, 4952 bp, Homo sapiens
tggaaacctaaggaaaaacgtctgacctgcggaggtagtttgggtggctacttggtgttggacttggctaaataaataccagaggcagataaaacaagcgaggggcctaggtcaagagttccaagtttgttcctcgataaaaaacgacaaacgcggtcgggggcggtgatgcccgcctgcagtcccaacactttaggaagctgaggcggggggatcgcaggagttcgagaccagtctgggcaacataatgagaccatccccaccacctcccgtccttaattttttttaataaaaaaaatctttaagtgagaaatgcatctgtaatgtccttattaaccaaaaacgcctaagggataaagaagcacacgctccctagccaacgctagaggaacacaccccgagagctggtgctgtaggacccagttttcccgcgaaaacgctgccgcgcagggggtcagaccatctggaccaaggggggccgagcgaggcctacttctggtttacgcacgggcgctgaaagaagcggcactgtccccccctgccgatgcgcagtggcgcctcccggaggcggagccacgtacgagcgccgctgtgattggtgaggccccgccaggggcggagacgaccttgccgccggcgggaactctgggtctcgcggtttgggagcgctactcgccaggtggactcggagtccgcgagcgtcgtcggcaagcggccgcctttccacggtactccgagcactatgtcgtccccggcgtcgaccccgagccgccgcggcagccggcgtggaagggccacccccgcccagacgcctcggagtgaggatgccaggtcatctccctctcagagacgtagaggcgaggattccacctccacgggggagttgcagccgatgccaacctcgcctggagtggacctgcagagccctgctgcgcaggacgtgctgttttccagccctccccaaatgcattcttcagctatccctcttgactttgatgttagttcaccactgacatacggcactcccagctctcgggtagagggaaccccaagaagtggtgttaggggcacacctgtgagacagaggcctgacctgggctctgcacagaagggcctgcaagtggatctgcagtctgacggggcagcagcagaagatatagtggcaagtgagcagtctctaggccaaaaacttgtgatctggggaacagatgtaaatgtggcagcatgcaaagaaaactttcagagatttcttcagcgttttattgaccctctggctaaagaagaagaaaatgttggcatagatattactgaacctctatacatgcaacgacttggggagattaatgttattggtgagccatttttaaatgtgaactgtgaacacatcaaatcatttgacaaaaatttgtacagacaactcatctcttacccacaggaagttattccaacttttgacatggctgtcaatgaaatcttctttgaccgttaccctgactcaatcttagaacatcagattcaagtaagaccattcaacgcattgaagactaagaatatgagaaacctgaatccagaagacattgaccagctcatcaccatcagcggcatggtgatcaggacatcccagctgattcccgagatgcaggaggccttcttccagtgccaagtgtgtgcccacacgacccgggtggagatggaccgcggccgcattgcagagcccagtgtgtgcgggcgctgccacaccacccacagcatggcactcatccacaaccgctccctcttctctgacaagcagatgatcaagcttcaggagtctccggaagacatgcctgcagggcagacaccacacacagttatcctgtttgctcacaatgatctcgttgacaaggtccagcctggggacagagtgaatgttacaggcatctatcgagctgtgcctattcgagtcaatccaagagtgagtaatgtgaagtctgtctacaaaacccacattgatgtcattcattatcggaaaacggatgcaaaacgtctgcatggccttgatgaagaagcagaacagaaacttttttcagagaaacgtgtggaattgcttaaggaactttccaggaaaccagacatttatgagaggcttgcttcagccttggctccaagcatttatgaacatgaagatataaagaagggaattttgcttcagctctttggcgggacaaggaaggattttagtcacactggaaggggcaaatttcgggctgagatcaacatcttgctgtgtggcgaccctggtaccagcaagtcccagctgctgcagtacgtgtacaacctcgtccccaggggccagtacacgtctgggaagggctccagtgcagttggcctcactgcgtacgtaatgaaagaccctgagacaaggcagctggtcctgcagacaggtgctcttgtcctgagtgacaacggcatctgctgtatcgatgagttcgacaagatgaatgaaagtacaagatcggtattgcatgaagtcatggaacagcagactctgtccattgcaaaggctgggatcatctgtcagctcaatgcgcgcacctctgtcctggcagcagcaaatcccattgagtctcagtggaatcctaaaaaaacaaccattgaaaacatccagctgcctcatactttattatcaaggtttgatttgatcttcctcatgctggaccctcaggacgaagcctatgacaggcgtctggctcaccacctggtcgcactgtactaccagagcgaggagcaggcagaggaggagctcctggacatggcggtgctaaaggactacattgcctacgcgcacagcaccatcatgccgcggctaagtgaggaagccagccaggctctcatcgaggcttatgtagacatgaggaagattggcagtagccggggaatggtttctgcataccctcgacagctagagtcattaatccgcttagcagaagcccatgctaaagtaagattgtctaacaaagttgaagccattgatgtggaagaggccaaacgcctccatcgggaagctctgaagcagtctgcaactgatccccggactggcatcgtggacatatctattcttactacggggatgagtgccacctctcgtaaacggaaagaagaattagctgaagcattgaaaaagcttattttatctaagggcaaaacaccagctctaaaataccagcaactttttgaagatattcggggacaatctgacatagcaattactaaagatatgtttgaagaagcactgcgtgccctggcagatgatgatttcctgacagtgactgggaagaccgtgcgcttgctctgaagccttgtgagcaaggaaggctccctgcatgtcctgcttgctgcacgccacatgggtgtggtctgcatctcagttggccgccatcagtgtaaatagagcttaaagtcatggtttggctgcataaaaattttctaacttgggttcaatatttgtagtgaagtatctgttttcatttttttcacgttataaataaaaatactatgctggccgggcgcggtggctcacacctgtaatcccagcactttgggaggccaatgtgggtggatcatgaggtcaggagttcaagaccagcctagccaagatggtgaaaccccgtctctagtaaagataacaaaaaattagctgggcttgatggcatgcgcctgtaatcccagctactcgggaggttgaggcaggagaatcgcttaaacccaggcggcagaggttgcagtgagccaagatcgcgccactgcactccagcctcagcaatagagtgagactgtctcaaaaaaaaaaaaaaaaaaaacctgccaattttcaaacataccgtagagattattttcaggtgccattttatagtatagcagcagggcttttactctgtgtatgcacagatgcagtctggggcatggtttgtgtgctggactttctcatggccatcatcagtatgcttatggatttgatgacaggcatagcctgggcatatcacctcattggtaaagggctagagcctttcttttttatggcacttctttttttgagatagggtcttactctgtcaccctggctagagtacactggtacaatcacggctcaatgtaggcttaacctcctgggctcaggtgtatgtcactatgcccggctactttttgtattttttggtagagacggcttcgccacgttgcccaggctgcaagcgatatgcctaggctcaagcgatctgcccacctcaacttccggaagtgctgagattacaggtgtgagccactgcacccagcctttgttttattttttattttttgagaggtatgattctttctagagattttttctcatggctactattagatcaggaatgggtgattggagattattagattctaggttaacttctaccactttaccctaatacataaaactttttcctaaataaatgatggaaggaataatacttggttacctggcattatttttcagtaagaaaaaagctttactaaccactacatttatggaaatttgtaggggtaagtattttataggtcataaaaaacaccataatataacgaatctcattttctttaaatgtgaattaaatcctaacagtcatctttataaaatgaccataggctaaaatcttacgtgtaagtactactacaataaataatttctgaaacctttaaatcatatgagttgggccttttttataacttggaatcaacattttttaataaagtatccatagaaaatgatagatctggccgggcgcggtggctcacacctgtaatcccagcactttgggaggccgagatggctggatcatgaggcaggagaatgacatgaacctaggaggcggagcttgcagtgagccgagatcatgccactgcactccaggctgggcaacagagtgagactccatctc

SEQ ID NO: 346374 - DNA, 4719 bp, Homo sapiens
tggaaacctaaggaaaaacgtctgacctgcggaggtagtttgggtggctacttggtgttggacttggctaaataaataccagaggcagataaaacaagcgaggggcctaggtcaagagttccaagtttgttcctcgataaaaaacgacaaacgcggtcgggggcggtgatgcccgcctgcagtcccaacactttaggaagctgaggcggggggatcgcaggagttcgagaccagtctgggcaacataatgagaccatccccaccacctcccgtccttaattttttttaataaaaaaaatctttaagtgagaaatgcatctgtaatgtccttattaaccaaaaacgcctaagggataaagaagcacacgctccctagccaacgctagaggaacacaccccgagagctggtgctgtaggacccagttttcccgcgaaaacgctgccgcgcagggggtcagaccatctggaccaaggggggccgagcgaggcctacttctggtttacgcacgggcgctgaaagaagcggcactgtccccccctgccgatgcgcagtggcgcctcccggaggcggagccacgtacgagcgccgctgtgattggtgaggccccgccaggggcggagacgaccttgccgccggcgggaactctgggtctcgcggtttgggagcgctactcgccaggtggactcggagtccgcgagcgtcgtcggcaagcggccgcctttccacggtactccgagcactatgtcgtccccggcgtcgaccccgagccgccgcggcagccggcgtggaagggccacccccgcccagacgcctcggagtgaggatgccaggtcatctccctctcagagacgtagaggcgaggattccacctccacgggggagttgcagccgatgccaacctcgcctggagtggacctgcagagccctgctgcgcaggacgtgctgttttccagccctccccaaatgcattcttcagctatccctcttgactttgatgttagttcaccactgacatacggcactcccagctctcgggtagagggaaccccaagaagtggtgttaggggcacacctgtgagacagaggcctgacctgggctctgcacagaagggcctgcaagtggatctgcagtctgacggggcagcagcagaagatatagtggcaagtgagcagtctctaggccaaaaacttgtgatctggggaacagatgtaaatgtggcagcatgcaaagaaaactttcagagatttcttcagcgttttattgaccctctggctaaagaagaagaaaatgttggcatagatattactgaacctctatacatgcaacgacttggggagattaatgttattggtgagccatttttaaatgtgaactgtgaacacatcaaatcatttgacaaaaatttgtacagacaactcatctcttacccacaggaagttattccaacttttgacatggctgtcaatgaaatcttctttgaccgttaccctgactcaatcttagaacatcagattcaagtaagaccattcaacgcattgaagactaagaatatgagaaacctgaatccagaagacattgaccagctcatcaccatcagcggcatggtgatcaggacatcccagctgattcccgagatgcaggaggccttcttccagtgccaagtgtgtgcccacacgacccgggtggagatggaccgcggccgcattgcagagcccagtgtgtgcgggcgctgccacaccacccacagcatggcactcatccacaaccgctccctcttctctgacaagcagatgatcaagcttcaggagtctccggaagacatgcctgcagggcagacaccacacacagttatcctgtttgctcacaatgatctcgttgacaaggtccagcctggggacagagtgaatgttacaggcatctatcgagctgtgcctattcgagtcaatccaagagtgagtaatgtgaagtctgtctacaaaacccacattgatgtcattcattatcggaaaacggatgcaaaacgtctgcatggccttgatgaagaagcagaacagaaacttttttcagagaaacgtgtggaattgcttaaggaactttccaggaaaccagacatttatgagaggcttgcttcagccttggctccaagcatttatgaacatgaagatataaagaagggaattttgcttcagctctttggcgggacaaggaaggattttagtcacactggaaggggcaaatttcgggctgagatcaacatcttgctgtgtggcgaccctggtaccagcaagtcccagctgctgcagtacgtgtacaacctcgtccccaggggccagtacacgtctgggaagggctccagtgcagttggcctcactgcgtacgtaatgaaagaccctgagacaaggcagctggtcctgcagacaggtgctcttgtcctgagtgacaacggcatctgctgtatcgatgagttcgacaagatgaatgaaagtacaagatcggtattgcatgaagtcatggaacagcagactctgtccattgcaaaggctgggatcatctgtcagctcaatgcgcgcacctctgtcctggcagcagcaaatcccattgagtctcagtggaatcctaaaaaaacaaccattgaaaacatccagctgcctcatactttattatcaaggtttgatttgatcttcctcatgctggaccctcaggacgaagcctatgacaggcgtctggctcaccacctggtcgcactgtactaccagagcgaggagcaggcagaggaggagctcctggacatggcggtgctaaaggactacattgcctacgcgcacagcaccatcatgccgcggctaagtgaggaagccagccaggctctcatcgaggcttatgtagacatgaggaagattggcagtagccggggaatggtttctgcataccctcgacagctagagtcattaatccgcttagcagaagcccatgctaaagtaagattgtctaacaaagttgaagccattgatgtggaagaggccaaacgcctccatcgggaagctctgaagcagtctgcaactgatccccggactggcatcgtggacatatctattcttactacggggatgagtgccacctctcgtaaacggaaagaagaattagctgaagcattgaaaaagcttattttatctaagggcaaaacaccagctctaaaataccagcaactttttgaagatattcggggacaatctgacatagcaattactaaagatatgtttgaagaagcactgcgtgccctggcagatgatgatttcctgacagtgactgggaagaccgtgcgcttgctctgaagccttgtgagcaaggaaggctccctgcatgtcctgcttgctgcacgccacatgggtgtggtctgcatctcagttggccgccatcagtgtaaatagagcttaaagtcatggtttggctgcataaaaattttctaacttgggttcaatatttgtagtgaagtatctgttttcatttttttcacgttataaataaaaatactatgctggccgggcgcggtggctcacacctgtaatcccagcactttgggaggccaatgtgggtggatcatgaggtcaggagttcaagaccagcctagccaagatggtgaaaccccgtctctagtaaagataacaaaaaattagctgggcttgatggcatgcgcctgtaatcccagctactcgggaggttgaggcaggagaatcgcttaaacccaggcggcagaggttgcagtgagccaagatcgcgccactgcactccagcctcagcaatagagtgagactgtctcaaaaaaacacttctttttttgagatagggtcttactctgtcaccctggctagagtacactggtacaatcacggctcaatgtaggcttaacctcctgggctcaggtgtatgtcactatgcccggctactttttgtattttttggtagagacggcttcgccacgttgcccaggctgcaagcgatatgcctaggctcaagcgatctgcccacctcaacttccggaagtgctgagattacaggtgtgagccactgcacccagcctttgttttattttttattttttgagaggtatgattctttctagagattttttctcatggctactattagatcaggaatgggtgattggagattattagattctaggttaacttctaccactttaccctaatacataaaactttttcctaaataaatgatggaaggaataatacttggttacctggcattatttttcagtaagaaaaaagctttactaaccactacatttatggaaatttgtaggggtaagtattttataggtcataaaaaacaccataatataacgaatctcattttctttaaatgtgaattaaatcctaacagtcatctttataaaatgaccataggctaaaatcttacgtgtaagtactactacaataaataatttctgaaacctttaaatcatatgagttgggccttttttataacttggaatcaacattttttaataaagtatccatagaaaatgatagatctggccgggcgcggtggctcacacctgtaatcccagcactttgggaggccgagatggctggatcatgaggcaggagaatgacatgaacctaggaggcggagcttgcagtgagccgagatcatgccactgcactccaggctgggcaacagagtgagactccatctc

SEQ ID NO: 346375 - DNA, 4502 bp, Homo sapiens
tggaaacctaaggaaaaacgtctgacctgcggaggtagtttgggtggctacttggtgttggacttggctaaataaataccagaggcagataaaacaagcgaggggcctaggtcaagagttccaagtttgttcctcgataaaaaacgacaaacgcggtcgggggcggtgatgcccgcctgcagtcccaacactttaggaagctgaggcggggggatcgcaggagttcgagaccagtctgggcaacataatgagaccatccccaccacctcccgtccttaattttttttaataaaaaaaatctttaagtgagaaatgcatctgtaatgtccttattaaccaaaaacgcctaagggataaagaagcacacgctccctagccaacgctagaggaacacaccccgagagctggtgctgtaggacccagttttcccgcgaaaacgctgccgcgcagggggtcagaccatctggaccaaggggggccgagcgaggcctacttctggtttacgcacgggcgctgaaagaagcggcactgtccccccctgccgatgcgcagtggcgcctcccggaggcggagccacgtacgagcgccgctgtgattggtgaggccccgccaggggcggagacgaccttgccgccggcgggaactctgggtctcgcggtttgggagcgctactcgccaggtggactcggagtccgcgagcgtcgtcggcaagcggccgcctttccacggtactccgagcactatgtcgtccccggcgtcgaccccgagccgccgcggcagccggcgtggaagggccacccccgcccagacgcctcggagtgaggatgccaggtcatctccctctcagagacgtagaggcgaggattccacctccacgggggagttgcagccgatgccaacctcgcctggagtggacctgcagagccctgctgcgcaggacgtgctgttttccagccctccccaaatgcattcttcagctatccctcttgactttgatgttagttcaccactgacatacggcactcccagctctcgggtagagggaaccccaagaagtggtgttaggggcacacctgtgagacagaggcctgacctgggctctgcacagaagggcctgcaagtggatctgcagtctgacggggcagcagcagaagatatagtggcaagtgagcagtctctaggccaaaaacttgtgatctggggaacagatgtaaatgtggcagcatgcaaagaaaactttcagagatttcttcagcgttttattgaccctctggctaaagaagaagaaaatgttggcatagatattactgaacctctatacatgcaacgacttggggagattaatgttattggtgagccatttttaaatgtgaactgtgaacacatcaaatcatttgacaaaaatttgtacagacaactcatctcttacccacaggaagttattccaacttttgacatggctgtcaatgaaatcttctttgaccgttaccctgactcaatcttagaacatcagattcaagtaagaccattcaacgcattgaagactaagaatatgagaaacctgaatccagaagacattgaccagctcatcaccatcagcggcatggtgatcaggacatcccagctgattcccgagatgcaggaggccttcttccagtgccaagtgtgtgcccacacgacccgggtggagatggaccgcggccgcattgcagagcccagtgtgtgcgggcgctgccacaccacccacagcatggcactcatccacaaccgctccctcttctctgacaagcagatgatcaagcttcaggagtctccggaagacatgcctgcagggcagacaccacacacagttatcctgtttgctcacaatgatctcgttgacaaggtccagcctggggacagagtgaatgttacaggcatctatcgagctgtgcctattcgagtcaatccaagagtgagtaatgtgaagtctgtctacaaaacccacattgatgtcattcattatcggaaaacggatgcaaaacgtctgcatggccttgatgaagaagcagaacagaaacttttttcagagaaacgtgtggaattgcttaaggaactttccaggaaaccagacatttatgagaggcttgcttcagccttggctccaagcatttatgaacatgaagatataaagaagggaattttgcttcagctctttggcgggacaaggaaggattttagtcacactggaaggggcaaatttcgggctgagatcaacatcttgctgtgtggcgaccctggtaccagcaagtcccagctgctgcagtacgtgtacaacctcgtccccaggggccagtacacgtctgggaagggctccagtgcagttggcctcactgcgtacgtaatgaaagaccctgagacaaggcagctggtcctgcagacaggtgctcttgtcctgagtgacaacggcatctgctgtatcgatgagttcgacaagatgaatgaaagtacaagatcggtattgcatgaagtcatggaacagcagactctgtccattgcaaaggctgggatcatctgtcagctcaatgcgcgcacctctgtcctggcagcagcaaatcccattgagtctcagtggaatcctaaaaaaacaaccattgaaaacatccagctgcctcatactttattatcaaggtttgatttgatcttcctcatgctggaccctcaggacgaagcctatgacaggcgtctggctcaccacctggtcgcactgtactaccagagcgaggagcaggcagaggaggagctcctggacatggcggtgctaaaggactacattgcctacgcgcacagcaccatcatgccgcggctaagtgaggaagccagccaggctctcatcgaggcttatgtagacatgaggaagattggcagtagccggggaatggtttctgcataccctcgacagctagagtcattaatccgcttagcagaagcccatgctaaagtaagattgtctaacaaagttgaagccattgatgtggaagaggccaaacgcctccatcgggaagctctgaagcagtctgcaactgatccccggactggcatcgtggacatatctattcttactacggggatgagtgccacctctcgtaaacggaaagaagaattagctgaagcattgaaaaagcttattttatctaagggcaaaacaccagctctaaaataccagcaactttttgaagatattcggggacaatctgacatagcaattactaaagatatgtttgaagaagcactgcgtgccctggcagatgatgatttcctgacagtgactgggaagaccgtgcgcttgctctgaagccttgtgagcaaggaaggctccctgcatgtcctgcttgctgcacgccacatgggtgtggtctgcatctcagttggccgccatcagtgtaaatagagcttaaagtcatggtttggctgcataaaaattttctaacttgggttcaatatttgtagtgaagtatctgttttcatttttttcacgttataaataaaaatactatgctggccgggcgcggtggctcacacctgtaatcccagcactttgggaggccaatgtgggtggatcatgaggtcaggagttcaagaccagcctagccaagatggtgaaaccccgtctctagtaaagataacaaaaaattagctgggcttgatggcatgcgcctgtaatcccagctactcgggaggttgaggcaggagaatcgcttaaacccaggcggcagaggttgcagtgagccaagatcgcgccactgcactccagcctcagcaatagagtgagactgtctcaaaaaaaaaaaaaaaaaaaacctgccaattttcaaacataccgtagagattattttcaggtgccattttatagtatagcagcagggcttttactctgtgtatgcacagatgcagtctggggcatggtttgtgtgctggactttctcatggccatcatcagtatgcttatggatttgatgacaggcatagcctgggcatatcacctcattggtaaagggctagagcctttcttttttatggcacttctttttttgagatagggtcttactctgtcaccctggctagagtacactggtacaatcacggctcaatgtaggcttaacctcctgggctcaggtgtatgtcactatgcccggctactttttgtattttttggtagagacggcttcgccacgttgcccaggctgcaagcgatatgcctaggctcaagcgatctgcccacctcaacttccggaagtgctgagattacaggtgtgagccactgcacccagcctttgttttattttttattttttgagaggtatgattctttctagagattttttctcatggctactattagatcaggaatgggtgattggagattattagattctaggttaacttctaccactttaccctaatacataaaactttttcctaaataaatgatggaagttgctagggggatcctctcaagtcga

SEQ ID NO: 346376 - DNA, 4159 bp, Homo sapiens
ctgttttgtgtgacacaagctcggagtgaggatgccaggtcatctccctctcagagacgtagaggcgaggattccacctccacgggggagttgcagccgatgccaacctcgcctggagtggacctgcagagccctgctgcgcaggacgtgctgttttccagccctccccaaatgcattcttcagctatccctcttgactttgatgttagttcaccactgacatacggcactcccagctctcgggtagagggaaccccaagaagtggtgttaggggcacacctgtgagacagaggcctgacctgggctctgcacagaagggcctgcaagtggatctgcagtctgacggggcagcagcagaagatatagtggcaagtgagcagtctctaggccaaaaacttgtgatctggggaacagatgtaaatgtggcagcatgcaaagaaaactttcagagatttcttcagcgttttattgaccctctggctaaagaagaagaaaatgttggcatagatattactgaacctctatacatgcaacgacttggggagattaatgttattggtgagccatttttaaatgtgaactgtgaacacatcaaatcatttgacaaaaatttgtacagacaactcatctcttacccacaggaagttattccaacttttgacatggctgtcaatgaaatcttctttgaccgttaccctgactcaatcttagaacatcagattcaagtaagaccattcaacgcattgaagactaagaatatgagaaacctgaatccagaagacattgaccagctcatcaccatcagcggcatggtgatcaggacatcccagctgattcccgagatgcaggaggccttcttccagtgccaagtgtgtgcccacacgacccgggtggagatggaccgcggccgcattgcagagcccagtgtgtgcgggcgctgccacaccacccacagcatggcactcatccacaaccgctccctcttctctgacaagcagatgatcaagcttcaggagtctccggaagacatgcctgcagggcagacaccacacacagttatcctgtttgctcacaatgatctcgttgacaaggtccagcctggggacagagtgaatgttacaggcatctatcgagctgtgcctattcgagtcaatccaagagtgagtaatgtgaagtctgtctacaaaacccacattgatgtcattcattatcggaaaacggatgcaaaacgtctgcatggccttgatgaagaagcagaacagaaacttttttcagagaaacgtgtggaattgcttaaggaactttccaggaaaccagacatttatgagaggcttgcttcagccttggctccaagcatttatgaacatgaagatataaagaagggaattttgcttcagctctttggcgggacaaggaaggattttagtcacactggaaggggcaaatttcgggctgagatcaacatcttgctgtgtggcgaccctggtaccagcaagtcccagctgctgcagtacgtgtacaacctcgtccccaggggccagtacacgtctgggaagggctccagtgcagttggcctcactgcgtacgtaatgaaagaccctgagacaaggcagctggtcctgcagacaggtgctcttgtcctgagtgacaacggcatctgctgtatcgatgagttcgacaagatgaatgaaagtacaagatcggtattgcatgaagtcatggaacagcagactctgtccattgcaaaggctgggatcatctgtcagctcaatgcgcgcacctctgtcctggcagcagcaaatcccattgagtctcagtggaatcctaaaaaaacaaccattgaaaacatccagctgcctcatactttattatcaaggtttgatttgatcttcctcatgctggaccctcaggacgaagcctatgacaggcgtctggctcaccacctggtcgcactgtactaccagagcgaggagcaggcagaggaggagctcctggacatggcggtgctaaaggactacattgcctacgcgcacagcaccatcatgccgcggctaagtgaggaagccagccaggctctcatcgaggcttatgtagacatgaggaagattggcagtagccggggaatggtttctgcataccctcgacagctagagtcattaatccgcttagcagaagcccatgctaaagtaagattgtctaacaaagttgaagccattgatgtggaagaggccaaacgcctccatcgggaagctctgaagcagtctgcaactgatccccggactggcatcgtggacatatctattcttactacggggatgagtgccacctctcgtaaacggaaagaagaattagctgaagcattgaaaaagcttattttatctaagggcaaaacaccagctctaaaataccagcaactttttgaagatattcggggacaatctgacatagcaattactaaagatatgtttgaagaagcactgcgtgccctggcagatgatgatttcctgacagtgactgggaagaccgtgcgcttgctctgaagccttgtgagcaaggaaggctccctgcatgtcctgcttgctgcacgccacatgggtgtggtctgcatctcagttggccgccatcagtgtaaatagagcttaaagtcatggtttggctgcataaaaattttctaacttgggttcaatatttgtagtgaagtatctgttttcatttttttcacgttataaataaaaatactatgctggccgggcgcggtggctcacacctgtaatcccagcactttgggaggccaatgtgggtggatcatgaggtcaggagttcaagaccagcctagccaagatggtgaaaccccgtctctagtaaagataacaaaaaattagctgggcttgatggcatgcgcctgtaatcccagctactcgggaggttgaggcaggagaatcgcttaaacccaggcggcagaggttgcagtgagccaagatcgcgccactgcactccagcctcagcaatagagtgagactgtctcaaaaaaaaaaaaaaaaaaaacctgccaattttcaaacataccgtagagattattttcaggtgccattttatagtatagcagcagggcttttactctgtgtatgcacagatgcagtctggggcatggtttgtgtgctggactttctcatggccatcatcagtatgcttatggatttgatgacaggcatagcctgggcatatcacctcattggtaaagggctagagcctttcttttttatggcacttctttttttgagatagggtcttactctgtcaccctggctagagtacactggtacaatcacggctcaatgtaggcttaacctcctgggctcaggtgtatgtcactatgcccggctactttttgtattttttggtagagacggcttcgccacgttgcccaggctgcaagcgatatgcctaggctcaagcgatctgcccacctcaacttccggaagtgctgagattacaggtgtgagccactgcacccagcctttgttttattttttattttttgagaggtatgattctttctagagattttttctcatggctactattagatcaggaatgggtgattggagattattagattctaggttaacttctaccactttaccctaatacataaaactttttcctaaataaatgatggaaggaataatacttggttacctggcattatttttcagtaagaaaaaagctttactaaccactacatttatggaaatttgtaggggtaagtattttataggtcataaaaaacaccataatataacgaatctcattttctttaaatgtgaattaaatcctaacagtcatctttataaaatgaccataggctaaaatcttacgtgtaagtactactacaataaataatttctgaaacctttaaatcatatgagttgggccttttttataacttggaatcaacattttttaataaagtatccatagaaaatgatagatctggccgggcgcggtggctcacacctgtaatcccagcactttgggaggccgagatggctggatcatgaggcaggagaatgacatgaacctaggaggcggagcttgcagtgagccgagatcatgccactgcactccaggctgggcaacagagtgagactccatctc

SEQ ID NO: 346377 - DNA, 4842 bp, Homo sapiens
  misc_feature (3742)..(3742): n is a, c, g, or t
  misc_feature (3744)..(3744): n is a, c, g, or t
  misc_feature (3755)..(3755): n is a, c, g, or t
  misc_feature (3758)..(3758): n is a, c, g, or t
  misc_feature (3763)..(3763): n is a, c, g, or t
tggaaacctaaggaaaaacgtctgacctgcggaggtagtttgggtggctacttggtgttggacttggctaaataaataccagaggcagataaaacaagcgaggggcctaggtcaagagttccaagtttgttcctcgataaaaaacgacaaacgcggtcgggggcggtgatgcccgcctgcagtcccaacactttaggaagctgaggcggggggatcgcaggagttcgagaccagtctgggcaacataatgagaccatccccaccacctcccgtccttaattttttttaataaaaaaaatctttaagtgagaaatgcatctgtaatgtccttattaaccaaaaacgcctaagggataaagaagcacacgctccctagccaacgctagaggaacacaccccgagagctggtgctgtaggacccagttttcccgcgaaaacgctgccgcgcagggggtcagaccatctggaccaaggggggccgagcgaggcctacttctggtttacgcacgggcgctgaaagaagcggcactgtccccccctgccgatgcgcagtggcgcctcccggaggcggagccacgtacgagcgccgctgtgattggtgaggccccgccaggggcggagacgaccttgccgccggcgggaactctgggtctcgcggtttgggagcgctactcgccaggtggactcggagtccgcgagcgtcgtcggcaagcggccgcctttccacggtactccgagcactatgtcgtccccggcgtcgaccccgagccgccgcggcagccggcgtggaagggccacccccgcccagacgcctcggagtgaggatgccaggtcatctccctctcagagacgtagaggcgaggattccacctccacgggggagttgcagccgatgccaacctcgcctggagtggacctgcagagccctgctgcgcaggacgtgctgttttccagccctccccaaatgcattcttcagctatccctcttgactttgatgttagttcaccactgacatacggcactcccagctctcgggtagagggaaccccaagaagtggtgttaggggcacacctgtgagacagaggcctgacctgggctctgcacagaagggcctgcaagtggatctgcagtctgacggggcagcagcagaagatatagtggcaagtgagcagtctctaggccaaaaacttgtgatctggggaacagatgtaaatgtggcagcatgcaaagaaaactttcagagatttcttcagcgttttattgaccctctggctaaagaagaagaaaatgttggcatagatattactgaacctctatacatgcaacgacttggggagattaatgttattggtgagccatttttaaatgtgaactgtgaacacatcaaatcatttgacaaaaatttgtacagacaactcatctcttacccacaggaagttattccaacttttgacatggctgtcaatgaaatcttctttgaccgttaccctgactcaatcttagaacatcagattcaagtaagaccattcaacgcattgaagactaagaatatgagaaacctgaatccagaagacattgaccagctcatcaccatcagcggcatggtgatcaggacatcccagctgattcccgagatgcaggaggccttcttccagtgccaagtgtgtgcccacacgacccgggtggagatggaccgcggccgcattgcagagcccagtgtgtgcgggcgctgccacaccacccacagcatggcactcatccacaaccgctccctcttctctgacaagcagatgatcaagcttcaggagtctccggaagacatgcctgcagggcagacaccacacacagttatcctgtttgctcacaatgatctcgttgacaaggtccagcctggggacagagtgaatgttacaggcatctatcgagctgtgcctattcgagtcaatccaagagtgagtaatgtgaagtctgtctacaaaacccacattgatgtcattcattatcggaaaacggatgcaaaacgtctgcatggccttgatgaagaagcagaacagaaacttttttcagagaaacgtgtggaattgcttaaggaactttccaggaaaccagacatttatgagaggcttgcttcagccttggctccaagcatttatgaacatgaagatataaagaagggaattttgcttcagctctttggcgggacaaggaaggattttagtcacactggaaggggcaaatttcgggctgagatcaacatcttgctgtgtggcgaccctggtaccagcaagtcccagctgctgcagtacgtgtacaacctcgtccccaggggccagtacacgtctgggaagggctccagtgcagttggcctcactgcgtacgtaatgaaagaccctgagacaaggcagctggtcctgcagacaggtgctcttgtcctgagtgacaacggcatctgctgtatcgatgagttcgacaagatgaatgaaagtacaagatcggtattgcatgaagtcatggaacagcagactctgtccattgcaaaggctgggatcatctgtcagctcaatgcgcgcacctctgtcctggcagcagcaaatcccattgagtctcagtggaatcctaaaaaaacaaccattgaaaacatccagctgcctcatactttattatcaaggtttgatttgatcttcctcatgctggaccctcaggacgaagcctatgacaggcgtctggctcaccacctggtcgcactgtactaccagagcgaggagcaggcagaggaggagctcctggacatggcggtgctaaaggactacattgcctacgcgcacagcaccatcatgccgcggctaagtgaggaagccagccaggctctcatcgaggcttatgtagacatgaggaagattggcagtagccggggaatggtttctgcataccctcgacagctagagtcattaatccgcttagcagaagcccatgctaaagtaagattgtctaacaaagttgaagccattgatgtggaagaggccaaacgcctccatcgggaagctctgaagcagtctgcaactgatccccggactggcatcgtggacatatctattcttactacggggatgagtgccacctctcgtaaacggaaagaagaattagctgaagcattgaaaaagcttattttatctaagggcaaaacaccagctctaaaataccagcaactttttgaagatattcggggacaatctgacatagcaattactaaagatatgtttgaagaagcactgcgtgccctggcagatgatgatttcctgacagtgactgggaagaccgtgcgcttgctctgaagccttgtgagcaaggaaggctccctgcatctcagttggccgccatcagtgtaaatagagcttaaagtcatggtttggctgcataaaaattttctaacttgggttcaatatttgtagtgaagtatctgttttcatttttttcacgttataaataaaaatactatgctggccgggcgcggtggctcacacctgtaatcccagcactttgggaggccaatgtgggtggatcatgaggtcaggagttcaagaccagcctagccaagatggtgaaaccccgtctctagtaaagataacaaaaaattagctgggcttgatggcatgcgcctgtaatcccagctactcgggagaaaaaaaaaaaaaaaaaaaaaaaaaaaaaaaacccgcgcgcccagtttctaacacactatntncgcggaaaganttntttgnagggggtgccattttatagtatagcagcagggcttttactctgtgtatgcacagatgcagtctggggcatggtttgtgtgctggactttctcatggccatcatcagtatgcttatggatttgatgacaggcatagcctgggcatatcacctcattggtaaagggctagagcctttcttttttatggcacttctttttttgagatagggtcttactctgtcaccctggctagagtacactggtacaatcacggctcaatgtaggcttaacctcctgggctcaggtgtatgtcactatgcccggctactttttgtattttttggtagagacggcttcgccacgttgcccaggctgcaagcgatatgcctaggctcaagcgatctgcccacctcaacttccggaagtgctgagattacaggtgtgagccactgcacccagcctttgttttattttttattttttgagaggtatgattctttctagagattttttctcatggctactattagatcaggaatgggtgattggagattattagattctaggttaacttctaccactttaccctaatacataaaactttttcctaaataaatgatggaaggaataatacttggttacctggcattatttttcagtaagaaaaaagctttactaaccactacatttatggaaatttgtaggggtaagtattttataggtcataaaaaacaccataatataacgaatctcattttctttaaatgtgaattaaatcctaacagtcatctttataaaatgaccataggctaaaatcttacgtgtaagtactactacaataaataatttctgaaacctttaaatcatatgagttgggccttttttataacttggaatcaacattttttaataaagtatccatagaaaatgatagatctggccgggcgcggtggctcacacctgtaatcccagcactttgggaggccgagatggctggatcatgaggcaggagaatgacatgaacctaggaggcggagcttgcagtgagccgagatcatgccactgcactccaggctgggcaacagagtgagactccatctc

SEQ ID NO: 346378 - DNA, 5101 bp, Homo sapiens
tggaaacctaaggaaaaacgtctgacctgcggaggtagtttgggtggctacttggtgttggacttggctaaataaataccagaggcagataaaacaagcgaggggcctaggtcaagagttccaagtttgttcctcgataaaaaacgacaaacgcggtcgggggcggtgatgcccgcctgcagtcccaacactttaggaagctgaggcggggggatcgcaggagttcgagaccagtctgggcaacataatgagaccatccccaccacctcccgtccttaattttttttaataaaaaaaatctttaagtgagaaatgcatctgtaatgtccttattaaccaaaaacgcctaagggataaagaagcacacgctccctagccaacgctagaggaacacaccccgagagctggtgctgtaggacccagttttcccgcgaaaacgctgccgcgcagggggtcagaccatctggaccaaggggggccgagcgaggcctacttctggtttacgcacgggcgctgaaagaagcggcactgtccccccctgccgatgcgcagtggcgcctcccggaggcggagccacgtacgagcgccgctgtgattggtgaggccccgccaggggcggagacgaccttgccgccggcgggaactctgggtctcgcggtttgggagcgctactcgccaggtggactcggagtccgcgagcgtcgtcggcaagcggccgcctttccacggtactccgagcactatgtcgtccccggcgtcgaccccgagccgccgcggcagccggcgtggaagggccacccccgcccagacgcctcggagtgaggatgccaggtcatctccctctcagagacgtagaggcgaggattccacctccacgggggagttgcagccgatgccaacctcgcctggagtggacctgcagagccctgctgcgcaggacgtgctgttttccagccctccccaaatgcattcttcagctatccctcttgactttgatgttagttcaccactgacatacggcactcccagctctcgggtagagggaaccccaagaagtggtgttaggggcacacctgtgagacagaggcctgacctgggctctgcacagaagggcctgcaagtggatctgcagtctgacggggcagcagcagaagatatagtggcaagtgagcagtctctaggccaaaaacttgtgatctggggaacagatgtaaatgtggcagcatgcaaagaaaactttcagagatttcttcagcgttttattgaccctctggctaaagaagaagaaaatgttggcatagatattactgaacctctatacatgcaacgacttggggagattaatgttattggtgagccatttttaaatgtgaactgtgaacacatcaaatcatttgacaaaaatttgtacagacaactcatctcttacccacaggaagttattccaacttttgacatggctgtcaatgaaatcttctttgaccgttaccctgactcaatcttagaacatcagattcaagtaagaccattcaacgcattgaagactaagaatatgagaaacctgaatccagaagacattgaccagctcatcaccatcagcggcatggtgatcaggacatcccagctgattcccgagatgcaggaggccttcttccagtgccaagtgtgtgcccacacgacccgggtggagatggaccgcggccgcattgcagagcccagtgtgtgcgggcgctgccacaccacccacagcatggcactcatccacaaccgctccctcttctctgacaagcagatgatcaagcttcaggagtctccggaagacatgcctgcagggcagacaccacacacagttatcctgtttgctcacaatgatctcgttgacaaggtccagcctggggacagagtgaatgttacaggcatctatcgagctgtgcctattcgagtcaatccaagagtgagtaatgtgaagtctgtctacaaaacccacattgatgtcattcattatcggaaaacggatgcaaaacgtctgcatggccttgatgaagaagcagaacagaaacttttttcagagaaacgtgtggaattgcttaaggaactttccaggaaaccagacatttatgagaggcttgcttcagccttggctccaagcatttatgaacatgaagatataaagaagggaattttgcttcagctctttggcgggacaaggaaggattttagtcacactggaaggggcaaatttcgggctgagatcaacatcttgctgtgtggcgaccctggtaccagcaagtcccagctgctgcagtacgtgtacaacctcgtccccaggggccagtacacgtctgggaagggctccagtgcagttggcctcactgcgtacgtaatgaaagaccctgagacaaggcagctggtcctgcagacaggtgctcttgtcctgagtgacaacggcatctgctgtatcgatgagttcgacaagatgaatgaaagtacaagatcggtattgcatgaagtcatggaacagcagactctgtccattgcaaagggtgtcacgttttgtctttattgctgtactagccttgaatttgtcctaaagctcttgcaaggtgcctgcttcctgagaaagatgtggttatagcacacattcatctaaactcagtccttggcatgaatctgaggacagggcttatccaggctgggatcatctgtcagctcaatgcgcgcacctctgtcctggcagcagcaaatcccattgagtctcagtggaatcctaaaaaaacaaccattgaaaacatccagctgcctcatactttattatcaaggtttgatttgatcttcctcatgctggaccctcaggacgaagcctatgacaggcgtctggctcaccacctggtcgcactgtactaccagagcgaggagcaggcagaggaggagctcctggacatggcggtgctaaaggactacattgcctacgcgcacagcaccatcatgccgcggctaagtgaggaagccagccaggctctcatcgaggcttatgtagacatgaggaagattggcagtagccggggaatggtttctgcataccctcgacagctagagtcattaatccgcttagcagaagcccatgctaaagtaagattgtctaacaaagttgaagccattgatgtggaagaggccaaacgcctccatcgggaagctctgaagcagtctgcaactgatccccggactggcatcgtggacatatctattcttactacggggatgagtgccacctctcgtaaacggaaagaagaattagctgaagcattgaaaaagcttattttatctaagggcaaaacaccagctctaaaataccagcaactttttgaagatattcggggacaatctgacatagcaattactaaagatatgtttgaagaagcactgcgtgccctggcagatgatgatttcctgacagtgactgggaagaccgtgcgcttgctctgaagccttgtgagcaaggaaggctccctgcatgtcctgcttgctgcacgccacatgggtgtggtctgcatctcagttggccgccatcagtgtaaatagagcttaaagtcatggtttggctgcataaaaattttctaacttgggttcaatatttgtagtgaagtatctgttttcatttttttcacgttataaataaaaatactatgctggccgggcgcggtggctcacacctgtaatcccagcactttgggaggccaatgtgggtggatcatgaggtcaggagttcaagaccagcctagccaagatggtgaaaccccgtctctagtaaagataacaaaaaattagctgggcttgatggcatgcgcctgtaatcccagctactcgggaggttgaggcaggagaatcgcttaaacccaggcggcagaggttgcagtgagccaagatcgcgccactgcactccagcctcagcaatagagtgagactgtctcaaaaaaaaaaaaaaaaaaaacctgccaattttcaaacataccgtagagattattttcaggtgccattttatagtatagcagcagggcttttactctgtgtatgcacagatgcagtctggggcatggtttgtgtgctggactttctcatggccatcatcagtatgcttatggatttgatgacaggcatagcctgggcatatcacctcattggtaaagggctagagcctttcttttttatggcacttctttttttgagatagggtcttactctgtcaccctggctagagtacactggtacaatcacggctcaatgtaggcttaacctcctgggctcaggtgtatgtcactatgcccggctactttttgtattttttggtagagacggcttcgccacgttgcccaggctgcaagcgatatgcctaggctcaagcgatctgcccacctcaacttccggaagtgctgagattacaggtgtgagccactgcacccagcctttgttttattttttattttttgagaggtatgattctttctagagattttttctcatggctactattagatcaggaatgggtgattggagattattagattctaggttaacttctaccactttaccctaatacataaaactttttcctaaataaatgatggaaggaataatacttggttacctggcattatttttcagtaagaaaaaagctttactaaccactacatttatggaaatttgtaggggtaagtattttataggtcataaaaaacaccataatataacgaatctcattttctttaaatgtgaattaaatcctaacagtcatctttataaaatgaccataggctaaaatcttacgtgtaagtactactacaataaataatttctgaaacctttaaatcatatgagttgggccttttttataacttggaatcaacattttttaataaagtatccatagaaaatgatagatctggccgggcgcggtggctcacacctgtaatcccagcactttgggaggccgagatggctggatcatgaggcaggagaatgacatgaacctaggaggcggagcttgcagtgagccgagatcatgccactgcactccaggctgggcaacagagtgagactccatctc

SEQ ID NO: 346379 - DNA, 4898 bp, Homo sapiens
tggaaacctaaggaaaaacgtctgacctgcggaggtagtttgggtggctacttggtgttggacttggctaaataaataccagaggcagataaaacaagcgaggggcctaggtcaagagttccaagtttgttcctcgataaaaaacgacaaacgcggtcgggggcggtgatgcccgcctgcagtcccaacactttaggaagctgaggcggggggatcgcaggagttcgagaccagtctgggcaacataatgagaccatccccaccacctcccgtccttaattttttttaataaaaaaaatctttaagtgagaaatgcatctgtaatgtccttattaaccaaaaacgcctaagggataaagaagcacacgctccctagccaacgctagaggaacacaccccgagagctggtgctgtaggacccagttttcccgcgaaaacgctgccgcgcagggggtcagaccatctggaccaaggggggccgagcgaggcctacttctggtttacgcacgggcgctgaaagaagcggcactgtccccccctgccgatgcgcagtggcgcctcccggaggcggagccacgtacgagcgccgctgtgattggtgaggccccgccaggggcggagacgaccttgccgccggcgggaactctgggtctcgcggtttgggagcgctactcgccaggtggactcggagtccgcgagcgtcgtcggcaagcggccgcctttccacggtactccgagcactatgtcgtccccggcgtcgaccccgagccgccgcggcagccggcgtggaagggccacccccgcccagacgcctcggagtgaggatgccaggtcatctccctctcagagacgtagaggcgaggattccacctccacgggggagttgcagccgatgccaacctcgcctggagtggacctgcagagccctgctgcgcaggacgtgctgttttccagccctccccaaatgcattcttcagctatccctcttgactttgatgttagttcaccactgacatacggcactcccagctctcgggtagagggaaccccaagaagtggtgttaggggcacacctgtgagacagaggcctgacctgggctctgcacagaagggcctgcaagtggatctgcagtctgacggggcagcagcagaagatatagtggcaagtgagcagtctctaggccaaaaacttgtgatctggggaacagatgtaaatgtggcagcatgcaaagaaaactttcagagatttcttcagcgttttattgaccctctggctaaagaagaagaaaatgttggcatagatattactgaacctctatacatgcaacgacttggggagattaatgttattggtgagccatttttaaatgtgaactgtgaacacatcaaatcatttgacaaaaatttgtacagacaactcatctcttacccacaggaagttattccaacttttgacatggctgtcaatgaaatcttctttgaccgttaccctgactcaatcttagaacatcagattcaagtaagaccattcaacgcattgaagactaagaatatgagaaacctgaatccagaagacattgaccagctcatcaccatcagcggcatggtgatcaggacatcccagctgattcccgagatgcaggaggccttcttccagtgccaagtgtgtgcccacacgacccgggtggagatggaccgcggccgcattgcagagcccagtgtgtgcgggcgctgccacaccacccacagcatggcactcatccacaaccgctccctcttctctgacaagcagatgatcaagcttcaggagtctccggaagacatgcctgcagggcagacaccacacacagttatcctgtttgctcacaatgatctcgttgacaaggtccagcctggggacagagtgaatgttacaggcatctatcgagctgtgcctattcgagtcaatccaagagtgagtaatgtgaagtctgtctacaaaacccacattgatgtcattcattatcggaaaacggatgcaaaacgtctgcatggccttgatgaagaagcagaacagaaacttttttcagagaaacgtgtggaattgcttaaggaactttccaggaaaccagacatttatgagaggcttgcttcagccttggctccaagcatttatgaacatgaagatataaagaagggaattttgcttcagctctttggcgggacaaggaaggattttagtcacactggaaggggcaaatttcgggctgagatcaacatcttgctgtgtggcgaccctggtaccagcaagtcccagctgctgcagtacgtgtacaacctcgtccccaggggccagtacacgtctgggaagggctccagtgcagttggcctcactgcgtacgtaatgaaagaccctgagacaaggcagctggtcctgcagacaggtgctcttgtcctgagtgacaacggcatctgctgtatcgatgagttcgacaagatgaatgaaagtacaagatcggtattgcatgaagtcatggaacagcagactctgtccattgcaaaggctgggatcatctgtcagctcaatgcgcgcacctctgtcctggcagcagcaaatcccattgagtctcagtggaatcctaaaaaaacaaccattgtgctggaccctcaggacgaagcctatgacaggcgtctggctcaccacctggtcgcactgtactaccagagcgaggagcaggcagaggaggagctcctggacatggcggtgctaaaggactacattgcctacgcgcacagcaccatcatgccgcggctaagtgaggaagccagccaggctctcatcgaggcttatgtagacatgaggaagattggcagtagccggggaatggtttctgcataccctcgacagctagagtcattaatccgcttagcagaagcccatgctaaagtaagattgtctaacaaagttgaagccattgatgtggaagaggccaaacgcctccatcgggaagctctgaagcagtctgcaactgatccccggactggcatcgtggacatatctattcttactacggggatgagtgccacctctcgtaaacggaaagaagaattagctgaagcattgaaaaagcttattttatctaagggcaaaacaccagctctaaaataccagcaactttttgaagatattcggggacaatctgacatagcaattactaaagatatgtttgaagaagcactgcgtgccctggcagatgatgatttcctgacagtgactgggaagaccgtgcgcttgctctgaagccttgtgagcaaggaaggctccctgcatgtcctgcttgctgcacgccacatgggtgtggtctgcatctcagttggccgccatcagtgtaaatagagcttaaagtcatggtttggctgcataaaaattttctaacttgggttcaatatttgtagtgaagtatctgttttcatttttttcacgttataaataaaaatactatgctggccgggcgcggtggctcacacctgtaatcccagcactttgggaggccaatgtgggtggatcatgaggtcaggagttcaagaccagcctagccaagatggtgaaaccccgtctctagtaaagataacaaaaaattagctgggcttgatggcatgcgcctgtaatcccagctactcgggaggttgaggcaggagaatcgcttaaacccaggcggcagaggttgcagtgagccaagatcgcgccactgcactccagcctcagcaatagagtgagactgtctcaaaaaaaaaaaaaaaaaaaacctgccaattttcaaacataccgtagagattattttcaggtgccattttatagtatagcagcagggcttttactctgtgtatgcacagatgcagtctggggcatggtttgtgtgctggactttctcatggccatcatcagtatgcttatggatttgatgacaggcatagcctgggcatatcacctcattggtaaagggctagagcctttcttttttatggcacttctttttttgagatagggtcttactctgtcaccctggctagagtacactggtacaatcacggctcaatgtaggcttaacctcctgggctcaggtgtatgtcactatgcccggctactttttgtattttttggtagagacggcttcgccacgttgcccaggctgcaagcgatatgcctaggctcaagcgatctgcccacctcaacttccggaagtgctgagattacaggtgtgagccactgcacccagcctttgttttattttttattttttgagaggtatgattctttctagagattttttctcatggctactattagatcaggaatgggtgattggagattattagattctaggttaacttctaccactttaccctaatacataaaactttttcctaaataaatgatggaaggaataatacttggttacctggcattatttttcagtaagaaaaaagctttactaaccactacatttatggaaatttgtaggggtaagtattttataggtcataaaaaacaccataatataacgaatctcattttctttaaatgtgaattaaatcctaacagtcatctttataaaatgaccataggctaaaatcttacgtgtaagtactactacaataaataatttctgaaacctttaaatcatatgagttgggccttttttataacttggaatcaacattttttaataaagtatccatagaaaatgatagatctggccgggcgcggtggctcacacctgtaatcccagcactttgggaggccgagatggctggatcatgaggcaggagaatgacatgaacctaggaggcggagcttgcagtgagccgagatcatgccactgcactccaggctgggcaacagagtgagactccatctc

SEQ ID NO: 346380 - DNA, 4944 bp, Homo sapiens
tggaaacctaaggaaaaacgtctgacctgcggaggtagtttgggtggctacttggtgttggacttggctaaataaataccagaggcagataaaacaagcgaggggcctaggtcaagagttccaagtttgttcctcgataaaaaacgacaaacgcggtcgggggcggtgatgcccgcctgcagtcccaacactttaggaagctgaggcggggggatcgcaggagttcgagaccagtctgggcaacataatgagaccatccccaccacctcccgtccttaattttttttaataaaaaaaatctttaagtgagaaatgcatctgtaatgtccttattaaccaaaaacgcctaagggataaagaagcacacgctccctagccaacgctagaggaacacaccccgagagctggtgctgtaggacccagttttcccgcgaaaacgctgccgcgcagggggtcagaccatctggaccaaggggggccgagcgaggcctacttctggtttacgcacgggcgctgaaagaagcggcactgtccccccctgccgatgcgcagtggcgcctcccggaggcggagccacgtacgagcgccgctgtgattggtgaggccccgccaggggcggagacgaccttgccgccggcgggaactctgggtctcgcggtttgggagcgctactcgccaggtggactcggagtccgcgagcgtcgtcggcaagcggccgcctttccacggtaaccgcgcgccggcgggggagggcgtggcgcggagccgacgggaacgtccgcgctgcggagcagggcagggaagccgggaggcgggcccggcccgagcttgtccttgtcgcgcaggtactccgagcactatgtcgtccccggcgtcgaccccgagccgccgcggcagccggcgtggaagggccacccccgcccagacgcctcggagtgaggatgccaggtcatctccctctcagagacgtagaggcgaggattccacctccacgggggagttgcagccgatgccaacctcgcctggagtggacctgcagagccctgctgcgcaggacgtgctgttttccagccctccccaaatgcattcttcagttcaccactgacatacggcactcccagctctcgggtagagggaaccccaagaagtggtgttaggggcacacctgtgagacagaggcctgacctgggctctgcacagatgtaaatgtggcagcatgcaaagaaaactttcagagatttcttcagcgttttattgaccctctggctaaagaagaagaaaatgttggcatagatattactgaacctctatacatgcaacgacttggggagattaatgttattggtgagccatttttaaatgtgaactgtgaacacatcaaatcatttgacaaaaatttgtacagacaactcatctcttacccacaggaagttattccaacttttgacatggctgtcaatgaaatcttctttgaccgttaccctgactcaatcttagaacatcagattcaagtaagaccattcaacgcattgaagactaagaatatgagaaacctgaatccagaagacattgaccagctcatcaccatcagcggcatggtgatcaggacatcccagctgattcccgagatgcaggaggccttcttccagtgccaagtgtgtgcccacacgacccgggtggagatggaccgcggccgcattgcagagcccagtgtgtgcgggcgctgccacaccacccacagcatggcactcatccacaaccgctccctcttctctgacaagcagatgatcaagcttcaggagtctccggaagacatgcctgcagggcagacaccacacacagttatcctgtttgctcacaatgatctcgttgacaaggtccagcctggggacagagtgaatgttacaggcatctatcgagctgtgcctattcgagtcaatccaagagtgagtaatgtgaagtctgtctacaaaacccacattgatgtcattcattatcggaaaacggatgcaaaacgtctgcatggccttgatgaagaagcagaacagaaacttttttcagagaaacgtgtggaattgcttaaggaactttccaggaaaccagacatttatgagaggcttgcttcagccttggctccaagcatttatgaacatgaagatataaagaagggaattttgcttcagctctttggcgggacaaggaaggattttagtcacactggaaggggcaaatttcgggctgagatcaacatcttgctgtgtggcgaccctggtaccagcaagtcccagctgctgcagtacgtgtacaacctcgtccccaggggccagtacacgtctgggaagggctccagtgcagttggcctcactgcgtacgtaatgaaagaccctgagacaaggcagctggtcctgcagacaggtgctcttgtcctgagtgacaacggcatctgctgtatcgatgagttcgacaagatgaatgaaagtacaagatcggtattgcatgaagtcatggaacagcagactctgtccattgcaaaggctgggatcatctgtcagctcaatgcgcgcacctctgtcctggcagcagcaaatcccattgagtctcagtggaatcctaaaaaaacaaccattgaaaacatccagctgcctcatactttattatcaaggtttgatttgatcttcctcatgctggaccctcaggacgaagcctatgacaggcgtctggctcaccacctggtcgcactgtactaccagagcgaggagcaggcagaggaggagctcctggacatggcggtgctaaaggactacattgcctacgcgcacagcaccatcatgccgcggctaagtgaggaagccagccaggctctcatcgaggcttatgtagacatgaggaagattggcagtagccggggaatggtttctgcataccctcgacagctagagtcattaatccgcttagcagaagcccatgctaaagtaagattgtctaacaaagttgaagccattgatgtggaagaggccaaacgcctccatcgggaagctctgaagcagtctgcaactgatccccggactggcatcgtggacatatctattcttactacggggatgagtgccacctctcgtaaacggaaagaagaattagctgaagcattgaaaaagcttattttatctaagggcaaaacaccagctctaaaataccagcaactttttgaagatattcggggacaatctgacatagcaattactaaagatatgtttgaagaagcactgcgtgccctggcagatgatgatttcctgacagtgactgggaagaccgtgcgcttgctctgaagccttgtgagcaaggaaggctccctgcatgtcctgcttgctgcacgccacatgggtgtggtctgcatctcagttggccgccatcagtgtaaatagagcttaaagtcatggtttggctgcataaaaattttctaacttgggttcaatatttgtagtgaagtatctgttttcatttttttcacgttataaataaaaatactatgctggccgggcgcggtggctcacacctgtaatcccagcactttgggaggccaatgtgggtggatcatgaggtcaggagttcaagaccagcctagccaagatggtgaaaccccgtctctagtaaagataacaaaaaattagctgggcttgatggcatgcgcctgtaatcccagctactcgggaggttgaggcaggagaatcgcttaaacccaggcggcagaggttgcagtgagccaagatcgcgccactgcactccagcctcagcaatagagtgagactgtctcaaaaaaaaaaaaaaaaaaaacctgccaattttcaaacataccgtagagattattttcaggtgccattttatagtatagcagcagggcttttactctgtgtatgcacagatgcagtctggggcatggtttgtgtgctggactttctcatggccatcatcagtatgcttatggatttgatgacaggcatagcctgggcatatcacctcattggtaaagggctagagcctttcttttttatggcacttctttttttgagatagggtcttactctgtcaccctggctagagtacactggtacaatcacggctcaatgtaggcttaacctcctgggctcaggtgtatgtcactatgcccggctactttttgtattttttggtagagacggcttcgccacgttgcccaggctgcaagcgatatgcctaggctcaagcgatctgcccacctcaacttccggaagtgctgagattacaggtgtgagccactgcacccagcctttgttttattttttattttttgagaggtatgattctttctagagattttttctcatggctactattagatcaggaatgggtgattggagattattagattctaggttaacttctaccactttaccctaatacataaaactttttcctaaataaatgatggaaggaataatacttggttacctggcattatttttcagtaagaaaaaagctttactaaccactacatttatggaaatttgtaggggtaagtattttataggtcataaaaaacaccataatataacgaatctcattttctttaaatgtgaattaaatcctaacagtcatctttataaaatgaccataggctaaaatcttacgtgtaagtactactacaataaataatttctgaaacctttaaatcatatgagttgggccttttttataacttggaatcaacattttttaataaagtatccatagaaaatgatagatctggccgggcgcggtggctcacacctgtaatcccagcactttgggaggccgagatggctggatcatgaggcaggagaatgacatgaacctaggaggcggagcttgcagtgagccgagatcatgccactgcactccaggctgggcaacagagtgagactccatctc

SEQ ID NO: 346381 - DNA, 4820 bp, Homo sapiens
tggaaacctaaggaaaaacgtctgacctgcggaggtagtttgggtggctacttggtgttggacttggctaaataaataccagaggcagataaaacaagcgaggggcctaggtcaagagttccaagtttgttcctcgataaaaaacgacaaacgcggtcgggggcggtgatgcccgcctgcagtcccaacactttaggaagctgaggcggggggatcgcaggagttcgagaccagtctgggcaacataatgagaccatccccaccacctcccgtccttaattttttttaataaaaaaaatctttaagtgagaaatgcatctgtaatgtccttattaaccaaaaacgcctaagggataaagaagcacacgctccctagccaacgctagaggaacacaccccgagagctggtgctgtaggacccagttttcccgcgaaaacgctgccgcgcagggggtcagaccatctggaccaaggggggccgagcgaggcctacttctggtttacgcacgggcgctgaaagaagcggcactgtccccccctgccgatgcgcagtggcgcctcccggaggcggagccacgtacgagcgccgctgtgattggtgaggccccgccaggggcggagacgaccttgccgccggcgggaactctgggtctcgcggtttgggagcgctactcgccaggtggactcggagtccgcgagcgtcgtcggcaagcggccgcctttccacggtactccgagcactatgtcgtccccggcgtcgaccccgagccgccgcggcagccggcgtggaagggccacccccgcccagacgcctcggagtgaggatgccaggtcatctccctctcagagacgtagaggcgaggattccacctccacgggggagttgcagccgatgccaacctcgcctggagtggacctgcagagccctgctgcgcaggacgtgctgttttccagccctccccaaatgcattcttcagctatccctcttgactttgatgttagttcaccactgacatacggcactcccagctctcgggtagagggaaccccaagaagtggtgttaggggcacacctgtgagacagaggcctgacctgggctctgcacagaagggcctgcaagtggatctgcagtctgacggggcagcagcagaagatatagtggcaagtgagcagtctctaggccaaaaacttgtgatctggggaacagatgtaaatgtggcagcatgcaaagaaaactttcagagatttcttcagcgttttattgaccctctggctaaagaagaagaaaatgttggcatagatattactgaacctctatacatgcaacgacttggggagattaatgttattggtgagccatttttaaatgtgaactgtgaacacatcaaatcatttgacaaaaatttgtacagacaactcatctcttacccacaggaagttattccaacttttgacatggctgtcaatgaaatcttctttgaccgttaccctgactcaatcttagaacatcagattcaagtaagaccattcaacgcattgaagactaagaatatgagaaacctgaatccagaagacattgaccagctcatcaccatcagcggcatggtgatcaggacatcccagctgattcccgagatgcaggaggccttcttccagtgccaaatcaagcttcaggagtctccggaagacatgcctgcagggcagacaccacacacagttatcctgtttgctcacaatgatctcgttgacaaggtccagcctggggacagagtgaatgttacaggcatctatcgagctgtgcctattcgagtcaatccaagagtgagtaatgtgaagtctgtctacaaaacccacattgatgtcattcattatcggaaaacggatgcaaaacgtctgcatggccttgatgaagaagcagaacagaaacttttttcagagaaacgtgtggaattgcttaaggaactttccaggaaaccagacatttatgagaggcttgcttcagccttggctccaagcatttatgaacatgaagatataaagaagggaattttgcttcagctctttggcgggacaaggaaggattttagtcacactggaaggggcaaatttcgggctgagatcaacatcttgctgtgtggcgaccctggtaccagcaagtcccagctgctgcagtacgtgtacaacctcgtccccaggggccagtacacgtctgggaagggctccagtgcagttggcctcactgcgtacgtaatgaaagaccctgagacaaggcagctggtcctgcagacaggtgctcttgtcctgagtgacaacggcatctgctgtatcgatgagttcgacaagatgaatgaaagtacaagatcggtattgcatgaagtcatggaacagcagactctgtccattgcaaaggctgggatcatctgtcagctcaatgcgcgcacctctgtcctggcagcagcaaatcccattgagtctcagtggaatcctaaaaaaacaaccattgaaaacatccagctgcctcatactttattatcaaggtttgatttgatcttcctcatgctggaccctcaggacgaagcctatgacaggcgtctggctcaccacctggtcgcactgtactaccagagcgaggagcaggcagaggaggagctcctggacatggcggtgctaaaggactacattgcctacgcgcacagcaccatcatgccgcggctaagtgaggaagccagccaggctctcatcgaggcttatgtagacatgaggaagattggcagtagccggggaatggtttctgcataccctcgacagctagagtcattaatccgcttagcagaagcccatgctaaagtaagattgtctaacaaagttgaagccattgatgtggaagaggccaaacgcctccatcgggaagctctgaagcagtctgcaactgatccccggactggcatcgtggacatatctattcttactacggggatgagtgccacctctcgtaaacggaaagaagaattagctgaagcattgaaaaagcttattttatctaagggcaaaacaccagctctaaaataccagcaactttttgaagatattcggggacaatctgacatagcaattactaaagatatgtttgaagaagcactgcgtgccctggcagatgatgatttcctgacagtgactgggaagaccgtgcgcttgctctgaagccttgtgagcaaggaaggctccctgcatgtcctgcttgctgcacgccacatgggtgtggtctgcatctcagttggccgccatcagtgtaaatagagcttaaagtcatggtttggctgcataaaaattttctaacttgggttcaatatttgtagtgaagtatctgttttcatttttttcacgttataaataaaaatactatgctggccgggcgcggtggctcacacctgtaatcccagcactttgggaggccaatgtgggtggatcatgaggtcaggagttcaagaccagcctagccaagatggtgaaaccccgtctctagtaaagataacaaaaaattagctgggcttgatggcatgcgcctgtaatcccagctactcgggaggttgaggcaggagaatcgcttaaacccaggcggcagaggttgcagtgagccaagatcgcgccactgcactccagcctcagcaatagagtgagactgtctcaaaaaaaaaaaaaaaaaaaacctgccaattttcaaacataccgtagagattattttcaggtgccattttatagtatagcagcagggcttttactctgtgtatgcacagatgcagtctggggcatggtttgtgtgctggactttctcatggccatcatcagtatgcttatggatttgatgacaggcatagcctgggcatatcacctcattggtaaagggctagagcctttcttttttatggcacttctttttttgagatagggtcttactctgtcaccctggctagagtacactggtacaatcacggctcaatgtaggcttaacctcctgggctcaggtgtatgtcactatgcccggctactttttgtattttttggtagagacggcttcgccacgttgcccaggctgcaagcgatatgcctaggctcaagcgatctgcccacctcaacttccggaagtgctgagattacaggtgtgagccactgcacccagcctttgttttattttttattttttgagaggtatgattctttctagagattttttctcatggctactattagatcaggaatgggtgattggagattattagattctaggttaacttctaccactttaccctaatacataaaactttttcctaaataaatgatggaaggaataatacttggttacctggcattatttttcagtaagaaaaaagctttactaaccactacatttatggaaatttgtaggggtaagtattttataggtcataaaaaacaccataatataacgaatctcattttctttaaatgtgaattaaatcctaacagtcatctttataaaatgaccataggctaaaatcttacgtgtaagtactactacaataaataatttctgaaacctttaaatcatatgagttgggccttttttataacttggaatcaacattttttaataaagtatccatagaaaatgatagatctggccgggcgcggtggctcacacctgtaatcccagcactttgggaggccgagatggctggatcatgaggcaggagaatgacatgaacctaggaggcggagcttgcagtgagccgagatcatgccactgcactccaggctgggcaacagagtgagactccatctc

SEQ ID NO: 346382 - DNA, 3414 bp, Homo sapiens
acttcgctccgtccggaccgtcgctcctttgtggccaagtttttcatcgttgtgtctgcagagctctgagcactcgcttcgcgtcgcggggtctccctcctgttgctttcctaaccctgccctccggggcgtaaataaagtctgcaaggaacccacggcgtgggttcattgcagagcccagtgtgtgcgggcgctgccacaccacccacagcatggcactcatccacaaccgctccctcttctctgacaagcagatgatcaagcttcaggagtctccggaagacatgcctgcagggcagacaccacacacagttatcctgtttgctcacaatgatctcgttgacaaggtccagcctggggacagagtgaatgttacaggcatctatcgagctgtgcctattcgagtcaatccaagagtgagtaatgtgaagtctgtctacaaaacccacattgatgtcattcattatcggaaaacggatgcaaaacgtctgcatggccttgatgaagaagcagaacagaaacttttttcagagaaacgtgtggaattgcttaaggaactttccaggaaaccagacatttatgagaggcttgcttcagccttggctccaagcatttatgaacatgaagatataaagaagggaattttgcttcagctctttggcgggacaaggaaggattttagtcacactggaaggggcaaatttcgggctgagatcaacatcttgctgtgtggcgaccctggtaccagcaagtcccagctgctgcagtacgtgtacaacctcgtccccaggggccagtacacgtctgggaagggctccagtgcagttggcctcactgcgtacgtaatgaaagaccctgagacaaggcagctggtcctgcagacaggtgctcttgtcctgagtgacaacggcatctgctgtatcgatgagttcgacaagatgaatgaaagtacaagatcggtattgcatgaagtcatggaacagcagactctgtccattgcaaaggctgggatcatctgtcagctcaatgcgcgcacctctgtcctggcagcagcaaatcccattgagtctcagtggaatcctaaaaaaacaaccattgaaaacatccagctgcctcatactttattatcaaggtttgatttgatcttcctcatgctggaccctcaggacgaagcctatgacaggcgtctggctcaccacctggtcgcactgtactaccagagcgaggagcaggcagaggaggagctcctggacatggcggtgctaaaggactacattgcctacgcgcacagcaccatcatgccgcggctaagtgaggaagccagccaggctctcatcgaggcttatgtagacatgaggaagattggcagtagccggggaatggtttctgcataccctcgacagctagagtcattaatccgcttagcagaagcccatgctaaagtaagattgtctaacaaagttgaagccattgatgtggaagaggccaaacgcctccatcgggaagctctgaagcagtctgcaactgatccccggactggcatcgtggacatatctattcttactacggggatgagtgccacctctcgtaaacggaaagaagaattagctgaagcattgaaaaagcttattttatctaagggcaaaacaccagctctaaaataccagcaactttttgaagatattcggggacaatctgacatagcaattactaaagatatgtttgaagaagcactgcgtgccctggcagatgatgatttcctgacagtgactgggaagaccgtgcgcttgctctgaagccttgtgagcaaggaaggctccctgcatgtcctgcttgctgcacgccacatgggtgtggtctgcatctcagttggccgccatcagtgtaaatagagcttaaagtcatggtttggctgcataaaaattttctaacttgggttcaatatttgtagtgaagtatctgttttcatttttttcacgttataaataaaaatactatgctggccgggcgcggtggctcacacctgtaatcccagcactttgggaggccaatgtgggtggatcatgaggtcaggagttcaagaccagcctagccaagatggtgaaaccccgtctctagtaaagataacaaaaaattagctgggcttgatggcatgcgcctgtaatcccagctactcgggaggttgaggcaggagaatcgcttaaacccaggcggcagaggttgcagtgagccaagatcgcgccactgcactccagcctcagcaatagagtgagactgtctcaaaaaaaaaaaaaaaaaaaacctgccaattttcaaacataccgtagagattattttcaggtgccattttatagtatagcagcagggcttttactctgtgtatgcacagatgcagtctggggcatggtttgtgtgctggactttctcatggccatcatcagtatgcttatggatttgatgacaggcatagcctgggcatatcacctcattggtaaagggctagagcctttcttttttatggcacttctttttttgagatagggtcttactctgtcaccctggctagagtacactggtacaatcacggctcaatgtaggcttaacctcctgggctcaggtgtatgtcactatgcccggctactttttgtattttttggtagagacggcttcgccacgttgcccaggctgcaagcgatatgcctaggctcaagcgatctgcccacctcaacttccggaagtgctgagattacaggtgtgagccactgcacccagcctttgttttattttttattttttgagaggtatgattctttctagagattttttctcatggctactattagatcaggaatgggtgattggagattattagattctaggttaacttctaccactttaccctaatacataaaactttttcctaaataaatgatggaaggaataatacttggttacctggcattatttttcagtaagaaaaaagctttactaaccactacatttatggaaatttgtaggggtaagtattttataggtcataaaaaacaccataatataacgaatctcattttctttaaatgtgaattaaatcctaacagtcatctttataaaatgaccataggctaaaatcttacgtgtaagtactactacaataaataatttctgaaacctttaaatcatatgagttgggccttttttataacttggaatcaacattttttaataaagtatccatagaaaatgatagatctggccgggcgcggtggctcacacctgtaatcccagcactttgggaggccgagatggctggatcatgaggcaggagaatgacatgaacctaggaggcggagcttgcagtgagccgagatcatgccactgcactccaggctgggcaacagagtgagactccatctc

SEQ ID NO: 346383 - DNA, 2978 bp, Homo sapiens
  misc_feature (2896)..(2896): n is a, c, g, or t
tggaaacctaaggaaaaacgtctgacctgcggaggtagtttgggtggctacttggtgttggacttggctaaataaataccagaggcagataaaacaagcgaggggcctaggtcaagagttccaagtttgttcctcgataaaaaacgacaaacgcggtcgggggcggtgatgcccgcctgcagtcccaacactttaggaagctgaggcggggggatcgcaggagttcgagaccagtctgggcaacataatgagaccatccccaccacctcccgtccttaattttttttaataaaaaaaatctttaagtgagaaatgcatctgtaatgtccttattaaccaaaaacgcctaagggataaagaagcacacgctccctagccaacgctagaggaacacaccccgagagctggtgctgtaggacccagttttcccgcgaaaacgctgccgcgcagggggtcagaccatctggaccaaggggggccgagcgaggcctacttctggtttacgcacgggcgctgaaagaagcggcactgtccccccctgccgatgcgcagtggcgcctcccggaggcggagccacgtacgagcgccgctgtgattggtgaggccccgccaggggcggagacgaccttgccgccggcgggaactctgggtctcgcggtttgggagcgctactcgccaggtggactcggagtccgcgagcgtcgtcggcaagcggccgcctttccacggtactccgagcactatgtcgtccccggcgtcgaccccgagccgccgcggcagccggcgtggaagggccacccccgcccagacgcctcggagtgaggatgccaggtcatctccctctcagagacgtagaggcgaggattccacctccacgggggagttgcagccgatgccaacctcgcctggagtggacctgcagagccctgctgcgcaggacgtgctgttttccagccctccccaaatgcattcttcagctatccctcttgactttgatgttagttcaccactgacatacggcactcccagctctcgggtagagggaaccccaagaagtggtgttaggggcacacctgtgagacagaggcctgacctgggctctgcacagaagggcctgcaagtggatctgcagtctgacggggcagcagcagaagatatagtggcaagtgagcagtctctaggccaaaaacttgtgatctggggaacagatgtaaatgtggcagcatgcaaagaaaactttcagagatttcttcagcgttttattgaccctctggctaaagaagaagaaaatgttggcatagatattactgaacctctatacatgcaacgacttggggagattaatgttattggtgagccatttttaaatgtgaactgtgaacacatcaaatcatttgacaaaaatttgtacagacaactcatctcttacccacaggaagttattccaacttttgacatggctgtcaatgaaatcttctttgaccgttaccctgactcaatcttagaacatcagattcaagtaagaccattcaacgcattgaagactaagaatatgagaaacctgaatccagaagacattgaccagctcatcaccatcagcggcatggtgatcaggacatcccagctgattcccgagatgcaggaggccttcttccagtgccaagtgtgtgcccacacgacccgggtggagatggaccgcggccgcattgcagagcccagtgtgtgcgggcgctgccacaccacccacagcatggcactcatccacaaccgctccctcttctctgacaagcagatgatcaagcttcaggagtctccggaagacatgcctgcagggcagacaccacacacagttatcctgtttgctcacaatgatctcgttgacaaggtccagcctggggacagagtgaatgttacaggcatctatcgagctgtgcctattcgagtcaatccaagagtgagtaatgtgaagtctgtctacaaaacccacattgatgtcattcattatcggaaaacggatgcaaaacgtctgcatggccttgatgaagaagcagaacagaaacttttttcagagaaacgtgtggaattgcttaaggaactttccaggaaaccagacatttatgagaggcttgcttcagccttggctccaagcatttatgaacatgaagatataaagaagggaattttgcttcagctctttggcgggacaaggaaggattttagtcacactggaaggggcaaatttcgggctgagatcaacatcttgctgtgtggcgaccctggtaccagcaagtcccagctgctgcagtacgtgtacaacctcgtccccaggggccagtacacgtctgggaagggctccagtgcagttggcctcactgcgtacgtaatgaaagaccctgagacaaggcagctggtcctgcagacaggtgctcttgtcctgagtgacaacggcatctgctgtatcgatgagttcgacaagatgaatgaaagtacaagatcggtattgcatgaagtcatggaacagcagactctgtccattgcaaaggctgggatcatctgtcagctcaatgcgcgcacctctgtcctggcagcagcaaatcccattgagtctcagtggaatcctaaaaaaacaaccattgaaaacatccagctgcctcatactttattatcaaggtttgatttgatcttcctcatgctggaccctcaggacgaagcctatgacaggcgtctggctcaccacctggtcgcactgtactaccagagcgaggagcaggcagaggaggagctcctggacatggcggtgctaaaggactacattgcctacgcgcacagcaccatcatgccgcggctaagtgaggaagccagccaggctctcatcgaggctcatgctgaccctccngacgaacctatacaagcgtctggctcatccacctgtcgcacagtactacacagagcgaggacgctaatctgctgaggatacc

SEQ ID NO: 346384 - DNA, 2371 bp, Homo sapiens
tggaaacctaaggaaaaacgtctgacctgcggaggtagtttgggtggctacttggtgttggacttggctaaataaataccagaggcagataaaacaagcgaggggcctaggtcaagagttccaagtttgttcctcgataaaaaacgacaaacgcggtcgggggcggtgatgcccgcctgcagtcccaacactttaggaagctgaggcggggggatcgcaggagttcgagaccagtctgggcaacataatgagaccatccccaccacctcccgtccttaattttttttaataaaaaaaatctttaagtgagaaatgcatctgtaatgtccttattaaccaaaaacgcctaagggataaagaagcacacgctccctagccaacgctagaggaacacaccccgagagctggtgctgtaggacccagttttcccgcgaaaacgctgccgcgcagggggtcagaccatctggaccaaggggggccgagcgaggcctacttctggtttacgcacgggcgctgaaagaagcggcactgtccccccctgccgatgcgcagtggcgcctcccggaggcggagccacgtacgagcgccgctgtgattggtgaggccccgccaggggcggagacgaccttgccgccggcgggaactctgggtctcgcggtttgggagcgctactcgccaggtggactcggagtccgcgagcgtcgtcggcaagcggccgcctttccacggtactccgagcactatgtcgtccccggcgtcgaccccgagccgccgcggcagccggcgtggaagggccacccccgcccagacgcctcggagtgaggatgccaggtcatctccctctcagagacgtagaggcgaggattccacctccacgggggagttgcagccgatgccaacctcgcctggagtggacctgcagagccctgctgcgcaggacgtgctgttttccagccctccccaaatgcattcttcagctatccctcttgactttgatgttagttcaccactgacatacggcactcccagctctcgggtagagggaaccccaagaagtggtgttaggggcacacctgtgagacagaggcctgacctgggctctgcacagaagggcctgcaagtggatctgcagtctgacggggcagcagcagaagatatagtggcaagtgagcagtctctaggccaaaaacttgtgatctggggaacagatgtaaatgtggcagcatgcaaagaaaactttcagagatttcttcagcgttttattgaccctctggctaaagaagaagaaaatgttggcatagatattactgaacctctatacatgcaacgacttggggagattaatgttattggtgagccatttttaaatgtgaactgtgaacacatcaaatcatttgacaaaaatttgtacagacaactcatctcttacccacaggaagttattccaacttttgacatggctgtcaatgaaatcttctttgaccgttaccctgactcaatcttagaacatcagattcaagtaagaccattcaacgcattgaagactaagaatatgagaaacctgaatccagaagacattgaccagctcatcaccatcagcggcatggtgatcaggacatcccagctgattcccgagatgcaggaggccttcttccagtgccaagtgtgtgcccacacgacccgggtggagatggaccgcggccgcattgcagagcccagtgtgtgcgggcgctgccacaccacccacagcatggcactcatccacaaccgctccctcttctctgacaagcagatgatcaagcttcaggagtctccggaagacatgcctgcagggcagacaccacacacagttatcctgtttgctcacaatgatctcgttgacaaggtccagcctggggacagagtgaatgttacaggcatctatcgagctgtgcctattcgagtcaatccaagagtgagtaatgtgaagtctgtctacaaaacccacattgatgtcattcattatcggaaaacggatgcaaaacgtctgcatggccttgatgaagaagcagaacagaaacttttttcagagaaacgtgtggaattgcttaaggaactttccaggaaaccagacatttatgagaggcttgcttcagccttggctccaagcatttatgaacatgaagatataaagaagcttgaaggattttcacgcacagggcacattttggctgtcccaagtactttggccggggacccagggcacggcatttaggacacaccggcgcagggggcaaattacggagctgagaatcaagcttcttgcagtgattgggaacccttggtacccagcaagttcccacggcgagttaagtgtatacaccatgtaccc

SEQ ID NO: 346385 - DNA, 2133 bp, Homo sapiens
tggaaacctaaggaaaaacgtctgacctgcggaggtagtttgggtggctacttggtgttggacttggctaaataaataccagaggcagataaaacaagcgaggggcctaggtcaagagttccaagtttgttcctcgataaaaaacgacaaacgcggtcgggggcggtgatgcccgcctgcagtcccaacactttaggaagctgaggcggggggatcgcaggagttcgagaccagtctgggcaacataatgagaccatccccaccacctcccgtccttaattttttttaataaaaaaaatctttaagtgagaaatgcatctgtaatgtccttattaaccaaaaacgcctaagggataaagaagcacacgctccctagccaacgctagaggaacacaccccgagagctggtgctgtaggacccagttttcccgcgaaaacgctgccgcgcagggggtcagaccatctggaccaaggggggccgagcgaggcctacttctggtttacgcacgggcgctgaaagaagcggcactgtccccccctgccgatgcgcagtggcgcctcccggaggcggagccacgtacgagcgccgctgtgattggtgaggccccgccaggggcggagacgaccttgccgccggcgggaactctgggtctcgcggtttgggagcgctactcgccaggtggactcggagtccgcgagcgtcgtcggcaagcggccgcctttccacggtactccgagcactatgtcgtccccggcgtcgaccccgagccgccgcggcagccggcgtggaagggccacccccgcccagacgcctcggagtgaggatgccaggtcatctccctctcagagacgtagaggcgaggattccacctccacgggggagttgcagccgatgccaacctcgcctggagtggacctgcagagccctgctgcgcaggacgtgctgttttccagccctccccaaatgcattcttcagctatccctcttgactttgatgttagttcaccactgacatacggcactcccagctctcgggtagagggaaccccaagaagtggtgttaggggcacacctgtgagacagaggcctgacctgggctctgcacagaagggcctgcaagtggatctgcagtctgacggggcagcagcagaagatatagtggcaagtgagcagtctctaggccaaaaacttgtgatctggggaacagatgtaaatgtggcagcatgcaaagaaaactttcagagatttcttcagcgttttattgaccctctggctaaagaagaagaaaatgttggcatagatattactgaacctctatacatgcaacgacttggggagattaatgttattggtgagccatttttaaatgtgaactgtgaacacatcaaatcatttgacaaaaatttgtacagacaactcatctcttacccacaggaagttattccaacttttgacatggctgtcaatgaaatcttctttgaccgttaccctgactcaatcttagaacatcagattcaagtaagaccattcaacgcattgaagactaagaatatgagaaacctgaatccagaagacattgaccagctcatcaccatcagcggcatggtgatcaggacatcccagctgattcccgagatgcaggaggccttcttccagtgccaagtgtgtgcccacacgacccgggtggagatggaccgcggccgcattgcagagcccagtgtgtgcgggcgctgccacaccacccacagcatggcactcatccacaaccgctccctcttctctgacaagcagatggtgcgcagccaccctggccccccaggctatgctttgcctgtctgtatcctcaaaaggccaactataacttgtccctcggaccctgagcctcacttcccgaatggcatccatccctctctggtcttgtgggtttcgttagtggcctatgggctaaatatgcagagcacgcaaagcccctgcttcagggcactgtccctgtgctgttgccagtggcactgtctgttgttagagacactgtattttcatggcctaaaatgcttcaaacgtttgagatgagaatacttggttaaatgtcattctgctttttccattggtaaaggattgaggaatttttctga

SEQ ID NO: 346386 - DNA, 1957 bp, Homo sapiens
  misc_feature (857)..(857): n is a, c, g, or t
  misc_feature (859)..(859): n is a, c, g, or t
  misc_feature (870)..(870): n is a, c, g, or t
  misc_feature (873)..(873): n is a, c, g, or t
  misc_feature (878)..(878): n is a, c, g, or t
gaacctaactttatcatacataagcgtctcgaagtcgcgttaaggaacgttaccagtgaatcactagactagtttactgtaagaggagcattgccttgtctacactcgtatgtgacgtcgcatatgcgacttttcatcgacaccaattgacacgaatactacacacgagaccgggagaagcagagacagttacgtcgtagacagccattcgagaatgagactttacttgatagtcttaatgaggtcggaaatctacctagctcgtgaaattaccaggcaacttctatgatacgattttcggggagcaatcgtgacatagcaattactaaagatatgtttgaagaagcactgcgtgccctggcagatgatgatttcctgacagtgactgggaagaccgtgcgcttgctctgaagccttgtgagcaaggaaggctccctgcatgtcctgcttgctgcacgccacatgggtgtggtctgcatctcagttggccgccatcagtgtaaatagagcttaaagtcatggtttggctgcataaaaattttctaacttgggttcaatatttgtagtgaagtatctgttttcatttttttcacgttataaataaaaatactatgctggccgggcgcggtggctcacacctgtaatcccagcactttgggaggccaatgtgggtggatcatgaggtcaggagttcaagaccagcctagccaagatggtgaaaccccgtctctagtaaagataacaaaaaattagctgggcttgatggcatgcgcctgtaatcccagctactcgggagaaaaaaaaaaaaaaaaaaaaaaaaaaaaaaaacccgcgcgcccagtttctaacacactatntncgcggaaaganttntttgnagggggtgccattttatagtatagcagcagggcttttactctgtgtatgcacagatgcagtctggggcatggtttgtgtgctggactttctcatggccatcatcagtatgcttatggatttgatgacaggcatagcctgggcatatcacctcattggtaaagggctagagcctttcttttttatggcacttctttttttgagatagggtcttactctgtcaccctggctagagtacactggtacaatcacggctcaatgtaggcttaacctcctgggctcaggtgtatgtcactatgcccggctactttttgtattttttggtagagacggcttcgccacgttgcccaggctgcaagcgatatgcctaggctcaagcgatctgcccacctcaacttccggaagtgctgagattacaggtgtgagccactgcacccagcctttgttttattttttattttttgagaggtatgattctttctagagattttttctcatggctactattagatcaggaatgggtgattggagattattagattctaggttaacttctaccactttaccctaatacataaaactttttcctaaataaatgatggaaggaataatacttggttacctggcattatttttcagtaagaaaaaagctttactaaccactacatttatggaaatttgtaggggtaagtattttataggtcataaaaaacaccataatataacgaatctcattttctttaaatgtgaattaaatcctaacagtcatctttataaaatgaccataggctaaaatcttacgtgtaagtactactacaataaataatttctgaaacctttaaatcatatgagttgggccttttttataacttggaatcaacattttttaataaagtatccatagaaaatgatagatctggccgggcgcggtggctcacacctgtaatcccagcactttgggaggccgagatggctggatcatgaggcaggagaatgacatgaacctaggaggcggagcttgcagtgagccgagatcatgccactgcactccaggctgggcaacagagtgagactccatctc

SEQ ID NO: 346387 - DNA, 366 bp, Homo sapiens
ttggctccaagcatttatgaacatgaagatataaagaagaaggtaacagtggattttaaactaggggttgggatttacaattctttgggatcaaatagtataaacatccactccgccactcgagccatccgccataaaggacagagttgtggcctgttagagcaagtgctggcaacctgacttgccattggttgagaagaatcatagcattgtctatcctcatctctggtctaaacttaggtttctaaacagaagaggccacacagtgtcagaatagggacttgcatggccaccattctggtgtaatgataggtgctgatgaactggtcagtgataacttaaagcatatcaagcactttcacgagc

SEQ ID NO: 346388 - DNA, 3943 bp, Homo sapiens
tggaaacctaaggaaaaacgtctgacctgcggaggtagtttgggtggctacttggtgttggacttggctaaataaataccagaggcagataaaacaagcgaggggcctaggtcaagagttccaagtttgttcctcgataaaaaacgacaaacgcggtcgggggcggtgatgcccgcctgcagtcccaacactttaggaagctgaggcggggggatcgcaggagttcgagaccagtctgggcaacataatgagaccatccccaccacctcccgtccttaattttttttaataaaaaaaatctttaagtgagaaatgcatctgtaatgtccttattaaccaaaaacgcctaagggataaagaagcacacgctccctagccaacgctagaggaacacaccccgagagctggtgctgtaggacccagttttcccgcgaaaacgctgccgcgcagggggtcagaccatctggaccaaggggggccgagcgaggcctacttctggtttacgcacgggcgctgaaagaagcggcactgtccccccctgccgatgcgcagtggcgcctcccggaggcggagccacgtacgagcgccgctgtgattggtgaggccccgccaggggcggagacgaccttgccgccggcgggaactctgggtctcgcggtttgggagcgctactcgccaggtggactcggagtccgcgagcgtcgtcggcaagcggccgcctttccacggtaaccgcgcgccggcgggggagggcgtggcgcggagccgacgggaacgtccgcgctgcggagcagggcagggaagccgggaggcgggcccggcccgagcttgtccttgtcgcgcaggtactccgagcactatgtcgtccccggcgtcgaccccgagccgccgcggcagccggcgtggaagggccacccccgcccagacgcctcggagtgaggatgccaggtcatctccctctcagagacgtagaggcgaggattccacctccacgggggagttgcagccgatgccaacctcgcctggagtggacctgcagagccctgctgcgcaggacgtgctgttttccagccctccccaaatgcattcttcagctatccctcttgactttgatgttagttcaccactgacatacggcactcccagctctcgggtagagggaaccccaagaagtggtgttaggggcacacctgtgagacagaggcctgacctgggctctgcacagaagggcctgcaagtggatctgcagtctgacggggcagcagcagaagatatagtggcaagtgagcagtctctaggccaaaaacttgtgatctggggaacagatgtaaatgtggcagcatgcaaagaaaactttcagagatttcttcagcgttttattgaccctctggctaaagaagaagaaaatgttggcatagatattactgaacctctatacatgcaacgacttggggagattaatgttattggtgagccatttttaaatgtgaactgtgaacacatcaaatcatttgacaaaaatttgtacagacaactcatctcttacccacaggaagttattccaacttttgacatggctgtcaatgaaatcttctttgaccgttaccctgactcaatcttagaacatcagattcaagtaagaccattcaacgcattgaagactaagaatatgagaaacctgaatccagaagacattgaccagctcatcaccatcagcggcatggtgatcaggacatcccagctgattcccgagatgcaggaggccttcttccagtgccaagtgtgtgcccacacgacccgggtggagatggaccgcggccgcattgcagagcccagtgtgtgcgggcgctgccacaccacccacagcatggcactcatccacaaccgctccctcttctctgacaagcagatgatcaagcttcaggagtctccggaagacatgcctgcagggcagacaccacacacagttatcctgtttgctcacaatgatctcgttgacaaggtccagcctggggacagagtgaatgttacaggcatctatcgagctgtgcctattcgagtcaatccaagagtgagtaatgtgaagtctgtctacaaaacccacattgatgtcattcattatcggaaaacggatgcaaaacgtctgcatggccttgatgaagaagcagaacagaaacttttttcagagaaacgtgtggaattgcttaaggaactttccaggaaaccagacatttatgagaggcttgcttcagccttggctccaagcatttatgaacatgaagatataaagaagggaattttgcttcagctctttggcgggacaaggaaggattttagtcacactggaaggggcaaatttcgggctgagatcaacatcttgctgtgtggcgaccctggtaccagcaagtcccagctgctgcagtacgtgtacaacctcgtccccaggggccagtacacgtctgggaagggctccagtgcagttggcctcactgcgtacgtaatgaaagaccctgagacaaggcagctggtcctgcagacaggtgctcttgtcctgagtgacaacggcatctgctgtatcgatgagttcgacaagatgaatgaaagtacaagatcggtattgcatgaagtcatggaacagcagactctgtccattgcaaaggctgggatcatctgtcagctcaatgcgcgcacctctgtcctggcagcagcaaatcccattgagtctcagtggaatcctaaaaaaacaaccattgaaaacatccagctgcctcatactttattatcaaggtttgatttgatcttcctcatgctggaccctcaggacgaagcctatgacaggcgtctggctcaccacctggtcgcactgtactaccagagcgaggagcaggcagaggaggagctcctggacatggcggtgctaaaggactacattgcctacgcgcacagcaccatcatgccgcggctaagtgaggaagccagccaggctctcatcgaggcttatgtagacatgaggaagattggcagtagccggggaatggtttctgcataccctcgacagctagagtcattaatccgcttagcagaagcccatgctaaagtaagattgtctaacaaagttgaagccattgatgtggaagaggccaaacgcctccatcgggaagctctgaagcagtctgcaactgatccccggactggcatcgtggacatatctattcttactacggggatgagtgccacctctcgtaaacggaaagaagaattagctgaagcattgaaaaagcttattttatctaagggcaaaacaccagctctaaaataccagcaactttttgaagatattcggggacaatctgacatagcaattactaaagatatgtttgaagaagcactgcgtgccctggcagatgatgatttcctgacagtgactgggaagaccgtgcgcttgctctgaagccttgtgagcaaggaaggctccctgcatgtcctgcttgctgcacgccacatgggtgtggtctgcatctcagttggccgccatcagtgtaaatagagcttaaagtcatggtttggctgcataaaaattttctaacttgggttcaatatttgtagtgaagtatctgttttcatttttttcacgttataaataaaaatactatgctggccgggcgcggtggctcacacctgtaatcccagcactttgggaggccaatgtgggtggatcatgaggtcaggagttcaagaccagcctagccaagatggtgaaaccccgtctctagtaaagataacaaaaaattagctgggcttgatggcatgcgcctgtaatcccagctactcgggaggttgaggcaggagaatcgcttaaacccaggcggcagaggttgcagtgagccaagatcgcgccactgcactccagcctcagcaatagagtgagactgtctcaaaaaaa

SEQ ID NO: 346389 - DNA, 4880 bp, Homo sapiens
  misc_feature (3780)..(3780): n is a, c, g, or t
  misc_feature (3782)..(3782): n is a, c, g, or t
  misc_feature (3793)..(3793): n is a, c, g, or t
  misc_feature (3796)..(3796): n is a, c, g, or t
  misc_feature (3801)..(3801): n is a, c, g, or t
tggaaacctaaggaaaaacgtctgacctgcggaggtagtttgggtggctacttggtgttggacttggctaaataaataccagaggcagataaaacaagcgaggggcctaggtcaagagttccaagtttgttcctcgataaaaaacgacaaacgcggtcgggggcggtgatgcccgcctgcagtcccaacactttaggaagctgaggcggggggatcgcaggagttcgagaccagtctgggcaacataatgagaccatccccaccacctcccgtccttaattttttttaataaaaaaaatctttaagtgagaaatgcatctgtaatgtccttattaaccaaaaacgcctaagggataaagaagcacacgctccctagccaacgctagaggaacacaccccgagagctggtgctgtaggacccagttttcccgcgaaaacgctgccgcgcagggggtcagaccatctggaccaaggggggccgagcgaggcctacttctggtttacgcacgggcgctgaaagaagcggcactgtccccccctgccgatgcgcagtggcgcctcccggaggcggagccacgtacgagcgccgctgtgattggtgaggccccgccaggggcggagacgaccttgccgccggcgggaactctgggtctcgcggtttgggagcgctactcgccaggtggactcggagtccgcgagcgtcgtcggcaagcggccgcctttccacggtactccgagcactatgtcgtccccggcgtcgaccccgagccgccgcggcagccggcgtggaagggccacccccgcccagacgcctcggagtgaggatgccaggtcatctccctctcagagacgtagaggcgaggattccacctccacgggggagttgcagccgatgccaacctcgcctggagtggacctgcagagccctgctgcgcaggacgtgctgttttccagccctccccaaatgcattcttcagctatccctcttgactttgatgttagttcaccactgacatacggcactcccagctctcgggtagagggaaccccaagaagtggtgttaggggcacacctgtgagacagaggcctgacctgggctctgcacagaagggcctgcaagtggatctgcagtctgacggggcagcagcagaagatatagtggcaagtgagcagtctctaggccaaaaacttgtgatctggggaacagatgtaaatgtggcagcatgcaaagaaaactttcagagatttcttcagcgttttattgaccctctggctaaagaagaagaaaatgttggcatagatattactgaacctctatacatgcaacgacttggggagattaatgttattggtgagccatttttaaatgtgaactgtgaacacatcaaatcatttgacaaaaatttgtacagacaactcatctcttacccacaggaagttattccaacttttgacatggctgtcaatgaaatcttctttgaccgttaccctgactcaatcttagaacatcagattcaagtaagaccattcaacgcattgaagactaagaatatgagaaacctgaatccagaagacattgaccagctcatcaccatcagcggcatggtgatcaggacatcccagctgattcccgagatgcaggaggccttcttccagtgccaagtgtgtgcccacacgacccgggtggagatggaccgcggccgcattgcagagcccagtgtgtgcgggcgctgccacaccacccacagcatggcactcatccacaaccgctccctcttctctgacaagcagatgatcaagcttcaggagtctccggaagacatgcctgcagggcagacaccacacacagttatcctgtttgctcacaatgatctcgttgacaaggtccagcctggggacagagtgaatgttacaggcatctatcgagctgtgcctattcgagtcaatccaagagtgagtaatgtgaagtctgtctacaaaacccacattgatgtcattcattatcggaaaacggatgcaaaacgtctgcatggccttgatgaagaagcagaacagaaacttttttcagagaaacgtgtggaattgcttaaggaactttccaggaaaccagacatttatgagaggcttgcttcagccttggctccaagcatttatgaacatgaagatataaagaagggaattttgcttcagctctttggcgggacaaggaaggattttagtcacactggaaggggcaaatttcgggctgagatcaacatcttgctgtgtggcgaccctggtaccagcaagtcccagctgctgcagtacgtgtacaacctcgtccccaggggccagtacacgtctgggaagggctccagtgcagttggcctcactgcgtacgtaatgaaagaccctgagacaaggcagctggtcctgcagacaggtgctcttgtcctgagtgacaacggcatctgctgtatcgatgagttcgacaagatgaatgaaagtacaagatcggtattgcatgaagtcatggaacagcagactctgtccattgcaaaggctgggatcatctgtcagctcaatgcgcgcacctctgtcctggcagcagcaaatcccattgagtctcagtggaatcctaaaaaaacaaccattgaaaacatccagctgcctcatactttattatcaaggtttgatttgatcttcctcatgctggaccctcaggacgaagcctatgacaggcgtctggctcaccacctggtcgcactgtactaccagagcgaggagcaggcagaggaggagctcctggacatggcggtgctaaaggactacattgcctacgcgcacagcaccatcatgccgcggctaagtgaggaagccagccaggctctcatcgaggcttatgtagacatgaggaagattggcagtagccggggaatggtttctgcataccctcgacagctagagtcattaatccgcttagcagaagcccatgctaaagtaagattgtctaacaaagttgaagccattgatgtggaagaggccaaacgcctccatcgggaagctctgaagcagtctgcaactgatccccggactggcatcgtggacatatctattcttactacggggatgagtgccacctctcgtaaacggaaagaagaattagctgaagcattgaaaaagcttattttatctaagggcaaaacaccagctctaaaataccagcaactttttgaagatattcggggacaatctgacatagcaattactaaagatatgtttgaagaagcactgcgtgccctggcagatgatgatttcctgacagtgactgggaagaccgtgcgcttgctctgaagccttgtgagcaaggaaggctccctgcatgtcctgcttgctgcacgccacatgggtgtggtctgcatctcagttggccgccatcagtgtaaatagagcttaaagtcatggtttggctgcataaaaattttctaacttgggttcaatatttgtagtgaagtatctgttttcatttttttcacgttataaataaaaatactatgctggccgggcgcggtggctcacacctgtaatcccagcactttgggaggccaatgtgggtggatcatgaggtcaggagttcaagaccagcctagccaagatggtgaaaccccgtctctagtaaagataacaaaaaattagctgggcttgatggcatgcgcctgtaatcccagctactcgggagaaaaaaaaaaaaaaaaaaaaaaaaaaaaaaaacccgcgcgcccagtttctaacacactatntncgcggaaaganttntttgnagggggtgccattttatagtatagcagcagggcttttactctgtgtatgcacagatgcagtctggggcatggtttgtgtgctggactttctcatggccatcatcagtatgcttatggatttgatgacaggcatagcctgggcatatcacctcattggtaaagggctagagcctttcttttttatggcacttctttttttgagatagggtcttactctgtcaccctggctagagtacactggtacaatcacggctcaatgtaggcttaacctcctgggctcaggtgtatgtcactatgcccggctactttttgtattttttggtagagacggcttcgccacgttgcccaggctgcaagcgatatgcctaggctcaagcgatctgcccacctcaacttccggaagtgctgagattacaggtgtgagccactgcacccagcctttgttttattttttattttttgagaggtatgattctttctagagattttttctcatggctactattagatcaggaatgggtgattggagattattagattctaggttaacttctaccactttaccctaatacataaaactttttcctaaataaatgatggaaggaataatacttggttacctggcattatttttcagtaagaaaaaagctttactaaccactacatttatggaaatttgtaggggtaagtattttataggtcataaaaaacaccataatataacgaatctcattttctttaaatgtgaattaaatcctaacagtcatctttataaaatgaccataggctaaaatcttacgtgtaagtactactacaataaataatttctgaaacctttaaatcatatgagttgggccttttttataacttggaatcaacattttttaataaagtatccatagaaaatgatagatctggccgggcgcggtggctcacacctgtaatcccagcactttgggaggccgagatggctggatcatgaggcaggagaatgacatgaacctaggaggcggagcttgcagtgagccgagatcatgccactgcactccaggctgggcaacagagtgagactccatctc

SEQ ID NO: 346390 - DNA, 3826 bp, Homo sapiens
tggaaacctaaggaaaaacgtctgacctgcggaggtagtttgggtggctacttggtgttggacttggctaaataaataccagaggcagataaaacaagcgaggggcctaggtcaagagttccaagtttgttcctcgataaaaaacgacaaacgcggtcgggggcggtgatgcccgcctgcagtcccaacactttaggaagctgaggcggggggatcgcaggagttcgagaccagtctgggcaacataatgagaccatccccaccacctcccgtccttaattttttttaataaaaaaaatctttaagtgagaaatgcatctgtaatgtccttattaaccaaaaacgcctaagggataaagaagcacacgctccctagccaacgctagaggaacacaccccgagagctggtgctgtaggacccagttttcccgcgaaaacgctgccgcgcagggggtcagaccatctggaccaaggggggccgagcgaggcctacttctggtttacgcacgggcgctgaaagaagcggcactgtccccccctgccgatgcgcagtggcgcctcccggaggcggagccacgtacgagcgccgctgtgattggtgaggccccgccaggggcggagacgaccttgccgccggcgggaactctgggtctcgcggtttgggagcgctactcgccaggtggactcggagtccgcgagcgtcgtcggcaagcggccgcctttccacggtactccgagcactatgtcgtccccggcgtcgaccccgagccgccgcggcagccggcgtggaagggccacccccgcccagacgcctcggagtgaggatgccaggtcatctccctctcagagacgtagaggcgaggattccacctccacgggggagttgcagccgatgccaacctcgcctggagtggacctgcagagccctgctgcgcaggacgtgctgttttccagccctccccaaatgcattcttcagctatccctcttgactttgatgttagttcaccactgacatacggcactcccagctctcgggtagagggaaccccaagaagtggtgttaggggcacacctgtgagacagaggcctgacctgggctctgcacagaagggcctgcaagtggatctgcagtctgacggggcagcagcagaagatatagtggcaagtgagcagtctctaggccaaaaacttgtgatctggggaacagatgtaaatgtggcagcatgcaaagaaaactttcagagatttcttcagcgttttattgaccctctggctaaagaagaagaaaatgttggcatagatattactgaacctctatacatgcaacgacttggggagattaatgttattggtgagccatttttaaatgtgaactgtgaacacatcaaatcatttgacaaaaatttgtacagacaactcatctcttacccacaggaagttattccaacttttgacatggctgtcaatgaaatcttctttgaccgttaccctgactcaatcttagaacatcagattcaagtaagaccattcaacgcattgaagactaagaatatgagaaacctgaatccagaagacattgaccagctcatcaccatcagcggcatggtgatcaggacatcccagctgattcccgagatgcaggaggccttcttccagtgccaagtgtgtgcccacacgacccgggtggagatggaccgcggccgcattgcagagcccagtgtgtgcgggcgctgccacaccacccacagcatggcactcatccacaaccgctccctcttctctgacaagcagatgatcaagcttcaggagtctccggaagacatgcctgcagggcagacaccacacacagttatcctgtttgctcacaatgatctcgttgacaaggtccagcctggggacagagtgaatgttacaggcatctatcgagctgtgcctattcgagtcaatccaagagtgagtaatgtgaagtctgtctacaaaacccacattgatgtcattcattatcggaaaacggatgcaaaacgtctgcatggccttgatgaagaagcagaacagaaacttttttcagagaaacgtgtggaattgcttaaggaactttccaggaaaccagacatttatgagaggcttgcttcagccttggctccaagcatttatgaacatgaagatataaagaagggaattttgcttcagctctttggcgggacaaggaaggattttagtcacactggaaggggcaaatttcgggctgagatcaacatcttgctgtgtggcgaccctggtaccagcaagtcccagctgctgcagtacgtgtacaacctcgtccccaggggccagtacacgtctgggaagggctccagtgcagttggcctcactgcgtacgtaatgaaagaccctgagacaaggcagctggtcctgcagacaggtgctcttgtcctgagtgacaacggcatctgctgtatcgatgagttcgacaagatgaatgaaagtacaagatcggtattgcatgaagtcatggaacagcagactctgtccattgcaaaggctgggatcatctgtcagctcaatgcgcgcacctctgtcctggcagcagcaaatcccattgagtctcagtggaatcctaaaaaaacaaccattgaaaacatccagctgcctcatactttattatcaaggtttgatttgatcttcctcatgctggaccctcaggacgaagcctatgacaggcgtctggctcaccacctggtcgcactgtactaccagagcgaggagcaggcagaggaggagctcctggacatggcggtgctaaaggactacattgcctacgcgcacagcaccatcatgccgcggctaagtgaggaagccagccaggctctcatcgaggcttatgtagacatgaggaagattggcagtagccggggaatggtttctgcataccctcgacagctagagtcattaatccgcttagcagaagcccatgctaaagtaagattgtctaacaaagttgaagccattgatgtggaagaggccaaacgcctccatcgggaagctctgaagcagtctgcaactgatccccggactggcatcgtggacatatctattcttactacggggatgagtgccacctctcgtaaacggaaagaagaattagctgaagcattgaaaaagcttattttatctaagggcaaaacaccagctctaaaataccagcaactttttgaagatattcggggacaatctgacatagcaattactaaagatatgtttgaagaagcactgcgtgccctggcagatgatgatttcctgacagtgactgggaagaccgtgcgcttgctctgaagccttgtgagcaaggaaggctccctgcatgtcctgcttgctgcacgccacatgggtgtggtctgcatctcagttggccgccatcagtgtaaatagagcttaaagtcatggtttggctgcataaaaattttctaacttgggttcaatatttgtagtgaagtatctgttttcatttttttcacgttataaataaaaatactatgctggccgggcgcggtggctcacacctgtaatcccagcactttgggaggccaatgtgggtggatcatgaggtcaggagttcaagaccagcctagccaagatggtgaaaccccgtctctagtaaagataacaaaaaattagctgggcttgatggcatgcgcctgtaatcccagctactcgggaggttgaggcaggagaatcgcttaaacccaggcggcagaggttgcagtgagccaagatcgcgccactgcactccagcctcagcaatagagtgagactgtctcaaaaaaa

SEQ ID NO: 346391 - DNA, 4813 bp, Homo sapiens
tggaaacctaaggaaaaacgtctgacctgcggaggtagtttgggtggctacttggtgttggacttggctaaataaataccagaggcagataaaacaagcgaggggcctaggtcaagagttccaagtttgttcctcgataaaaaacgacaaacgcggtcgggggcggtgatgcccgcctgcagtcccaacactttaggaagctgaggcggggggatcgcaggagttcgagaccagtctgggcaacataatgagaccatccccaccacctcccgtccttaattttttttaataaaaaaaatctttaagtgagaaatgcatctgtaatgtccttattaaccaaaaacgcctaagggataaagaagcacacgctccctagccaacgctagaggaacacaccccgagagctggtgctgtaggacccagttttcccgcgaaaacgctgccgcgcagggggtcagaccatctggaccaaggggggccgagcgaggcctacttctggtttacgcacgggcgctgaaagaagcggcactgtccccccctgccgatgcgcagtggcgcctcccggaggcggagccacgtacgagcgccgctgtgattggtgaggccccgccaggggcggagacgaccttgccgccggcgggaactctgggtctcgcggtttgggagcgctactcgccaggtggactcggagtccgcgagcgtcgtcggcaagcggccgcctttccacggtactccgagcactatgtcgtccccggcgtcgaccccgagccgccgcggcagccggcgtggaagggccacccccgcccagacgcctcggagtgaggatgccaggtcatctccctctcagagacgtagaggcgaggattccacctccacgggggagttgcagccgatgccaacctcgcctggagtggacctgcagagccctgctgcgcaggacgtgctgttttccagccctccccaaatgcattcttcagctatccctcttgactttgatgttagttcaccactgacatacggcactcccagctctcgggtagagggaaccccaagaagtggtgttaggggcacacctgtgagacagaggcctgacctgggctctgcacagaagggcctgcaagtggatctgcagtctgacggggcagcagcagaagatatagtggcaagtgagcagtctctaggccaaaaacttgtgatctggggaacagatgtaaatgtggcagcatgcaaagaaaactttcagagatttcttcagcgttttattgaccctctggctaaagaagaagaaaatgttggcatagatattactgaacctctatacatgcaacgacttggggagattaatgttattggtgagccatttttaaatgtgaactgtgaacacatcaaatcatttgacaaaaatttgtacagacaactcatctcttacccacaggaagttattccaacttttgacatggctgtcaatgaaatcttctttgaccgttaccctgactcaatcttagaacatcagattcaagtaagaccattcaacgcattgaagactaagaatatgagaaacctgaatccagaagacattgaccagctcatcaccatcagcggcatggtgatcaggacatcccagctgattcccgagatgcaggaggccttcttccagtgccaagtgtgtgcccacacgacccgggtggagatggaccgcggccgcattgcagagcccagtgtgtgcgggcgctgccacaccacccacagcatggcactcatccacaaccgctccctcttctctgacaagcagatgatcaagcttcaggagtctccggaagacatgcctgcagggcagacaccacacacagttatcctgtttgctcacaatgatctcgttgacaaggtccagcctggggacagagtgaatgttacaggcatctatcgagctgtgcctattcgagtcaatccaagagtgagtaatgtgaagtctgtctacaaaacccacattgatgtcattcattatcggaaaacggatgcaaaacgtctgcatggccttgatgaagaagcagaacagaaacttttttcagagaaacgtgtggaattgcttaaggaactttccaggaaaccagacatttatgagaggcttgcttcagccttggctccaagcatttatgaacatgaagatataaagaagggaattttgcttcagctctttggcgggacaaggaaggattttagtcacactggaaggggcaaatttcgggctgagatcaacatcttgctgtgtggcgaccctggtaccagcaagtcccagctgctgcagtacgtgtacaacctcgtccccaggggccagtacacgtctgggaagggctccagtgcagttggcctcactgcgtacgtaatgaaagaccctgagacaaggcagctggtcctgcagacaggtgctcttgtcctgagtgacaacggcatctgctgtatcgatgagttcgacaagatgaatgaaagtacaagatcggtattgcatgaagtcatggaacagcagactctgtccattgcaaaggctgggatcatctgtcagctcaatgcgcgcacctctgtcctggcagcagcaaatcccattgagtctcagtggaatcctaaaaaaacaaccattgaaaacatccagctgcctcatactttattatcaaggtttgatttgatcttcctcatgctggaccctcaggacgaagcctatgacaggcgtctggctcaccacctggtcgcactgtactaccagagcgaggagcaggcagaggaggagctcctggacatggcggtgctaaaggactacattgcctacgcgcacagcaccatcatgccgcggctaagtgaggaagccagccaggctctcatcgaggcttatgtagacatgaggaagattggcagtagccggggaatggtttctgcataccctcgacagctagagtcattaatccgcttagcagaagcccatgctaaagtaagattgtctaacaaagttgaagccattgatgtggaagaggccaaacgcctccatcgggaagctctgaagcagtctgcaactgatccccggactggcatcgtggacatatctattcttactacggggatgagtgccacctctcgtaaacggaaagaagaattagctgaagcattgaaaaagcttattttatctaagggcaaaacaccagctctaaaataccagcaactttttgaagatattcggggacaatctgacatagcaattactaaagatatgtttgaagaagcactgcgtgccctggcagatgatgatttcctgacagtgactgggaagaccgtgcgcttgctctgaagccttgtgagcaaggaaggctccctgcatgtcctgcttgctgcacgccacatgggtgtggtctgcatctcagttggccgccatcagtgtaaatagagcttaaagtcatggtttggctgcataaaaattttctaacttgggttcaatatttgtagtgaagtatctgttttcatttttttcacgttataaataaaaatactatgctggccgggcgcggtggctcacacctgtaatcccagcactttgggaggccaatgtgggtggatcatgaggtcaggagttcaagaccagcctagccaagatggtgaaaccccgtctctagtaaagataacaaaaaattagctgggcttgatggcatgcgcctgtaatcccagctactcgggaggttgaggcaggagaatcgcttaaacccaggcggcagaggttgcagtgagccaagatcgcgccactgcactccagcctcagcaatagagtgagactgtctcaaaaaaaaaaaaaaaaaaaacctgccaattttcaaacataccgtagagattattttcaggtgccattttatagtatagcagcagggcttttactctgtgtatgcacagatgcagtctggggcatggtttgtgtgctggactttctcatggccatcatcagtatgcttatggatttgatgacaggcatagcctgggcatatcacctcattggtaaagggctagagcctttcttttttatggcacttctttttttgagatagggtcttactctgtcaccctggctagagtacactggtacaatcacggctcaatgtaggcttaacctcctgggctcaggagccactgcacccagcctttgttttattttttattttttgagaggtatgattctttctagagattttttctcatggctactattagatcaggaatgggtgattggagattattagattctaggttaacttctaccactttaccctaatacataaaactttttcctaaataaatgatggaaggaataatacttggttacctggcattatttttcagtaagaaaaaagctttactaaccactacatttatggaaatttgtaggggtaagtattttataggtcataaaaaacaccataatataacgaatctcattttctttaaatgtgaattaaatcctaacagtcatctttataaaatgaccataggctaaaatcttacgtgtaagtactactacaataaataatttctgaaacctttaaatcatatgagttgggccttttttataacttggaatcaacattttttaataaagtatccatagaaaatgatagatctggccgggcgcggtggctcacacctgtaatcccagcactttgggaggccgagatggctggatcatgaggcaggagaatgacatgaacctaggaggcggagcttgcagtgagccgagatcatgccactgcactccaggctgggcaacagagtgagactccatctc

SEQ ID NO: 346392 - DNA, 4324 bp, Homo sapiens
  misc_feature (4245)..(4245): n is a, c, g, or t
tggaaacctaaggaaaaacgtctgacctgcggaggtagtttgggtggctacttggtgttggacttggctaaataaataccagaggcagataaaacaagcgaggggcctaggtcaagagttccaagtttgttcctcgataaaaaacgacaaacgcggtcgggggcggtgatgcccgcctgcagtcccaacactttaggaagctgaggcggggggatcgcaggagttcgagaccagtctgggcaacataatgagaccatccccaccacctcccgtccttaattttttttaataaaaaaaatctttaagtgagaaatgcatctgtaatgtccttattaaccaaaaacgcctaagggataaagaagcacacgctccctagccaacgctagaggaacacaccccgagagctggtgctgtaggacccagttttcccgcgaaaacgctgccgcgcagggggtcagaccatctggaccaaggggggccgagcgaggcctacttctggtttacgcacgggcgctgaaagaagcggcactgtccccccctgccgatgcgcagtggcgcctcccggaggcggagccacgtacgagcgccgctgtgattggtgaggccccgccaggggcggagacgaccttgccgccggcgggaactctgggtctcgcggtttgggagcgctactcgccaggtggactcggagtccgcgagcgtcgtcggcaagcggccgcctttccacggtactccgagcactatgtcgtccccggcgtcgaccccgagccgccgcggcagccggcgtggaagggccacccccgcccagacgcctcggagtgaggatgccaggtcatctccctctcagagacgtagaggcgaggattccacctccacgggggagttgcagccgatgccaacctcgcctggagtggacctgcagagccctgctgcgcaggacgtgctgttttccagccctccccaaatgcattcttcagctatccctcttgactttgatgttagttcaccactgacatacggcactcccagctctcgggtagagggaaccccaagaagtggtgttaggggcacacctgtgagacagaggcctgacctgggctctgcacagaagggcctgcaagtggatctgcagtctgacggggcagcagcagaagatatagtggcaagtgagcagtctctaggccaaaaacttgtgatctggggaacagatgtaaatgtggcagcatgcaaagaaaactttcagagatttcttcagcgttttattgaccctctggctaaagaagaagaaaatgttggcatagatattactgaacctctatacatgcaacgacttggggagattaatgttattggtgagccatttttaaatgtgaactgtgaacacatcaaatcatttgacaaaaatttgtacagacaactcatctcttacccacaggaagttattccaacttttgacatggctgtcaatgaaatcttctttgaccgttaccctgactcaatcttagaacatcagattcaagtaagaccattcaacgcattgaagactaagaatatgagaaacctgaatccagaagacattgaccagctcatcaccatcagcggcatggtgatcaggacatcccagctgattcccgagatgcaggaggccttcttccagtgccaagtgtgtgcccacacgacccgggtggagatggaccgcggccgcattgcagagcccagtgtgtgcgggcgctgccacaccacccacagcatggcactcatccacaaccgctccctcttctctgacaagcagatgatcaagcttcaggagtctccggaagacatgcctgcagggcagacaccacacacagttatcctgtttgctcacaatgatctcgttgacaaggtccagcctggggacagagtgaatgttacaggcatctatcgagctgtgcctattcgagtcaatccaagagtgagtaatgtgaagtctgtctacaaaacccacattgatgtcattcattatcggaaaacggatgcaaaacgtctgcatggccttgatgaagaagcagaacagaaacttttttcagagaaacgtgtggaattgcttaaggaactttccaggaaaccagacatttatgagaggcttgcttcagccttggctccaagcatttatgaacatgaagatataaagaagggaattttgcttcagctctttggcgggacaaggaaggattttagtcacactggaaggggcaaatttcgggctgagatcaacatcttgctgtgtggcgaccctggtaccagcaagtcccagctgctgcagtacgtgtacaacctcgtccccaggggccagtacacgtctgggaagggctccagtgcagttggcctcactgcgtacgtaatgaaagaccctgagacaaggcagctggtcctgcagacaggtgctcttgtcctgagtgacaacggcatctgctgtatcgatgagttcgacaagatgaatgaaagtacaagatcggtattgcatgaagtcatggaacagcagactctgtccattgcaaaggctgggatcatctgtcagctcaatgcgcgcacctctgtcctggcagcagcaaatcccattgagtctcagtggaatcctaaaaaaacaaccattgaaaacatccagctgcctcatactttattatcaaggtttgatttgatcttcctcatgctggaccctcaggacgaagcctatgacaggcgtctggctcaccacctggtcgcactgtactaccagagcgaggagcaggcagaggaggagctcctggacatggcggtgctaaaggactacattgcctacgcgcacagcaccatcatgccgcggctaagtgaggaagccagccaggctctcatcgaggcttatgtagacatgaggaagattggcagtagccggggaatggtttctgcataccctcgacagctagagtcattaatccgcttagcagaagcccatgctaaagtaagattgtctaacaaagttgaagccattgatgtggaagaggccaaacgcctccatcgggaagctctgaagcagtctgcaactgatccccggactggcatcgtggacatatctattcttactacggggatgagtgccacctctcgtaaacggaaagaagaattagctgaagcattgaaaaagcttattttatctaagggcaaaacaccagctctaaaataccagcaactttttgaagatattcggggacaatctgacatagcaattactaaagatatgtttgaagaagcactgcgtgccctggcagatgatgatttcctgacagtgactgggaagaccgtgcgcttgctctgaagccttgtgagcaaggaaggctccctgcatgtcctgcttgctgcacgccacatgggtgtggtctgcatctcagttggccgccatcagtgtaaatagagcttaaagtcatggtttggctgcataaaaattttctaacttgggttcaatatttgtagtgaagtatctgttttcatttttttcacgttataaataaaaatactatgctggccgggcgcggtggctcacacctgtaatcccagcactttgggaggccaatgtgggtggatcatgaggtcaggagttcaagaccagcctagccaagatggtgaaaccccgtctctagtaaagataacaaaaaattagctgggcttgatggcatgcgcctgtaatcccagctactcgggaggttgaggcaggagaatcgcttaaacccaggcggcagaggttgcagtgagccaagatcgcgccactgcactccagcctcagcaatagagtgagactgtctcaaaaaaaaaaaaaaaaaaaacctgccaattttcaaacataccgtagagattattttcaggtgccattttatagtatagcagcagggcttttactctgtgtatgcacagatgcagtctggggcatggtttgtgtgctggactttctcatggccatcatcagtatgcttatggatttgatgacaggcatagcctgggcatatcacctcattggtaaagggctagagcctttcttttttatggcacttctttttttgagatagggtcttactctgtcaccctggctagagtacactggtacaatcacggctcaatgtaggcttaacctcctgggctcaggtgtatgtcactatgcccggctactttttgtattttttggtagagacggcttcgccacgttgcccaggctggttttgactcctgagctcngccgtccgcccgcctcggctttccagtgctaggattacagttgaccctgcacctgcctcatgcccgctatttctgtttt

SEQ ID NO: 346393 - DNA, 4010 bp, Homo sapiens
tggaaacctaaggaaaaacgtctgacctgcggaggtagtttgggtggctacttggtgttggacttggctaaataaataccagaggcagataaaacaagcgaggggcctaggtcaagagttccaagtttgttcctcgataaaaaacgacaaacgcggtcgggggcggtgatgcccgcctgcagtcccaacactttaggaagctgaggcggggggatcgcaggagttcgagaccagtctgggcaacataatgagaccatccccaccacctcccgtccttaattttttttaataaaaaaaatctttaagtgagaaatgcatctgtaatgtccttattaaccaaaaacgcctaagggataaagaagcacacgctccctagccaacgctagaggaacacaccccgagagctggtgctgtaggacccagttttcccgcgaaaacgctgccgcgcagggggtcagaccatctggaccaaggggggccgagcgaggcctacttctggtttacgcacgggcgctgaaagaagcggcactgtccccccctgccgatgcgcagtggcgcctcccggaggcggagccacgtacgagcgccgctgtgattggtgaggccccgccaggggcggagacgaccttgccgccggcgggaactctgggtctcgcggtttgggagcgctactcgccaggtggactcggagtccgcgagcgtcgtcggcaagcggccgcctttccacggtactccgagcactatgtcgtccccggcgtcgaccccgagccgccgcggcagccggcgtggaagggccacccccgcccagacgcctcggagtgaggatgccaggtcatctccctctcagagacgtagaggcgaggattccacctccacgggggagttgcagccgatgccaacctcgcctggagtggacctgcagagccctgctgcgcaggacgtgctgttttccagccctccccaaatgcattcttcagctatccctcttgactttgatgttagttcaccactgacatacggcactcccagctctcgggtagagggaaccccaagaagtggtgttaggggcacacctgtgagacagaggcctgacctgggctctgcacagaagggcctgcaagtggatctgcagtctgacggggcagcagcagaagatatagtggcaagtgagcagtctctaggccaaaaacttgtgatctggggaacagatgtaaatgtggcagcatgcaaagaaaactttcagagatttcttcagcgttttattgaccctctggctaaagaagaagaaaatgttggcatagatattactgaacctctatacatgcaacgacttggggagattaatgttattggtgagccatttttaaatgtgaactgtgaacacatcaaatcatttgacaaaaatttgtacagacaactcatctcttacccacaggaagttattccaacttttgacatggctgtcaatgaaatcttctttgaccgttaccctgactcaatcttagaacatcagattcaagtaagaccattcaacgcattgaagactaagaatatgagaaacctgaatccagaagacattgaccagctcatcaccatcagcggcatggtgatcaggacatcccagctgattcccgagatgcaggaggccttcttccagtgccaagtgtgtgcccacacgacccgggtggagatggaccgcggccgcattgcagagcccagtgtgtgcgggcgctgccacaccacccacagcatggcactcatccacaaccgctccctcttctctgacaagcagatgatcaagcttcaggagtctccggaagacatgcctgcagggcagacaccacacacagttatcctgtttgctcacaatgatctcgttgacaaggtccagcctggggacagagtgaatgttacaggcatctatcgagctgtgcctattcgagtcaatccaagagtgagtaatgtgaagtctgtctacaaaacccacattgatgtcattcattatcggaaaacggatgcaaaacgtctgcatggccttgatgaagaagcagaacagaaacttttttcagagaaacgtgtggaattgcttaaggaactttccaggaaaccagacatttatgagaggcttgcttcagccttggctccaagcatttatgaacatgaagatataaagaagggaattttgcttcagctctttggcgggacaaggaaggattttagtcacactggaaggggcaaatttcgggctgagatcaacatcttgctgtgtggcgaccctggtaccagcaagtcccagctgctgcagtacgtgtacaacctcgtccccaggggccagtacacgtctgggaagggctccagtgcagttggcctcactgcgtacgtaatgaaagaccctgagacaaggcagctggtcctgcagacaggtgctcttgtcctgagtgacaacggcatctgctgtatcgatgagttcgacaagatgaatgaaagtacaagatcggtattgcatgaagtcatggaacagcagactctgtccattgcaaaggctgggatcatctgtcagctcaatgcgcgcacctctgtcctggcagcagcaaatcccattgagtctcagtggaatcctaaaaaaacaaccattgaaaacatccagctgcctcatactttattatcaaggtttgatttgatcttcctcatgctggaccctcaggacgaagcctatgacaggcgtctggctcaccacctggtcgcactgtactaccagagcgaggagcaggcagaggaggagctcctggacatggcggtgctaaaggactacattgcctacgcgcacagcaccatcatgccgcggctaagtgaggaagccagccaggctctcatcgaggcttatgtagacatgaggaagattggcagtagccggggaatggtttctgcataccctcgacagctagagtcattaatccgcttagcagaagcccatgctaaagtaagattgtctaacaaagttgaagccattgatgtggaagaggccaaacgcctccatcgggaagctctgaagcagtctgcaactgatccccggactggcatcgtggacatatctattcttactacggggatgagtgccacctctcgtaaacggaaagaagaattagctgaagcattgaaaaagcttattttatctaagggcaaaacaccagctctaaaataccagcaactttttgaagatattcggggacaatctgacatagcaattactaaagatatgtttgaagaagcactgcgtgccctggcagatgatgatttcctgacagtgactgggaagaccgtgcgcttgctctgaagccttgtgagcaaggaaggctccctgcatgtcctgcttgctgcacgccacatgggtgtggtctgcatctcagttggccgccatcagtgtaaatagagcttaaagtcatggtttggctgcataaaaattttctaacttgggttcaatatttgtagtgaagtatctgttttcatttttttcacgttataaataaaaatactatgctggccgggcgcggtggctcacacctgtaatcccagcactttgggaggccaatgtgggtggatcatgaggtcaggagttcaagaccagcctagccaagatggtgaaaccccgtctctagtaaagataacaaaaaattagctgggcttgatggcatgcgcctgtaatcccagctactcgggagaaaaaaaaaaaaaaaaaaaaaaaaaaaaaaaacacaaacaaaaaaagccccggcacatttttcacaaatttccggaaaaaattttttcggggggcccaatattatatatgagatataatagcccagaggggcgcttataaaccccgctggtgttttattgcccagaatattgcacctcgtggggccaaatgggtggaggaggcgggagaacacatctccagagggaccacacaccgaattgtgctcatagaggaatttgaacaaaacgggatataaggcgggggaatatgc

SEQ ID NO: 346394 - DNA, 4387 bp, Homo sapiens
  misc_feature (4215)..(4215): n is a, c, g, or t
  misc_feature (4228)..(4228): n is a, c, g, or t
tggaaacctaaggaaaaacgtctgacctgcggaggtagtttgggtggctacttggtgttggacttggctaaataaataccagaggcagataaaacaagcgaggggcctaggtcaagagttccaagtttgttcctcgataaaaaacgacaaacgcggtcgggggcggtgatgcccgcctgcagtcccaacactttaggaagctgaggcggggggatcgcaggagttcgagaccagtctgggcaacataatgagaccatccccaccacctcccgtccttaattttttttaataaaaaaaatctttaagtgagaaatgcatctgtaatgtccttattaaccaaaaacgcctaagggataaagaagcacacgctccctagccaacgctagaggaacacaccccgagagctggtgctgtaggacccagttttcccgcgaaaacgctgccgcgcagggggtcagaccatctggaccaaggggggccgagcgaggcctacttctggtttacgcacgggcgctgaaagaagcggcactgtccccccctgccgatgcgcagtggcgcctcccggaggcggagccacgtacgagcgccgctgtgattggtgaggccccgccaggggcggagacgaccttgccgccggcgggaactctgggtctcgcggtttgggagcgctactcgccaggtggactcggagtccgcgagcgtcgtcggcaagcggccgcctttccacggtactccgagcactatgtcgtccccggcgtcgaccccgagccgccgcggcagccggcgtggaagggccacccccgcccagacgcctcggagtgaggatgccaggtcatctccctctcagagacgtagaggcgaggattccacctccacgggggagttgcagccgatgccaacctcgcctggagtggacctgcagagccctgctgcgcaggacgtgctgttttccagccctccccaaatgcattcttcagctatccctcttgactttgatgttagttcaccactgacatacggcactcccagctctcgggtagagggaaccccaagaagtggtgttaggggcacacctgtgagacagaggcctgacctgggctctgcacagaagggcctgcaagtggatctgcagtctgacggggcagcagcagaagatatagtggcaagtgagcagtctctaggccaaaaacttgtgatctggggaacagatgtaaatgtggcagcatgcaaagaaaactttcagagatttcttcagcgttttattgaccctctggctaaagaagaagaaaatgttggcatagatattactgaacctctatacatgcaacgacttggggagattaatgttattggtgagccatttttaaatgtgaactgtgaacacatcaaatcatttgacaaaaatttgtacagacaactcatctcttacccacaggaagttattccaacttttgacatggctgtcaatgaaatcttctttgaccgttaccctgactcaatcttagaacatcagattcaagtaagaccattcaacgcattgaagactaagaatatgagaaacctgaatccagaagacattgaccagctcatcaccatcagcggcatggtgatcaggacatcccagctgattcccgagatgcaggaggccttcttccagtgccaagtgtgtgcccacacgacccgggtggagatggaccgcggccgcattgcagagcccagtgtgtgcgggcgctgccacaccacccacagcatggcactcatccacaaccgctccctcttctctgacaagcagatgatcaagcttcaggagtctccggaagacatgcctgcagggcagacaccacacacagttatcctgtttgctcacaatgatctcgttgacaaggtccagcctggggacagagtgaatgttacaggcatctatcgagctgtgcctattcgagtcaatccaagagtgagtaatgtgaagtctgtctacaaaacccacattgatgtcattcattatcggaaaacggatgcaaaacgtctgcatggccttgatgaagaagcagaacagaaacttttttcagagaaacgtgtggaattgcttaaggaactttccaggaaaccagacatttatgagaggcttgcttcagccttggctccaagcatttatgaacatgaagatataaagaagggaattttgcttcagctctttggcgggacaaggaaggattttagtcacactggaaggggcaaatttcgggctgagatcaacatcttgctgtgtggcgaccctggtaccagcaagtcccagctgctgcagtacgtgtacaacctcgtccccaggggccagtacacgtctgggaagggctccagtgcagttggcctcactgcgtacgtaatgaaagaccctgagacaaggcagctggtcctgcagacaggtgctcttgtcctgagtgacaacggcatctgctgtatcgatgagttcgacaagatgaatgaaagtacaagatcggtattgcatgaagtcatggaacagcagactctgtccattgcaaaggctgggatcatctgtcagctcaatgcgcgcacctctgtcctggcagcagcaaatcccattgagtctcagtggaatcctaaaaaaacaaccattgaaaacatccagctgcctcatactttattatcaaggtttgatttgatcttcctcatgctggaccctcaggacgaagcctatgacaggcgtctggctcaccacctggtcgcactgtactaccagagcgaggagcaggcagaggaggagctcctggacatggcggtgctaaaggactacattgcctacgcgcacagcaccatcatgccgcggctaagtgaggaagccagccaggctctcatcgaggcttatgtagacatgaggaagattggcagtagccggggaatggtttctgcataccctcgacagctagagtcattaatccgcttagcagaagcccatgctaaagtaagattgtctaacaaagttgaagccattgatgtggaagaggccaaacgcctccatcgggaagctctgaagcagtctgcaactgatccccggactggcatcgtggacatatctattcttactacggggatgagtgccacctctcgtaaacggaaagaagaattagctgaagcattgaaaaagcttattttatctaagggcaaaacaccagctctaaaataccagcaactttttgaagatattcggggacaatctgacatagcaattactaaagatatgtttgaagaagcactgcgtgccctggcagatgatgatttcctgacagtgactgggaagaccgtgcgcttgctctgaagccttgtgagcaaggaaggctccctgcatgtcctgcttgctgcacgccacatgggtgtggtctgcatctcagttggccgccatcagtgtaaatagagcttaaagtcatggtttggctgcataaaaattttctaacttgggttcaatatttgtagtgaagtatctgttttcatttttttcacgttataaataaaaatactatggagccactgcacccagcctttgttttattttttattttttgagaggtatgattctttctagagattttttctcatggctactattagatcaggaatgggtgattggagattattagattctaggttaacttctaccactttaccctaatacataaaactttttcctaaataaatgatggaaggaataatacttggttacctggcattatttttcagtaagaaaaaagctttactaaccactacatttatggaaatttgtaggggtaagtattttataggtcataaaaaacaccataatataacgaatctcattttctttaaatgtgaattaaatcctaacagtcatctttataaaatgaccataggctaaaatcttacgtgtaagtactactacaataaataatttctgaaacctttaaacaaaaaaaaaaaaaaaaacaaaaacaactttttgggggcctgggggccccaaaaagtcttttaacaacctcgttgggggccgggccctgggtggtgaaccctgggccccgcgtgcccgggaacccgggccacgaactaggggtgggtttccacccaataaaaaaacggccggggcgcaccgggctggttttgaacaaccccatggggcttgagggcattcccggtctcacccagggagccagcaatcgatatacccgnccagctgttgtancgtcaaccacaccatcaacagtccatgatcacatactgacacgacgcccatacatccctcagcgcgagaaacccactaagcgatccgccactcgacatcgcacactatctgagcagacgaccacacagtcacagaactaaatactacacaccgagtaca

SEQ ID NO: 346395 - DNA, 4852 bp, Homo sapiens
tggaaacctaaggaaaaacgtctgacctgcggaggtagtttgggtggctacttggtgttggacttggctaaataaataccagaggcagataaaacaagcgaggggcctaggtcaagagttccaagtttgttcctcgataaaaaacgacaaacgcggtcgggggcggtgatgcccgcctgcagtcccaacactttaggaagctgaggcggggggatcgcaggagttcgagaccagtctgggcaacataatgagaccatccccaccacctcccgtccttaattttttttaataaaaaaaatctttaagtgagaaatgcatctgtaatgtccttattaaccaaaaacgcctaagggataaagaagcacacgctccctagccaacgctagaggaacacaccccgagagctggtgctgtaggacccagttttcccgcgaaaacgctgccgcgcagggggtcagaccatctggaccaaggggggccgagcgaggcctacttctggtttacgcacgggcgctgaaagaagcggcactgtccccccctgccgatgcgcagtggcgcctcccggaggcggagccacgtacgagcgccgctgtgattggtgaggccccgccaggggcggagacgaccttgccgccggcgggaactctgggtctcgcggtttgggagcgctactcgccaggtggactcggagtccgcgagcgtcgtcggcaagcggccgcctttccacggtactccgagcactatgtcgtccccggcgtcgaccccgagccgccgcggcagccggcgtggaagggccacccccgcccagacgcctcggagtgaggatgccaggtcatctccctctcagagacgtagaggcgaggattccacctccacgggggagttgcagccgatgccaacctcgcctggagtggacctgcagagccctgctgcgcaggacgtgctgttttccagccctccccaaatgcattcttcagctatccctcttgactttgatgttagttcaccactgacatacggcactcccagctctcgggtagagggaaccccaagaagtggtgttaggggcacacctgtgagacagaggcctgacctgggctctgcacagatgtaaatgtggcagcatgcaaagaaaactttcagagatttcttcagcgttttattgaccctctggctaaagaagaagaaaatgttggcatagatattactgaacctctatacatgcaacgacttggggagattaatgttattggtgagccatttttaaatgtgaactgtgaacacatcaaatcatttgacaaaaatttgtacagacaactcatctcttacccacaggaagttattccaacttttgacatggctgtcaatgaaatcttctttgaccgttaccctgactcaatcttagaacatcagattcaagtaagaccattcaacgcattgaagactaagaatatgagaaacctgaatccagaagacattgaccagctcatcaccatcagcggcatggtgatcaggacatcccagctgattcccgagatgcaggaggccttcttccagtgccaagtgtgtgcccacacgacccgggtggagatggaccgcggccgcattgcagagcccagtgtgtgcgggcgctgccacaccacccacagcatggcactcatccacaaccgctccctcttctctgacaagcagatgatcaagcttcaggagtctccggaagacatgcctgcagggcagacaccacacacagttatcctgtttgctcacaatgatctcgttgacaaggtccagcctggggacagagtgaatgttacaggcatctatcgagctgtgcctattcgagtcaatccaagagtgagtaatgtgaagtctgtctacaaaacccacattgatgtcattcattatcggaaaacggatgcaaaacgtctgcatggccttgatgaagaagcagaacagaaacttttttcagagaaacgtgtggaattgcttaaggaactttccaggaaaccagacatttatgagaggcttgcttcagccttggctccaagcatttatgaacatgaagatataaagaagggaattttgcttcagctctttggcgggacaaggaaggattttagtcacactggaaggggcaaatttcgggctgagatcaacatcttgctgtgtggcgaccctggtaccagcaagtcccagctgctgcagtacgtgtacaacctcgtccccaggggccagtacacgtctgggaagggctccagtgcagttggcctcactgcgtacgtaatgaaagaccctgagacaaggcagctggtcctgcagacaggtgctcttgtcctgagtgacaacggcatctgctgtatcgatgagttcgacaagatgaatgaaagtacaagatcggtattgcatgaagtcatggaacagcagactctgtccattgcaaaggctgggatcatctgtcagctcaatgcgcgcacctctgtcctggcagcagcaaatcccattgagtctcagtggaatcctaaaaaaacaaccattgaaaacatccagctgcctcatactttattatcaaggtttgatttgatcttcctcatgctggaccctcaggacgaagcctatgacaggcgtctggctcaccacctggtcgcactgtactaccagagcgaggagcaggcagaggaggagctcctggacatggcggtgctaaaggactacattgcctacgcgcacagcaccatcatgccgcggctaagtgaggaagccagccaggctctcatcgaggcttatgtagacatgaggaagattggcagtagccggggaatggtttctgcataccctcgacagctagagtcattaatccgcttagcagaagcccatgctaaagtaagattgtctaacaaagttgaagccattgatgtggaagaggccaaacgcctccatcgggaagctctgaagcagtctgcaactgatccccggactggcatcgtggacatatctattcttactacggggatgagtgccacctctcgtaaacggaaagaagaattagctgaagcattgaaaaagcttattttatctaagggcaaaacaccagctctaaaataccagcaactttttgaagatattcggggacaatctgacatagcaattactaaagatatgtttgaagaagcactgcgtgccctggcagatgatgatttcctgacagtgactgggaagaccgtgcgcttgctctgaagccttgtgagcaaggaaggctccctgcatgtcctgcttgctgcacgccacatgggtgtggtctgcatctcagttggccgccatcagtgtaaatagagcttaaagtcatggtttggctgcataaaaattttctaacttgggttcaatatttgtagtgaagtatctgttttcatttttttcacgttataaataaaaatactatgctggccgggcgcggtggctcacacctgtaatcccagcactttgggaggccaatgtgggtggatcatgaggtcaggagttcaagaccagcctagccaagatggtgaaaccccgtctctagtaaagataacaaaaaattagctgggcttgatggcatgcgcctgtaatcccagctactcgggaggttgaggcaggagaatcgcttaaacccaggcggcagaggttgcagtgagccaagatcgcgccactgcactccagcctcagcaatagagtgagactgtctcaaaaaaaaaaaaaaaaaaaacctgccaattttcaaacataccgtagagattattttcaggtgccattttatagtatagcagcagggcttttactctgtgtatgcacagatgcagtctggggcatggtttgtgtgctggactttctcatggccatcatcagtatgcttatggatttgatgacaggcatagcctgggcatatcacctcattggtaaagggctagagcctttcttttttatggcacttctttttttgagatagggtcttactctgtcaccctggctagagtacactggtacaatcacggctcaatgtaggcttaacctcctgggctcaggtgtatgtcactatgcccggctactttttgtattttttggtagagacggcttcgccacgttgcccaggctgcaagcgatatgcctaggctcaagcgatctgcccacctcaacttccggaagtgctgagattacaggtgtgagccactgcacccagcctttgttttattttttattttttgagaggtatgattctttctagagattttttctcatggctactattagatcaggaatgggtgattggagattattagattctaggttaacttctaccactttaccctaatacataaaactttttcctaaataaatgatggaaggaataatacttggttacctggcattatttttcagtaagaaaaaagctttactaaccactacatttatggaaatttgtaggggtaagtattttataggtcataaaaaacaccataatataacgaatctcattttctttaaatgtgaattaaatcctaacagtcatctttataaaatgaccataggctaaaatcttacgtgtaagtactactacaataaataatttctgaaacctttaaatcatatgagttgggccttttttataacttggaatcaacattttttaataaagtatccatagaaaatgatagatctggccgggcgcggtggctcacacctgtaatcccagcactttgggaggccgagatggctggatcatgaggcaggagaatgacatgaacctaggaggcggagcttgcagtgagccgagatcatgccactgcactccaggctgggcaacagagtgagactccatctc

SEQ ID NO: 346396 - DNA, 4723 bp, Homo sapiens
tggaaacctaaggaaaaacgtctgacctgcggaggtagtttgggtggctacttggtgttggacttggctaaataaataccagaggcagataaaacaagcgaggggcctaggtcaagagttccaagtttgttcctcgataaaaaacgacaaacgcggtcgggggcggtgatgcccgcctgcagtcccaacactttaggaagctgaggcggggggatcgcaggagttcgagaccagtctgggcaacataatgagaccatccccaccacctcccgtccttaattttttttaataaaaaaaatctttaagtgagaaatgcatctgtaatgtccttattaaccaaaaacgcctaagggataaagaagcacacgctccctagccaacgctagaggaacacaccccgagagctggtgctgtaggacccagttttcccgcgaaaacgctgccgcgcagggggtcagaccatctggaccaaggggggccgagcgaggcctacttctggtttacgcacgggcgctgaaagaagcggcactgtccccccctgccgatgcgcagtggcgcctcccggaggcggagccacgtacgagcgccgctgtgattggtgaggccccgccaggggcggagacgaccttgccgccggcgggaactctgggtctcgcggtttgggagcgctactcgccaggtggactcggagtccgcgagcgtcgtcggcaagcggccgcctttccacggtactccgagcactatgtcgtccccggcgtcgaccccgagccgccgcggcagccggcgtggaagggccacccccgcccagacgcctcggagtgaggatgccaggtcatctccctctcagagacgtagaggcgaggattccacctccacgggggagttgcagccgatgccaacctcgcctggagtggacctgcagagccctgctgcgcaggacgtgctgttttccagccctccccaaatgcattcttcagctatccctcttgactttgatgttagttcaccactgacatacggcactcccagctctcgggtagagggaaccccaagaagtggtgttaggggcacacctgtgagacagaggcctgacctgggctctgcacagaagggcctgcaagtggatctgcagtctgacggggcagcagcagaagatatagtggcaagtgagcagtctctaggccaaaaacttgtgatctggggaacagatgtaaatgtggcagcatgcaaagaaaactttcagagatttcttcagcgttttattgaccctctggctaaagaagaagaaaatgttggcatagatattactgaacctctatacatgcaacgacttggggagattaatgttattggtgagccatttttaaatgtgaactgtgaacacatcaaatcatttgacaaaaatttgtacagacaactcatctcttacccacaggaagttattccaacttttgacatggctgtcaatgaaatcttctttgaccgttaccctgactcaatcttagaacatcagattcaagtaagaccattcaacgcattgaagactaagaatatgagaaacctgaatccagaagacattgaccagctcatcaccatcagcggcatggtgatcaggacatcccagctgattcccgagatgcaggaggccttcttccagtgccaagtgtgtgcccacacgacccgggtggagatggaccgcggccgcattgcagagcccagtgtgtgcgggcgctgccacaccacccacagcatggcactcatccacaaccgctccctcttctctgacaagcagatgatcaagcttcaggagtctccggaagacatgcctgcagggcagacaccacacacagttatcctgtttgctcacaatgatctcgttgacaaggtccagcctggggacagagtgaatgttacaggcatctatcgagctgtgcctattcgagtcaatccaagagtgagtaatgtgaagtctgtctacaaaacccacattgatgtcattcattatcggaaaacggatgcaaaacgtctgcatggccttgatgaagaagcagaacagaaacttttttcagagaaacgtgtggaattgcttaaggaactttccaggaaaccagacatttatgagaggcttgcttcagccttggctccaagcatttatgaacatgaagatataaagaagggaattttgcttcagctctttggcgggacaaggaaggattttagtcacactggaaggggcaaatttcgggctgagatcaacatcttgctgtgtggcgaccctggtaccagcaagtcccagctgctgcagtacgtgtacaacctcgtccccaggggccagtacacgtctgggaagggctccagtgcagttggcctcactgcgtacgtaatgaaagaccctgagacaaggcagctggtcctgcagacaggtgctcttgtcctgagtgacaacggcatctgctgtatcgatgagttcgacaagatgaatgaaagtacaagatcggtattgcatgaagtcatggaacagcagactctgtccattgcaaaggctgggatcatctgtcagctcaatgcgcgcacctctgtcctggcagcagcaaatcccattgagtctcagtggaatcctaaaaaaacaaccattgaaaacatccagctgcctcatactttattatcaagattggcagtagccggggaatggtttctgcataccctcgacagctagagtcattaatccgcttagcagaagcccatgctaaagtaagattgtctaacaaagttgaagccattgatgtggaagaggccaaacgcctccatcgggaagctctgaagcagtctgcaactgatccccggactggcatcgtggacatatctattcttactacggggatgagtgccacctctcgtaaacggaaagaagaattagctgaagcattgaaaaagcttattttatctaagggcaaaacaccagctctaaaataccagcaactttttgaagatattcggggacaatctgacatagcaattactaaagatatgtttgaagaagcactgcgtgccctggcagatgatgatttcctgacagtgactgggaagaccgtgcgcttgctctgaagccttgtgagcaaggaaggctccctgcatgtcctgcttgctgcacgccacatgggtgtggtctgcatctcagttggccgccatcagtgtaaatagagcttaaagtcatggtttggctgcataaaaattttctaacttgggttcaatatttgtagtgaagtatctgttttcatttttttcacgttataaataaaaatactatgctggccgggcgcggtggctcacacctgtaatcccagcactttgggaggccaatgtgggtggatcatgaggtcaggagttcaagaccagcctagccaagatggtgaaaccccgtctctagtaaagataacaaaaaattagctgggcttgatggcatgcgcctgtaatcccagctactcgggaggttgaggcaggagaatcgcttaaacccaggcggcagaggttgcagtgagccaagatcgcgccactgcactccagcctcagcaatagagtgagactgtctcaaaaaaaaaaaaaaaaaaaacctgccaattttcaaacataccgtagagattattttcaggtgccattttatagtatagcagcagggcttttactctgtgtatgcacagatgcagtctggggcatggtttgtgtgctggactttctcatggccatcatcagtatgcttatggatttgatgacaggcatagcctgggcatatcacctcattggtaaagggctagagcctttcttttttatggcacttctttttttgagatagggtcttactctgtcaccctggctagagtacactggtacaatcacggctcaatgtaggcttaacctcctgggctcaggtgtatgtcactatgcccggctactttttgtattttttggtagagacggcttcgccacgttgcccaggctgcaagcgatatgcctaggctcaagcgatctgcccacctcaacttccggaagtgctgagattacaggtgtgagccactgcacccagcctttgttttattttttattttttgagaggtatgattctttctagagattttttctcatggctactattagatcaggaatgggtgattggagattattagattctaggttaacttctaccactttaccctaatacataaaactttttcctaaataaatgatggaaggaataatacttggttacctggcattatttttcagtaagaaaaaagctttactaaccactacatttatggaaatttgtaggggtaagtattttataggtcataaaaaacaccataatataacgaatctcattttctttaaatgtgaattaaatcctaacagtcatctttataaaatgaccataggctaaaatcttacgtgtaagtactactacaataaataatttctgaaacctttaaatcatatgagttgggccttttttataacttggaatcaacattttttaataaagtatccatagaaaatgatagatctggccgggcgcggtggctcacacctgtaatcccagcactttgggaggccgagatggctggatcatgaggcaggagaatgacatgaacctaggaggcggagcttgcagtgagccgagatcatgccactgcactccaggctgggcaacagagtgagactccatctc

SEQ ID NO: 346397 - DNA, 3454 bp, Homo sapiens
tggaaacctaaggaaaaacgtctgacctgcggaggtagtttgggtggctacttggtgttggacttggctaaataaataccagaggcagataaaacaagcgaggggcctaggtcaagagttccaagtttgttcctcgataaaaaacgacaaacgcggtcgggggcggtgatgcccgcctgcagtcccaacactttaggaagctgaggcggggggatcgcaggagttcgagaccagtctgggcaacataatgagaccatccccaccacctcccgtccttaattttttttaataaaaaaaatctttaagtgagaaatgcatctgtaatgtccttattaaccaaaaacgcctaagggataaagaagcacacgctccctagccaacgctagaggaacacaccccgagagctggtgctgtaggacccagttttcccgcgaaaacgctgccgcgcagggggtcagaccatctggaccaaggggggccgagcgaggcctacttctggtttacgcacgggcgctgaaagaagcggcactgtccccccctgccgatgcgcagtggcgcctcccggaggcggagccacgtacgagcgccgctgtgattggtgaggccccgccaggggcggagacgaccttgccgccggcgggaactctgggtctcgcggtttgggagcgctactcgccaggtggactcggagtccgcgagcgtcgtcggcaagcggccgcctttccacggtactccgagcactatgtcgtccccggcgtcgaccccgagccgccgcggcagccggcgtggaagggccacccccgcccagacgcctcggagtgaggatgccaggtcatctccctctcagagacgtagaggcgaggattccacctccacgggggagttgcagccgatgccaacctcgcctggagtggacctgcagagccctgctgcgcaggacgtgctgttttccagccctccccaaatgcattcttcagctatccctcttgactttgatgttagttcaccactgacatacggcactcccagctctcgggtagagggaaccccaagaagtggtgttaggggcacacctgtgagacagaggcctgacctgggctctgcacagaagggcctgcaagtggatctgcagtctgacggggcagcagcagaagatatagtggcaagtgagcagtctctaggccaaaaacttgtgatctggggaacagatgtaaatgtggcagcatgcaaagaaaactttcagagatttcttcagcgttttattgaccctctggctaaagaagaagaaaatgttggcatagatattactgaacctctatacatgcaacgacttggggagattaatgttattggtgagccatttttaaatgtgaactgtgaacacatcaaatcatttgacaaaaatttgtacagacaactcatctcttacccacaggaagttattccaacttttgacatggctgtcaatgaaatcttctttgaccgttaccctgactcaatcttagaacatcagattcaagtaagaccattcaacgcattgaagactaagaatatgagaaacctgaatccagaagacattgaccagctcatcaccatcagcggcatggtgatcaggacatcccagctgattcccgagatgcaggaggccttcttccagtgccaagtgtgtgcccacacgacccgggtggagatggaccgcggccgcattgcagagcccagtgtgtgcgggcgctgccacaccacccacagcatggcactcatccacaaccgctccctcttctctgacaagcagatgatcaagcttcaggagtctccggaagacatgcctgcagggcagacaccacacacagttatcctgtttgctcacaatgatctcgttgacaaggtccagcctggggacagagtgaatgttacaggcatctatcgagctgtgcctattcgagtcaatccaagagtgagtaatgtgaagtctgtctacaaaacccacattgatgtcattcattatcggaaaacggatgcaaaacgtctgcatggccttgatgaagaagcagaacagaaacttttttcagagaaacgtgtggaattgcttaaggaactttccaggaaaccagacatttatgagaggcttgcttcagccttggctccaagcatttatgaacatgaagatataaagaagggaattttgcttcagctctttggcgggacaaggaaggattttagtcacactggaaggggcaaatttcgggctgagatcaacatcttgctgtgtggcgaccctggtaccagcaagtcccagctgctgcagtacgtgtacaacctcgtccccaggggccagtacacgtctgggaagggctccagtgcagttggcctcactgcgtacgtaatgaaagaccctgagacaaggcagctggtcctgcagacaggtgctcttgtcctgagtgacaacggcatctgctgtatcgatgagttcgacaagatgaatgaaagtacaagatcggtattgcatgaagtcatggaacagcagactctgtccattgcaaaggctgggatcatctgtcagctcaatgcgcgcacctctgtcctggcagcagcaaatcccattgagtctcagtggaatcctaaaaaaacaaccattgaaaacatccagctgcctcatactttattatcaaggtttgatttgatcttcctcatgctggaccctcaggacgaagcctatgacaggcgtctggctcaccacctggtcgcactgtactaccagagcgaggagcaggcagaggaggagctcctggacatggcggtgctaaaggactacattgcctacgcgcacagcaccatcatgccgcggctaagtgaggaagccagccaggctctcatcgaggcttatgtagacatgaggaagattggcagtagccggggaatggtttctgcataccctcgacagctagagtcattaatccgcttagcagaagcccatgctaaagtaagattgtctaacaaagttgaagccattgatgtggaagaggccaaacgcctccatcgggaagctctgaagcagtctgcaactgatccccggactggcatcgtggacatatctattcttactacggggatgagtgccacctctcgtaaacggaaagaagaattagctgaagcattgaaaaagcttattttatctaagggcaaaacaccctgtaatcccagcactttgggaggccaatgtgggtggatcatgaggtcaggagttcaagaccagcctagccaagatggtgaaaccccgtctctagtaaagataacaaaaaattagctgggcttgatggcatgcgcctgtaatcccagctactcgggaggttgaggcaggagaatcgcttaaacccaggcggcagaggttgcagtgagccaagatcgcgccactgcactccagcctcagcaatagagtgagactgtctcaaaaaaa

SEQ ID NO: 346398 - DNA, 4198 bp, Homo sapiens
tggaaacctaaggaaaaacgtctgacctgcggaggtagtttgggtggctacttggtgttggacttggctaaataaataccagaggcagataaaacaagcgaggggcctaggtcaagagttccaagtttgttcctcgataaaaaacgacaaacgcggtcgggggcggtgatgcccgcctgcagtcccaacactttaggaagctgaggcggggggatcgcaggagttcgagaccagtctgggcaacataatgagaccatccccaccacctcccgtccttaattttttttaataaaaaaaatctttaagtgagaaatgcatctgtaatgtccttattaaccaaaaacgcctaagggataaagaagcacacgctccctagccaacgctagaggaacacaccccgagagctggtgctgtaggacccagttttcccgcgaaaacgctgccgcgcagggggtcagaccatctggaccaaggggggccgagcgaggcctacttctggtttacgcacgggcgctgaaagaagcggcactgtccccccctgccgatgcgcagtggcgcctcccggaggcggagccacgtacgagcgccgctgtgattggtgaggccccgccaggggcggagacgaccttgccgccggcgggaactctgggtctcgcggtttgggagcgctactcgccaggtggactcggagtccgcgagcgtcgtcggcaagcggccgcctttccacggtactccgagcactatgtcgtccccggcgtcgaccccgagccgccgcggcagccggcgtggaagggccacccccgcccagacgcctcggagtgaggatgccaggtcatctccctctcagagacgtagaggcgaggattccacctccacgggggagttgcagccgatgccaacctcgcctggagtggacctgcagagccctgctgcgcaggacgtgctgttttccagccctccccaaatgcattcttcagctatccctcttgactttgatgttagttcaccactgacatacggcactcccagctctcgggtagagggaaccccaagaagtggtgttaggggcacacctgtgagacagaggcctgacctgggctctgcacagaagggcctgcaagtggatctgcagtctgacggggcagcagcagaagatatagtggcaagtgagcagtctctaggccaaaaacttgtgatctggggaacagatgtaaatgtggcagcatgcaaagaaaactttcagagatttcttcagcgttttattgaccctctggctaaagaagaagaaaatgttggcatagatattactgaacctctatacatgcaacgacttggggagattaatgttattggtgagccatttttaaatgtgaactgtgaacacatcaaatcatttgacaaaaatttgtacagacaactcatctcttacccacaggaagttattccaacttttgacatggctgtcaatgaaatcttctttgaccgttaccctgactcaatcttagaacatcagattcaagtaagaccattcaacgcattgaagactaagaatatgagaaacctgaatccagaagacattgaccagctcatcaccatcagcggcatggtgatcaggacatcccagctgattcccgagatgcaggaggccttcttccagtgccaagtgtgtgcccacacgacccgggtggagatggaccgcggccgcattgcagagcccagtgtgtgcgggcgctgccacaccacccacagcatggcactcatccacaaccgctccctcttctctgacaagcagatgatcaagcttcaggagtctccggaagacatgcctgcagggcagacaccacacacagttatcctgtttgctcacaatgatctcgttgacaaggtccagcctggggacagagtgaatgttacaggtttgatttgatcttcctcatgctggaccctcaggacgaagcctatgacaggcgtctggctcaccacctggtcgcactgtactaccagagcgaggagcaggcagaggaggagctcctggacatggcggtgctaaaggactacattgcctacgcgcacagcaccatcatgccgcggctaagtgaggaagccagccaggctctcatcgaggcttatgtagacatgaggaagattggcagtagccggggaatggtttctgcataccctcgacagctagagtcattaatccgcttagcagaagcccatgctaaagtaagattgtctaacaaagttgaagccattgatgtggaagaggccaaacgcctccatcgggaagctctgaagcagtctgcaactgatccccggactggcatcgtggacatatctattcttactacggggatgagtgccacctctcgtaaacggaaagaagaattagctgaagcattgaaaaagcttattttatctaagggcaaaacaccagctctaaaataccagcaactttttgaagatattcggggacaatctgacatagcaattactaaagatatgtttgaagaagcactgcgtgccctggcagatgatgatttcctgacagtgactgggaagaccgtgcgcttgctctgaagccttgtgagcaaggaaggctccctgcatgtcctgcttgctgcacgccacatgggtgtggtctgcatctcagttggccgccatcagtgtaaatagagcttaaagtcatggtttggctgcataaaaattttctaacttgggttcaatatttgtagtgaagtatctgttttcatttttttcacgttataaataaaaatactatgctggccgggcgcggtggctcacacctgtaatcccagcactttgggaggccaatgtgggtggatcatgaggtcaggagttcaagaccagcctagccaagatggtgaaaccccgtctctagtaaagataacaaaaaattagctgggcttgatggcatgcgcctgtaatcccagctactcgggaggttgaggcaggagaatcgcttaaacccaggcggcagaggttgcagtgagccaagatcgcgccactgcactccagcctcagcaatagagtgagactgtctcaaaaaaaaaaaaaaaaaaaacctgccaattttcaaacataccgtagagattattttcaggtgccattttatagtatagcagcagggcttttactctgtgtatgcacagatgcagtctggggcatggtttgtgtgctggactttctcatggccatcatcagtatgcttatggatttgatgacaggcatagcctgggcatatcacctcattggtaaagggctagagcctttcttttttatggcacttctttttttgagatagggtcttactctgtcaccctggctagagtacactggtacaatcacggctcaatgtaggcttaacctcctgggctcaggtgtatgtcactatgcccggctactttttgtattttttggtagagacggcttcgccacgttgcccaggctgcaagcgatatgcctaggctcaagcgatctgcccacctcaacttccggaagtgctgagattacaggtgtgagccactgcacccagcctttgttttattttttattttttgagaggtatgattctttctagagattttttctcatggctactattagatcaggaatgggtgattggagattattagattctaggttaacttctaccactttaccctaatacataaaactttttcctaaataaatgatggaaggaataatacttggttacctggcattatttttcagtaagaaaaaagctttactaaccactacatttatggaaatttgtaggggtaagtattttataggtcataaaaaacaccataatataacgaatctcattttctttaaatgtgaattaaatcctaacagtcatctttataaaatgaccataggctaaaatcttacgtgtaagtactactacaataaataatttctgaaacctttaaatcatatgagttgggccttttttataacttggaatcaacattttttaataaagtatccatagaaaatgatagatctggccgggcgcggtggctcacacctgtaatcccagcactttgggaggccgagatggctggatcatgaggcaggagaatgacatgaacctaggaggcggagcttgcagtgagccgagatcatgccactgcactccaggctgggcaacagagtgagactccatctc

SEQ ID NO: 346399 - DNA, 3035 bp, Homo sapiens
tggaaacctaaggaaaaacgtctgacctgcggaggtagtttgggtggctacttggtgttggacttggctaaataaataccagaggcagataaaacaagcgaggggcctaggtcaagagttccaagtttgttcctcgataaaaaacgacaaacgcggtcgggggcggtgatgcccgcctgcagtcccaacactttaggaagctgaggcggggggatcgcaggagttcgagaccagtctgggcaacataatgagaccatccccaccacctcccgtccttaattttttttaataaaaaaaatctttaagtgagaaatgcatctgtaatgtccttattaaccaaaaacgcctaagggataaagaagcacacgctccctagccaacgctagaggaacacaccccgagagctggtgctgtaggacccagttttcccgcgaaaacgctgccgcgcagggggtcagaccatctggaccaaggggggccgagcgaggcctacttctggtttacgcacgggcgctgaaagaagcggcactgtccccccctgccgatgcgcagtggcgcctcccggaggcggagccacgtacgagcgccgctgtgattggtgaggccccgccaggggcggagacgaccttgccgccggcgggaactctgggtctcgcggtttgggagcgctactcgccaggtggactcggagtccgcgagcgtcgtcggcaagcggccgcctttccacggtactccgagcactatgtcgtccccggcgtcgaccccgagccgccgcggcagccggcgtggaagggccacccccgcccagacgcctcggagtgaggatgccaggtcatctccctctcagagacgtagaggcgaggattccacctccacgggggagttgcagccgatgccaacctcgcctggagtggacctgcagagccctgctgcgcaggacgtgctgttttccagccctccccaaatgcattcttcagctatccctcttgactttgatgttagttcaccactgacatacggcactcccagctctcgggtagagggaaccccaagaagtggtgttaggggcacacctgtgagacagaggcctgacctgggctctgcacagaagggcctgcaagtggatctgcagtctgacggggcagcagcagaagatatagtggcaagtgagcagtctctaggccaaaaacttgtgatctggggaacagatgtaaatgtggcagcatgcaaagaaaactttcagagatttcttcagcgttttattgaccctctggctaaagaagaagaaaatgttggcatagatattactgaacctctatacatgcaacgacttggggagattaatgttattggtgagccatttttaaatgtgaactgtgaacacatcaaatcatttgacaaaaatttgtacagacaactcatctcttacccacaggaagttattccaacttttgacatggctgtcaatgaaatcttctttgaccgttaccctgactcaatcttagaacatcagattcaagtaagaccattcaacgcattgaagactaagaatatgagaaacctgaatccagaagacattgaccagctcatcaccatcagcggcatggtgatcaggacatcccagctgattcccgagatgcaggaggccttcttccagtgccaagtgtgtgcccacacgacccgggtggagatggaccgcggccgcattgcagagcccagtgtgtgcgggcgctgccacaccacccacagcatggcactcatccacaaccgctccctcttctctgacaagcagatgatcaagcttcaggagtctccggaagacatgcctgcagggcagacaccacacacagttatcctgtttgctcacaatgatctcgttgacaaggtccagcctggggacagagtgaatgttacaggcatctatcgagctgtgcctattcgagtcaatccaagagtgagtaatgtgaagtctgtctacaaaacccacattgatgtcattcattatcggaaaacggatgcaaaacgtctgcatggccttgatgaagaagcagaacagaaacttttttcagagaaacgtgtggaattgcttaaggaactttccaggaaaccagacatttatgagaggcttgcttcagccttggctccaagcatttatgaacatgaagatataaagaagggaattttgcttcagctctttggcgggacaaggaaggattttagtcacactggaaggggcaaatttcgggctgagatcaacatcttgctgtgtggcgaccctggtaccagcaagtcccagctgctgcagtacgtgtacaacctcgtccccaggggccagtacacgtctgggaagggctccagtgcagttggcctcactgcgtacgtaatgaaagaccctgagacaaggcagctggtcctgcagacaggtgctcttgtcctgagtgacaacggcatctgctgtatcgatgagttcgacaagatgaatgaaagtacaagatcggtattgcatgaagtcatggaacagcagactctgtccattgcaaaggctgggatcatctgtcagctcaatgcgcgcacctctgtcctggcagcagcaaatcccattgagtctcagtggaatcctaaaaaaacaaccattgaaaacatccagctgcctcatactttattatcaaggtttgatttgatcttcctcatgctggaccctcaggacgaagcctatgacaggcgtctggctcaccacctggtcgcactgtactaccagagcgaggagcaggcagaggaggagctcctggacatggcggtgctaaaggactacattgcctacgcgcacagcaccatcatgccgcggctaagtgaggaagccagccaggctctcatcgaggcttatgtagacatgaggaagattggcagtagccggggaatggtttctgcataccctcgacagctagagtcattaatccgcttagcagaagcccatgctaaagtaagattgtctaacaaagttccgttgaagccgtgcgggatcctctagatccacc

SEQ ID NO: 346400 - DNA, 4066 bp, Homo sapiens
tggaaacctaaggaaaaacgtctgacctgcggaggtagtttgggtggctacttggtgttggacttggctaaataaataccagaggcagataaaacaagcgaggggcctaggtcaagagttccaagtttgttcctcgataaaaaacgacaaacgcggtcgggggcggtgatgcccgcctgcagtcccaacactttaggaagctgaggcggggggatcgcaggagttcgagaccagtctgggcaacataatgagaccatccccaccacctcccgtccttaattttttttaataaaaaaaatctttaagtgagaaatgcatctgtaatgtccttattaaccaaaaacgcctaagggataaagaagcacacgctccctagccaacgctagaggaacacaccccgagagctggtgctgtaggacccagttttcccgcgaaaacgctgccgcgcagggggtcagaccatctggaccaaggggggccgagcgaggcctacttctggtttacgcacgggcgctgaaagaagcggcactgtccccccctgccgatgcgcagtggcgcctcccggaggcggagccacgtacgagcgccgctgtgattggtgaggccccgccaggggcggagacgaccttgccgccggcgggaactctgggtctcgcggtttgggagcgctactcgccaggtggactcggagtccgcgagcgtcgtcggcaagcggccgcctttccacggtactccgagcactatgtcgtccccggcgtcgaccccgagccgccgcggcagccggcgtggaagggccacccccgcccagacgcctcggagtgaggatgccaggtcatctccctctcagagacgtagaggcgaggattccacctccacgggggagttgcagccgatgccaacctcgcctggagtggacctgcagagccctgctgcgcaggacgtgctgttttccagccctccccaaatgcattcttcagctatccctcttgactttgatgttagttcaccactgacatacggcactcccagctctcgggtagagggaaccccaagaagtggtgttaggggcacacctgtgagacagaggcctgacctgggctctgcacagaagggcctgcaagtggatctgcagtctgacggggcagcagcagaagatatagtggcaagtgagcagtctctaggccaaaaacttgtgatctggggaacagatgtaaatgtggcagcatgcaaagaaaactttcagagatttcttcagcgttttattgaccctctggctaaagaagaagaaaatgttggcatagatattactgaacctctatacatgcaacgacttggggagattaatgttattggtgagccatttttaaatgtgaactgtgaacacatcaaatcatttgacaaaaatttgtacagacaactcatctcttacccacaggaagttattccaacttttgacatggctgtcaatgaaatcttctttgaccgttaccctgactcaatcttagaacatcagattcaagtaagaccattcaacgcattgaagactaagaatatgagaaacctgaatccagaagacattgaccagctcatcaccatcagcggcatggtgatcaggacatcccagctgattcccgagatgcaggaggccttcttccagtgccaaatcaagcttcaggagtctccggaagacatgcctgcagggcagacaccacacacagttatcctgtttgctcacaatgatctcgttgacaaggtccagcctggggacagagtgaatgttacaggtttgatttgatcttcctcatgctggaccctcaggacgaagcctatgacaggcgtctggctcaccacctggtcgcactgtactaccagagcgaggagcaggcagaggaggagctcctggacatggcggtgctaaaggactacattgcctacgcgcacagcaccatcatgccgcggctaagtgaggaagccagccaggctctcatcgaggcttatgtagacatgaggaagattggcagtagccggggaatggtttctgcataccctcgacagctagagtcattaatccgcttagcagaagcccatgctaaagtaagattgtctaacaaagttgaagccattgatgtggaagaggccaaacgcctccatcgggaagctctgaagcagtctgcaactgatccccggactggcatcgtggacatatctattcttactacggggatgagtgccacctctcgtaaacggaaagaagaattagctgaagcattgaaaaagcttattttatctaagggcaaaacaccagctctaaaataccagcaactttttgaagatattcggggacaatctgacatagcaattactaaagatatgtttgaagaagcactgcgtgccctggcagatgatgatttcctgacagtgactgggaagaccgtgcgcttgctctgaagccttgtgagcaaggaaggctccctgcatgtcctgcttgctgcacgccacatgggtgtggtctgcatctcagttggccgccatcagtgtaaatagagcttaaagtcatggtttggctgcataaaaattttctaacttgggttcaatatttgtagtgaagtatctgttttcatttttttcacgttataaataaaaatactatgctggccgggcgcggtggctcacacctgtaatcccagcactttgggaggccaatgtgggtggatcatgaggtcaggagttcaagaccagcctagccaagatggtgaaaccccgtctctagtaaagataacaaaaaattagctgggcttgatggcatgcgcctgtaatcccagctactcgggaggttgaggcaggagaatcgcttaaacccaggcggcagaggttgcagtgagccaagatcgcgccactgcactccagcctcagcaatagagtgagactgtctcaaaaaaaaaaaaaaaaaaaacctgccaattttcaaacataccgtagagattattttcaggtgccattttatagtatagcagcagggcttttactctgtgtatgcacagatgcagtctggggcatggtttgtgtgctggactttctcatggccatcatcagtatgcttatggatttgatgacaggcatagcctgggcatatcacctcattggtaaagggctagagcctttcttttttatggcacttctttttttgagatagggtcttactctgtcaccctggctagagtacactggtacaatcacggctcaatgtaggcttaacctcctgggctcaggtgtatgtcactatgcccggctactttttgtattttttggtagagacggcttcgccacgttgcccaggctgcaagcgatatgcctaggctcaagcgatctgcccacctcaacttccggaagtgctgagattacaggtgtgagccactgcacccagcctttgttttattttttattttttgagaggtatgattctttctagagattttttctcatggctactattagatcaggaatgggtgattggagattattagattctaggttaacttctaccactttaccctaatacataaaactttttcctaaataaatgatggaaggaataatacttggttacctggcattatttttcagtaagaaaaaagctttactaaccactacatttatggaaatttgtaggggtaagtattttataggtcataaaaaacaccataatataacgaatctcattttctttaaatgtgaattaaatcctaacagtcatctttataaaatgaccataggctaaaatcttacgtgtaagtactactacaataaataatttctgaaacctttaaatcatatgagttgggccttttttataacttggaatcaacattttttaataaagtatccatagaaaatgatagatctggccgggcgcggtggctcacacctgtaatcccagcactttgggaggccgagatggctggatcatgaggcaggagaatgacatgaacctaggaggcggagcttgcagtgagccgagatcatgccactgcactccaggctgggcaacagagtgagactccatctc

SEQ ID NO: 346401 - DNA, 674 bp, Homo sapiens
ttcggatcctggcgtttgcctgcagcaagatggcggcggtctcaatgtcagtggtactgaggcagacgttgtggcggagaagggcagtggctgtagctgccctttccgtttccagggttccgaccaggtcgttgaggacttccacatggagattggcacaggaccagactcaagacacacaactcataacagttgatgaaaaattggatatcactactttaactggcgttccagaagagcatataaaaactagaaaagtcaggatctttgttcctgctcgcaataacatgcagtctggagtaaacaacacaaagaaatggaagatggagtttgataccagggagcgatgggaaaatcctttgatgggttgggcatcaacggctgatcccttatccaacatggttctaaccttcagtactaaagaagatgcagtttcctttgcagaaaaaaatggatggagctatgacattgaagagaggaaggttccaaaacccaagtccaagtcttatggtgcaaacttttcttggaacaaaagaacaagagtatccacaaaataggttggcactgactatatctctgcttgactgtgaataaagtcagctatgcagtatttatagtccatgtataataaatacatctcttaatctcctaataaattggacctttaaactaca

SEQ ID NO: 346402 - DNA, 831 bp, Homo sapiens
ttcggatcctggcgtttgcctgcagcaagatggcggcggtctcaatgtcagtggtactgaggcagacgttgtggcggagaagggcagtggctgtagctgccctttccgtttccagggttccgaccaggtcgttgaggacttccacatggagattggcacaggaccagactcaagacacacaactcataacagttgatgaaaaattggatatcactactttaactggcgttccagaagagcatataaaaactagaaaagtcaggatctttgttcctgctcgcaataacatgcagtctggagtaaacaacacaaagaaatggaagatggagtttgataccagggagcgatgggaaaatcctttgatgggttgggcatcaacggctgatcccttatccaacatggttctaaccttcagtactaaagaagatgcagtttcctttgcagaaaaaaatggatggagctatgacattgaagagaggaaggttccaaaacccaagtccaagtcttatggtgcaaacttttcttggaacaaaagaacaagagtatccacaaaataggttggcactgactatatctctgcttgactgtgaataaagtcagctatgcagtatttatagtccatgtataataaatacatctcttaatctcctaataaattggacctttaaactacaaaaaaaaaaaaagaaaaaaaatttgggggggggggccccgaaaaattttaaaacacttctggggggcggcccaagggaaaggaaaggcaaagggttccgaaaaccggggaatggggggttcccaaaaagcggggggcaggttgaaaccagggttggg

SEQ ID NO: 346403 - DNA, 846 bp, Homo sapiens
ttcggatcctggcgtttgcctgcagcaagatggcggcggtctcaatgtcagtggtactgaggcagacgttgtggcggagaagggcagtggctgtagctgccctttccgtttccagggttccgaccaggtcgttgaggacttccacatggagattggcacaggaccagactcaagacacacaactcataacagttgatgaaaaattggtttatcttgtaccactgtgttttacattctgtggtctagccacaccaagcctggaacttgctactctttttcctgcttcaaggcatttggagttcctgttcactctacctggatgcattttaactaatcctgaggacttcatccggtcaccatctacctattcttcaaatggatatcactactttaactggcgttccagaagagcatataaaaactagaaaagtcaggatctttgttcctgctcgcaataacatgcagtctggagtaaacaacacaaagaaatggaagatggagtttgataccagggagcgatgggaaaatcctttgatgggttgggcatcaacggctgatcccttatccaacatggttctaaccttcagtactaaagaagatgcagtttcctttgcagaaaaaaatggatggagctatgacattgaagagaggaaggttccaaaacccaagtccaagtcttatggtgcaaacttttcttggaacaaaagaacaagagtatccacaaaataggttggcactgactatatctctgcttgactgtgaataaagtcagctatgcagtatttatagtccatgtataataaatacatctcttaatctcctaataaattggacctttaaactaca

SEQ ID NO: 346404 - DNA, 684 bp, Homo sapiens
cccccggcttgcaggaattcggcaccaagcaagaggcggcggtctccattgccagtggtactaagccaaccgttgtgccgaaaaaagcccaagggcctgaacctccccttcccgttcacgaggttccccccccggttggttgagcctttcccacatgaagttggccaggggcccagtctcaacccacacattcttatcccgtttatataaaatattgatatcactactttaactggcgttccagaagagcatataaaaactagaaaagtcaggatctttgttcctgctcgcaataacatgcagtctggagtaaacaacacaaagaaatggaagatggagtttgataccagggagcgatgggaaaatcctttgatgggttgggcatcaacggctgatcccttatccaacatggttctaaccttcagtactaaagaagatgcagtttcctttgcagaaaaaaatggatggagctatgacattgaagagaggaaggttccaaaacccaagtccaagtcttatggtgcaaacttttcttggaacaaaagaacaagagtatccacaaaataggttggcactgactatatctctgcttgactgtgaataaagtcagctatgcagtatttatagtccatgtataataaatacatctcttaatctcctaataaattggacctttaaactaca

SEQ ID NO: 346405 - DNA, 473 bp, Homo sapiens
  misc_feature (38)..(38): n is a, c, g, or t
  misc_feature (46)..(46): n is a, c, g, or t
gacgtggtccccggctgcgggacccggcccgtcgaccngagggctntaaactaaaagtcaggatctttgttcctgctcgcaataacatgcagtctggagtaaacaacacaaagaaatggaagatggagtttgataccagggagcgatgggaaaatcctttgatgggttgggcatcaacggctgatcccttatccaacatggttctaaccttcagtactaaagaagatgcagtttcctttgcagaaaaaaatggatggagctatgacattgaagagaggaaggttccaaaacccaagtccaagtcttatggtgcaaacttttcttggaacaaaagaacaagagtatccacaaaataggttggcactgactatatctctgcttgactgtgaataaagtcagctatgcagtatttatagtccatgtataataaatacatctcttaatctcctaataaattggacctttaaactaca

SEQ ID NO: 346406 - DNA, 600 bp, Homo sapiens
ttcggatcctggcgtttgcctgcagcaagatggcggcggtctcaatgtcagtggtactgaggcagacgttgtggcggagaagggcagtggctgtagctgccctttccgtttccagggttccgaccaggtcgttgaggacttccacatggagattggcacaggaccagactcaagacacacaactcataacagttgatgaaaaattggatatcactactttaactggcgttccagaagagcatataaaaactagaaaagtcaggatctttgttcctgctcgcaataacatgcagtctggagtaaacaacacaaagaaatggaagatggagtttgataccagggagcgatgggaaaatcctttgatgggttgggcatcaacgatggagctatgacattgaagagaggaaggttccaaaacccaagtccaagtcttatggtgcaaacttttcttggaacaaaagaacaagagtatccacaaaataggttggcactgactatatctctgcttgactgtgaataaagtcagctatgcagtatttatagtccatgtataataaatacatctcttaatctcctaataaattggacctttaaactaca

SEQ ID NO: 346407 - DNA, 697 bp, Homo sapiens
cacatgcacccatacacacgtacatatatatacgtttacatatttttctatatccctttggaagagttccaaactcttgtaaagaaaccaacttttagaataatagtgagtggttataatgttcatcgctcttcattgcaactattttaaaggcctatgttaaaccacatagagtaatggaaatttttatgtaatacatagatatcagtaattgagcaaggtgaaattgaatcatagtttacatctttaacaacttgagatatggtaaataatctgcaggcaatcttttggacccttttctcacagaggattataagggaacaaatagtaagtatatctcagatgtgttgacatatactcttgatgataaatgaacattaagttaagttataaaagctagcctctgcttgctgtgcttttcaggtatcctctttaattctgtttctgtggatttgtctttgttttttcctcctagggatggagctatgacattgaagagaggaaggttccaaaacccaagtccaagtcttatggtgcaaacttttcttggaacaaaagaacaagagtatccacaaaataggttggcactgactatatctctgcttgactgtgaataaagtcagctatgcagtatttatagtccatgtataataaatacatctcttaatctcctaataaattggacctttaaactaca

SEQ ID NO: 346408 - DNA, 275 bp, Homo sapiens
  misc_feature (1)..(1): n is a, c, g, or t
nagaagaaaatgacacatcacataatcacacacggtcgccttccagctaggcaggatggagctatgacattgaagagaggaaggttccaaaacccaagtccaagtcttatggtgcaaacttttcttggaacaaaagaacaagagtatccacaaaataggttggcactgactatatctctgcttgactgtgaataaagtcagctatgcagtatttatagtccatgtataataaatacatctcttaatctcctaataaattggacctttaaactaca

SEQ ID NO: 346409 - DNA, 287 bp, Homo sapiens
agatggggtggtgacgttaagttaattcgcatttgtgaacatggcgcgtgtttttgagctaggacagatggagctatgacattgaagagaggaaggttccaaaacccaagtccaagtcttatggtgcaaacttttcttggaacaaaagaacaagagtatccacaaaataggttggcactgactatatctctgcttgactgtgaataaagtcagctatgcagtatttatagtccatgtataataaatacatctcttaatctcctaataaattggacctttaaactaca

SEQ ID NO: 346410 - DNA, 450 bp, Homo sapiens
ctgtttgaaacgtgtttttttttcttgtttttctgtaggatatcactactttaactggcgttccagaagagcatataaaaactagaaaagtcaggatctttgttcctgctcgcaataacatgcagtctggagtaaacaacacaaagaaatggaagatggagtttgataccagggagcgatgggaaaatcctttgatgggttgggcatcaacggctgatcccttatccaacatggttctaaccttcagtactaaagaagatgcagtttcctttgcagaaaaaaatggtatgtttggtctgtttttgacaaagtcaagataatgattttatgttcttaaccttaatgaaaaccaattaagtatacagaatttgagttggaatccagtggtttcattgtatctaatccagtggtttcagactttaactacatcagaacacccacctccaaaaa

SEQ ID NO: 346411 - DNA, 620 bp, Homo sapiens
ttcggatcctggcgtttgcctgcagcaagatggcggcggtctcaatgtcagtggtactgaggcagacgttgtggcggagaagggcagtggctgtagctgccctttccgtttccagggttccgaccaggtcgttgaggacttccacatggagattggcacaggaccagactcaagacacacaactcataacagttgatgaaaaattggatatcactactttaactggcgttccagaagagcatataaaaactagaaaagtcaggatctttgttcctgctcgcaataacatgcagtctggagtaaacaacacaaagaaatggaagatggagtttgataccagggagcgatgggtaaccttcagtactaaagaagatgcagtttcctttgcagaaaaaaatggatggagctatgacattgaagagaggaaggttccaaaacccaagtccaagtcttatggtgcaaacttttcttggaacaaaagaacaagagtatccacaaaataggttggcactgactatatctctgcttgactgtgaataaagtcagctatgcagtatttatagtccatgtataataaatacatctcttaatctcctaataaattggacctttaaactaca

SEQ ID NO: 346412 - DNA, 615 bp, Homo sapiens
ttcggatcctggcgtttgcctgcagcaagatggcggcggtctcaatgtcagtggtactgaggcagacgttgtggcggagaagggcagtggctgtagctgccctttccgtttccagggttccgaccaggtcgttgaggacttccacatggagattggcacaggaccagactcaagacacacaactcataacagttgatgaaaaattggatatcactactttaactggcgttccagaagagcatataaaaactagaaaagtcaggatctttgttcctgctcgcaataacatgcagtctggagtaaacaacacaaagaaatggaagatggagtttgataccagggagcgatgggaaaatcctttgatgggttgggcatcaacggctgatcccttatccaacatggttctaaccttcagtactaaagaagatgcagtttcctttgcagaaaaaaatggatggagctatgacattgaagagaggaaggttccaaaacccaagtccaagtcttatggtgcaaacttttcttggaacaaaagaacaagagtagcagtatttatagtccatgtataataaatacatctcttaatctcctaataaattggacctttaaactaca

SEQ ID NO: 346413 - DNA, 616 bp, Homo sapiens
ttcggatcctggcgtttgcctgcagcaagatggcggcggtctcaatgtcagtggtactgaggcagacgttgtggcggagaagggcagtggctgtagctgccctttccgtttccagggttccgaccaggtcgttgaggacttccacatggagattggcacaggaccagactcaagacacacaactcataacagttgatgaaaaattggatatcactactttaactggcgttccagaagagcatataaaaactagaaaagtcaggatctttgttcctgctcgcaataacatgcagtctggagtaaacaacacaaagaaatggaagatggagtttgataccagggagcgatgggaaaatcctttgatgggttgggcatcaacggctgatcccttatccaacatggttctaaccttcagtactaaagaagatgcagtttcctttgcagaaaaaaatggatggagctatgacattgaagagaggaaggttcctccacaaaataggttggcactgactatatctctgcttgactgtgaataaagtcagctatgcagtatttatagtccatgtataataaatacatctcttaatctcctaataaattggacctttaaactaca

SEQ ID NO: 346414 - DNA, 872 bp, Homo sapiens
ggcggtctcaatgtcagtggtactgaggcagacgttgtggcggagaagggcagtggctgtagctgccctttccgtttccagggttccgaccaggtaatagaattttcacacttttcttcaagcttcttgggtccctccatttttgcggagtctctgctggctgagttccggaggaggcctcggggaaggcgtcctctgttgacccttttctcgggagaagtcgggcggactagggactgtctgctatcaatgggcgttggccaggcgagtgagggcgtgagtgcgaggccggggaggaggacctgtggttttctggaagctttcgtattcggcttgtcgctgagggagagggtccgtggaggttttgcctccggagctgcaagctgaaccttagccctcagagaaggggaggagtctcactgatttctgtttccactttctgcatcccttccatttgtcacctgtttgcccaccactccagtccttacagaagggttaaatcactgtatcccttccatggttttaagtggttttaatttggtttctgcataggaagattgtttattcatcagtctgcttgggaggaaaacttgtttggaattcagtgttagtaaaaatatcactgctagtaatattggaaggtaatttttaaaaggctggtggtaatgcctggaggttttctagggattttgttaaagcctcacaataattcagggattgaattgagttgttgagggctctttgcgtccttgagaacctaaagtagtacttttccaaagtattgtcagattcagttgtcagttgattgagttgttactgtttttccttgaagcatttttgtgatgatttttttttttttggctgtattaacc

SEQ ID NO: 346415 - DNA, 701 bp, Homo sapiens
tacttgcttaaaaagttttgacatcaagatactgaactgtatcacgttttaggaccataaaatcctaatagtggatgcgtttaaataataggttagcatactttataaatgttagtagaataggaaagtcttcctggtgtataaactaaacactagaaaagttgaatggaccataataatttatgtaattatcaaatagctaagtaatttcagcttttgttacttgcttttactatctcagttttttgtaattaaagtctctaaagtattcattaaaatatttgtaataacatggttgaagtaaaataacttgtaggaagtttttgataataccaaaacttgataggcagcttcaattttttttctttattttcagtaatctatgccagcaattatgacaatgttagcagaccatgcagctcgtcagctgcttgatttcagccaaaaactggatatcaacttattagataatgtggtgaattgcttataccatggagaaggagcccaggtaaagtagccaaccaaaactttataacattatgacagtgtaacagagttgttgggtttagaataaaattttaaattatcacctttaaaaaagatattccatagtttgcattaatttggaattctgtattaaccataatgaaaattggtttggagaaagaaattgcatgtttgacatggttagagtgggttgt

SEQ ID NO: 346416 - DNA, 475 bp, Homo sapiens
tttgagtatttctgaacatcaataatagaatctctgtccaattagaatttgtgccttgctcagtagttttcattttaatgaatgattcaaaagaatacattagcttaagttttgttttttttaataatattttagcaaagaatggctcaagaagtactgacacatttaaaggagcatcctgatgcttggacaagagtcgacacaattttggaattttctcagaatatgaatacgaaatactatggactacaaattttggaaaatgtgataaaaacaaggtggaagattcttccaaggaaccagtgcgaaggaataaaaaaatacgttgttggcctcattatcaagacgtcatctgacccaacttgtgtagaggtaagagtttattttggagcttattgggagagcataaaatcatttagatattgagtctgactacaacctaattctgtcaagacacatagtcacacatatgcac

SEQ ID NO: 346417 - DNA, 494 bp, Homo sapiens
  misc_feature (3)..(3): n is a, c, g, or t
  misc_feature (15)..(15): n is a, c, g, or t
gancacagtggggantaataacaaagggtatcaccttttgtaacattaatgttaaagtttgggatatttgttcaccatgaaacattgtgtttattttccttgtcttggcttttccacggtggctcatgccactgttcccagccgtggataattcttatatgataaatggaatttgctttttttcctccaagaatgtggatatactgaaagatcctgaaacagtcaagcagcttggtagcattttgaaaacaaatgtgagagcctgcaaagctgttggacacccctttgtaattcagcttggaagaatttatttagatatgcttaatgtatacaagtgcctcagtgaaaatatttctgcagctatccaagctaatggtaggtgattctgatttcttacacaatgcagtataaacaaaccacttctcttctactgccttaagtcaaacatttgatgttttttacagatttaaatcagacctcccatttcccaaatg

SEQ ID NO: 346418 - DNA, 331 bp, Homo sapiens
cttcgatcgagctctgaccactagtccacggttgtaggctgcatctttttaacaactcattaaaaaacaaaacaactctggcttttgagatgacttatactaatttacattgtttaccaagctgtagtgctttaagaacactacttaaaaagcaaaataaacttggtttacatttatttttcctttattgactcatttattcctatattaatgatagtgggtatttgtgtttaagcatcaagtaacattttaaatgaagttggaccccttgatttacaaacaagatttctaaggttattgttcctagtaaatgcagcagttgtgtaaaatg

SEQ ID NO: 346419 - DNA, 4213 bp, Homo sapiens
cacgaggctgaaacccaccttgattcgtcccctctcccccctccccaccttccctcgccctaatcccccaacgaggaaggaaggagcagttggttcaatctctggtaatctatgccagcaattatgacaatgttagcagaccatgcagctcgtcagctgcttgatttcagccaaaaactggatatcaacttattagataatgtggtgaattgcttataccatggagaaggagcccagcaaagaatggctcaagaagtactgacacatttaaaggagcatcctgatgcttggacaagagtcgacacaattttggaattttctcagaatatgaatacgaaatactatggactacaaattttggaaaatgtgataaaaacaaggtggaagattcttccaaggaaccagtgcgaaggaataaaaaaatacgttgttggcctcattatcaagacgtcatctgacccaacttgtgtagagaaagaaaaggtgtatatcggaaaattaaatatgatccttgttcagatactgaaacaagaatggcccaaacattggccaacttttatcagtgatattgttggagcaagtaggaccagcgaaagtctctgtcaaaataatatggtgattcttaaactcttgagtgaagaagtatttgatttctctagtggacagataacccaagtcaaatctaagcatttaaaagacagcatgtgcaatgaattctcacagatatttcaactgtgtcagtttgtaatggaaaattctcaaaatgctccacttgtacatgcaaccttggaaacattgctcagatttctgaactggattcccctgggatatatttttgagaccaaattaatcagcacattgatttataagttcctgaatgttccaatgtttcgaaatgtctctctgaagtgcctcactgagattgctggtgtgagtgtaagccaatatgaagaacaatttgtaacactatttactctgacaatgatgcaactaaagcagatgcttcctttaaataccaatattcgacttgcgtactcaaatggaaaagatgatgaacagaacttcattcaaaatctcagtttgtttctctgcacctttcttaaggaacatgatcaacttatagaaaaaagattaaatctcagggaaactcttatggaggcccttcattatatgttgttggtatctgaagtagaagaaactgaaatctttaaaatttgtcttgaatactggaatcatttggctgctgaactctatagagagagtccattctctacatctgcctctccgttgctttctggaagtcaacattttgatgttcctcccaggagacagctatatttgcccatgttattcaaggtccgtttattaatggttagtcgaatggctaaaccagaggaagtattggttgtagagaatgatcaaggagaagttgtgagagaattcatgaaggatacagattccataaatttgtataagaatatgagggaaacattggtttatcttactcatctggattatgtagatacagaaagaataatgacagagaagcttcacaatcaagtgaatggtacagagtggtcatggaaaaatttgaatacattgtgttgggcaataggctccattagtggagcaatgcatgaagaggacgaaaaacgatttcttgttactgttataaaggatctattaggattatgtgaacagaaaagaggcaaagataataaagctattattgcatcaaatatcatgtacatagtaggtcaatacccacgttttttgagagctcactggaaatttctgaagactgtagttaacaagctgttcgaattcatgcatgagacccatgatggagtccaggatatggcttgtgatactttcattaaaatagcccaaaaatgccgcaggcatttcgttcaggttcaggttggagaagtgatgccatttattgatgaaattttgaacaacattaacactattatttgtgatcttcagcctcaacaggttcatacgttttatgaagctgtggggtacatgattggtgcacaaacagatcaaacagtacaagaacacttgatagaaaagtacatgttactccctaatcaagtgtgggatagtataatccagcaggcaaccaaaaatgtggatatactgaaagatcctgaaacagtcaagcagcttggtagcattttgaaaacaaatgtgagagcctgcaaagctgttggacacccctttgtaattcagcttggaagaatttatttagatatgcttaatgtatacaagtgcctcagtgaaaatatttctgcagctatccaagctaatggtgaaatggttacaaagcaaccattgattagaagtatgcgaactgtaaaaagggaaactttaaagttaatatctggttgggtgagccgatccaatgatccacagatggtcgctgaaaattttgttccccctctgttggatgcagttctcattgattatcagagaaatgtcccagctgctagagaaccagaagtgcttagtactatggccataattgtcaacaagttagggggacatataacagctgaaatacctcaaatatttgatgctgtttttgaatgcacattgaatatgataaataaggactttgaagaatatcctgaacatagaacgaactttttcttactacttcaggctgtcaattctcattgtttcccagcattccttgctattccacctacacagtttaaacttgttttggattccatcatttgggctttcaaacatactatgaggaatgtcgcagatacgggcttacagatactttttacactcttacaaaatgttgcacaagaagaagctgcagctcagagtttttatcaaacttatttttgtgatattctccagcatatcttttctgttgtgacagacacttcacatactgctggtttaacaatgcatgcatcaattcttgcatatatgtttaatttggttgaagaaggaaaaataagtacatcattaaatcctggaaatccagttaacaaccaaatctttcttcaggaatatgtggctaatctccttaagtcggccttccctcacctacaagatgctcaagtaaagctctttgtgacagggcttttcagcttaaatcaagatattcctgctttcaaggaacatttaagagatttcctagttcaaataaaggaatttgcaggtgaagacacttctgatttgtttttggaagagagagaaatagccctacggcaggctgatgaagagaaacataaacgtcaaatgtctgtccctggcatctttaatccacatgagattccagaagaaatgtgtgattaaaatccaaattcatgctgttttttttctctgcaactcgttagcagaggaaaacagcatgtgggtatttgtcgaccaaaatgatgccaatttgtaaattaaaatgtcacctagtggccctttttcttatgtgtttttttgtataagaaattttctgtgaaatatccttccattgtttaagcttttgttttggtcatctttatttagtttgcatgaagttgaaaattaaggcatttttaaaaattttacttcatgcccatttttgtggctgggctggggggaggaggcaaattcgatttgaacatatacttgtaattctaatgcaaaattatacaatttttcctgtaaacaataccaatttttaattagggagcattttccttctagtctatttcagcctagaagaaaagataatgagtaaaacaaattgcgttgtttaaaggattatagtgctgcattgtctgaagttagcacctcttggactgaatcgtttgtctagactacatgtattacaaagtctctttggcaagattgcagcaagatcatgtgcatatcatcccattgtaaagcgacttcaaaaatatgggaacacagttagttatttttacacagttctttttgtttttgtgtgtgtgtgctgtcgcttgtcgacaacagctttttgttttcctcaatgaggagtgttgctcatttgtgagccttcattaactcgaagtgaaatggttaaaaatatttatcctgttagaataggctgcatctttttaacaactcattaaaaaacaaaacaactctggcttttgagatgacttatactaatttacattgtttaccaagctgtagtgctttaagaacactacttaaaaagcaaaataaacttggtttacattta

SEQ ID NO: 346420 - DNA, 4245 bp, Homo sapiens
ggagaagcggctgcagcggccgcggcaggagcagcgggagctacagcatcagcaagagcaacagtagctacagccccggcggcggtgcctgttccagtctttgctgctgcagaaggagcagttggttcaatctctggtaatctatgccagcaattatgacaatgttagcagaccatgcagctcgtcagctgcttgatttcagccaaaaactggatatcaacttattagataatgtggtgaattgcttataccatggagaaggagcccagcaaagaatggctcaagaagtactgacacatttaaaggagcatcctgatgcttggacaagagtcgacacaattttggaattttctcagaatatgaatacgaaatactatggactacaaattttggaaaatgtgataaaaacaaggtggaagattcttccaaggaaccagtgcgaaggaataaaaaaatacgttgttggcctcattatcaagacgtcatctgacccaacttgtgtagagaaagaaaaggtgtatatcggaaaattaaatatgatccttgttcagatactgaaacaagaatggcccaaacattggccaacttttatcagtgatattgttggagcaagtaggaccagcgaaagtctctgtcaaaataatatggtgattcttaaactcttgagtgaagaagtatttgatttctctagtggacagataacccaagtcaaatctaagcatttaaaagacagcatgtgcaatgaattctcacagatatttcaactgtgtcagtttgtaatggaaaattctcaaaatgctccacttgtacatgcaaccttggaaacattgctcagatttctgaactggattcccctgggatatatttttgagaccaaattaatcagcacattgatttataagttcctgaatgttccaatgtttcgaaatgtctctctgaagtgcctcactgagattgctggtgtgagtgtaagccaatatgaagaacaatttgtaacactatttactctgacaatgatgcaactaaagcagatgcttcctttaaataccaatattcgacttgcgtactcaaatggaaaagatgatgaacagaacttcattcaaaatctcagtttgtttctctgcacctttcttaaggaacatgatcaacttatagaaaaaagattaaatctcagggaaactcttatggaggcccttcattatatgttgttggtatctgaagtagaagaaactgaaatctttaaaatttgtcttgaatactggaatcatttggctgctgaactctatagagagagtccattctctacatctgcctctccgttgctttctggaagtcaacattttgatgttcctcccaggagacagctatatttgcccatgttattcaaggtccgtttattaatggttagtcgaatggctaaaccagaggaagtattggttgtagagaatgatcaaggagaagttgtgagagaattcatgaaggatacagattccataaatttgtataagaatatgagggaaacattggtttatcttactcatctggattatgtagatacagaaagaataatgacagagaagcttcacaatcaagtgaatggtacagagtggtcatggaaaaatttgaatacattgtgttgggcaataggctccattagtggagcaatgcatgaagaggacgaaaaacgatttcttgttactgttataaaggatctattaggattatgtgaacagaaaagaggcaaagataataaagctattattgcatcaaatatcatgtacatagtaggtcaatacccacgttttttgagagctcactggaaatttctgaagactgtagttaacaagctgttcgaattcatgcatgagacccatgatggagtccaggatatggcttgtgatactttcattaaaatagcccaaaaatgccgcaggcatttcgttcaggttcaggttggagaagtgatgccatttattgatgaaattttgaacaacattaacactattatttgtgatcttcagcctcaacaggttcatacgttttatgaagctgtggggtacatgattggtgcacaaacagatcaaacagtacaagaacacttgatagaaaagtacatgttactccctaatcaagtgtgggatagtataatccagcaggcaaccaaaaatgtggatatactgaaagatcctgaaacagtcaagcagcttggtagcattttgaaaacaaatgtgagagcctgcaaagctgttggacacccctttgtaattcagcttggaagaatttatttagatatgcttaatgtatacaagtgcctcagtgaaaatatttctgcagctatccaagctaatggtgaaatggttacaaagcaaccattgattagaagtatgcgaactgtaaaaagggaaactttaaagttaatatctggttgggtgagccgatccaatgatccacagatggtcgctgaaaattttgttccccctctgttggatgcagttctcattgattatcagagaaatgtcccagctgctagagaaccagaagtgcttagtactatggccataattgtcaacaagttagggggacatataacagctgaaatacctcaaatatttgatgctgtttttgaatgcacattgaatatgataaataaggactttgaagaatatcctgaacatagaacgaactttttcttactacttcaggctgtcaattctcattgtttcccagcattccttgctattccacctacacagtttaaacttgttttggattccatcatttgggctttcaaacatactatgaggaatgtcgcagatacgggcttacagatactttttacactcttacaaaatgttgcacaagaagaagctgcagctcagagtttttatcaaacttatttttgtgatattctccagcatatcttttctgttgtgacagacacttcacatactgctggtttaacaatgcatgcatcaattcttgcatatatgtttaatttggttgaagaaggaaaaataagtacatcattaaatcctggaaatccagttaacaaccaaatctttcttcaggaatatgtggctaatctccttaagtcggccttccctcacctacaagatgctcaagtaaagctctttgtgacagggcttttcagcttaaatcaagatattcctgctttcaaggaacatttaagagatttcctagttcaaataaaggaatttgcaggtgaagacacttctgatttgtttttggaagagagagaaatagccctacggcaggctgatgaagagaaacataaacgtcaaatgtctgtccctggcatctttaatccacatgagattccagaagaaatgtgtgattaaaatccaaattcatgctgttttttttctctgcaactcgttagcagaggaaaacagcatgtgggtatttgtcgaccaaaatgatgccaatttgtaaattaaaatgtcacctagtggccctttttcttatgtgtttttttgtataagaaattttctgtgaaatatccttccattgtttaagcttttgttttggtcatctttatttagtttgcatgaagttgaaaattaaggcatttttaaaaattttacttcatgcccatttttgtggctgggctggggggaggaggcaaattcgatttgaacatatacttgtaattctaatgcaaaattatacaatttttcctgtaaacaataccaatttttaattagggagcattttccttctagtctatttcagcctagaagaaaagataatgagtaaaacaaattgcgttgtttaaaggattatagtgctgcattgtctgaagttagcacctcttggactgaatcgtttgtctagactacatgtattacaaagtctctttggcaagattgcagcaagatcatgtgcatatcatcccattgtaaagcgacttcaaaaatatgggaacacagttagttatttttacacagttctttttgtttttgtgtgtgtgtgctgtcgcttgtcgacaacagctttttgttttcctcaatgaggagtgttgctcatttgtgagccttcattaactcgaagtgaaatggttaaaaatatttatcctgttagaataggctgcatctttttaacaactcattaaaaaacaaaacaactctggcttttgagatgacttatactaatttacattgtttaccaagctgtagtgctttaagaacactacttaaaaagcaaaataaacttggtttacattta

SEQ ID NO: 346421 - DNA, 4484 bp, Homo sapiens
tacttgcttaaaaagttttgacatcaagatactgaactgtatcacgttttaggaccataaaatcctaatagtggatgcgtttaaataataggttagcatactttataaatgttagtagaataggaaagtcttcctggtgtataaactaaacactagaaaagttgaatggaccataataatttatgtaattatcaaatagctaagtaatttcagcttttgttacttgcttttactatctcagttttttgtaattaaagtctctaaagtattcattaaaatatttgtaataacatggttgaagtaaaataacttgtaggaagtttttgataataccaaaacttgataggcagcttcaattttttttctttattttcagtaatctatgccagcaattatgacaatgttagcagaccatgcagctcgtcagctgcttgatttcagccaaaaactggatatcaacttattagataatgtggtgaattgcttataccatggagaaggagcccagcaaagaatggctcaagaagtactgacacatttaaaggagcatcctgatgcttggacaagagtcgacacaattttggaattttctcagaatatgaatacgaaatactatggactacaaattttggaaaatgtgataaaaacaaggtggaagattcttccaaggaaccagtgcgaaggaataaaaaaatacgttgttggcctcattatcaagacgtcatctgacccaacttgtgtagagaaagaaaaggtgtatatcggaaaattaaatatgatccttgttcagatactgaaacaagaatggcccaaacattggccaacttttatcagtgatattgttggagcaagtaggaccagcgaaagtctctgtcaaaataatatggtgattcttaaactcttgagtgaagaagtatttgatttctctagtggacagataacccaagtcaaatctaagcatttaaaagacagcatgtgcaatgaattctcacagatatttcaactgtgtcagtttgtaatggaaaattctcaaaatgctccacttgtacatgcaaccttggaaacattgctcagatttctgaactggattcccctgggatatatttttgagaccaaattaatcagcacattgatttataagttcctgaatgttccaatgtttcgaaatgtctctctgaagtgcctcactgagattgctggtgtgagtgtaagccaatatgaagaacaatttgtaacactatttactctgacaatgatgcaactaaagcagatgcttcctttaaataccaatattcgacttgcgtactcaaatggaaaagatgatgaacagaacttcattcaaaatctcagtttgtttctctgcacctttcttaaggaacatgatcaacttatagaaaaaagattaaatctcagggaaactcttatggaggcccttcattatatgttgttggtatctgaagtagaagaaactgaaatctttaaaatttgtcttgaatactggaatcatttggctgctgaactctatagagagagtccattctctacatctgcctctccgttgctttctggaagtcaacattttgatgttcctcccaggagacagctatatttgcccatgttattcaaggtccgtttattaatggttagtcgaatggctaaaccagaggaagtattggttgtagagaatgatcaaggagaagttgtgagagaattcatgaaggatacagattccataaatttgtataagaatatgagggaaacattggtttatcttactcatctggattatgtagatacagaaagaataatgacagagaagcttcacaatcaagtgaatggtacagagtggtcatggaaaaatttgaatacattgtgttgggcaataggctccattagtggagcaatgcatgaagaggacgaaaaacgatttcttgttactgttataaaggatctattaggattatgtgaacagaaaagaggcaaagataataaagctattattgcatcaaatatcatgtacatagtaggtcaatacccacgttttttgagagctcactggaaatttctgaagactgtagttaacaagctgttcgaattcatgcatgagacccatgatggagtccaggatatggcttgtgatactttcattaaaatagcccaaaaatgccgcaggcatttcgttcaggttcaggttggagaagtgatgccatttattgatgaaattttgaacaacattaacactattatttgtgatcttcagcctcaacaggttcatacgttttatgaagctgtggggtacatgattggtgcacaaacagatcaaacagtacaagaacacttgatagaaaagtacatgttactccctaatcaagtgtgggatagtataatccagcaggcaaccaaaaatgtggatatactgaaagatcctgaaacagtcaagcagcttggtagcattttgaaaacaaatgtgagagcctgcaaagctgttggacacccctttgtaattcagcttggaagaatttatttagatatgcttaatgtatacaagtgcctcagtgaaaatatttctgcagctatccaagctaatggtgaaatggttacaaagcaaccattgattagaagtatgcgaactgtaaaaagggaaactttaaagttaatatctggttgggtgagccgatccaatgatccacagatggtcgctgaaaattttgttccccctctgttggatgcagttctcattgattatcagagaaatgtcccagctgctagagaaccagaagtgcttagtactatggccataattgtcaacaagttagggggacatataacagctgaaatacctcaaatatttgatgctgtttttgaatgcacattgaatatgataaataaggactttgaagaatatcctgaacatagaacgaactttttcttactacttcaggctgtcaattctcattgtttcccagcattccttgctattccacctacacagtttaaacttgttttggattccatcatttgggctttcaaacatactatgaggaatgtcgcagatacgggcttacagatactttttacactcttacaaaatgttgcacaagaagaagctgcagctcagagtttttatcaaacttatttttgtgatattctccagcatatcttttctgttgtgacagacacttcacatactgctggtttaacaatgcatgcatcaattcttgcatatatgtttaatttggttgaagaaggaaaaataagtacatcattaaatcctggaaatccagttaacaaccaaatctttcttcaggaatatgtggctaatctccttaagtcggccttccctcacctacaagatgctcaagtaaagctctttgtgacagggcttttcagcttaaatcaagatattcctgctttcaaggaacatttaagagatttcctagttcaaataaaggaatttgcaggtgaagacacttctgatttgtttttggaagagagagaaatagccctacggcaggctgatgaagagaaacataaacgtcaaatgtctgtccctggcatctttaatccacatgagattccagaagaaatgtgtgattaaaatccaaattcatgctgttttttttctctgcaactcgttagcagaggaaaacagcatgtgggtatttgtcgaccaaaatgatgccaatttgtaaattaaaatgtcacctagtggccctttttcttatgtgtttttttgtataagaaattttctgtgaaatatccttccattgtttaagcttttgttttggtcatctttatttagtttgcatgaagttgaaaattaaggcatttttaaaaattttacttcatgcccatttttgtggctgggctggggggaggaggcaaattcgatttgaacatatacttgtaattctaatgcaaaattatacaatttttcctgtaaacaataccaatttttaattagggagcattttccttctagtctatttcagcctagaagaaaagataatgagtaaaacaaattgcgttgtttaaaggattatagtgctgcattgtctgaagttagcacctcttggactgaatcgtttgtctagactacatgtattacaaagtctctttggcaagattgcagcaagatcatgtgcatatcatcccattgtaaagcgacttcaaaaatatgggaacacagttagttatttttacacagttctttttgtttttgtgtgtgtgtgctgtcgcttgtcgacaacagctttttgttttcctcaatgaggagtgttgctcatttgtgagccttcattaactcgaagtgaaatggttaaaaatatttatcctgttagaataggctgcatctttttaacaactcattaaaaaacaaaacaactctggcttttgagatgacttatactaatttacattgtttaccaagctgtagtgctttaagaacactacttaaaaagcaaaataaacttggtttacattta

SEQ ID NO: 346422 - DNA, 4066 bp, Homo sapiens
tttgagtatttctgaacatcaataatagaatctctgtccaattagaatttgtgccttgctcagtagttttcattttaatgaatgattcaaaagaatacattagcttaagttttgttttttttaataatattttagcaaagaatggctcaagaagtactgacacatttaaaggagcatcctgatgcttggacaagagtcgacacaattttggaattttctcagaatatgaatacgaaatactatggactacaaattttggaaaatgtgataaaaacaaggtggaagattcttccaaggaaccagtgcgaaggaataaaaaaatacgttgttggcctcattatcaagacgtcatctgacccaacttgtgtagagatactgaaacaagaatggcccaaacattggccaacttttatcagtgatattgttggagcaagtaggaccagcgaaagtctctgtcaaaataatatggtgattcttaaactcttgagtgaagaagtatttgatttctctagtggacagataacccaagtcaaatctaagcatttaaaagacagcatgtgcaatgaattctcacagatatttcaactgtgtcagtttgtaatggaaaattctcaaaatgctccacttgtacatgcaaccttggaaacattgctcagatttctgaactggattcccctgggatatatttttgagaccaaattaatcagcacattgatttataagttcctgaatgttccaatgtttcgaaatgtctctctgaagtgcctcactgagattgctggtgtgagtgtaagccaatatgaagaacaatttgtaacactatttactctgacaatgatgcaactaaagcagatgcttcctttaaataccaatattcgacttgcgtactcaaatggaaaagatgatgaacagaacttcattcaaaatctcagtttgtttctctgcacctttcttaaggaacatgatcaacttatagaaaaaagattaaatctcagggaaactcttatggaggcccttcattatatgttgttggtatctgaagtagaagaaactgaaatctttaaaatttgtcttgaatactggaatcatttggctgctgaactctatagagagagtccattctctacatctgcctctccgttgctttctggaagtcaacattttgatgttcctcccaggagacagctatatttgcccatgttattcaaggtccgtttattaatggttagtcgaatggctaaaccagaggaagtattggttgtagagaatgatcaaggagaagttgtgagagaattcatgaaggatacagattccataaatttgtataagaatatgagggaaacattggtttatcttactcatctggattatgtagatacagaaagaataatgacagagaagcttcacaatcaagtgaatggtacagagtggtcatggaaaaatttgaatacattgtgttgggcaataggctccattagtggagcaatgcatgaagaggacgaaaaacgatttcttgttactgttataaaggatctattaggattatgtgaacagaaaagaggcaaagataataaagctattattgcatcaaatatcatgtacatagtaggtcaatacccacgttttttgagagctcactggaaatttctgaagactgtagttaacaagctgttcgaattcatgcatgagacccatgatggagtccaggatatggcttgtgatactttcattaaaatagcccaaaaatgccgcaggcatttcgttcaggttcaggttggagaagtgatgccatttattgatgaaattttgaacaacattaacactattatttgtgatcttcagcctcaacaggttcatacgttttatgaagctgtggggtacatgattggtgcacaaacagatcaaacagtacaagaacacttgatagaaaagtacatgttactccctaatcaagtgtgggatagtataatccagcaggcaaccaaaaatgtggatatactgaaagatcctgaaacagtcaagcagcttggtagcattttgaaaacaaatgtgagagcctgcaaagctgttggacacccctttgtaattcagcttggaagaatttatttagatatgcttaatgtatacaagtgcctcagtgaaaatatttctgcagctatccaagctaatggtgaaatggttacaaagcaaccattgattagaagtatgcgaactgtaaaaagggaaactttaaagttaatatctggttgggtgagccgatccaatgatccacagatggtcgctgaaaattttgttccccctctgttggatgcagttctcattgattatcagagaaatgtcccagctgctagagaaccagaagtgcttagtactatggccataattgtcaacaagttagggggacatataacagctgaaatacctcaaatatttgatgctgtttttgaatgcacattgaatatgataaataaggactttgaagaatatcctgaacatagaacgaactttttcttactacttcaggctgtcaattctcattgtttcccagcattccttgctattccacctacacagtttaaacttgttttggattccatcatttgggctttcaaacatactatgaggaatgtcgcagatacgggcttacagatactttttacactcttacaaaatgttgcacaagaagaagctgcagctcagagtttttatcaaacttatttttgtgatattctccagcatatcttttctgttgtgacagacacttcacatactgctggtttaacaatgcatgcatcaattcttgcatatatgtttaatttggttgaagaaggaaaaataagtacatcattaaatcctggaaatccagttaacaaccaaatctttcttcaggaatatgtggctaatctccttaagtcggccttccctcacctacaagatgctcaagtaaagctctttgtgacagggcttttcagcttaaatcaagatattcctgctttcaaggaacatttaagagatttcctagttcaaataaaggaatttgcaggtgaagacacttctgatttgtttttggaagagagagaaatagccctacggcaggctgatgaagagaaacataaacgtcaaatgtctgtccctggcatctttaatccacatgagattccagaagaaatgtgtgattaaaatccaaattcatgctgttttttttctctgcaactcgttagcagaggaaaacagcatgtgggtatttgtcgaccaaaatgatgccaatttgtaaattaaaatgtcacctagtggccctttttcttatgtgtttttttgtataagaaattttctgtgaaatatccttccattgtttaagcttttgttttggtcatctttatttagtttgcatgaagttgaaaattaaggcatttttaaaaattttacttcatgcccatttttgtggctgggctggggggaggaggcaaattcgatttgaacatatacttgtaattctaatgcaaaattatacaatttttcctgtaaacaataccaatttttaattagggagcattttccttctagtctatttcagcctagaagaaaagataatgagtaaaacaaattgcgttgtttaaaggattatagtgctgcattgtctgaagttagcacctcttggactgaatcgtttgtctagactacatgtattacaaagtctctttggcaagattgcagcaagatcatgtgcatatcatcccattgtaaagcgacttcaaaaatatgggaacacagttagttatttttacacagttctttttgtttttgtgtgtgtgtgctgtcgcttgtcgacaacagctttttgttttcctcaatgaggagtgttgctcatttgtgagccttcattaactcgaagtgaaatggttaaaaatatttatcctgttagaataggctgcatctttttaacaactcattaaaaaacaaaacaactctggcttttgagatgacttatactaatttacattgtttaccaagctgtagtgctttaagaacactacttaaaaagcaaaataaacttggtttacattta

SEQ ID NO: 346423 - DNA, 3459 bp, Homo sapiens
ttagcgtggtttcggccgaggtacatgcaaccttggaaacattgctcagatttctgaactggattcccctgggatatatttttgagaccaaattaatcagcacattgatttataagttcctgaatgttccaatgtttcgaaatgtctctctgaagtgcctcactgagattgctggtgtgagtgtaagccaatatgaagaacaatttgtaacactatttactctgacaatgatgcaactaaagcagatgcttcctttaaataccaatattcgacttgcgtactcaaatggaaaagatgatgaacagaacttcattcaaaatctcagtttgtttctctgcacctttcttaaggaacatgatcaacttatagaaaaaagattaaatctcagggaaactcttatggaggcccttcattatatgttgttggtatctgaagtagaagaaactgaaatctttaaaatttgtcttgaatactggaatcatttggctgctgaactctatagagagagtccattctctacatctgcctctccgttgctttctggaagtcaacattttgatgttcctcccaggagacagctatatttgcccatgttattcaaggtccgtttattaatggttagtcgaatggctaaaccagaggaagtattggttgtagagaatgatcaaggagaagttgtgagagaattcatgaaggatacagattccataaatttgtataagaatatgagggaaacattggtttatcttactcatctggattatgtagatacagaaagaataatgacagagaagcttcacaatcaagtgaatggtacagagtggtcatggaaaaatttgaatacattgtgttgggcaataggctccattagtggagcaatgcatgaagaggacgaaaaacgatttcttgttactgttataaaggatctattaggattatgtgaacagaaaagaggcaaagataataaagctattattgcatcaaatatcatgtacatagtaggtcaatacccacgttttttgagagctcactggaaatttctgaagactgtagttaacaagctgttcgaattcatgcatgagacccatgatggagtccaggatatggcttgtgatactttcattaaaatagcccaaaaatgccgcaggcatttcgttcaggttcaggttggagaagtgatgccatttattgatgaaattttgaacaacattaacactattatttgtgatcttcagcctcaacaggttcatacgttttatgaagctgtggggtacatgattggtgcacaaacagatcaaacagtacaagaacacttgatagaaaagtacatgttactccctaatcaagtgtgggatagtataatccagcaggcaaccaaaaatgtggatatactgaaagatcctgaaacagtcaagcagcttggtagcattttgaaaacaaatgtgagagcctgcaaagctgttggacacccctttgtaattcagcttggaagaatttatttagatatgcttaatgtatacaagtgcctcagtgaaaatatttctgcagctatccaagctaatggtgaaatggttacaaagcaaccattgattagaagtatgcgaactgtaaaaagggaaactttaaagttaatatctggttgggtgagccgatccaatgatccacagatggtcgctgaaaattttgttccccctctgttggatgcagttctcattgattatcagagaaatgtcccagctgctagagaaccagaagtgcttagtactatggccataattgtcaacaagttagggggacatataacagctgaaatacctcaaatatttgatgctgtttttgaatgcacattgaatatgataaataaggactttgaagaatatcctgaacatagaacgaactttttcttactacttcaggctgtcaattctcattgtttcccagcattccttgctattccacctacacagtttaaacttgttttggattccatcatttgggctttcaaacatactatgaggaatgtcgcagatacgggcttacagatactttttacactcttacaaaatgttgcacaagaagaagctgcagctcagagtttttatcaaacttatttttgtgatattctccagcatatcttttctgttgtgacagacacttcacatactgctggtttaacaatgcatgcatcaattcttgcatatatgtttaatttggttgaagaaggaaaaataagtacatcattaaatcctggaaatccagttaacaaccaaatctttcttcaggaatatgtggctaatctccttaagtcggccttccctcacctacaagatgctcaagtaaagctctttgtgacagggcttttcagcttaaatcaagatattcctgctttcaaggaacatttaagagatttcctagttcaaataaaggaatttgcaggtgaagacacttctgatttgtttttggaagagagagaaatagccctacggcaggctgatgaagagaaacataaacgtcaaatgtctgtccctggcatctttaatccacatgagattccagaagaaatgtgtgattaaaatccaaattcatgctgttttttttctctgcaactcgttagcagaggaaaacagcatgtgggtatttgtcgaccaaaatgatgccaatttgtaaattaaaatgtcacctagtggccctttttcttatgtgtttttttgtataagaaattttctgtgaaatatccttccattgtttaagcttttgttttggtcatctttatttagtttgcatgaagttgaaaattaaggcatttttaaaaattttacttcatgcccatttttgtggctgggctggggggaggaggcaaattcgatttgaacatatacttgtaattctaatgcaaaattatacaatttttcctgtaaacaataccaatttttaattagggagcattttccttctagtctatttcagcctagaagaaaagataatgagtaaaacaaattgcgttgtttaaaggattatagtgctgcattgtctgaagttagcacctcttggactgaatcgtttgtctagactacatgtattacaaagtctctttggcaagattgcagcaagatcatgtgcatatcatcccattgtaaagcgacttcaaaaatatgggaacacagttagttatttttacacagttctttttgtttttgtgtgtgtgtgctgtcgcttgtcgacaacagctttttgttttcctcaatgaggagtgttgctcatttgtgagccttcattaactcgaagtgaaatggttaaaaatatttatcctgttagaataggctgcatctttttaacaactcattaaaaaacaaaacaactctggcttttgagatgacttatactaatttacattgtttaccaagctgtagtgctttaagaacactacttaaaaagcaaaataaacttggtttacattta

SEQ ID NO: 346424 - DNA, 4295 bp, Homo sapiens
gtaacctgtatcaatacctcactttttatcatgtctgaagaatattctcattgtatgaatattcagtattttgtttgttctctcctctgtgatggtacatttgggttgtgataccacttattggcacccaaggccttttaaataaatgtcgttccattaggagacatgataaaaatacatattgatcaactactatgtgagagatttttgaagtgctttagggcatgtcagaagaagcagagttactccagagtttgctgtctatttgataagtattgaaatctgagttgtgatgaataaaacatgaatttttattttcccttaaggtgtaacaagtgaaaagcaatttgaagttggtaatgtttaagaattattttaacagttttggtcttctgtgtaggcccttcattatatgttgttggtatctgaagtagaagaaactgaaatctttaaaatttgtcttgaatactggaatcatttggctgctgaactctatagagagagtccattctctacatctgcctctccgttgctttctggaagtcaacattttgatgttcctcccaggagacagctatatttgcccatgttattcaaggtaacagagcggttggttgagtgttcttcctgttgcatactgtggttttgaggtctgaatccaaatacttctaatctgtgtaaataaattagctataaaaagagaacccaacaacttctccatgagtgtggaaaactagaacatgaaaggagttgagtctagaaccttgattctcaagagtgtggtccttctctcagtatcaacattggttgtgatttcgttaggcaaattcattggccacctgccaatctactaaaccagagtctaggaatgagacacaggaaactcctgtaacagaagttggttaaaaaaatcacattaaaacacacttaaataattataaagccatttttgtagaattacagtgaaaaaaaattttttcttttggagacagggtcttgctctgtggctcaggttggagtgcagtggcgtggtcatagctcactacaatcttgaactcctagactaaagcaattctcttgtgtcagcctcccaagtaattggttgcaggcacacaccaccatgcctagcaaattttaaattttttagttttacttcatttatatttacatagttttttctgttgtgctttaagccccagtatttttattgttttagagattgggtgtcattttgtgttgctcaagctgctctcaaattcctggccacaacagttctttttgcctcggccctccggaatagttggaattataggcatgaatccctacacatggctggcttgtggtttttttggttttgtttgtttttaactaagcttctacactaatgatttcagtgatctaacgatttttttcttgattgatatattgttgagtataggtccgtttattaatggttagtcgaatggctaaaccagaggaagtattggttgtagagaatgatcaaggagaagttgtgagagaattcatgaaggatacagattccataaatttgtataagaatatgagggaaacattggtttatcttactcatctggattatgtagatacagaaagaataatgacagagaagcttcacaatcaagtgaatggtacagagtggtcatggaaaaatttgaatacattgtgttgggcaataggctccattagtggagcaatgcatgaagaggacgaaaaacgatttcttgttactgttataaaggatctattaggattatgtgaacagaaaagaggcaaagataataaagctattattgcatcaaatatcatgtacatagtaggtcaatacccacgttttttgagagctcactggaaatttctgaagactgtagttaacaagctgttcgaattcatgcatgagacccatgatggagtccaggatatggcttgtgatactttcattaaaatagcccaaaaatgccgcaggcatttcgttcaggttcaggttggagaagtgatgccatttattgatgaaattttgaacaacattaacactattatttgtgatcttcagcctcaacaggttcatacgttttatgaagctgtggggtacatgattggtgcacaaacagatcaaacagtacaagaacacttgatagaaaagtacatgttactccctaatcaagtgtgggatagtataatccagcaggcaaccaaaaatgtggatatactgaaagatcctgaaacagtcaagcagcttggtagcattttgaaaacaaatgtgagagcctgcaaagctgttggacacccctttgtaattcagcttggaagaatttatttagatatgcttaatgtatacaagtgcctcagtgaaaatatttctgcagctatccaagctaatggtgaaatggttacaaagcaaccattgattagaagtatgcgaactgtaaaaagggaaactttaaagttaatatctggttgggtgagccgatccaatgatccacagatggtcgctgaaaattttgttccccctctgttggatgcagttctcattgattatcagagaaatgtcccagctgctagagaaccagaagtgcttagtactatggccataattgtcaacaagttagggggacatataacagctgaaatacctcaaatatttgatgctgtttttgaatgcacattgaatatgataaataaggactttgaagaatatcctgaacatagaacgaactttttcttactacttcaggctgtcaattctcattgtttcccagcattccttgctattccacctacacagtttaaacttgttttggattccatcatttgggctttcaaacatactatgaggaatgtcgcagatacgggcttacagatactttttacactcttacaaaatgttgcacaagaagaagctgcagctcagagtttttatcaaacttatttttgtgatattctccagcatatcttttctgttgtgacagacacttcacatactgctggtttaacaatgcatgcatcaattcttgcatatatgtttaatttggttgaagaaggaaaaataagtacatcattaaatcctggaaatccagttaacaaccaaatctttcttcaggaatatgtggctaatctccttaagtcggccttccctcacctacaagatgctcaagtaaagctctttgtgacagggcttttcagcttaaatcaagatattcctgctttcaaggaacatttaagagatttcctagttcaaataaaggaatttgcaggtgaagacacttctgatttgtttttggaagagagagaaatagccctacggcaggctgatgaagagaaacataaacgtcaaatgtctgtccctggcatctttaatccacatgagattccagaagaaatgtgtgattaaaatccaaattcatgctgttttttttctctgcaactcgttagcagaggaaaacagcatgtgggtatttgtcgaccaaaatgatgccaatttgtaaattaaaatgtcacctagtggccctttttcttatgtgtttttttgtataagaaattttctgtgaaatatccttccattgtttaagcttttgttttggtcatctttatttagtttgcatgaagttgaaaattaaggcatttttaaaaattttacttcatgcccatttttgtggctgggctggggggaggaggcaaattcgatttgaacatatacttgtaattctaatgcaaaattatacaatttttcctgtaaacaataccaatttttaattagggagcattttccttctagtctatttcagcctagaagaaaagataatgagtaaaacaaattgcgttgtttaaaggattatagtgctgcattgtctgaagttagcacctcttggactgaatcgtttgtctagactacatgtattacaaagtctctttggcaagattgcagcaagatcatgtgcatatcatcccattgtaaagcgacttcaaaaatatgggaacacagttagttatttttacacagttctttttgtttttgtgtgtgtgtgctgtcgcttgtcgacaacagctttttgttttcctcaatgaggagtgttgctcatttgtgagccttcattaactcgaagtgaaatggttaaaaatatttatcctgttagaataggctgcatctttttaacaactcattaaaaaacaaaacaactctggcttttgagatgacttatactaatttacattgtttaccaagctgtagtgctttaagaacactacttaaaaagcaaaataaacttggtttacattta

SEQ ID NO: 346425 - DNA, 4368 bp, Homo sapiens
cacgaggctgaaacccaccttgattcgtcccctctcccccctccccaccttccctcgccctaatcccccaacgaggaaggaaggagcagttggttcaatctctggtaatctatgccagcaattatgacaatgttagcagaccatgcagctcgtcagctgcttgatttcagccaaaaactggatatcaacttattagataatgtggtgaattgcttataccatggagaaggagcccagcaaagaatggctcaagaagtactgacacatttaaaggagcatcctgatgcttggacaagagtcgacacaattttggaattttctcagaatatgaatacgaaatactatggactacaaattttggaaaatgtgataaaaacaaggtggaagattcttccaaggaaccagtgcgaaggaataaaaaaatacgttgttggcctcattatcaagacgtcatctgacccaacttgtgtagagaaagaaaaggtgtatatcggaaaattaaatatgatccttgttcagatactgaaacaagaatggcccaaacattggccaacttttatcagtgatattgttggagcaagtaggaccagcgaaagtctctgtcaaaataatatggtgattcttaaactcttgagtgaagaagtatttgatttctctagtggacagataacccaagtcaaatctaagcatttaaaagacagcatgtgcaatgaattctcacagatatttcaactgtgtcagtttgtaatggaaaattctcaaaatgctccacttgtacatgcaaccttggaaacattgctcagatttctgaactggattcccctgggatatatttttgagaccaaattaatcagcacattgatttataagttcctgaatgttccaatgtttcgaaatgtctctctgaagtgcctcactgagattgctggtgtgagtgtaagccaatatgaagaacaatttgtaacactatttactctgacaatgatgcaactaaagcagatgcttcctttaaataccaatattcgacttgcgtactcaaatggaaaagatgatgaacagaacttcattcaaaatctcagtttgtttctctgcacctttcttaaggaacatgatcaacttatagaaaaaagattaaatctcagggaaactcttatggaggcccttcattatatgttgttggtatctgaagtagaagaaactgaaatctttaaaatttgtcttgaatactggaatcatttggctgctgaactctatagagagagtccattctctacatctgcctctccgttgctttctggaagtcaacattttgatgttcctcccaggagacagctatatttgcccatgttattcaaggtccgtttattaatggttagtcgaatggctaaaccagaggaagtattggttgtagagaatgatcaaggagaagttgtgagagaattcatgaaggatacagattccataaatttgtataagaatatgagggaaacattggtttatcttactcatctggattatgtagatacagaaagaataatgacagagaagcttcacaatcaagtgaatggtacagagtggtcatggaaaaatttgaatacattgtgttgggcaataggctccattagtggagcaatgcatgaagaggacgaaaaacgatttcttgttactgttataaaggatctattaggattatgtgaacagaaaagaggcaaagataataaagctattattgcatcaaatatcatgtacatagtaggtcaatacccacgttttttgagagctcactggaaatttctgaagactgtagttaacaagctgttcgaattcatgcatgagacccatgatggagtccaggatatggcttgtgatactttcattaaaatagcccaaaaatgccgcaggcatttcgttcaggttcaggttggagaagtgatgccatttattgatgaaattttgaacaacattaacactattatttgtgatcttcagcctcaacaggttcatacgttttatgaagctgtggggtacatgattggtgcacaaacagatcaaacagtacaagaacacttgatagaaaagtacatgttactccctaatcaagtgtgggatagtataatccagcaggcaaccaaaaatgtggatatactgaaagatcctgaaacagtcaagcagcttggtagcattttgaaaacaaatgtgagagcctgcaaagctgttggacacccctttgtaattcagcttggaagaatttatttagatatgcttaatgtatacaagtgcctcagtgaaaatatttctgcagctatccaagctaatggtgaaatggttacaaagcaaccattgattagaagtatgcgaactgtaaaaagggaaactttaaagttaatatctggttgggtgagccgatccaatgatccacagatggtcgctgaaaattttgttccccctctgttggatgcagttctcattgattatcagagaaatgtcccagctgctagagaaccagaagtgcttagtactatggccataattgtcaacaagttagggggacatataacagctgaaatacctcaaatatttgatgctgtttttgaatgcacattgaatatgataaataaggactttgaagaatatcctgaacatagaacgaactttttcttactacttcaggctgtcaattctcattgtttcccagcattccttgctattccacctacacagtttaaacttgttttggattccatcatttgggctttcaaacatactatgaggaatgtcgcagatacgggcttacagatactttttacactcttacaaaatgttgcacaagaagaagctgcagctcagagtttttatcaaacttatttttgtgatattctccagcatatcttttctgttgtgacagacacttcacatactgctggtttaacaatgcatgcatcaattcttgcatatatgtttaatttggttgaagaaggaaaaataagtacatcattaaatcctggaaatccagttaacaaccaaatctttcttcaggaatatgtggctaatctccttaagtcggccttccctcacctacaagatgctcaagtaaagctctttgtgacagggcttttcagcttaaatcaagatattcctgctttcaaggaacatttaagagatttcctagttcaaataaaggaatttgcaggtgaagacacttctgatttgtttttggaagagagagaaatagccctacggcaggctgatgaagagaaacataaacgtcaaatgtctgtccctggcatctttaatccacatgagattccagaagaaatgtgtgattaaaatccaaattcatgctgttttttttctctgcaactcgttagcagaggaaaacagcatgtgggtatttgtcgaccaaaatgatgccaatttgtaaattaaaatgtcacctagtggccctttttcttatgtgtttttttgtataagaaattttctgtgaaatatccttccattgtttaagcttttgttttggtcatctttatttagtttgcatgaagttgaaaattaaggcatttttaaaaattttacttcatgcccatttttgtggctgggctggggggaggaggcaaattcgatttgaacatatacttgtaattctaatgcaaaattatacaatttttcctgtaaacaataccaatttttaattagggagcattttccttctagtctatttcagcctagaagaaaagataatgagtaaaacaaattgcgttgtttaaaggattatagtgctgcattgtctgaagttagcacctcttggactgaatcgtttgtctagactacatgtattacaaagtctctttggcaagattgcagcaagatcatgtgcatatcatcccattgtaaagcgacttcaaaaatatgggaacacagttagttatttttacacagttctttttgtttttgtgtgtgtgtgctgtcgcttgtcgacaacagctttttgttttcctcaatgaggagtgttgctcatttgtgagccttcattaactcgaagtgaaatggttaaaaatatttatcctgttagaataggctgcatctttttaacaactcattaaaaaacaaaacaactctggcttttgagatgacttatactaatttacattgtttaccaagctgtagtgctttaagaacactacttaaaaagcaaaataaacttggtttacatttatttttcctttattgactcatttattcctatattaatgatagtgggtatttgtgtttaagcatcaagtaacattttaaatgaagttggaccccttgatttacaaacaagatttctaaggttattgttcctagtaaatgcagcagttgtgtaaaatg

SEQ ID NO: 346426 - DNA, 4157 bp, Homo sapiens
cacgaggctgaaacccaccttgattcgtcccctctcccccctccccaccttccctcgccctaatcccccaacgaggaaggaaggagcagttggttcaatctctggtaatctatgccagcaattatgacaatgttagcagaccatgcagctcgtcagctgcttgatttcagccaaaaactggatatcaacttattagataatgtggtgaattgcttataccatggagaaggagcccagcaaagaatggctcaagaagtactgacacatttaaaggagcatcctgatgcttggacaagagtcgacacaattttggaattttctcagaatatgaatacgaaatactatggactacaaattttggaaaatgtgataaaaacaaggtggaagattcttccaaggaaccagtgcgaaggaataaaaaaatacgttgttggcctcattatcaagacgtcatctgacccaacttgtgtagagaaagaaaaggtgtatatcggaaaattaaatatgatccttgttcagatactgaaacaagaatggcccaaacattggccaacttttatcagtgatattgttggagcaagtaggaccagcgaaagtctctgtcaaaataatatggtgattcttaaactcttgagtgaagaagtatttgatttctctagtggacagataacccaagtcaaatctaagcatttaaaagacagcatgtgcaatgaattctcacagatatttcaactgtgtcagtttgtaatggaaaattctcaaaatgctccacttgtacatgcaaccttggaaacattgctcagatttctgaactggattcccctgggatatatttttgagaccaaattaatcagcacattgatttataagttcctgaatgttccaatgtttcgaaatgtctctctgaagtgcctcactgagattgctggtgtgagtgtaagccaatatgaagaacaatttgtaacactatttactctgacaatgatgcaactaaagcagatgcttcctttaaataccaatattcgacttgcgtactcaaatggaaaagatgatgaacagaacttcattcaaaatctcagtttgtttctctgcacctttcttaaggaacatgatcaacttatagaaaaaagattaaatctcagggaaactcttatggaggcccttcattatatgttgttggtatctgaagtagaagaaactgaaatctttaaaatttgtcttgaatactggaatcatttggctgctgaactctatagagagagtccattctctacatctgcctctccgttgctttctggaagtcaacattttgatgttcctcccaggagacagctatatttgcccatgttattcaaggtccgtttattaatggttagtcgaatggctaaaccagaggaagtattggttgtagagaatgatcaaggagaagttgtgagagaattcatgaaggatacagattccataaatttgtataagaatatgagggaaacattggtttatcttactcatctggattatgtagatacagaaagaataatgacagagaagcttcacaatcaagtgaatggtacagagtggtcatggaaaaatttgaatacattgtgttgggcaataggctccattagtggagcaatgcatgaagaggacgaaaaacgatttcttgttactgttataaaggatctattaggattatgtgaacagaaaagaggcaaagataataaagctattattgcatcaaatatcatgtacatagtaggtcaatacccacgttttttgagagctcactggaaatttctgaagactgtagttaacaagctgttcgaattcatgcatgagacccatgatggagtccaggatatggcttgtgatactttcattaaaatagcccaaaaatgccgcaggcatttcgttcaggttcaggttggagaagtgatgccatttattgatgaaattttgaacaacattaacactattatttgtgatcttcagcctcaacaggttcatacgttttatgaagctgtggggtacatgattggtgcacaaacagatcaaacagtacaagaacacttgatagaaaagtacatgttactccctaatcaagtgtgggatagtataatccagcaggcaaccaaaaatgtggatatactgaaagatcctgaaacagtcaagcagcttggtagcattttgaaaacaaatgtgagagcctgcaaagctgttggacacccctttgtaattcagcttggaagaatttatttagatatgcttaatgtatacaagtgcctcagtgaaaatatttctgcagctatccaagctaatggtgaaatggttacaaagcaaccattgattagaagtatgcgaactgtaaaaagggaaactttaaagttaatatctggttgggtgagccgatccaatgatccacagatgaaatgtcccagctgctagagaaccagaagtgcttagtactatggccataattgtcaacaagttagggggacatataacagctgaaatacctcaaatatttgatgctgtttttgaatgcacattgaatatgataaataaggactttgaagaatatcctgaacatagaacgaactttttcttactacttcaggctgtcaattctcattgtttcccagcattccttgctattccacctacacagtttaaacttgttttggattccatcatttgggctttcaaacatactatgaggaatgtcgcagatacgggcttacagatactttttacactcttacaaaatgttgcacaagaagaagctgcagctcagagtttttatcaaacttatttttgtgatattctccagcatatcttttctgttgtgacagacacttcacatactgctggtttaacaatgcatgcatcaattcttgcatatatgtttaatttggttgaagaaggaaaaataagtacatcattaaatcctggaaatccagttaacaaccaaatctttcttcaggaatatgtggctaatctccttaagtcggccttccctcacctacaagatgctcaagtaaagctctttgtgacagggcttttcagcttaaatcaagatattcctgctttcaaggaacatttaagagatttcctagttcaaataaaggaatttgcaggtgaagacacttctgatttgtttttggaagagagagaaatagccctacggcaggctgatgaagagaaacataaacgtcaaatgtctgtccctggcatctttaatccacatgagattccagaagaaatgtgtgattaaaatccaaattcatgctgttttttttctctgcaactcgttagcagaggaaaacagcatgtgggtatttgtcgaccaaaatgatgccaatttgtaaattaaaatgtcacctagtggccctttttcttatgtgtttttttgtataagaaattttctgtgaaatatccttccattgtttaagcttttgttttggtcatctttatttagtttgcatgaagttgaaaattaaggcatttttaaaaattttacttcatgcccatttttgtggctgggctggggggaggaggcaaattcgatttgaacatatacttgtaattctaatgcaaaattatacaatttttcctgtaaacaataccaatttttaattagggagcattttccttctagtctatttcagcctagaagaaaagataatgagtaaaacaaattgcgttgtttaaaggattatagtgctgcattgtctgaagttagcacctcttggactgaatcgtttgtctagactacatgtattacaaagtctctttggcaagattgcagcaagatcatgtgcatatcatcccattgtaaagcgacttcaaaaatatgggaacacagttagttatttttacacagttctttttgtttttgtgtgtgtgtgctgtcgcttgtcgacaacagctttttgttttcctcaatgaggagtgttgctcatttgtgagccttcattaactcgaagtgaaatggttaaaaatatttatcctgttagaataggctgcatctttttaacaactcattaaaaaacaaaacaactctggcttttgagatgacttatactaatttacattgtttaccaagctgtagtgctttaagaacactacttaaaaagcaaaataaacttggtttacattta

SEQ ID NO: 346427 - DNA, 5058 bp, Homo sapiens
cacgaggctgaaacccaccttgattcgtcccctctcccccctccccaccttccctcgccctaatcccccaacgaggaaggaaggagcagttggttcaatctctggtaatctatgccagcaattatgacaatgttagcagaccatgcagctcgtcagctgcttgatttcagccaaaaactggatatcaacttattagataatgtggtgaattgcttataccatggagaaggagcccagcaaagaatggctcaagaagtactgacacatttaaaggagcatcctgatgcttggacaagagtcgacacaattttggaattttctcagaatatgaatacgaaatactatggactacaaattttggaaaatgtgataaaaacaaggtggaagattcttccaaggaaccagtgcgaaggaataaaaaaatacgttgttggcctcattatcaagacgtcatctgacccaacttgtgtagagaaagaaaaggtgtatatcggaaaattaaatatgatccttgttcagatactgaaacaagaatggcccaaacattggccaacttttatcagtgatattgttggagcaagtaggaccagcgaaagtctctgtcaaaataatatggtgattcttaaactcttgagtgaagaagtatttgatttctctagtggacagataacccaagtcaaatctaagcatttaaaagacagcatgtgcaatgaattctcacagatatttcaactgtgtcagtttgtaatggaaaattctcaaaatgctccacttgtacatgcaaccttggaaacattgctcagatttctgaactggattcccctgggatatatttttgagaccaaattaatcagcacattgatttataagttcctgaatgttccaatgtttcgaaatgtctctctgaagtgcctcactgagattgctggtgtgagtgtaagccaatatgaagaacaatttgtaacactatttactctgacaatgatgcaactaaagcagatgcttcctttaaataccaatattcgacttgcgtactcaaatggaaaagatgatgaacagaacttcattcaaaatctcagtttgtttctctgcacctttcttaaggaacatgatcaacttatagaaaaaagattaaatctcagggaaactcttatggaggcccttcattatatgttgttggtatctgaagtagaagaaactgaaatctttaaaatttgtcttgaatactggaatcatttggctgctgaactctatagagagagtccattctctacatctgcctctccgttgctttctggaagtcaacattttgatgttcctcccaggagacagctatatttgcccatgttattcaaggtccgtttattaatggttagtcgaatggctaaaccagaggaagtattggttgtagagaatgatcaaggagaagttgtgagagaattcatgaaggatacagattccataaatttgtataagaatatgagggaaacattggtttatcttactcatctggattatgtagatacagaaagaataatgacagagaagcttcacaatcaagtgaatggtacagagtggtcatggaaaaatttgaatacattgtgttgggcaataggctccattagtggagcaatgcatgaagaggacgaaaaacgatttcttgttactgttataaaggatctattaggattatgtgaacagaaaagaggcaaagataataaagctattattgcatcaaatatcatgtacatagtaggtcaatacccacgttttttgagagctcactggaaatttctgaagactgtagttaacaagctgttcgaattcatgcatgagacccatgatggagtccaggatatggcttgtgatactttcattaaaatagcccaaaaatgccgcaggcatttcgttcaggttcaggttggagaagtgatgccatttattgatgaaattttgaacaacattaacactattatttgtgatcttcagcctcaacaggttcatacgttttatgaagctgtggggtacatgattggtgcacaaacagatcaaacagtacaagaacacttgatagaaaagtacatgttactccctaatcaagtgtgggatagtataatccagcaggcaaccaaaaatgtggatatactgaaagatcctgaaacagtcaagcagcttggtagcattttgaaaacaaatgtgagagcctgcaaagctgttggacacccctttgtaattcagcttggaagaatttatttagatatgcttaatgtatacaagtgcctcagtgaaaatatttctgcagctatccaagctaatggtgaaatggttacaaagcaaccattgattagaagtatgcgaactgtaaaaagggaaactttaaagttaatatctggttgggtgagccgatccaatgatccacagatggtcgctgaaaattttgttccccctctgttggatgcagttctcattgattatcagagaaatgtcccagctgctagagaaccagaagtgcttagtactatggccataattgtcaacaagttagggggacatataacagctgaaatacctcaaatatttgatgctgtttttgaatgcacattgaatatgataaataaggactttgaagaatatcctgaacatagaacgaactttttcttactacttcaggctgtcaattctcattgtttcccagcattccttgctattccacctacacagtttaaacttgttttggattccatcatttgggctttcaaacatactatgaggaatgtcgcagatacgggtaaataaaagatgttcttttattcatttgcctgccaatccaaaaatacaaatatagttaattgtacataggaaggtattacttgttcagagttttgagtgtgtgaattacatatatgaacatctgagaaaatcctataagcagtttaatcaactgttccactccactccaagtgagtccataggcagaattgagttatggggagagcggcctagtaataattggtttgcgtaatacaaagttctactgggtagtgatgttgtagaagttcatatagaatcagctgagctttcagaaatggtgaaagggtggtaatagtcataacttagattgtaatttttttcccataggcttttaaaaaatattcatgaggttctttttttatttcaatagtttttggggaacaggtggtttttggttacatgaataagttcttcagtggtgatttctgagattttggtgcacctgtcatgtgagcagtatgaactctactttatgtgtagtcttatccctcatgtgtatgaactccaccttatgtgtagtcttatccctcacccactcctgcccttccccacaagtccccaaagtccattatatgatctttatgcctttacatcttcacagtttagctctcacacaacttattataatttataagtaagccagcattggatatagttgtattccattattaatttaagaaaccttatgcaagtaattattagtcatcatcccaaaaaaaagggagaacagggttagattcagaatactttgataagagctaaatactatcatgagtgctgtcagtctgtagtaactttccattggtattctatgtcttttaggcttacagatactttttacactcttacaaaatgttgcacaagaagaagctgcagctcagagtttttatcaaacttatttttgtgatattctccagcatatcttttctgttgtgacagacacttcacatactgctggtttaacaatgcatgcatcaattcttgcatatatgtttaatttggttgaagaaggaaaaataagtacatcattaaatcctggaaatccagttaacaaccaaatctttcttcaggaatatgtggctaatctccttaagtcggccttccctcacctacaagatgctcaagtaaagctctttgtgacagggcttttcagcttaaatcaagatattcctgctttcaaggaacatttaagagatttcctagttcaaataaaggaatttgcaggtgaagacacttctgatttgtttttggaagagagagaaatagccctacggcaggctgatgaagagaaacataaacgtcaaatgtctgtccctggcatctttaatccacatgagattccagaagaaatgtgtgattaaaatccaaattcatgctgttttttttctctgcaactcgttagcagaggaaaacagcatgtgggtatttgtcgaccaaaatgatgccaatttgtaaattaaaatgtcacctagtggccctttttcttatgtgtttttttgtataagaaattttctgtgaaatatccttccattgtttaagcttttgttttggtcatctttatttagtttgcatgaagttgaaaattaaggcatttttaaaaattttacttcatgcccatttttgtggctgggctggggggaggaggcaaattcgatttgaacatatacttgtaattctaatgcaaaattatacaatttttcctgtaaacaataccaatttttaattagggagcattttccttctagtctatttcagcctagaagaaaagataatgagtaaaacaaattgcgttgtttaaaggattatagtgctgcattgtctgaagttagcacctcttggactgaatcgtttgtctagactacatgtattacaaagtctctttggcaagattgcagcaagatcatgtgcatatcatcccattgtaaagcgacttcaaaaatatgggaacacagttagttatttttacacagttctttttgtttttgtgtgtgtgtgctgtcgcttgtcgacaacagctttttgttttcctcaatgaggagtgttgctcatttgtgagccttcattaactcgaagtgaaatggttaaaaatatttatcctgttagaataggctgcatctttttaacaactcattaaaaaacaaaacaactctggcttttgagatgacttatactaatttacattgtttaccaagctgtagtgctttaagaacactacttaaaaagcaaaataaacttggtttacattta

SEQ ID NO: 346428 - DNA, 4158 bp, Homo sapiens
cacgaggctgaaacccaccttgattcgtcccctctcccccctccccaccttccctcgccctaatcccccaacgaggaaggaaggagcagttggttcaatctctggtaatctatgccagcaattatgacaatgttagcagaccatgcagctcgtcagctgcttgatttcagccaaaaactggatatcaacttattagataatgtggtgaattgcttataccatggagaaggagcccagcaaagaatggctcaagaagtactgacacatttaaaggagcatcctgatgcttggacaagagtcgacacaattttggaattttctcagaatatgaatacgaaatactatggactacaaattttggaaaatgtgataaaaacaaggtggaagattcttccaaggaaccagtgcgaaggaataaaaaaatacgttgttggcctcattatcaagacgtcatctgacccaacttgtgtagagaaagaaaaggtgtatatcggaaaattaaatatgatccttgttcagatactgaaacaagaatggcccaaacattggccaacttttatcagtgatattgttggagcaagtaggaccagcgaaagtctctgtcaaaataatatggtgattcttaaactcttgagtgaagaagtatttgatttctctagtggacagataacccaagtcaaatctaagcatttaaaagacagcatgtgcaatgaattctcacagatatttcaactgtgtcagtttgtaatggaaaattctcaaaatgctccacttgtacatgcaaccttggaaacattgctcagatttctgaactggattcccctgggatatatttttgagaccaaattaatcagcacattgatttataagttcctgaatgttccaatgtttcgaaatgtctctctgaagtgcctcactgagattgctggtgtgagtgtaagccaatatgaagaacaatttgtaacactatttactctgacaatgatgcaactaaagcagatgcttcctttaaataccaatattcgacttgcgtactcaaatggaaaagatgatgaacagaacttcattcaaaatctcagtttgtttctctgcacctttcttaaggaacatgatcaacttatagaaaaaagattaaatctcagggaaactcttatggaggcccttcattatatgttgttggtatctgaagtagaagaaactgaaatctttaaaatttgtcttgaatactggaatcatttggctgctgaactctatagagagagtccattctctacatctgcctctccgttgctttctggaagtcaacattttgatgttcctcccaggagacagctatatttgcccatgttattcaaggtccgtttattaatggttagtcgaatggctaaaccagaggaagtattggttgtagagaatgatcaaggagaagttgtgagagaattcatgaaggatacagattccataaatttgtataagaatatgagggaaacattggtttatcttactcatctggattatgtagatacagaaagaataatgacagagaagcttcacaatcaagtgaatggtacagagtggtcatggaaaaatttgaatacattgtgttgggcaataggctccattagtggagcaatgcatgaagaggacgaaaaacgatttcttgttactgttataaaggatctattaggattatgtgaacagaaaagaggcaaagataataaagctattattgcatcaaatatcatgtacatagtaggtcaatacccacgttttttgagagctcactggaaatttctgaagactgtagttaacaagctgttcgaattcatgcatgagacccatgatggagtccaggatatggcttgtgatactttcattaaaatagcccaaaaatgccgcaggcatttcgttcaggttcaggttggagaagtgatgccatttattgatgaaattttgaacaacattaacactattatttgtgatcttcagcctcaacaggttcatacgttttatgaagctgtggggtacatgattggtgcacaaacagatcaaacagtacaagaacacttgatagaaaagtacatgttactccctaatcaagtgtgggatagtataatccagcaggcaaccaaaaatgtggatatactgaaagatcctgaaacagtcaagcagcttggtagcattttgaaaacaaatgtgagagcctgcaaagctgttggacacccctttgtaattcagcttggaagaatttatttagatatgcttaatgtatacaagtgcctcagtgaaaatatttctgcagctatccaagctaatggtgaaatggttacaaagcaaccattgattagaagtatgcgaactgtaaaaagggaaactttaaagttaatatctggttgggtgagccgatccaatgatccacagatggtcgctgaaaattttgttccccctctgttggatgcagttctcattgattatcagagaaatgtcccagctgctagagaaccagaagtgcttagtactatggccataattgtcaacaagttagggggacatataacagctgaaatacctcaaatatttgatgctgtttttgaatgcacattgaatatgataaataaggactttgaagaatatcctgaacatagaacgaactttttcttactacttcaggctgtcaattctcattgtttcccagcattccttgctattccacctacacagtttaaacttgttttggattccatcatttgggctttcaaacatactatgaggaatgtcgcagatacgggcttacagatactttttacactcttacaaaatgttgcacaagaagaagctgcagctcagagtttttatcaaacttatttttgtgatattctccagcatatcttttctgttgtgacagacacttcacatactgctggtttaacaatgcatgcatcaattcttgcatatatgtttaatttggttgaagaaggaaaaataagtacatcattaaatcctggaaatccagttaacaaccaaatctttcttcaggaatatgtggctaatctccttaagtcggccttccctcacctacaagatgctcaagtaaagctctttgtgacagggcttttcagcttaaatcaagatattcctgctttcaaggaacatttaagagatttcctagttcaaataaaggaatttgcaggtgaagacacttctgatttgtttttggaagagagagaaatagccctacggcaggctgatgaagagaaacataaacgtcaaatgtctgtccctggcatctttaatccacatgagattccagaagaaatgtgtgattaaaatccaaattcatgctgttttttttctctgcaactcgttagcagaggaaaacagcatgtgggtatttgtcgaccaaaatgatgccaatttgtaaattaaaatgtcacctagtggccctttttcttatgtgtttttttgtataagaaattttctgtgaaatatccttccattgtttaagcttttgttttggtcatctttatttagtttgcatgaagttgaaaattaaggcatttttaaaaattttacttcatgcccatttttgtggctgggctggggggaggaggcaaattcgatttgaacatatacttgtaattctaatgcaaaattatacaatttttcctgtaaacaataccaatttttaattagggagcattttccttctagtctatttcagcctagaagaaaagataatgagtctcttggactgaatcgtttgtctagactacatgtattacaaagtctctttggcaagattgcagcaagatcatgtgcatatcatcccattgtaaagcgacttcaaaaatatgggaacacagttagttatttttacacagttctttttgtttttgtgtgtgtgtgctgtcgcttgtcgacaacagctttttgttttcctcaatgaggagtgttgctcatttgtgagccttcattaactcgaagtgaaatggttaaaaatatttatcctgttagaataggctgcatctttttaacaactcattaaaaaacaaaacaactctggcttttgagatgacttatactaatttacattgtttaccaagctgtagtgctttaagaacactacttaaaaagcaaaataaacttggtttacattta

SEQ ID NO: 346429 - DNA, 4154 bp, Homo sapiens
cacgaggctgaaacccaccttgattcgtcccctctcccccctccccaccttccctcgccctaatcccccaacgaggaaggaaggagcagttggttcaatctctggtaatctatgccagcaattatgacaatgttagcagaccatgcagctcgtcagctgcttgatttcagccaaaaactggatatcaacttattagataatgtggtgaattgcttataccatggagaaggagcccagcaaagaatggctcaagaagtactgacacatttaaaggagcatcctgatgcttggacaagagtcgacacaattttggaattttctcagaatatgaatacgaaatactatggactacaaattttggaaaatgtgataaaaacaaggtggaagattcttccaaggaaccagtgcgaaggaataaaaaaatacgttgttggcctcattatcaagacgtcatctgacccaacttgtgtagagaaagaaaaggtgtatatcggaaaattaaatatgatccttgttcagatactgaaacaagaatggcccaaacattggccaacttttatcagtgatattgttggagcaagtaggaccagcgaaagtctctgtcaaaataatatggtgattcttaaactcttgagtgaagaagtatttgatttctctagtggacagataacccaagtcaaatctaagcatttaaaagacagcatgtgcaatgaattctcacagatatttcaactgtgtcagtttgtaatggaaaattctcaaaatgctccacttgtacatgcaaccttggaaacattgctcagatttctgaactggattcccctgggatatatttttgagaccaaattaatcagcacattgatttataagttcctgaatgttccaatgtttcgaaatgtctctctgaagtgcctcactgagattgctggtgtgagtgtaagccaatatgaagaacaatttgtaacactatttactctgacaatgatgcaactaaagcagatgcttcctttaaataccaatattcgacttgcgtactcaaatggaaaagatgatgaacagaacttcattcaaaatctcagtttgtttctctgcacctttcttaaggaacatgatcaacttatagaaaaaagattaaatctcagggaaactcttatggaggcccttcattatatgttgttggtatctgaagtagaagaaactgaaatctttaaaatttgtcttgaatactggaatcatttggctgctgaactctatagagagagtccattctctacatctgcctctccgttgctttctggaagtcaacattttgatgttcctcccaggagacagctatatttgcccatgttattcaaggtccgtttattaatggttagtcgaatggctaaaccagaggaagtattggttgtagagaatgatcaaggagaagttgtgagagaattcatgaaggatacagattccataaatttgtataagaatatgagggaaacattggtttatcttactcatctggattatgtagatacagaaagaataatgacagagaagcttcacaatcaagtgaatggtacagagtggtcatggaaaaatttgaatacattgtgttgggcaataggctccattagtggagcaatgcatgaagaggacgaaaaacgatttcttgttactgttataaaggatctattaggattatgtgaacagaaaagaggcaaagataataaagctattattgcatcaaatatcatgtacatagtaggtcaatacccacgttttttgagagctcactggaaatttctgaagactgtagttaacaagctgttcgaattcatgcatgagacccatgatggagtccaggatatggcttgtgatactttcattaaaatagcccaaaaatgccgcaggcatttcgttcaggttcaggttggagaagtgatgccatttattgatgaaattttgaacaacattaacactattatttgtgatcttcagcctcaacaggttcatacgttttatgaagctgtggggtacatgattggtgcacaaacagatcaaacagtacaagaacacttgatagaaaagtacatgttactccctaatcaagtgtgggatagtataatccagcaggcaaccaaaaatgtggatatactgaaagatcctgaaacagtcaagcagcttggtagcattttgaaaacaaatgtgagagcctgcaaagctgttggacacccctttgtaattcagcttggaagaatttatttagatatgcttaatgtatacaagtgcctcagtgaaaatatttctgcagctatccaagctaatggtgaaatggttacaaagcaaccattgattagaagtatgcgaactgtaaaaagggaaactttaaagttaatatctggttgggtgagccgatccaatgatccacagatggtcgctgaaaattttgttccccctctgttggatgcagttctcattgattatcagagaaatgtcccagctgctagagaaccagaagtgcttagtactatggccataattgtcaacaagttagggggacatataacagctgaaatacctcaaatatttgatgctgtttttgaatgcacattgaatatgataaataaggactttgaagaatatcctgaacatagaacgaactttttcttactacttcaggctgtcaattctcattgtttcccagcattccttgctattccacctacacagtttaaacttgttttggattccatcatttgggctttcaaacatactatgaggaatgtcgcagatacgggcttacagatactttttacactcttacaaaatgttgcacaagaagaagctgcagctcagagtttttatcaaacttatttttgtgatattctccagcatatcttttctgttgtgacagacacttcacatactgctggtttaacaatgcatgcatcaattcttgcatatatgtttaatttggttgaagaaggaaaaataagtacatcattaaatcctggaaatccagttaacaaccaaatctttcttcaggaatatgtggctaatctccttaagtcggccttccctcacctacaagatgctcaagtaaagctctttgtgacagggcttttcagcttaaatcaagatattcctgctttcaaggaacatttaagagatttcctagttcaaataaaggaatttgcaggtgaagacacttctgatttgtttttggaagagagagaaatagccctacggcaggctgatgaagagaaacataaacgtcaaatgtctgtccctggcatctttaatccacatgagattccagaagaaatgtgtgattaaaatccaaattcatgctgttttttttctctgcaactcgttagcagaggaaaacagcatgtgggtatttgtcgaccaaaatgatgccaatttgtaaattaaaatgtcacctagtggccctttttcttatgtgtttttttgtataagaaattttctgtgaaatatccttccattgtttaagcttttgttttggtcatctttatttagtttgcatgaagttgaaaattaaggcatttttaaaaattttacttcatgcccatttttgtggctgggctggggggaggaggcaaattcgatttgaacatatacttgtaattctaatgcaaaattatacaatttttcctgtaaacaataccaatttttaattagggagcattttccttctagtctatttcagcctagaagaaaagataatgagtaaaacaaattgcgttgtttaaaggattatagtgctgcattgtctgaagttagcacctcttggactgaatcgtttgtctagactacatgtattacaaagtctctttggcaagattgcagcaagatcatgtgcatatcatcccattgtaaagcgacttcaaaaatatgggaacacagttagttatttttacacagttctttttgtttttgtgtgtgtgtgctgtcgcttgtcgacaacagctttttgttttcctcaatgaggagtgttgctcatttgtgagccttcattaactcgaagtgaaatgaaaacaactctggcttttgagatgacttatactaatttacattgtttaccaagctgtagtgctttaagaacactacttaaaaagcaaaataaacttggtttacattta

SEQ ID NO: 346430 - DNA, 4160 bp, Homo sapiens
cacgaggctgaaacccaccttgattcgtcccctctcccccctccccaccttccctcgccctaatcccccaacgaggaaggaaggagcagttggttcaatctctggtaatctatgccagcaattatgacaatgttagcagaccatgcagctcgtcagctgcttgatttcagccaaaaactggatatcaacttattagataatgtggtgaattgcttataccatggagaaggagcccagcaaagaatggctcaagaagtactgacacatttaaaggagcatcctgatgcttggacaagagtcgacacaattttggaattttctcagaatatgaatacgaaatactatggactacaaattttggaaaatgtgataaaaacaaggtggaagattcttccaaggaaccagtgcgaaggaataaaaaaatacgttgttggcctcattatcaagacgtcatctgacccaacttgtgtagagaaagaaaaggtgtatatcggaaaattaaatatgatccttgttcagatactgaaacaagaatggcccaaacattggccaacttttatcagtgatattgttggagcaagtaggaccagcgaaagtctctgtcaaaataatatggtgattcttaaactcttgagtgaagaagtatttgatttctctagtggacagataacccaagtcaaatctaagcatttaaaagacagcatgtgcaatgaattctcacagatatttcaactgtgtcagtttgtaatggaaaattctcaaaatgctccacttgtacatgcaaccttggaaacattgctcagatttctgaactggattcccctgggatatatttttgagaccaaattaatcagcacattgatttataagttcctgaatgttccaatgtttcgaaatgtctctctgaagtgcctcactgagattgctggtgtgagtgtaagccaatatgaagaacaatttgtaacactatttactctgacaatgatgcaactaaagcagatgcttcctttaaataccaatattcgacttgcgtactcaaatggaaaagatgatgaacagaacttcattcaaaatctcagtttgtttctctgcacctttcttaaggaacatgatcaacttatagaaaaaagattaaatctcagggaaactcttatggaggcccttcattatatgttgttggtatctgaagtagaagaaactgaaatctttaaaatttgtcttgaatactggaatcatttggctgctgaactctatagagagagtccattctctacatctgcctctccgttgctttctggaagtcaacattttgatgttcctcccaggagacagctatatttgcccatgttattcaaggtccgtttattaatggttagtcgaatggctaaaccagaggaagtattggttgtagagaatgatcaaggagaagttgtgagagaattcatgaaggatacagattccataaatttgtataagaatatgagggaaacattggtttatcttactcatctggattatgtagatacagaaagaataatgacagagaagcttcacaatcaagtgaatggtacagagtggtcatggaaaaatttgaatacattgtgttgggcaataggctccattagtggagcaatgcatgaagaggacgaaaaacgatttcttgttactgttataaaggatctattaggattatgtgaacagaaaagaggcaaagataataaagctattattgcatcaaatatcatgtacatagtaggtcaatacccacgttttttgagagctcactggaaatttctgaagactgtagttaacaagctgttcgaattcatgcatgagacccatgatggagtccaggatatggcttgtgatactttcattaaaatagcccaaaaatgccgcaggcatttcgttcaggttcaggttggagaagtgatgccatttattgatgaaattttgaacaacattaacactattatttgtgatcttcagcctcaacaggttcatacgttttatgaagctgtggggtacatgattggtgcacaaacagatcaaacagtacaagaacacttgatagaaaagtacatgttactccctaatcaagtgtgggatagtataatccagcaggcaaccaaaaatgtggatatactgaaagatcctgaaacagtcaagcagcttggtagcattttgaaaacaaatgtgagagcctgcaaagctgttggacacccctttgtaattcagcttggaagaatttatttagatatgcttaatgtatacaagtgcctcagtgaaaatatttctgcagctatccaagctaatggtgaaatggttacaaagcaaccattgattagaagtatgcgaactgtaaaaagggaaactttaaagttaatatctggttgggtgagccgatccaatgatccacagatggtcgctgaaaattttgttccccctctgttggatgcagttctcattgattatcagagaaatgtcccagctgctagagaaccagaagtgcttagtactatggccataattgtcaacaagttagggggacatataacagctgaaatacctcaaatatttgatgctgtttttgaatgcacattgaatatgataaataaggactttgaagaatatcctgaacatagaacgaactttttcttactacttcaggctgtcaattctcattgtttcccagcattccttgctattccacctacacagtttaaacttgttttggattccatcatttgggctttcaaacatactatgaggaatgtcgcagatacgggcttacagatactttttacactcttacaaaatgttgcacaagaagaagctgcagctcagagtttttatcaaacttatttttgtgatattctccagcatatcttttctgttgtgacagacacttcacatactgctggtttaacaatgcatgcatcaattcttgcatatatgtttaatttggttgaagaaggaaaaataagtacatcattaaatcctggaaatccagttaacaaccaaatctttcttcaggaatatgtggctaatctccttaagtcggccttccctcacctacaagatgctcaagtaaagctctttgtgacagggcttttcagcttaaatcaagatattcctgctttcaaggaacatttaagagatttcctagttcaaataaaggaatttgcaggtgaagacacttctgatttgtttttggaagagagagaaatagccctacggcaggctgatgaagagaaacataaacgtcaaatgtctgtccctggcatctttaatccacatgagattccagaagaaatgtgtgattaaaatccaaattcatgctgttttttttctctgcaactcgttagcagaggaaaacagcatgtgggtatttgtcgaccaaaatgatgccaatttgtaaattaaaatgtcacctagtggccctttttcttatgtgtttttttgtataagaaattttctgtgaaatatccttccattgtttaagcttttgttttggtcatctttatttagtttgcatgaagttgaaaattaaggcatttttaaaaattttacttcatgcccatttttgtggctgggctggggggaggaggcaaattcgatttgaacatatacttgtaattctaatgcaaaattatacaatttttcctgtaaacaataccaatttttaattagggagcattttccttctagtctatttcagcctagaagaaaagataatgagtaaaacaaattgcgttgtttaaaggattatagtgctgcattgtctgaagttagcacctcttggactgaatcgtttgtctagactacatgtattacaaagtctctttggcaagattgcagcaagatcatgtgcatatcacagttctttttgtttttgtgtgtgtgtgctgtcgcttgtcgacaacagctttttgttttcctcaatgaggagtgttgctcatttgtgagccttcattaactcgaagtgaaatggttaaaaatatttatcctgttagaataggctgcatctttttaacaactcattaaaaaacaaaacaactctggcttttgagatgacttatactaatttacattgtttaccaagctgtagtgctttaagaacactacttaaaaagcaaaataaacttggtttacattta

SEQ ID NO: 346431 - DNA, 1386 bp, Homo sapiens
aattcttgcatatatgtttaatttggttgaattgatgcatgcatggtgtaaaccagcagtatgtgaagtgtctgtcacaacagaaaagatatgctggtttaacaatgcatgcatcaattcttgcatatatgtttaatttggttgaagaaggaaaaataagtacatcattaaatcctggaaatccagttaacaaccaaatctttcttcaggaatatgtggctaatctccttaagtcggccttccctcacctacaagatgctcaagtaaagctctttgtgacagggcttttcagcttaaatcaagatattcctgctttcaaggaacatttaagagatttcctagttcaaataaaggaatttgcaggtgaagacacttctgatttgtttttggaagagagagaaatagccctacggcaggctgatgaagagaaacataaacgtcaaatgtctgtccctggcatctttaatccacatgagattccagaagaaatgtgtgattaaaatccaaattcatgctgttttttttctctgcaactcgttagcagaggaaaacagcatgtgggtatttgtcgaccaaaatgatgccaatttgtaaattaaaatgtcacctagtggccctttttcttatgtgtttttttgtataagaaattttctgtgaaatatccttccattgtttaagcttttgttttggtcatctttatttagtttgcatgaagttgaaaattaaggcatttttaaaaattttacttcatgcccatttttgtggctgggctggggggaggaggcaaattcgatttgaacatatacttgtaattctaatgcaaaattatacaatttttcctgtaaacaataccaatttttaattagggagcattttccttctagtctatttcagcctagaagaaaagataatgagtaaaacaaattgcgttgtttaaaggattatagtgctgcattgtctgaagttagcacctcttggactgaatcgtttgtctagactacatgtattacaaagtctctttggcaagattgcagcaagatcatgtgcatatcatcccattgtaaagcgacttcaaaaatatgggaacacagttagttatttttacacagttctttttgtttttgtgtgtgtgtgctgtcgcttgtcgacaacagctttttgttttcctcaatgaggagtgttgctcatttgtgagccttcattaactcgaagtgaaatggttaaaaatatttatcctgttagaataggctgcatctttttaacaactcattaaaaaacaaaacaactctggcttttgagatgacttatactaatttacattgtttaccaagctgtagtgctttaagaacactacttaaaaagcaaaataaacttggtttacattta

SEQ ID NO: 346432 - DNA, 1185 bp, Homo sapiens
cctggctgatctagaggatcccataaaccggagatgagttgtctcacctacaagatgctcaagtaaagctctttgtgacagggcttttcagcttaaatcaagatattcctgctttcaaggaacatttaagagatttcctagttcaaataaaggaatttgcaggtgaagacacttctgatttgtttttggaagagagagaaatagccctacggcaggctgatgaagagaaacataaacgtcaaatgtctgtccctggcatctttaatccacatgagattccagaagaaatgtgtgattaaaatccaaattcatgctgttttttttctctgcaactcgttagcagaggaaaacagcatgtgggtatttgtcgaccaaaatgatgccaatttgtaaattaaaatgtcacctagtggccctttttcttatgtgtttttttgtataagaaattttctgtgaaatatccttccattgtttaagcttttgttttggtcatctttatttagtttgcatgaagttgaaaattaaggcatttttaaaaattttacttcatgcccatttttgtggctgggctggggggaggaggcaaattcgatttgaacatatacttgtaattctaatgcaaaattatacaatttttcctgtaaacaataccaatttttaattagggagcattttccttctagtctatttcagcctagaagaaaagataatgagtaaaacaaattgcgttgtttaaaggattatagtgctgcattgtctgaagttagcacctcttggactgaatcgtttgtctagactacatgtattacaaagtctctttggcaagattgcagcaagatcatgtgcatatcatcccattgtaaagcgacttcaaaaatatgggaacacagttagttatttttacacagttctttttgtttttgtgtgtgtgtgctgtcgcttgtcgacaacagctttttgttttcctcaatgaggagtgttgctcatttgtgagccttcattaactcgaagtgaaatggttaaaaatatttatcctgttagaataggctgcatctttttaacaactcattaaaaaacaaaacaactctggcttttgagatgacttatactaatttacattgtttaccaagctgtagtgctttaagaacactacttaaaaagcaaaataaacttggtttacattta

SEQ ID NO: 346433 - DNA, 1447 bp, Homo sapiens
ggtgcatgcctgtaatcccagctacttgggaggctgaggcaggagaatagcttcagaggttgcggtgagccgcgattgtgcgattgtactccaacctggtaaacgagcaaaactttgtctcaaaaattaaaaaaaaattcttgattaaaaaaaaaaaacattattgggacgctgaggcaggagaatgtcttgaacccgggaggcagagattacagtgagcagagatcatgccactgtactccagcctggtgacagagcaatactctgtctcgggggaaaaataaatcattatttaatcattgtgttttgatttgcagtgctcaagtaaagctctttgtgacagggcttttcagcttaaatcaagatattcctgctttcaaggaacatttaagagatttcctagttcaaataaaggaatttgcaggtgaagacacttctgatttgtttttggaagagagagaaatagccctacggcaggctgatgaagagaaacataaacgtcaaatgtctgtccctggcatctttaatccacatgagattccagaagaaatgtgtgattaaaatccaaattcatgctgttttttttctctgcaactcgttagcagaggaaaacagcatgtgggtatttgtcgaccaaaatgatgccaatttgtaaattaaaatgtcacctagtggccctttttcttatgtgtttttttgtataagaaattttctgtgaaatatccttccattgtttaagcttttgttttggtcatctttatttagtttgcatgaagttgaaaattaaggcatttttaaaaattttacttcatgcccatttttgtggctgggctggggggaggaggcaaattcgatttgaacatatacttgtaattctaatgcaaaattatacaatttttcctgtaaacaataccaatttttaattagggagcattttccttctagtctatttcagcctagaagaaaagataatgagtaaaacaaattgcgttgtttaaaggattatagtgctgcattgtctgaagttagcacctcttggactgaatcgtttgtctagactacatgtattacaaagtctctttggcaagattgcagcaagatcatgtgcatatcatcccattgtaaagcgacttcaaaaatatgggaacacagttagttatttttacacagttctttttgtttttgtgtgtgtgtgctgtcgcttgtcgacaacagctttttgttttcctcaatgaggagtgttgctcatttgtgagccttcattaactcgaagtgaaatggttaaaaatatttatcctgttagaataggctgcatctttttaacaactcattaaaaaacaaaacaactctggcttttgagatgacttatactaatttacattgtttaccaagctgtagtgctttaagaacactacttaaaaagcaaaataaacttggtttacattta

SEQ ID NO: 346434 - DNA, 1243 bp, Homo sapiens
cttttgtaatcttcccccccaccagttaacaggtttgcagttcattcagctatgtagtatactgtgtcactatcctataatttaaaacccagccactttatggataatttatattccttccttctctaaaaaggaaattgctcatctatgatttctttctttgcaagttgaagtttattgcgttgacatttcaactatctgttttcacaggaatttgcaggtgaagacacttctgatttgtttttggaagagagagaaatagccctacggcaggctgatgaagagaaacataaacgtcaaatgtctgtccctggcatctttaatccacatgagattccagaagaaatgtgtgattaaaatccaaattcatgctgttttttttctctgcaactcgttagcagaggaaaacagcatgtgggtatttgtcgaccaaaatgatgccaatttgtaaattaaaatgtcacctagtggccctttttcttatgtgtttttttgtataagaaattttctgtgaaatatccttccattgtttaagcttttgttttggtcatctttatttagtttgcatgaagttgaaaattaaggcatttttaaaaattttacttcatgcccatttttgtggctgggctggggggaggaggcaaattcgatttgaacatatacttgtaattctaatgcaaaattatacaatttttcctgtaaacaataccaatttttaattagggagcattttccttctagtctatttcagcctagaagaaaagataatgagtaaaacaaattgcgttgtttaaaggattatagtgctgcattgtctgaagttagcacctcttggactgaatcgtttgtctagactacatgtattacaaagtctctttggcaagattgcagcaagatcatgtgcatatcatcccattgtaaagcgacttcaaaaatatgggaacacagttagttatttttacacagttctttttgtttttgtgtgtgtgtgctgtcgcttgtcgacaacagctttttgttttcctcaatgaggagtgttgctcatttgtgagccttcattaactcgaagtgaaatggttaaaaatatttatcctgttagaataggctgcatctttttaacaactcattaaaaaacaaaacaactctggcttttgagatgacttatactaatttacattgtttaccaagctgtagtgctttaagaacactacttaaaaagcaaaataaacttggtttacattta

SEQ ID NO: 346435 - DNA, 837 bp, Homo sapiens
cggcacgaggcggcacgaggcgaccaaaatgatgccaatttgtaaattaaaatgtcacctagtggccctttttcttatgtgtttttttgtataagaaattttctgtgaaatatccttccattgtttaagcttttgttttggtcatctttatttagtttgcatgaagttgaaaattaaggcatttttaaaaattttacttcatgcccatttttgtggctgggctggggggaggaggcaaattcgatttgaacatatacttgtaattctaatgcaaaattatacaatttttcctgtaaacaataccaatttttaattagggagcattttccttctagtctatttcagcctagaagaaaagataatgagtaaaacaaattgcgttgtttaaaggattatagtgctgcattgtctgaagttagcacctcttggactgaatcgtttgtctagactacatgtattacaaagtctctttggcaagattgcagcaagatcatgtgcatatcatcccattgtaaagcgacttcaaaaatatgggaacacagttagttatttttacacagttctttttgtttttgtgtgtgtgtgctgtcgcttgtcgacaacagctttttgttttcctcaatgaggagtgttgctcatttgtgagccttcattaactcgaagtgaaatggttaaaaatatttatcctgttagaataggctgcatctttttaacaactcattaaaaaacaaaacaactctggcttttgagatgacttatactaatttacattgtttaccaagctgtagtgctttaagaacactacttaaaaagcaaaataaacttggtttacattta

SEQ ID NO: 346436 - DNA, 861 bp, Homo sapiens
acaaccagctcttacccgtcctacatagggttgtccacatagtgcgaccaaaatgatgccaatttgtaaattaaaatgtcacctagtggccctttttcttatgtgtttttttgtataagaaattttctgtgaaatatccttccattgtttaagcttttgttttggtcatctttatttagtttgcatgaagttgaaaattaaggcatttttaaaaattttacttcatgcccatttttgtggctgggctggggggaggaggcaaattcgatttgaacatatacttgtaattctaatgcaaaattatacaatttttcctgtaaacaataccaatttttaattagggagcattttccttctagtctatttcagcctagaagaaaagataatgagtaaaacaaattgcgttgtttaaaggattatagtgctgcattgtctgaagttagcacctcttggactgaatcgtttgtctagactacatgtattacaaagtctctttggcaagattgcagcaagatcatgtgcatatcatcccattgtaaagcgacttcaaaaatatgggaacacagttagttatttttacacagttctttttgtttttgtgtgtgtgtgctgtcgcttgtcgacaacagctttttgttttcctcaatgaggagtgttgctcatttgtgagccttcattaactcgaagtgaaatggttaaaaatatttatcctgttagaataggctgcatctttttaacaactcattaaaaaacaaaacaactctggcttttgagatgacttatactaatttacattgtttaccaagctgtagtgctttaagaacactacttaaaaagcaaaataaacttggtttacattta

SEQ ID NO: 346437 - DNA, 3256 bp, Homo sapiens
cacgaggctgaaacccaccttgattcgtcccctctcccccctccccaccttccctcgccctaatcccccaacgaggaaggaaggagcagttggttcaatctctggtaatctatgccagcaattatgacaatgttagcagaccatgcagctcgtcagctgcttgatttcagccaaaaactggatatcaacttattagataatgtggtgaattgcttataccatggagaaggagcccagcaaagaatggctcaagaagtactgacacatttaaaggagcatcctgatgcttggacaagagtcgacacaattttggaattttctcagaatatgaatacgaaatactatggactacaaattttggaaaatgtgataaaaacaaggtggaagattcttccaaggaaccagtgcgaaggaataaaaaaatacgttgttggcctcattatcaagacgtcatctgacccaacttgtgtagagaaagaaaaggtgtatatcggaaaattaaatatgatccttgttcagatactgaaacaagaatggcccaaacattggccaacttttatcagtgatattgttggagcaagtaggaccagcgaaagtctctgtcaaaataatatggtgattcttaaactcttgagtgaagaagtatttgatttctctagtggacagataacccaagtcaaatctaagcatttaaaagacagcatgtgcaatgaattctcacagatatttcaactgtgtcagtttgtaatggaaaattctcaaaatgctccacttgtacatgcaaccttggaaacattgctcagatttctgaactggattcccctgggatatatttttgagaccaaattaatcagcacattgatttataagttcctgaatgttccaatgtttcgaaatgtctctctgaagtgcctcactgagattgctggtgtgagtgtaagccaatatgaagaacaatttgtaacactatttactctgacaatgatgcaactaaagcagatgcttcctttaaataccaatattcgacttgcgtactcaaatggaaaagatgatgaacagaacttcattcaaaatctcagtttgtttctctgcacctttcttaaggaacatgatcaacttatagaaaaaagattaaatctcagggaaactcttatggaggcccttcattatatgttgttggtatctgaagtagaagaaactgaaatctttaaaatttgtcttgaatactggaatcatttggctgctgaactctatagagagagtccattctctacatctgcctctccgttgctttctggaagtcaacattttgatgttcctcccaggagacagctatatttgcccatgttattcaaggtccgtttattaatggttagtcgaatggctaaaccagaggaagtattggttgtagagaatgatcaaggagaagttgtgagagaattcatgaaggatacagattccataaatttgtataagaatatgagggaaacattggtttatcttactcatctggattatgtagatacagaaagaataatgacagagaagcttcacaatcaagtgaatggtacagagtggtcatggaaaaatttgaatacattgtgttgggcaataggctccattagtggagcaatgcatgaagaggacgaaaaacgatttcttgttactgttataaaggatctattaggattatgtgaacagaaaagaggcaaagataataaagctattattgcatcaaatatcatgtacatagtaggtcaatacccacgttttttgagagctcactggaaatttctgaagactgtagttaacaagctgttcgaattcatgcatgagacccatgatggagtccaggatatggcttgtgatactttcattaaaatagcccaaaaatgccgcaggcatttcgttcaggttcaggttggagaagtgatgccatttattgatgaaattttgaacaacattaacactattatttgtgatcttcagcctcaacaggttcatacgttttatgaagctgtggggtacatgattggtgcacaaacagatcaaacagtacaagaacacttgatagaaaagtacatgttactccctaatcaagtgtgggatagtataatccagcaggcaaccaaaaatgtggatatactgaaagatcctgaaacagtcaagcagcttggtagcattttgaaaacaaatgtgagagcctgcaaagctgttggacacccctttgtaattcagcttggaagaatttatttagatatgcttaatgtatacaagtgcctcagtgaaaatatttctgcagctatccaagctaatggtgaaatggttacaaagcaaccattgattagaagtatgcgaactgtaaaaagggaaactttaaagttaatatctggttgggtgagccgatccaatgatccacagatggtcgctgaaaattttgttccccctctgttggatgcagttctcattgattatcagagaaatgtcccagctgctagagaaccagaagtgcttagtactatggccataattgtcaacaagttagggggacatataacagctgaaatacctcaaatatttgatgctgtttttgaatgcacattgaatatgataaataaggactttgaagaatatcctgaacatagaacgaactttttcttactacttcaggctgtcaattctcattgtttcccagcattccttgctattccacctacacagtttaaacttgttttggattccatcatttgggctttcaaacatactatgaggaatgtcgcagatacgggcttacagatactttttacactcttacaaaatgttgcacaagaagaagctgcagctcagagtttttatcaaacttatttttgtgatattctccagcatatcttttctgttgtgacagacacttcacatactgctggtaagaatttaatacgatttaaatgttaagtgccagctgggcacagggcctcacgcctataatcccagcactttgggaggtcgaggcggggagattatgaggtcaggagttcgagaacagcctggccaccatggtgaaactgtctgtactaaaaataccataaaaaaataaaagatacaataaaaatactgggcatggtggcatgtgattgcaatcccacctattcgggaggctgaggcaggagaatggcttggaccgaggaggcagaggttgcagtgaactaagattgcgccacggcattccagcttgggtgacagagcgagactccgtcta

SEQ ID NO: 346438 - DNA, 2873 bp, Homo sapiens
cacgaggctgaaacccaccttgattcgtcccctctcccccctccccaccttccctcgccctaatcccccaacgaggaaggaaggagcagttggttcaatctctggtaatctatgccagcaattatgacaatgttagcagaccatgcagctcgtcagctgcttgatttcagccaaaaactggatatcaacttattagataatgtggtgaattgcttataccatggagaaggagcccagcaaagaatggctcaagaagtactgacacatttaaaggagcatcctgatgcttggacaagagtcgacacaattttggaattttctcagaatatgaatacgaaatactatggactacaaattttggaaaatgtgataaaaacaaggtggaagattcttccaaggaaccagtgcgaaggaataaaaaaatacgttgttggcctcattatcaagacgtcatctgacccaacttgtgtagagaaagaaaaggtgtatatcggaaaattaaatatgatccttgttcagatactgaaacaagaatggcccaaacattggccaacttttatcagtgatattgttggagcaagtaggaccagcgaaagtctctgtcaaaataatatggtgattcttaaactcttgagtgaagaagtatttgatttctctagtggacagataacccaagtcaaatctaagcatttaaaagacagcatgtgcaatgaattctcacagatatttcaactgtgtcagtttgtaatggaaaattctcaaaatgctccacttgtacatgcaaccttggaaacattgctcagatttctgaactggattcccctgggatatatttttgagaccaaattaatcagcacattgatttataagttcctgaatgttccaatgtttcgaaatgtctctctgaagtgcctcactgagattgctggtgtgagtgtaagccaatatgaagaacaatttgtaacactatttactctgacaatgatgcaactaaagcagatgcttcctttaaataccaatattcgacttgcgtactcaaatggaaaagatgatgaacagaacttcattcaaaatctcagtttgtttctctgcacctttcttaaggaacatgatcaacttatagaaaaaagattaaatctcagggaaactcttatggaggcccttcattatatgttgttggtatctgaagtagaagaaactgaaatctttaaaatttgtcttgaatactggaatcatttggctgctgaactctatagagagagtccattctctacatctgcctctccgttgctttctggaagtcaacattttgatgttcctcccaggagacagctatatttgcccatgttattcaaggtccgtttattaatggttagtcgaatggctaaaccagaggaagtattggttgtagagaatgatcaaggagaagttgtgagagaattcatgaaggatacagattccataaatttgtataagaatatgagggaaacattggtttatcttactcatctggattatgtagatacagaaagaataatgacagagaagcttcacaatcaagtgaatggtacagagtggtcatggaaaaatttgaatacattgtgttgggcaataggctccattagtggagcaatgcatgaagaggacgaaaaacgatttcttgttactgttataaaggatctattaggattatgtgaacagaaaagaggcaaagataataaagctattattgcatcaaatatcatgtacatagtaggtcaatacccacgttttttgagagctcactggaaatttctgaagactgtagttaacaagctgttcgaattcatgcatgagacccatgatggagtccaggatatggcttgtgatactttcattaaaatagcccaaaaatgccgcaggcatttcgttcaggttcaggttggagaagtgatgccatttattgatgaaattttgaacaacattaacactattatttgtgatcttcagcctcaacaggttcatacgttttatgaagctgtggggtacatgattggtgcacaaacagatcaaacagtacaagaacacttgatagaaaagtacatgttactccctaatcaagtgtgggatagtataatccagcaggcaaccaaaaatgtggatatactgaaagatcctgaaacagtcaagcagcttggtagcattttgaaaacaaatgtgagagcctgcaaagctgttggacacccctttgtaattcagcttggaagaatttatttagatatgcttaatgtatacaagtgcctcagtgaaaatatttctgcagctatccaagctaatggtgaaatggttacaaagcaaccattgattagaagtatgcgaactgtaaaaagggaaactttaaagttaatatctggttgggtgagccgatccaatgatccacagatggtcgctgaaaattttgttccccctctgttggatgcagttctcattgattatcagagaaatgtcccagctgctagagaaccagaagtgcttagtactatggccataattgtcaacaagttagggggacatataacagctgaaatacctcaaatatttgatgctgtttttgaatgcacattgaatatgataaataaggactttgaagaatatcctgaacatagaacgaactttttcttactacttcaggctgtcaattctcattgtttcccagcattccttgctattccacctacacagtttaaacttgttttggattccatcatttgggctttcaaacatactatgaggaatgtcgcagatacgggcttacagatactttttacactcttaccaaattttcgcgaccatctgctggatcagcggatcgagtgggatcctctgaacgccaa

SEQ ID NO: 346439 - DNA, 604 bp, Homo sapiens
taactaacgcataagtcagtacatggaagatatgcattgtttaagcccagaagggtggggtatcatgaaacgggcttacaggtcataggtgggttcggagattctttaatttgtaattcgttaaaggagtaaagctttgtccaaaaatttagagtcagcagaaaggactggtaagataaggaagtccgttaaccaatacactgggttaggtctacctggccaggtagacctatctctttggcaagattgcagcaagatcatgtgcatatcatcccattgtaaagcgacttcaaaaatatgggaacacagttagttatttttacacagttctttttgtttttgtgtgtgtgtgctgtcgcttgtcgacaacagctttttgttttcctcaatgaggagtgttgctcatttgtgagccttcattaactcgaagtgaaatggttaaaaatatttatcctgttagaataggctgcatctttttaacaactcattaaaaaacaaaacaactctggcttttgagatgacttatactaatttacattgtttaccaagctgtagtgctttaagaacactacttaaaaagcaaaataaacttggtttacattta

SEQ ID NO: 346440 - DNA, 616 bp, Homo sapiens
ggagaagcggctgcagcggccgcggcaggagcagcgggagctacagcatcagcaagagcaacagtagctacagccccggcggcggtgcctgttccagtctttgctgctgcagtccgtgcaaccacccagagggggaggggggaaccaccagtcgctgaggaacaagagaaggggggaaagtttaggcgagccttgggggggggggggccagcgccggagccgcgtgagagagggagccgtgttttggtaggggggagtcggactgcaactggcagcagagcgtctccccggccgtgtggactctacacctcctactcctgccgcttctgctgctgcctgtggctggagggtccccctggggctgaatctttgggacttgaccccgttccctcccccttccctcactccccagccgggcgggagcatttattccccagattaattccccttttgggggggggcgggtgtgtgtgtgtgtgtgtgtctggaagacctgggtgccaatactggcaagcttctagggggcccagtgtctgcgctgagcattgcggacaggacaggcaatgctgggcaccacacaaccatggacgtgactgtctaacatcgcggggatccc

SEQ ID NO: 346441 - DNA, 333 bp, Homo sapiens
ggagaagcggctgcagcggccgcggcaggagcagcgggagctacagcatcagcaagagcaacagtagctacagccccggcggcggtgcctgttccagtctttgctgctgcagtccgtgcaaccacccagccgggcgggagcatttattccccagattaattccccttttgggggggggcgggtgtgtgtgtgtgtgtgtgtctggaagacctgggtgccaatactggcaagcttctagggggcccagtgtctgcgctgagcattgcggacaggacaggcaatgctgggcaccacacaaccatggacgtgactgtctaacatcgcggggatccc

SEQ ID NO: 346442 - DNA, 568 bp, Homo sapiens
catgtgcaatgaattctcacagatatttcaactgtgtcagtttgtaatggtaagtgtttttaatttcatttttaaaaacaataataggaaagcaattatttacaagtgtgttttgttataggaaaattctcaaaatgctccacttgtacatgcaaccttggaaacattgctcagatttctgaactggattcccctgggatatatttttgagaccaaattaatcagcacattgatttataaggtacagtgaatacatttcagttatttgtcaccggatagccacatatattcttttcacatgtaaagctctcatctctgcattctaaaccttattcaaccttgtttctaacacgaggacgctgctcaggagaaatttcccatattcacacctagtaaattatttaaagtgagtttcaaatctgattctgccacttagaccatgtaattttatgaattcattttgaacaatggatttgattatattgcttttagtttgagtaagttacagtgaggtaagtcaagtgctatttctgaaaaatgaaaagttcatcttttaactgataattta

SEQ ID NO: 346443 - DNA, 595 bp, Homo sapiens
ggagaagcggctgcagcggccgcggcaggagcagcgggagctacagcatcagcaagagcaacagtagctacagccccggcggcggtgcctgttccagtctttgctgctgcagtccgtgcaaccacccagagggggaggggggaaccaccagtcgctgaggaacaagagaaggggggaaagtttaggcgagcgccggagccgcgtgagagagggagccgtgttttggtaggggggagtcggactgcaactggcagcagagcgtctccccggccgtgtggactctacacctcctactcctgccgcttctgctgctgcctgtggctggagggtccccctggggctgaatctttgggacttgaccccgttccctcccccttccctcactccccagccgggcgggagcatttattccccagattaattccccttttgggggggggcgggtgtgtgtgtgtgtgtgtgtctggaagacctgggtgccaatactggcaagcttctagggggcccagtgtctgcgctgagcattgcggacaggacaggcaatgctgggcaccacacaaccatggacgtgactgtctaacatcgcggggatccc

SEQ ID NO: 346444 - DNA, 4168 bp, Homo sapiens
cacgaggctgaaacccaccttgattcgtcccctctcccccctccccaccttccctcgccctaatcccccaacgaggaaggaaggagcagttggttcaatctctggtaatctatgccagcaattatgacaatgttagcagaccatgcagctcgtcagctgcttgatttcagccaaaaactggatatcaacttattagataatgtggtgaattgcttataccatggagaaggagcccagcaaagaatggctcaagaagtactgacacatttaaaggagcatcctgatgcttggacaagagtcgacacaattttggaattttctcagaatatgaatacgaaatactatggactacaaattttggaaaatgtgataaaaacaaggtggaagattcttccaaggaaccagtgcgaaggaataaaaaaatacgttgttggcctcattatcaagacgtcatctgacccaacttgtgtagagatactgaaacaagaatggcccaaacattggccaacttttatcagtgatattgttggagcaagtaggaccagcgaaagtctctgtcaaaataatatggtgattcttaaactcttgagtgaagaagtatttgatttctctagtggacagataacccaagtcaaatctaagcatttaaaagacagcatgtgcaatgaattctcacagatatttcaactgtgtcagtttgtaatggaaaattctcaaaatgctccacttgtacatgcaaccttggaaacattgctcagatttctgaactggattcccctgggatatatttttgagaccaaattaatcagcacattgatttataagttcctgaatgttccaatgtttcgaaatgtctctctgaagtgcctcactgagattgctggtgtgagtgtaagccaatatgaagaacaatttgtaacactatttactctgacaatgatgcaactaaagcagatgcttcctttaaataccaatattcgacttgcgtactcaaatggaaaagatgatgaacagaacttcattcaaaatctcagtttgtttctctgcacctttcttaaggaacatgatcaacttatagaaaaaagattaaatctcagggaaactcttatggaggcccttcattatatgttgttggtatctgaagtagaagaaactgaaatctttaaaatttgtcttgaatactggaatcatttggctgctgaactctatagagagagtccattctctacatctgcctctccgttgctttctggaagtcaacattttgatgttcctcccaggagacagctatatttgcccatgttattcaaggtccgtttattaatggttagtcgaatggctaaaccagaggaagtattggttgtagagaatgatcaaggagaagttgtgagagaattcatgaaggatacagattccataaatttgtataagaatatgagggaaacattggtttatcttactcatctggattatgtagatacagaaagaataatgacagagaagcttcacaatcaagtgaatggtacagagtggtcatggaaaaatttgaatacattgtgttgggcaataggctccattagtggagcaatgcatgaagaggacgaaaaacgatttcttgttactgttataaaggatctattaggattatgtgaacagaaaagaggcaaagataataaagctattattgcatcaaatatcatgtacatagtaggtcaatacccacgttttttgagagctcactggaaatttctgaagactgtagttaacaagctgttcgaattcatgcatgagacccatgatggagtccaggatatggcttgtgatactttcattaaaatagcccaaaaatgccgcaggcatttcgttcaggttcaggttggagaagtgatgccatttattgatgaaattttgaacaacattaacactattatttgtgatcttcagcctcaacaggttcatacgttttatgaagctgtggggtacatgattggtgcacaaacagatcaaacagtacaagaacacttgatagaaaagtacatgttactccctaatcaagtgtgggatagtataatccagcaggcaaccaaaaatgtggatatactgaaagatcctgaaacagtcaagcagcttggtagcattttgaaaacaaatgtgagagcctgcaaagctgttggacacccctttgtaattcagcttggaagaatttatttagatatgcttaatgtatacaagtgcctcagtgaaaatatttctgcagctatccaagctaatggtgaaatggttacaaagcaaccattgattagaagtatgcgaactgtaaaaagggaaactttaaagttaatatctggttgggtgagccgatccaatgatccacagatggtcgctgaaaattttgttccccctctgttggatgcagttctcattgattatcagagaaatgtcccagctgctagagaaccagaagtgcttagtactatggccataattgtcaacaagttagggggacatataacagctgaaatacctcaaatatttgatgctgtttttgaatgcacattgaatatgataaataaggactttgaagaatatcctgaacatagaacgaactttttcttactacttcaggctgtcaattctcattgtttcccagcattccttgctattccacctacacagtttaaacttgttttggattccatcatttgggctttcaaacatactatgaggaatgtcgcagatacgggcttacagatactttttacactcttacaaaatgttgcacaagaagaagctgcagctcagagtttttatcaaacttatttttgtgatattctccagcatatcttttctgttgtgacagacacttcacatactgctggtttaacaatgcatgcatcaattcttgcatatatgtttaatttggttgaagaaggaaaaataagtacatcattaaatcctggaaatccagttaacaaccaaatctttcttcaggaatatgtggctaatctccttaagtcggccttccctcacctacaagatgctcaagtaaagctctttgtgacagggcttttcagcttaaatcaagatattcctgctttcaaggaacatttaagagatttcctagttcaaataaaggaatttgcaggtgaagacacttctgatttgtttttggaagagagagaaatagccctacggcaggctgatgaagagaaacataaacgtcaaatgtctgtccctggcatctttaatccacatgagattccagaagaaatgtgtgattaaaatccaaattcatgctgttttttttctctgcaactcgttagcagaggaaaacagcatgtgggtatttgtcgaccaaaatgatgccaatttgtaaattaaaatgtcacctagtggccctttttcttatgtgtttttttgtataagaaattttctgtgaaatatccttccattgtttaagcttttgttttggtcatctttatttagtttgcatgaagttgaaaattaaggcatttttaaaaattttacttcatgcccatttttgtggctgggctggggggaggaggcaaattcgatttgaacatatacttgtaattctaatgcaaaattatacaatttttcctgtaaacaataccaatttttaattagggagcattttccttctagtctatttcagcctagaagaaaagataatgagtaaaacaaattgcgttgtttaaaggattatagtgctgcattgtctgaagttagcacctcttggactgaatcgtttgtctagactacatgtattacaaagtctctttggcaagattgcagcaagatcatgtgcatatcatcccattgtaaagcgacttcaaaaatatgggaacacagttagttatttttacacagttctttttgtttttgtgtgtgtgtgctgtcgcttgtcgacaacagctttttgttttcctcaatgaggagtgttgctcatttgtgagccttcattaactcgaagtgaaatggttaaaaatatttatcctgttagaataggctgcatctttttaacaactcattaaaaaacaaaacaactctggcttttgagatgacttatactaatttacattgtttaccaagctgtagtgctttaagaacactacttaaaaagcaaaataaacttggtttacattta

SEQ ID NO: 346445 - DNA, 3733 bp, Homo sapiens
tctactaaaaatacaaaaattagccgggcgtggtggcatgcatgtgtagtcccagctatttgagaggctgaggcaggagaatcgcttgaatccaagaggtgaggttgcagtgagccgagatcaagcccctgcatttcagcctgggcgagcgagactctgtctcaaaaaaacaaaaaaagtttgctcctaaagcatttactgtatactaggtaggcaataaaattccctctcagtatatctgcatgataaaatatgttcattcacttggcctgtttttgacatctacccctatatttaattgttaaagcctttttccttttaattgtgaattttaagtaaagtgtgtatcaggccaattaattttatggttccctccccccttttaaatagttcctgaatgttccaatgtttcgaaatgtctctctgaagtgcctcactgagattgctggtgtgagtgtaagccaatatgaagaacaatttgtaacactatttactctgacaatgatgcaactaaagcagatgcttcctttaaataccaatattcgacttgcgtactcaaatggaaaagatgatgaacagaacttcattcaaaatctcagtttgtttctctgcacctttcttaaggaacatgatcaacttatagaaaaaagattaaatctcagggaaactcttatggaggcccttcattatatgttgttggtatctgaagtagaagaaactgaaatctttaaaatttgtcttgaatactggaatcatttggctgctgaactctatagagagagtccattctctacatctgcctctccgttgctttctggaagtcaacattttgatgttcctcccaggagacagctatatttgcccatgttattcaaggtccgtttattaatggttagtcgaatggctaaaccagaggaagtattggttgtagagaatgatcaaggagaagttgtgagagaattcatgaaggatacagattccataaatttgtataagaatatgagggaaacattggtttatcttactcatctggattatgtagatacagaaagaataatgacagagaagcttcacaatcaagtgaatggtacagagtggtcatggaaaaatttgaatacattgtgttgggcaataggctccattagtggagcaatgcatgaagaggacgaaaaacgatttcttgttactgttataaaggatctattaggattatgtgaacagaaaagaggcaaagataataaagctattattgcatcaaatatcatgtacatagtaggtcaatacccacgttttttgagagctcactggaaatttctgaagactgtagttaacaagctgttcgaattcatgcatgagacccatgatggagtccaggatatggcttgtgatactttcattaaaatagcccaaaaatgccgcaggcatttcgttcaggttcaggttggagaagtgatgccatttattgatgaaattttgaacaacattaacactattatttgtgatcttcagcctcaacaggttcatacgttttatgaagctgtggggtacatgattggtgcacaaacagatcaaacagtacaagaacacttgatagaaaagtacatgttactccctaatcaagtgtgggatagtataatccagcaggcaaccaaaaatgtggatatactgaaagatcctgaaacagtcaagcagcttggtagcattttgaaaacaaatgtgagagcctgcaaagctgttggacacccctttgtaattcagcttggaagaatttatttagatatgcttaatgtatacaagtgcctcagtgaaaatatttctgcagctatccaagctaatggtgaaatggttacaaagcaaccattgattagaagtatgcgaactgtaaaaagggaaactttaaagttaatatctggttgggtgagccgatccaatgatccacagatggtcgctgaaaattttgttccccctctgttggatgcagttctcattgattatcagagaaatgtcccagctgctagagaaccagaagtgcttagtactatggccataattgtcaacaagttagggggacatataacagctgaaatacctcaaatatttgatgctgtttttgaatgcacattgaatatgataaataaggactttgaagaatatcctgaacatagaacgaactttttcttactacttcaggctgtcaattctcattgtttcccagcattccttgctattccacctacacagtttaaacttgttttggattccatcatttgggctttcaaacatactatgaggaatgtcgcagatacgggcttacagatactttttacactcttacaaaatgttgcacaagaagaagctgcagctcagagtttttatcaaacttatttttgtgatattctccagcatatcttttctgttgtgacagacacttcacatactgctggtttaacaatgcatgcatcaattcttgcatatatgtttaatttggttgaagaaggaaaaataagtacatcattaaatcctggaaatccagttaacaaccaaatctttcttcaggaatatgtggctaatctccttaagtcggccttccctcacctacaagatgctcaagtaaagctctttgtgacagggcttttcagcttaaatcaagatattcctgctttcaaggaacatttaagagatttcctagttcaaataaaggaatttgcaggtgaagacacttctgatttgtttttggaagagagagaaatagccctacggcaggctgatgaagagaaacataaacgtcaaatgtctgtccctggcatctttaatccacatgagattccagaagaaatgtgtgattaaaatccaaattcatgctgttttttttctctgcaactcgttagcagaggaaaacagcatgtgggtatttgtcgaccaaaatgatgccaatttgtaaattaaaatgtcacctagtggccctttttcttatgtgtttttttgtataagaaattttctgtgaaatatccttccattgtttaagcttttgttttggtcatctttatttagtttgcatgaagttgaaaattaaggcatttttaaaaattttacttcatgcccatttttgtggctgggctggggggaggaggcaaattcgatttgaacatatacttgtaattctaatgcaaaattatacaatttttcctgtaaacaataccaatttttaattagggagcattttccttctagtctatttcagcctagaagaaaagataatgagtaaaacaaattgcgttgtttaaaggattatagtgctgcattgtctgaagttagcacctcttggactgaatcgtttgtctagactacatgtattacaaagtctctttggcaagattgcagcaagatcatgtgcatatcatcccattgtaaagcgacttcaaaaatatgggaacacagttagttatttttacacagttctttttgtttttgtgtgtgtgtgctgtcgcttgtcgacaacagctttttgttttcctcaatgaggagtgttgctcatttgtgagccttcattaactcgaagtgaaatggttaaaaatatttatcctgttagaataggctgcatctttttaacaactcattaaaaaacaaaacaactctggcttttgagatgacttatactaatttacattgtttaccaagctgtagtgctttaagaacactacttaaaaagcaaaataaacttggtttacattta

SEQ ID NO: 346446 - DNA, 5053 bp, Homo sapiens
cacgaggctgaaacccaccttgattcgtcccctctcccccctccccaccttccctcgccctaatcccccaacgaggaaggaaggagcagttggttcaatctctggtaatctatgccagcaattatgacaatgttagcagaccatgcagctcgtcagctgcttgatttcagccaaaaactggatatcaacttattagataatgtggtgaattgcttataccatggagaaggagcccagcaaagaatggctcaagaagtactgacacatttaaaggagcatcctgatgcttggacaagagtcgacacaattttggaattttctcagaatatgaatacgaaatactatggactacaaattttggaaaatgtgataaaaacaaggtggaagattcttccaaggaaccagtgcgaaggaataaaaaaatacgttgttggcctcattatcaagacgtcatctgacccaacttgtgtagagaaagaaaaggtgtatatcggaaaattaaatatgatccttgttcagatactgaaacaagaatggcccaaacattggccaacttttatcagtgatattgttggagcaagtaggaccagcgaaagtctctgtcaaaataatatggtgattcttaaactcttgagtgaagaagtatttgatttctctagtggacagataacccaagtcaaatctaagcatttaaaagacagcatgtgcaatgaattctcacagatatttcaactgtgtcagtttgtaatggaaaattctcaaaatgctccacttgtacatgcaaccttggaaacattgctcagatttctgaactggattcccctgggatatatttttgagaccaaattaatcagcacattgatttataagttcctgaatgttccaatgtttcgaaatgtctctctgaagtgcctcactgagattgctggtgtgagtgtaagccaatatgaagaacaatttgtaacactatttactctgacaatgatgcaactaaagcagatgcttcctttaaataccaatattcgacttgcgtactcaaatggaaaagatgatgaacagaacttcattcaaaatctcagtttgtttctctgcacctttcttaaggaacatgatcaacttatagaaaaaagattaaatctcagggaaactcttatggaggcccttcattatatgttgttggtatctgaagtagaagaaactgaaatctttaaaatttgtcttgaatactggaatcatttggctgctgaactctatagagagagtccattctctacatctgcctctccgttgctttctggaagtcaacattttgatgttcctcccaggagacagctatatttgcccatgttattcaaggtaacagagcggttggttgagtgttcttcctgttgcatactgtggttttgaggtctgaatccaaatacttctaatctgtgtaaataaattagctataaaaagagaacccaacaacttctccatgagtgtggaaaactagaacatgaaaggagttgagtctagaaccttgattctcaagagtgtggtccttctctcagtatcaacattggttgtgatttcgttaggcaaattcattggccacctgccaatctactaaaccagagtctaggaatgagacacaggaaactcctgtaacagaagttggttaaaaaaatcacattaaaacacacttaaataattataaagccatttttgtagaattacagtgaaaaaaaattttttcttttggagacagggtcttgctctgtggctcaggttggagtgcagtggcgtggtcatagctcactacaatcttgaactcctagactaaagcaattctcttgtgtcagcctcccaagtaattggttgcaggcacacaccaccatgcctagcaaattttaaattttttagttttacttcatttatatttacatagttttttctgttgtgctttaagccccagtatttttattgttttagagattgggtgtcattttgtgttgctcaagctgctctcaaattcctggccacaacagttctttttgcctcggccctccggaatagttggaattataggcatgaatccctacacatggctggcttgtggtttttttggttttgtttgtttttaactaagcttctacactaatgatttcagtgatctaacgatttttttcttgattgatatattgttgagtataggtccgtttattaatggttagtcgaatggctaaaccagaggaagtattggttgtagagaatgatcaaggagaagttgtgagagaattcatgaaggatacagattccataaatttgtataagaatatgagggaaacattggtttatcttactcatctggattatgtagatacagaaagaataatgacagagaagcttcacaatcaagtgaatggtacagagtggtcatggaaaaatttgaatacattgtgttgggcaataggctccattagtggagcaatgcatgaagaggacgaaaaacgatttcttgttactgttataaaggatctattaggattatgtgaacagaaaagaggcaaagataataaagctattattgcatcaaatatcatgtacatagtaggtcaatacccacgttttttgagagctcactggaaatttctgaagactgtagttaacaagctgttcgaattcatgcatgagacccatgatggagtccaggatatggcttgtgatactttcattaaaatagcccaaaaatgccgcaggcatttcgttcaggttcaggttggagaagtgatgccatttattgatgaaattttgaacaacattaacactattatttgtgatcttcagcctcaacaggttcatacgttttatgaagctgtggggtacatgattggtgcacaaacagatcaaacagtacaagaacacttgatagaaaagtacatgttactccctaatcaagtgtgggatagtataatccagcaggcaaccaaaaatgtggatatactgaaagatcctgaaacagtcaagcagcttggtagcattttgaaaacaaatgtgagagcctgcaaagctgttggacacccctttgtaattcagcttggaagaatttatttagatatgcttaatgtatacaagtgcctcagtgaaaatatttctgcagctatccaagctaatggtgaaatggttacaaagcaaccattgattagaagtatgcgaactgtaaaaagggaaactttaaagttaatatctggttgggtgagccgatccaatgatccacagatggtcgctgaaaattttgttccccctctgttggatgcagttctcattgattatcagagaaatgtcccagctgctagagaaccagaagtgcttagtactatggccataattgtcaacaagttagggggacatataacagctgaaatacctcaaatatttgatgctgtttttgaatgcacattgaatatgataaataaggactttgaagaatatcctgaacatagaacgaactttttcttactacttcaggctgtcaattctcattgtttcccagcattccttgctattccacctacacagtttaaacttgttttggattccatcatttgggctttcaaacatactatgaggaatgtcgcagatacgggcttacagatactttttacactcttacaaaatgttgcacaagaagaagctgcagctcagagtttttatcaaacttatttttgtgatattctccagcatatcttttctgttgtgacagacacttcacatactgctggtttaacaatgcatgcatcaattcttgcatatatgtttaatttggttgaagaaggaaaaataagtacatcattaaatcctggaaatccagttaacaaccaaatctttcttcaggaatatgtggctaatctccttaagtcggccttccctcacctacaagatgctcaagtaaagctctttgtgacagggcttttcagcttaaatcaagatattcctgctttcaaggaacatttaagagatttcctagttcaaataaaggaatttgcaggtgaagacacttctgatttgtttttggaagagagagaaatagccctacggcaggctgatgaagagaaacataaacgtcaaatgtctgtccctggcatctttaatccacatgagattccagaagaaatgtgtgattaaaatccaaattcatgctgttttttttctctgcaactcgttagcagaggaaaacagcatgtgggtatttgtcgaccaaaatgatgccaatttgtaaattaaaatgtcacctagtggccctttttcttatgtgtttttttgtataagaaattttctgtgaaatatccttccattgtttaagcttttgttttggtcatctttatttagtttgcatgaagttgaaaattaaggcatttttaaaaattttacttcatgcccatttttgtggctgggctggggggaggaggcaaattcgatttgaacatatacttgtaattctaatgcaaaattatacaatttttcctgtaaacaataccaatttttaattagggagcattttccttctagtctatttcagcctagaagaaaagataatgagtaaaacaaattgcgttgtttaaaggattatagtgctgcattgtctgaagttagcacctcttggactgaatcgtttgtctagactacatgtattacaaagtctctttggcaagattgcagcaagatcatgtgcatatcatcccattgtaaagcgacttcaaaaatatgggaacacagttagttatttttacacagttctttttgtttttgtgtgtgtgtgctgtcgcttgtcgacaacagctttttgttttcctcaatgaggagtgttgctcatttgtgagccttcattaactcgaagtgaaatggttaaaaatatttatcctgttagaataggctgcatctttttaacaactcattaaaaaacaaaacaactctggcttttgagatgacttatactaatttacattgtttaccaagctgtagtgctttaagaacactacttaaaaagcaaaataaacttggtttacattta

SEQ ID NO: 346447 - DNA, 2597 bp, Homo sapiens
gttggcactagtccacggtgtggctacatccacggttggctactagtccacggttggctactagtccacggttggctactagtccacggttggctactagtccacggttggctactagtccacggttggctactagtccacgcttggctaatttctttgtatttgtagaagagatggggtttcaccacgttggtcaggctggtctgcaactcctgaccacaagtgattggcctgccttggcttctcaaagtattgggattacaggagtgatccactgcacctgggccaaaatcagtttcaagacgtttgtgaattgcttgtgtgtggttttccttattagggtgtataacataaacgttaaaatgtctgctttttaaaataggttcatacgttttatgaagctgtggggtacatgattggtgcacaaacagatcaaacagtacaagaacacttgatagaaaagtacatgttactccctaatcaagtgtgggatagtataatccagcaggcaaccaaaaatgtggatatactgaaagatcctgaaacagtcaagcagcttggtagcattttgaaaacaaatgtgagagcctgcaaagctgttggacacccctttgtaattcagcttggaagaatttatttagatatgcttaatgtatacaagtgcctcagtgaaaatatttctgcagctatccaagctaatggtgaaatggttacaaagcaaccattgattagaagtatgcgaactgtaaaaagggaaactttaaagttaatatctggttgggtgagccgatccaatgatccacagatggtcgctgaaaattttgttccccctctgttggatgcagttctcattgattatcagagaaatgtcccagctgctagagaaccagaagtgcttagtactatggccataattgtcaacaagttagggggacatataacagctgaaatacctcaaatatttgatgctgtttttgaatgcacattgaatatgataaataaggactttgaagaatatcctgaacatagaacgaactttttcttactacttcaggctgtcaattctcattgtttcccagcattccttgctattccacctacacagtttaaacttgttttggattccatcatttgggctttcaaacatactatgaggaatgtcgcagatacgggcttacagatactttttacactcttacaaaatgttgcacaagaagaagctgcagctcagagtttttatcaaacttatttttgtgatattctccagcatatcttttctgttgtgacagacacttcacatactgctggtttaacaatgcatgcatcaattcttgcatatatgtttaatttggttgaagaaggaaaaataagtacatcattaaatcctggaaatccagttaacaaccaaatctttcttcaggaatatgtggctaatctccttaagtcggccttccctcacctacaagatgctcaagtaaagctctttgtgacagggcttttcagcttaaatcaagatattcctgctttcaaggaacatttaagagatttcctagttcaaataaaggaatttgcaggtgaagacacttctgatttgtttttggaagagagagaaatagccctacggcaggctgatgaagagaaacataaacgtcaaatgtctgtccctggcatctttaatccacatgagattccagaagaaatgtgtgattaaaatccaaattcatgctgttttttttctctgcaactcgttagcagaggaaaacagcatgtgggtatttgtcgaccaaaatgatgccaatttgtaaattaaaatgtcacctagtggccctttttcttatgtgtttttttgtataagaaattttctgtgaaatatccttccattgtttaagcttttgttttggtcatctttatttagtttgcatgaagttgaaaattaaggcatttttaaaaattttacttcatgcccatttttgtggctgggctggggggaggaggcaaattcgatttgaacatatacttgtaattctaatgcaaaattatacaatttttcctgtaaacaataccaatttttaattagggagcattttccttctagtctatttcagcctagaagaaaagataatgagtaaaacaaattgcgttgtttaaaggattatagtgctgcattgtctgaagttagcacctcttggactgaatcgtttgtctagactacatgtattacaaagtctctttggcaagattgcagcaagatcatgtgcatatcatcccattgtaaagcgacttcaaaaatatgggaacacagttagttatttttacacagttctttttgtttttgtgtgtgtgtgctgtcgcttgtcgacaacagctttttgttttcctcaatgaggagtgttgctcatttgtgagccttcattaactcgaagtgaaatggttaaaaatatttatcctgttagaataggctgcatctttttaacaactcattaaaaaacaaaacaactctggcttttgagatgacttatactaatttacattgtttaccaagctgtagtgctttaagaacactacttaaaaagcaaaataaacttggtttacattta

SEQ ID NO: 346448 - DNA, 1957 bp, Homo sapiens
gtgggtgagccgatccagatattaactttaaagtttccctttttacagttcgcatacttctaatcaatggtgcttgtaaccatttcaccattagcttggatagctgtaaaaagggaaactttaaagttaatatctggttgggtgagccgatccaatgatccacagatggtcgctgaaaattttgttccccctctgttggatgcagttctcattgattatcagagaaatgtcccagctgctagagaaccagaagtgcttagtactatggccataattgtcaacaagttagggggacatataacagctgaaatacctcaaatatttgatgctgtttttgaatgcacattgaatatgataaataaggactttgaagaatatcctgaacatagaacgaactttttcttactacttcaggctgtcaattctcattgtttcccagcattccttgctattccacctacacagtttaaacttgttttggattccatcatttgggctttcaaacatactatgaggaatgtcgcagatacgggcttacagatactttttacactcttacaaaatgttgcacaagaagaagctgcagctcagagtttttatcaaacttatttttgtgatattctccagcatatcttttctgttgtgacagacacttcacatactgctggtttaacaatgcatgcatcaattcttgcatatatgtttaatttggttgaagaaggaaaaataagtacatcattaaatcctggaaatccagttaacaaccaaatctttcttcaggaatatgtggctaatctccttaagtcggccttccctcacctacaagatgctcaagtaaagctctttgtgacagggcttttcagcttaaatcaagatattcctgctttcaaggaacatttaagagatttcctagttcaaataaaggaatttgcaggtgaagacacttctgatttgtttttggaagagagagaaatagccctacggcaggctgatgaagagaaacataaacgtcaaatgtctgtccctggcatctttaatccacatgagattccagaagaaatgtgtgattaaaatccaaattcatgctgttttttttctctgcaactcgttagcagaggaaaacagcatgtgggtatttgtcgaccaaaatgatgccaatttgtaaattaaaatgtcacctagtggccctttttcttatgtgtttttttgtataagaaattttctgtgaaatatccttccattgtttaagcttttgttttggtcatctttatttagtttgcatgaagttgaaaattaaggcatttttaaaaattttacttcatgcccatttttgtggctgggctggggggaggaggcaaattcgatttgaacatatacttgtaattctaatgcaaaattatacaatttttcctgtaaacaataccaatttttaattagggagcattttccttctagtctatttcagcctagaagaaaagataatgagtaaaacaaattgcgttgtttaaaggattatagtgctgcattgtctgaagttagcacctcttggactgaatcgtttgtctagactacatgtattacaaagtctctttggcaagattgcagcaagatcatgtgcatatcatcccattgtaaagcgacttcaaaaatatgggaacacagttagttatttttacacagttctttttgtttttgtgtgtgtgtgctgtcgcttgtcgacaacagctttttgttttcctcaatgaggagtgttgctcatttgtgagccttcattaactcgaagtgaaatggttaaaaatatttatcctgttagaataggctgcatctttttaacaactcattaaaaaacaaaacaactctggcttttgagatgacttatactaatttacattgtttaccaagctgtagtgctttaagaacactacttaaaaagcaaaataaacttggtttacattta

SEQ ID NO: 346449 - DNA, 4213 bp, Homo sapiens
  misc_feature (4112)..(4112): n is a, c, g, or t
  misc_feature (4150)..(4150): n is a, c, g, or t
  misc_feature (4173)..(4173): n is a, c, g, or t
  misc_feature (4194)..(4194): n is a, c, g, or t
  misc_feature (4204)..(4204): n is a, c, g, or t
cacgaggctgaaacccaccttgattcgtcccctctcccccctccccaccttccctcgccctaatcccccaacgaggaaggaaggagcagttggttcaatctctggtaatctatgccagcaattatgacaatgttagcagaccatgcagctcgtcagctgcttgatttcagccaaaaactggatatcaacttattagataatgtggtgaattgcttataccatggagaaggagcccagcaaagaatggctcaagaagtactgacacatttaaaggagcatcctgatgcttggacaagagtcgacacaattttggaattttctcagaatatgaatacgaaatactatggactacaaattttggaaaatgtgataaaaacaaggtggaagattcttccaaggaaccagtgcgaaggaataaaaaaatacgttgttggcctcattatcaagacgtcatctgacccaacttgtgtagagaaagaaaaggtgtatatcggaaaattaaatatgatccttgttcagatactgaaacaagaatggcccaaacattggccaacttttatcagtgatattgttggagcaagtaggaccagcgaaagtctctgtcaaaataatatggtgattcttaaactcttgagtgaagaagtatttgatttctctagtggacagataacccaagtcaaatctaagcatttaaaagacagcatgtgcaatgaattctcacagatatttcaactgtgtcagtttgtaatggaaaattctcaaaatgctccacttgtacatgcaaccttggaaacattgctcagatttctgaactggattcccctgggatatatttttgagaccaaattaatcagcacattgatttataagttcctgaatgttccaatgtttcgaaatgtctctctgaagtgcctcactgagattgctggtgtgagtgtaagccaatatgaagaacaatttgtaacactatttactctgacaatgatgcaactaaagcagatgcttcctttaaataccaatattcgacttgcgtactcaaatggaaaagatgatgaacagaacttcattcaaaatctcagtttgtttctctgcacctttcttaaggaacatgatcaacttatagaaaaaagattaaatctcagggaaactcttatggaggcccttcattatatgttgttggtatctgaagtagaagaaactgaaatctttaaaatttgtcttgaatactggaatcatttggctgctgaactctatagagagagtccattctctacatctgcctctccgttgctttctggaagtcaacattttgatgttcctcccaggagacagctatatttgcccatgttattcaaggtccgtttattaatggttagtcgaatggctaaaccagaggaagtattggttgtagagaatgatcaaggagaagttgtgagagaattcatgaaggatacagattccataaatttgtataagaatatgagggaaacattggtttatcttactcatctggattatgtagatacagaaagaataatgacagagaagcttcacaatcaagtgaatggtacagagtggtcatggaaaaatttgaatacattgtgttgggcaataggctccattagtggagcaatgcatgaagaggacgaaaaacgatttcttgttactgttataaaggatctattaggattatgtgaacagaaaagaggcaaagataataaagctattattgcatcaaatatcatgtacatagtaggtcaatacccacgttttttgagagctcactggaaatttctgaagactgtagttaacaagctgttcgaattcatgcatgagacccatgatggagtccaggatatggcttgtgatactttcattaaaatagcccaaaaatgccgcaggcatttcgttcaggttcaggttggagaagtgatgccatttattgatgaaattttgaacaacattaacactattatttgtgatcttcagcctcaacaggttcatacgttttatgaagctgtggggtacatgattggtgcacaaacagatcaaacagtacaagaacacttgatagaaaagtacatgttactccctaatcaagtgtgggatagtataatccagcaggcaaccaaaaatgtggatatactgaaagatcctgaaacagtcaagcagcttggtagcattttgaaaacaaatgtgagagcctgcaaagctgttggacacccctttgtaattcagcttggaagaatttatttagatatgcttaatgtatacaagtgcctcagtgaaaatatttctgcagctatccaagctaatggtgaaatggttacaaagcaaccattgattagaagtatgcgaactgtaaaaagggaaactttaaagttaatatctggttgggtgagccgatccaatgatccacagatggtcgctgaaaattttgttccccctctgttggatgcagttctcattgattatcagagaaatgtcccagctgctagagaaccagaagtgcttagtactatggccataattgtcaacaagttagggggacatataacagctgaaatacctcaaatatttgatgctgtttttgaatgcacattgaatatgataaataaggactttgaagaatatcctgaacatagaacgaactttttcttactacttcaggctgtcaattctcattgtttcccagcattccttgctattccacctacacagtttaaacttgttttggattccatcatttgggctttcaaacatactatgaggaatgtcgcagatacgggcttacagatactttttacactcttacaaaatgttgcacaagaagaagctgcagctcagagtttttatcaaacttatttttgtgatattctccagcatatcttttctgttgtgacagacacttcacatactgctggtttaacaatgcatgcatcaattcttgcatatatgtttaatttggttgaagaaggaaaaataagtacatcattaaatcctggaaatccagttaacaaccaaatctttcttcaggaatatgtggctaatctccttaagtcggccttccctcacctacaagatgctcaagtaaagctctttgtgacagggcttttcagcttaaatcaagatattcctgctttcaaggaacatttaagagatttcctagttcaaataaaggaatttgcaggtgaagacacttctgatttgtttttggaagagagagaaatagccctacggcaggctgatgaagagaaacataaacgtcaaatgtctgtccctggcatctttaatccacatgagattccagaagaaatgtgtgattaaaatccaaattcatgctgttttttttctctgcaactcgttagcagaggaaaacagcatgtgggtatttgtcgaccaaaatgatgccaatttgtaaattaaaatgtcacctagtggccctttttcttatgtgtttttttgtataagaaattttctgtgaaatatccttccattgtttaagcttttgttttggtcatctttatttagtttgcatgaagttgaaaattaaggcatttttaaaaattttacttcatgcccatttttgtggctgggctggggggaggaggcaaattcgatttgaacatatacttgtaattctaatgcaaaattatacaatttttcctgtaaacaataccaatttttaattagggagcattttccttctagtctatttcagcctagaagaaaagataatgagtaaaacaaattgcgttgtttaaaggattatagtgctgcattgtctgaagttagcacctcttggactgaatcgtttgtctagactacatgtattacaaagtctctttggcaagattgcagcaagatcatgtgcatatcatcccattgtaaagcgacttcaaaaatatgggaacacagttagttatttttacacagttctttttgtttttgtgtgtgtgtgctgtcgcttgtcgacaacagctttttgttttcctcaatgaggagtgttgctcatttgtgagccttcattaactcgaagtgaaatggttaaaaatatttatcctgttagaataggctgcatctttttaacaactcattaaaaaacaaaacanctctggccctccacctcatggggcctcatagccctgcnggcccagcaggtcgtcccctcanccctgtcattaaagcgtcttntagctttggntccgttttt

SEQ ID NO: 346450 - DNA, 1740 bp, Homo sapiens
ccggtggccgttacgcgcgacatgccgcatagtatgtggacagcccaaatgatggaatccagaacaagttagggggacatataacagctgaaatacctcaaatatttgatgctgtttttgaatgcacattgaatatgataaataaggactttgaagaatatcctgaacatagaacgaactttttcttactacttcaggctgtcaattctcattgtttcccagcattccttgctattccacctacacagtttaaacttgttttggattccatcatttgggctttcaaacatactatgaggaatgtcgcagatacgggcttacagatactttttacactcttacaaaatgttgcacaagaagaagctgcagctcagagtttttatcaaacttatttttgtgatattctccagcatatcttttctgttgtgacagacacttcacatactgctggtttaacaatgcatgcatcaattcttgcatatatgtttaatttggttgaagaaggaaaaataagtacatcattaaatcctggaaatccagttaacaaccaaatctttcttcaggaatatgtggctaatctccttaagtcggccttccctcacctacaagatgctcaagtaaagctctttgtgacagggcttttcagcttaaatcaagatattcctgctttcaaggaacatttaagagatttcctagttcaaataaaggaatttgcaggtgaagacacttctgatttgtttttggaagagagagaaatagccctacggcaggctgatgaagagaaacataaacgtcaaatgtctgtccctggcatctttaatccacatgagattccagaagaaatgtgtgattaaaatccaaattcatgctgttttttttctctgcaactcgttagcagaggaaaacagcatgtgggtatttgtcgaccaaaatgatgccaatttgtaaattaaaatgtcacctagtggccctttttcttatgtgtttttttgtataagaaattttctgtgaaatatccttccattgtttaagcttttgttttggtcatctttatttagtttgcatgaagttgaaaattaaggcatttttaaaaattttacttcatgcccatttttgtggctgggctggggggaggaggcaaattcgatttgaacatatacttgtaattctaatgcaaaattatacaatttttcctgtaaacaataccaatttttaattagggagcattttccttctagtctatttcagcctagaagaaaagataatgagtaaaacaaattgcgttgtttaaaggattatagtgctgcattgtctgaagttagcacctcttggactgaatcgtttgtctagactacatgtattacaaagtctctttggcaagattgcagcaagatcatgtgcatatcatcccattgtaaagcgacttcaaaaatatgggaacacagttagttatttttacacagttctttttgtttttgtgtgtgtgtgctgtcgcttgtcgacaacagctttttgttttcctcaatgaggagtgttgctcatttgtgagccttcattaactcgaagtgaaatggttaaaaatatttatcctgttagaataggctgcatctttttaacaactcattaaaaaacaaaacaactctggcttttgagatgacttatactaatttacattgtttaccaagctgtagtgctttaagaacactacttaaaaagcaaaataaacttggtttacattta

SEQ ID NO: 346451 - DNA, 3407 bp, Homo sapiens
cacgaggctgaaacccaccttgattcgtcccctctcccccctccccaccttccctcgccctaatcccccaacgaggaaggaaggagcagttggttcaatctctggtaatctatgccagcaattatgacaatgttagcagaccatgcagctcgtcagctgcttgatttcagccaaaaactggatatcaacttattagataatgtggtgaattgcttataccatggagaaggagcccagcaaagaatggctcaagaagtactgacacatttaaaggagcatcctgatgcttggacaagagtcgacacaattttggaattttctcagaatatgaatacgaaatactatggactacaaattttggaaaatgtgataaaaacaaggtggaagattcttccaaggaaccagtgcgaaggaataaaaaaatacgttgttggcctcattatcaagacgtcatctgacccaacttgtgtagagaaagaaaaggtgtatatcggaaaattaaatatgatccttgttcagatactgaaacaagaatggcccaaacattggccaacttttatcagtgatattgttggagcaagtaggaccagcgaaagtctctgtcaaaataatatggtgattcttaaactcttgagtgaagaagtatttgatttctctagtggacagataacccaagtcaaatctaagcatttaaaagacagcatgtgcaatgaattctcacagatatttcaactgtgtcagtttgtaatggaaaattctcaaaatgctccacttgtacatgcaaccttggaaacattgctcagatttctgaactggattcccctgggatatatttttgagaccaaattaatcagcacattgatttataagttcctgaatgttccaatgtttcgaaatgtctctctgaagtgcctcactgagattgctggtgtgagtgtaagccaatatgaagaacaatttgtaacactatttactctgacaatgatgcaactaaagcagatgcttcctttaaataccaatattcgacttgcgtactcaaatggaaaagatgatgaacagaacttcattcaaaatctcagtttgtttctctgcacctttcttaaggaacatgatcaacttatagaaaaaagattaaatctcagggaaactcttatggaggcccttcattatatgttgttggtatctgaagtagaagaaactgaaatctttaaaatttgtcttgaatactggaatcatttggctgctgaactctatagagagagtccattctctacatctgcctctccgttgctttctggaagtcaacattttgatgttcctcccaggagacagctatatttgcccatgttattcaaggtccgtttattaatggttagtcgaatggctaaaccagaggaagtattggttgtagagaatgatcaaggagaagttgtgagagaattcatgaaggatacagattccataaatttgtataagaatatgagggaaacattggtttatcttactcatctggattatgtagatacagaaagaataatgacagagaagcttcacaatcaagtgaatggtacagagtggtcatggaaaaatttgaatacattgtgttgggcaataggctccattagtggagcaatgcatgaagaggacgaaaaacgatttcttgttactgttataaaggatctattaggattatgtgaacagaaaagaggcaaagataataaagctattattgcatcaaatatcatgtacatagtaggtcaatacccacgttttttgagagctcactggaaatttctgaagactgtagttaacaagctgttcgaattcatgcatgagacccatgatggagtccaggatatggcttgtgatactttcattaaaatagcccaaaaatgccgcaggcatttcgttcaggttcaggttggagaagtgatgccatttattgatgaaattttgaacaacattaacactattatttgtgatcttcagcctcaacaggttcatacgttttatgaagctgtggggtacatgattggtgcacaaacagatcaaacagtacaagaacacttgatagaaaagtacatgttactccctaatcaagtgtgggatagtataatccagcaggcaaccaaaaatgtggatatactgaaagatcctgaaacagtcaagcagcttggtagcattttgaaaacaaatgtgagagcctgcaaagctgttggacacccctttgtaattcagcttggaagaatttatttagatatgcttaatgtatacaagtgcctcagtgaaaatatttctgcagctatccaagctaatggtgaaatggttacaaagcaaccattgattagaagtatgcgaactgtaaaaagggaaactttaaagttaatatctggttgggtgagccgatccaatgatccacagatggtcgctgaaaattttgttccccctctgttggatgcagttctcattgattatcagagaaatgtcccagctgctagagaaccagaagtgcttagtactatggccataattgtcaacaagttagggggacatataacagctgaaatacctcaaatatttgatgctgtttttgaatgcacattgaatatgataaataaggactttgaagaatatcctgaacatagaacgaactttttcttactacttcaggctgtcaattctcattgtttcccagcattccttgctattccacctacacagtttaaacttgttttggattccatcatttgggctttcaaacatactatgaggaatgtcgcagatacgggcttacagatactttttacactcttacaaaatgttgcacaagaagaagctgcagctcagagtttttatcaaacttatttttgtgatattctccagcatatcttttctgttgtgacagacacttcacatactgctggtttaacaatgcatgcatcaattcttgcatatatgtttaatttggttgaagaaggaaaaataagtacatcattaaatcctggaaatccagttaacaaccaaatctttcttcaggaatatgtggctaatctccttaagtcggccttccctcacctacaagagtaaatataccttttaataaacgtagaatgttcctggtcgggcacagtggctcacacctgtaatcccagcactttgggaagcctaaggtgggaggattgcttgggcccaaaagttggagaccaacctagacaacaaaacaagatcccgtctctacaaaaaaaaaagtagtcagaagtggtatgcatctgtaggaccagctgttggagaggctgaggcgagagggttgtttgcatcctggagtttaagactgcagtgagctatgatcgcaccactgtacaccagcctgggtgatagagtgagaccctgcctctttaaaaaagcaa

SEQ ID NO: 346452 - DNA, 4101 bp, Homo sapiens
cacgaggctgaaacccaccttgattcgtcccctctcccccctccccaccttccctcgccctaatcccccaacgaggaaggaaggagcagttggttcaatctctggtaatctatgccagcaattatgacaatgttagcagaccatgcagctcgtcagctgcttgatttcagccaaaaactggatatcaacttattagataatgtggtgaattgcttataccatggagaaggagcccagcaaagaatggctcaagaagtactgacacatttaaaggagcatcctgatgcttggacaagagtcgacacaattttggaattttctcagaatatgaatacgaaatactatggactacaaattttggaaaatgtgataaaaacaaggtggaagattcttccaaggaaccagtgcgaaggaataaaaaaatacgttgttggcctcattatcaagacgtcatctgacccaacttgtgtagagaaagaaaaggtgtatatcggaaaattaaatatgatccttgttcagatactgaaacaagaatggcccaaacattggccaacttttatcagtgatattgttggagcaagtaggaccagcgaaagtctctgtcaaaataatatggtgattcttaaactcttgagtgaagaagtatttgatttctctagtggacagataacccaagtcaaatctaagcatttaaaagacagcatgtgcaatgaattctcacagatatttcaactgtgtcagtttgtaatggaaaattctcaaaatgctccacttgtacatgcaaccttggaaacattgctcagatttctgaactggattcccctgggatatatttttgagaccaaattaatcagcacattgatttataagttcctgaatgttccaatgtttcgaaatgtctctctgaagtgcctcactgagattgctggtgtgagtgtaagccaatatgaagaacaatttgtaacactatttactctgacaatgatgcaactaaagcagatgcttcctttaaataccaatattcgacttgcgtactcaaatggaaaagatgatgaacagaacttcattcaaaatctcagtttgtttctctgcacctttcttaaggaacatgatcaacttatagaaaaaagattaaatctcagggaaactcttatggaggcccttcattatatgttgttggtatctgaagtagaagaaactgaaatctttaaaatttgtcttgaatactggaatcatttggctgctgaactctatagagagagtccattctctacatctgcctctccgttgctttctggaagtcaacattttgatgttcctcccaggagacagctatatttgcccatgttattcaaggtccgtttattaatggttagtcgaatggctaaaccagaggaagtattggttgtagagaatgatcaaggagaagttgtgagagaattcatgaaggatacagattccataaatttgtataagaatatgagggaaacattggtttatcttactcatctggattatgtagatacagaaagaataatgacagagaagcttcacaatcaagtgaatggtacagagtggtcatggaaaaatttgaatacattgtgttgggcaataggctccattagtggagcaatgcatgaagaggacgaaaaacgatttcttgttactgttataaaggatctattaggattatgtgaacagaaaagaggcaaagataataaagctattattgcatcaaatatcatgtacatagtaggtcaatacccacgttttttgagagctcactggaaatttctgaagactgtagttaacaagctgttcgaattcatgcatgagacccatgatggagtccaggatatggcttgtgatactttcattaaaatagcccaaaaatgccgcaggcatttcgttcaggttcaggttggagaagtgatgccatttattgatgaaattttgaacaacattaacactattatttgtgatcttcagcctcaacaggttcatacgttttatgaagctgtggggtacatgattggtgcacaaacagatcaaacagtacaagaacacttgatagaaaagtacatgttactccctaatcaagtgtgggatagtataatccagcaggcaaccaaaaatgtggatatactgaaagatcctgaaacagtcaagcagcttggtagcattttgaaaacaaatgtgagagcctgcaaagctgttggacacccctttgtaattcagcttggaagaatttatttagatatgcttaatgtatacaagtgcctcagtgaaaatatttctgcagctatccaagctaatggtgaaatggttacaaagcaaccattgattagaagtatgcgaactgtaaaaagggaaactttaaagttaatatctggttgggtgagccgatccaatgatccacagatggtcgctgaaaattttgttccccctctgttggatgcagttctcattgattatcagagaaatgtcccagctgctagagaaccagaagtgcttagtactatggccataattgtcaacaagttagggggacatataacagctgaaatacctcaaatatttgatgctgtttttgaatgcacattgaatatgataaataaggactttgaagaatatcctgaacatagaacgaactttttcttactacttcaggctgtcaattctcattgtttcccagcattccttgctattccacctacacagtttaaacttgttttggattccatcatttgggctttcaaacatactatgaggaatgtcgcagatacgggtaaataaaagatgttcttttattcatttgcctgccaatccaaaaatacaaatatagttaattgtacataggaaggtattacttgttcagagttttgagtgtgtgaattacatatatgaacatctgagaaaatcctataagcagtttaatcaactgttccactccactccaagtgagtccataggcagaattgagttatggggagagcggcctagtaataattggtttgcgtaatacaaagttctactgggtagtgatgttgtagaagttcatatagaatcagctgagctttcagaaatggtgaaagggtggtaatagtcataacttagattgtaatttttttcccataggcttttaaaaaatattcatgaggttctttttttatttcaatagtttttggggaacaggtggtttttggttacatgaataagttcttcagtggtgatttctgagattttggtgcacctgtcatgtgagcagtatgaactctactttatgtgtagtcttatccctcatgtgtatgaactccaccttatgtgtagtcttatccctcacccactcctgcccttccccacaagtccccaaagtccattatatgatctttatgcctttacatcttcacagtttagctctcacacaacttattataatttataagtaagccagcattggatatagttgtattccattattaatttaagaaaccttatgcaagtaattattagtcatcatcccaaaaaaaagggagaacagggttagattcagaatactttgataagagctaaatactatcatgagtgctgtcagtctgtagtaactttccattggtattctatgtcttttaggcttacagatactttttacactcttacaaaatgttgcacaagaagaagctgcagctcagagtttttatcaaacttatttttgtgatattctccagcatatcttttctgttgtgacagacacttcacatactgctggtaagaatttaatacgatttaaatgttaagtgccagctgggcacagggcctcacgcctataatcccagcactttgggaggtcgaggcggggagattatgaggtcaggagttcgagaacagcctggccaccatggtgaaactgtctgtactaaaaataccataaaaaaataaaagatacaataaaaatactgggcatggtggcatgtgattgcaatcccacctattcgggaggctgaggcaggagaatggcttggaccgaggaggcagaggttgcagtgaactaagattgcgccacggcattccagcttgggtgacagagcgagactccgtcta

SEQ ID NO: 346453 - DNA, 2478 bp, Homo sapiens
  misc_feature (2430)..(2430): n is a, c, g, or t
  misc_feature (2478)..(2478): n is a, c, g, or t
cacgaggctgaaacccaccttgattcgtcccctctcccccctccccaccttccctcgccctaatcccccaacgaggaaggaaggagcagttggttcaatctctggtaatctatgccagcaattatgacaatgttagcagaccatgcagctcgtcagctgcttgatttcagccaaaaactggatatcaacttattagataatgtggtgaattgcttataccatggagaaggagcccagcaaagaatggctcaagaagtactgacacatttaaaggagcatcctgatgcttggacaagagtcgacacaattttggaattttctcagaatatgaatacgaaatactatggactacaaattttggaaaatgtgataaaaacaaggtggaagattcttccaaggaaccagtgcgaaggaataaaaaaatacgttgttggcctcattatcaagacgtcatctgacccaacttgtgtagagaaagaaaaggtgtatatcggaaaattaaatatgatccttgttcagatactgaaacaagaatggcccaaacattggccaacttttatcagtgatattgttggagcaagtaggaccagcgaaagtctctgtcaaaataatatggtgattcttaaactcttgagtgaagaagtatttgatttctctagtggacagataacccaagtcaaatctaagcatttaaaagacagcatgtgcaatgaattctcacagatatttcaactgtgtcagtttgtaatggaaaattctcaaaatgctccacttgtacatgcaaccttggaaacattgctcagatttctgaactggattcccctgggatatatttttgagaccaaattaatcagcacattgatttataagttcctgaatgttccaatgtttcgaaatgtctctctgaagtgcctcactgagattgctggtgtgagtgtaagccaatatgaagaacaatttgtaacactatttactctgacaatgatgcaactaaagcagatgcttcctttaaataccaatattcgacttgcgtactcaaatggaaaagatgatgaacagaacttcattcaaaatctcagtttgtttctctgcacctttcttaaggaacatgatcaacttatagaaaaaagattaaatctcagggaaactcttatggaggcccttcattatatgttgttggtatctgaagtagaagaaactgaaatctttaaaatttgtcttgaatactggaatcatttggctgctgaactctatagagagagtccattctctacatctgcctctccgttgctttctggaagtcaacattttgatgttcctcccaggagacagctatatttgcccatgttattcaaggtccgtttattaatggttagtcgaatggctaaaccagaggaagtattggttgtagagaatgatcaaggagaagttgtgagagaattcatgaaggatacagattccataaatttgtataagaatatgagggaaacattggtttatcttactcatctggattatgtagatacagaaagaataatgacagagaagcttcacaatcaagtgaatggtacagagtggtcatggaaaaatttgaatacattgtgttgggcaataggctccattagtggagcaatgcatgaagaggacgaaaaacgatttcttgttactgttataaaggatctattaggattatgtgaacagaaaagaggcaaagataataaagctattattgcatcaaatatcatgtacatagtaggtcaatacccacgttttttgagagctcactggaaatttctgaagactgtagttaacaagctgttcgaattcatgcatgagacccatgatggagtccaggatatggcttgtgatactttcattaaaatagcccaaaaatgccgcaggcatttcgttcaggttcaggttggagaagtgatgccatttattgatgaaattttgaacaacattaacactattatttgtgatcttcagcctcaacaggttcatacgttttatgaagctgtggggtacatgattggtgcacaaacagatcaaacagtacaagaacacttgatagaaaagtacatgttactccctaatcaagtgtgggatagtataatccagcaggcaaccaaaaatgtggatatactgaaagatcctgaaacagtcaagcagcttggtagcattttgaaaacaaatgtgagagcctgcaaagctgttggacacccctttgtaattcagcttggaagaatttatttagatatgcttaatgtatacaagtgcctcagtgaaaatatttctgcagctatccaagctaatggtgaaatggttacaaagcaaccattgattagaagtatgcgaactgtaaaaagggaaactttaaagttaatatctggttgggtgagccgatccaatgatccacagatgcccttnaaatttggtcccccttgtggatcagtctatggtttcaaaaaaggcccn

SEQ ID NO: 346454 - DNA, 4363 bp, Homo sapiens
ggcgcgcgaggagggtggctgcctctggagcaggccgggagaagagaaaaggcggcggcccggctggggaagaggggcggaggaggcggttcggacggctgtgtggggtacggagcgtcgccgggacagagcggagcagctgggcacggcgtccagggcagctagggcctgggccgcggttcggccgcgccggccgagctggactggccattatggaggaggagctgcagcattcccattgtgtgaattgtgtcagtagacggtgcatgaccaggccagagccagggatttcctgtgatttgattggttgtccattggtttgtggtgcagttttccattcttgtaaagctgatgagcatcgacttttatgtccatttgaacgagtgccttgcttaaatagtgactttggatgtccatttaccatggcccgaaataaagttgctgaacatctagaaatgtgtcctgcaagtgtggtgtgctgtactatggaatggaatcgatggccagttagttatgcagaccggaaatcatatgaaaatctaagcagagatgtcgatgaagtggcacaattggatatggccttggctcttcaagaccaaaggatgctcttagaatccctcaaagtagccaccatgatgtcaaaagcaactgataaagtatccaaacctagagaacaaatctcagttaaatcaagtgtcccagaaataccacatgctaatggtttagtgtctgttgatgaagaatcttatggtgcactttatcaagctactgtagaaacaaccagaagtttggctgctgctttggatatcctgaatactgctacaagagacattggcatgttaaatacaagtgtcccaaatgacatggatgaacagcaaaatgcgagagaaagcttagaggatcaaaacttgaaagaccaagatcatctttatgaggaggaaataggagcagtaggtggaattgactacaatgacacaaatcagaatgcccagtctgaacaaaatggttcaagtgatttattatgtgacttgaatacaagttcttatgacacttctgctctttgtaatggctttcctttggaaaatatatgtacccaggtcatagaccagaatcagaatttacatggtgattcaaaacaaagtaacttaacaaatggagactgtgtggcatcatcagatggcacttcaaaaccttccagctcacttgcggtggcagcacaacttagggaaataataccatccagtgctttgcctaatggcacagttcagcatatcctcatgccagatgatgaaggtgaaggtgaattgtgttggaaaaaagtagacttaggggacatgaagaatgtggatgtcttatctttcagtcatgctccttcattcaattttctttctaattcatgttggtctaaaccaaaggaagataaagcagtagatacatcagatttggaagttgcagaagatcctatgggcctccaaggaatagatctgatcacagcagcattgcttttttgtctaggagattctccaggagggaggggtatatctgatagccgcatggctgatatttatcacattgacgttgggactcagactttttcacttccatctgcaatattagctacaagtacaatggttggggagatagcttcagcttcagcttgtgatcatgccaatccacagctttcaaatccaagtccgtttcagacacttgggctggatttagtattggaatgtgtcgctaggtaccaacccaagcagcgttcaatgtttacctttgtgtgtggacagttatttagaaggaaagaattttcttcccactttaagaatgtgcatggtgacattcatgctggactcaatggctggatggaacagaggtgccctttagcttactatggttgtacctattctcagcgtagattttgtccatcaatacaaggagcaaagattatacatgaccgccaattgaggtcatttggagttcagccatgtgtatctacagtattagtggagcctgctagaaactgtgtgttgggattacataatgaccatctaagtagtcttccttttgaggtcctgcagcatattgcaggctttctcgatggcttcagcttatgtcagctctcatgtgtatccaagttaatgagggatgtgtgtggcagcctgcttcagtctcgtggcatggtcatactgcagtgggggaaaaggaagtatccagaaggaaattcatcatggcagataaaagaaaaggtatggcgatttagtactgcattttgttctgttaatgaatggaaatttgctgacatcctaagcatggcagaccacttgaagaaatgcagttacaatgttgtcgagaaacgggaggaagcaatccctttgccatgtatgtgtgtgacacgagaactcactaaagaaggacgttcactacgctcagttttaaaacctgtactttaaaagttgtaatattactagcacatatatgcaagcacctagtataatttctttgtaatatgtgaaactttattaatgtattaaatattacaactagctaaatttattgtcactgtgtatataatgttttgaagtgacatctatttttataaagtactgtttagttggaaaaagttgccttaatgtttgaaatgtgtgaaatttttggaacttgctggacagggtgatttaatttttagctacataattttaagaattagtattttcagtggtgtgcatattttggttcttaaatttttgcttcttaaactaaaaaaatcctgaccaatttatttgttgttttctgtgggttgcgacccatgcaatcaaaaagcaaaattttgattgagattttttacagcataggtttttcatataaaaatattctgaatttgttaagcactgccataatatcattataatgtttttgtcttttagtgcttccctatacaattgttaatgcacaaatgatctctaatatatacttacatacgtaaaatcataaagtttggtaatgcagtttatcgttttaaaaataatccacaaagatgtttttatctcacatacttacaactcaacacacagagtgaccatgtgcagctttcttttttgttagatgccacatccgaagactcatcgcagtgtgttatatgacaggacaaagcaaaaacaaacaaaaagcaagcctgtgaatataatttaatttgaaactgctcctggtattatatatttgctagttatctaatgttttaaaagaaaatatacctcatttaggtttgaattgggcgtattgtgtaaatttcaaatattcagaatgcaaagggcttgactattaaatgtttgcctttgatgtttataaacattacaactatgttgttttaagacatttaaaaacgtgaaatttgttatctttgtaaaatgacaatcatgtagaaacctgtcttggttgacaatctctttgaaacatttccgagttaatttcccataggcttcaccaccaagaaagtaagaattgcatctttacataatgatcaaggtataatggaaaaatatacctattcttgaagtagtttattatagttttcaaattgatttataccattattaacctgatgtggtctgcttaaaaaatgaatatatcagtatttagaaataaattgcaaaggtgggaatatatacttaaataatttgtcttaagtaaattagcatttggtagtctgaaatggtgacagattacttgttaaaattgtgaaaactctgttgtgtcctctcttcctacatttgtccctgagagtactccacgattactaggttcttgattcccttatatggcaatcaggcagaggcgttccttaagcattagagagttctgaagcttaagatttgttttggttggatgaagtccttagtacagttgaaaaacagagcattaaagactaatcaattgttttgcctcaccagtcattttaaatagtagaatacttatttctcagtgcttaaaatttctttttcaactgtgagattgaataaacagtctctatttctgtggaaaaaacaacagaaaagagatattaaataccataaaatgtaactctgccttttaaagttttgctgaagaatgtgtctgtggttaggatagcacaagcattaacttttgttttatagttatgctttttaaaattcattgtttttaaatttagacttcttatttccacactggattatgagatacttaacaatttttccaccttatatttcttttacacattttgctgttctcttttttgttattgttatgccaccataccattttgttaaaatgttttctttgtgaaacatttgttcaagttctaataaaattaatgttttcccttaac

SEQ ID NO: 346455 - DNA, 2354 bp, Homo sapiens
ctactcaggaggctgtggcaggaggatcacttggggccaggagttcaaggctgcagtaggctataatcaccttactgtactctagcctgggcaacagagtgagacctccatctctaaaaaaataaagccaagtgggatgtgtgtggcagcctgcttcagtctcgtggcatggtcatactgcagtgggggaaaaggaagtatccagaaggaaattcatcatggcagataaaagaaaaggtatggcgatttagtactgcattttgttctgttaatgaatggaaatttgctgacatcctaagcatggcagaccacttgaagaaatgcagttacaatgttgtcgagaaacgggaggaagcaatccctttgccatgtatgtgtgtgacacgagaactcactaaagaaggacgttcactacgctcagttttaaaacctgtactttaaaagttgtaatattactagcacatatatgcaagcacctagtataatttctttgtaatatgtgaaactttattaatgtattaaatattacaactagctaaatttattgtcactgtgtatataatgttttgaagtgacatctatttttataaagtactgtttagttggaaaaagttgccttaatgtttgaaatgtgtgaaatttttggaacttgctggacagggtgatttaatttttagctacataattttaagaattagtattttcagtggtgtgcatattttggttcttaaatttttgcttcttaaactaaaaaaatcctgaccaatttatttgttgttttctgtgggttgcgacccatgcaatcaaaaagcaaaattttgattgagattttttacagcataggtttttcatataaaaatattctgaatttgttaagcactgccataatatcattataatgtttttgtcttttagtgcttccctatacaattgttaatgcacaaatgatctctaatatatacttacatacgtaaaatcataaagtttggtaatgcagtttatcgttttaaaaataatccacaaagatgtttttatctcacatacttacaactcaacacacagagtgaccatgtgcagctttcttttttgttagatgccacatccgaagactcatcgcagtgtgttatatgacaggacaaagcaaaaacaaacaaaaagcaagcctgtgaatataatttaatttgaaactgctcctggtattatatatttgctagttatctaatgttttaaaagaaaatatacctcatttaggtttgaattgggcgtattgtgtaaatttcaaatattcagaatgcaaagggcttgactattaaatgtttgcctttgatgtttataaacattacaactatgttgttttaagacatttaaaaacgtgaaatttgttatctttgtaaaatgacaatcatgtagaaacctgtcttggttgacaatctctttgaaacatttccgagttaatttcccataggcttcaccaccaagaaagtaagaattgcatctttacataatgatcaaggtataatggaaaaatatacctattcttgaagtagtttattatagttttcaaattgatttataccattattaacctgatgtggtctgcttaaaaaatgaatatatcagtatttagaaataaattgcaaaggtgggaatatatacttaaataatttgtcttaagtaaattagcatttggtagtctgaaatggtgacagattacttgttaaaattgtgaaaactctgttgtgtcctctcttcctacatttgtccctgagagtactccacgattactaggttcttgattcccttatatggcaatcaggcagaggcgttccttaagcattagagagttctgaagcttaagatttgttttggttggatgaagtccttagtacagttgaaaaacagagcattaaagactaatcaattgttttgcctcaccagtcattttaaatagtagaatacttatttctcagtgcttaaaatttctttttcaactgtgagattgaataaacagtctctatttctgtggaaaaaacaacagaaaagagatattaaataccataaaatgtaactctgccttttaaagttttgctgaagaatgtgtctgtggttaggatagcacaagcattaacttttgttttatagttatgctttttaaaattcattgtttttaaatttagacttcttatttccacactggattatgagatacttaacaatttttccaccttatatttcttttacacattttgctgttctcttttttgttattgttatgccaccataccattttgttaaaatgttttctttgtgaaacatttgttcaagttctaataaaattaatgttttcccttaac

SEQ ID NO: 346456 - DNA, 4372 bp, Homo sapiens
ggcgcgcgaggagggtggctgcctctggagcaggccgggagaagagaaaaggcggcggcccggctggggaagaggggcggaggaggcggttcggacggctgtgtggggtacggagcgtcgccgggacagagcggagcagctgggcacggcgtccagggcagctagggcctgggccgcggttcggccgcgccggccgagctggactggccattatggaggaggagctgcagcattcccattgtgtgaattgtgtcagtagacggtgcatgaccaggccagagccagggatttcctgtgatttgattggttgtccattggtttgtggtgcagttttccattcttgtaaagctgatgagcatcgacttttatgtccatttgaacgagtgccttgcttaaatagtgactttggatgtccatttaccatggcccgaaataaagttgctgaacatctagaaatgtgtcctgcaagtgtggtgtgctgtactatggaatggaatcgatggccagttagttatgcagaccggaaatcatatgaaaatctaagcagagatgtcgatgaagtggcacaattggatatggccttggctcttcaagaccaaaggatgctcttagaatccctcaaagtagccaccatgatgtcaaaagcaactgataaagtatccaaacctagagaacaaatctcagttaaatcaagtgtcccagaaataccacatgctaatggtttagtgtctgttgatgaagaatcttatggtgcactttatcaagctactgtagaaacaaccagaagtttggctgctgctttggatatcctgaatactgctacaagagacattggcatgttaaatacaagtgtcccaaatgacatggatgaacagcaaaatgcgagagaaagcttagaggatcaaaacttgaaagaccaagatcatctttatgaggaggaaataggagcagtaggtggaattgactacaatgacacaaatcagaatgcccagtctgaacaaaatggttcaagtgatttattatgtgacttgaatacaagttcttatgacacttctgctctttgtaatggctttcctttggaaaatatatgtacccaggtcatagaccagaatcagaatttacatggtgattcaaaacaaagtaacttaacaaatggagactgtgtggcatcatcagatggcacttcaaaaccttccagctcacttgcggtggcagcacaacttagggaaataataccatccagtgctttgcctaatggcacagttcagcatatcctcatgccagatgatgaaggtgaaggtgaattgtgttggaaaaaagtagacttaggggacatgaagaatgtggatgtcttatctttcagtcatgctccttcattcaattttctttctaattcatgttggtctaaaccaaaggaagataaagcagtagatacatcagatttggaagttgcagaagatcctatgggcctccaaggaatagatctgatcacagcagcattgcttttttgtctaggagattctccaggagggaggggtatatctgatagccgcatggctgatatttatcacattgacgttgggactcagactttttcacttccatctgcaatattagctacaagtacaatggttggggagatagcttcagcttcagcttgtgatcatgccaatccacagctttcaaatccaagtccgtttcagacacttgggctggatttagtattggaatgtgtcgctaggtaccaacccaagcagcgttcaatgtttacctttgtgtgtggacagttatttagaaggaaagaattttcttcccactttaagaatgtgcatggtgacattcatgctggactcaatggctggatggaacagaggtgccctttagcttactatggttgtacctattctcagcgtagattttgtccatcaatacaaggagcaaagattatacatgaccgccaattgaggtcatttggagttcagccatgtgtatctacagtattagtggagcctgctagaaactgtgtgttgggattacataatgaccatctaagtagtcttccttttgaggtcctgcagcatattgcaggctttctcgatggcttcagcttatgtcagctctcatgtgtatccaagttaatgagggatgtgtgtggcagcctgcttcagtctcgtggcatggtcatactgcagtgggggaaaaggaagtatccagaaggaaattcatcatggcagataaaagaaaaggtatggcgatttagtactgcattttgttctgttaatgaatggaaatttgctgacatcctaagcatggcagaccacttgaagaaatgcagttacaatgttgtcgagaaacgggaggaagcaatccctttgccatgtatgtgtgtgacacgagaactcactaaagaaggacgttcactacgctcagttttaaaacctgtactttaaaagttgtaatattactagcacatatatgcaagcacctagtataatttctttgtaatatgtgaaactttattaatgtattaaatattacaactagctaaatttattgtcactgtgtatataatgttttgaagtgacatctatttttataaagtactgtttagttggaaaaagttgccttaatgtttgaaatgtgtgaaatttttggaacttgctggacagggtgatttaatttttagctacataattttaagaattagtattttcagtggtgtgcatattttggttcttaaatttttgcttcttaaactaaaaaaatcctgaccaatttatttgttgttttctgtgggttgcgacccatgcaatcaaaaagcaaaattttgattgagattttttacagcataggtttttcatataaaaatattctgaatttgttaagcactgccataatatcattataatgtttttgtcttttagtgcttccctatacaattgttaatgcacaaatgatctctaatatatacttacatacgtaaaatcataaagtttggtaatgcagtttatcgttttaaaaataatccacaaagatgtttttatctcacatacttacaactcaacacacagagtgaccatgtgcagctttcttttttgttagatgccacatccgaagactcatcgcagtgtgttatatgacaggacaaagcaaaaacaaacaaaaagcaagcctgtgaatataatttaatttgaaactgctcctggtattatatatttgctagttatctaatgttttaaaagaaaatatacctcatttaggtttgaattgggcgtattgtgtaaatttcaaatattcagaatgcaaagggcttgactattaaatgtttgcctttgatgtttataaacattacaactatgttgttttaagacatttaaaaacgtgaaatttgttatctttgtaaaatgacaatcatgtagaaacctgtcttggttgacaatctctttgaaacatttccgagttaatttcccataggcttcaccaccaagaaagtaagaattgcatctttacataatgatcaaggtataatggaaaaatatacctattcttgaagtagtttattatagttttcaaattgatttataccattattaacctgatgtggtctgcttaaaaaatgaatatatcagtatttagaaataaattgcaaaggtgggaatatatacttaaataatttgtcttaagtaaattagcatttggtagtctgaaatggtgacagattacttgttaaaattgtgaaaactctgttgtgtcctctcttcctacatttgtccctgagagtactccacgattactaggttcttgattcccttatatggcaatcaggcagaggcgttccttaagcattagagagttctgaagcttaagatttgttttggttggatgaagtccttagtacagttgaaaaacagagcattaaagactaatcaattgttttgcctcaccagtcattttaaatagtagaatacttatttctcagtgcttaaaatttctttttcaactgtgagattgaataaacagtctctatttctgtggaaaaaacaacagaaaagagatattaaataccataaaatgtaactctgccttttaaagttttgctgaagaatgtgtctgtggttaggatagcacaagcattaacttttgttttatagttatgctttttaaaattcattgtttttaaatttagacttcttatttccacactggattatgagatacttaacaatttttccaccttatatttcttttacacattttgctgttctcttttttgttattgttatgccaccataccattttgttaaaatatggctcaataacttaaaaacgttcatttaaataaaattttaatacttgtttgacaaattcaaca

SEQ ID NO: 346457 - DNA, 4428 bp, Homo sapiens
ggcgcgcgaggagggtggctgcctctggagcaggccgggagaagagaaaaggcggcggcccggctggggaagaggggcggaggaggcggttcggacggctgtgtggggtacggagcgtcgccgggacagagcggagcagctgggcacggcgtccagggcagctagggcctgggccgcggttcggccgcgccggccgagctggactggccattatggaggaggagctgcagcattcccattgtgtgaattgtgtcagtagacggtgcatgaccaggccagagccagggatttcctgtgatttgattggttgtccattggtttgtggtgcagttttccattcttgtaaagctgatgagcatcgacttttatgtccatttgaacgagtgccttgcttaaatagtgactttggatgtccatttaccatggcccgaaataaagttgctgaacatctagaaatgtgtcctgcaagtgtggtgtgctgtactatggaatggaatcgatggccagttagttatgcagaccggaaatcatatgaaaatctaagcagagatgtcgatgaagtggcacaattggatatggccttggctcttcaagaccaaaggatgctcttagaatccctcaaagtagccaccatgatgtcaaaagcaactgataaagtatccaaacctagagaacaaatctcagttaaatcaagtgtcccagaaataccacatgctaatggtttagtgtctgttgatgaagaatcttatggtgcactttatcaagctactgtagaaacaaccagaagtttggctgctgctttggatatcctgaatactgctacaagagacattggcatgttaaatacaagtgtcccaaatgacatggatgaacagcaaaatgcgagagaaagcttagaggatcaaaacttgaaagaccaagatcatctttatgaggaggaaataggagcagtaggtggaattgactacaatgacacaaatcagaatgcccagtctgaacaaaatggttcaagtgatttattatgtgacttgaatacaagttcttatgacacttctgctctttgtaatggctttcctttggaaaatatatgtacccaggtcatagaccagaatcagaatttacatggtgattcaaaacaaagtaacttaacaaatggagactgtgtggcatcatcagatggcacttcaaaaccttccagctcacttgcggtggcagcacaacttagggaaataataccatccagtgctttgcctaatggcacagttcagcatatcctcatgccagatgatgaaggtgaaggtgaattgtgttggaaaaaagtagacttaggggacatgaagaatgtggatgtcttatctttcagtcatgctccttcattcaattttctttctaattcatgttggtctaaaccaaaggaagataaagcagtagatacatcagatttggaagttgcagaagatcctatgggcctccaaggaatagatctgatcacagcagcattgcttttttgtctaggagattctccaggagggaggggtatatctgatagccgcatggctgatatttatcacattgacgttgggactcagactttttcacttccatctgcaatattagctacaagtacaatggttggggagatagcttcagcttcagcttgtgatcatgccaatccacagctttcaaatccaagtccgtttcagacacttgggctggatttagtattggaatgtgtcgctaggtaccaacccaagcagcgttcaatgtttacctttgtgtgtggacagttatttagaaggaaagaattttcttcccactttaagaatgtgcatggtgacattcatgctggactcaatggctggatggaacagaggtgccctttagcttactatggttgtacctattctcagcgtagattttgtccatcaatacaaggagcaaagattatacatgaccgccaattgaggtcatttggagttcagccatgtgtatctacagtattagtggagcctgctagaaactgtgtgttgggattacataatgaccatctaagtagtcttccttttgaggtcctgcagcatattgcaggctttctcgatggcttcagcttatgtcagctctcatgtgtatccaagttaatgagggatgtgtgtggcagcctgcttcagtctcgtggcatggtcatactgcagtgggggaaaaggaagtatccagaaggaaattcatcatggcagataaaagaaaaggtatggcgatttagtactgcattttgttctgttaatgaatggaaatttgctgacatcctaagcatggcagaccacttgaagaaatgcagttacaatgttgtcgagaaacgggaggaagcaatccctttgccatgtatgtgtgtgacacgagaactcactaaagaaggacgttcactacgctcagttttaaaacctgtactttaaaagttgtaatattactagcacatatatgcaagcacctagtataatttctttgtaatatgtgaaactttattaatgtattaaatattacaactagctaaatttattgtcactgtgtatataatgttttgaagtgacatctatttttataaagtactgtttagttggaaaaagttgccttaatgtttgaaatgtgtgaaatttttggaacttgctggacagggtgatttaatttttagctacataattttaagaattagtattttcagtggtgtgcatattttggttcttaaatttttgcttcttaaactaaaaaaatcctgaccaatttatttgttgttttctgtgggttgcgacccatgcaatcaaaaagcaaaattttgattgagattttttacagcataggtttttcatataaaaatattctgaatttgttaagcactgccataatatcattataatgtttttgtcttttagtgcttccctatacaattgttaatgcacaaatgatctctaatatatacttacatacgtaaaatcataaagtttggtaatgcagtttatcgttttaaaaataatccacaaagatgtttttatctcacatacttacaactcaacacacagagtgaccatgtgcagctttcttttttgttagatgccacatccgaagactcatcgcagtgtgttatatgacaggacaaagcaaaaacaaacaaaaagcaagcctgtgaatataatttaatttgaaactgctcctggtattatatatttgctagttatctaatgttttaaaagaaaatatacctcatttaggtttgaattgggcgtattgtgtaaatttcaaatattcagaatgcaaagggcttgactattaaatgtttgcctttgatgtttataaacattacaactatgttgttttaagacatttaaaaacgtgaaatttgttatctttgtaaaatgacaatcatgtagaaacctgtcttggttgacaatctctttgaaacatttccgagttaatttcccataggcttcaccaccaagaaagtaagaattgcatctttacataatgatcaaggtataatggaaaaatatacctattcttgaagtagtttattatagttttcaaattgatttataccattattaacctgatgtggtctgcttaaaaaatgaatatatcagtatttagaaataaattgcaaaggtgggaatatatacttaaataatttgtcttaagtaaattagcatttggtagtctgaaatggtgacagattacttgttaaaattgtgaaaactctgttgtgtcctctcttcctacatttgtccctgagagtactccacgattactaggttcttgattcccttatatggcaatcaggcagaggcgttccttaagcattagagagttctgaagcttaagatttgttttggttggatgaagtccttagtacagttgaaaaacagagcattaaagactaatcaattgttttgcctcaccagtcattttaaatagtagaatacttatttctcagtgcttaaaatttctttttcaactgtgagattgaataaacagtctctatttctgtggaaaaaacaacagaaaagagatattaaataccataaaatgtaactctgccttttaaagttttgctgaagaatgtgtctgtggttaggatagcacaagcattaacttttgttttatagttatgctttttaaaattcattgtttttaaatttagacttcttatttccacactggattatgagatacttaacaatttttccaccttatatttcttttacacattttgctgttctcttttttgttattgttatgccaccataccattttgttaaaatgttttctttgtgaaacatttgttcaagttctaataaaattaatgttttcccttaacatggctcaataacttaaaaacgttcatttaaataaaattttaatacttgtttgacaaattcaaca

SEQ ID NO: 346458 - DNA, 4319 bp, Homo sapiens
ggcgcgcgaggagggtggctgcctctggagcaggccgggagaagagaaaaggcggcggcccggctggggaagaggggcggaggaggcggttcggacggctgtgtggggtacggagcgtcgccgggacagagcggagcagctgggcacggcgtccagggcagctagggcctgggccgcggttcggccgcgccggccgagctggactggccattatggaggaggagctgcagcattcccattgtgtgaattgtgtcagtagacggtgcatgaccaggccagagccagggatttcctgtgatttgattggttgtccattggtttgtggtgcagttttccattcttgtaaagctgatgagcatcgacttttatgtccatttgaacgagtgccttgcttaaatagtgactttggatgtccatttaccatggcccgaaataaagttgctgaacatctagaaatgtgtcctgcaagtgtggtgtgctgtactatggaatggaatcgatggccagttagttatgcagaccggaaatcatatgaaaatctaagcagagatgtcgatgaagtggcacaattggatatggccttggctcttcaagaccaaaggatgctcttagaatccctcaaagtagccaccatgatgtcaaaagcaactgataaagtatccaaacctagagaacaaatctcagttaaatcaagtgtcccagaaataccacatgctaatggtttagtgtctgttgatgaagaatcttatggtgcactttatcaagctactgtagaaacaaccagaagtttggctgctgctttggatatcctgaatactgctacaagagacattggcatgttaaatacaagtgtcccaaatgacatggatgaacagcaaaatgcgagagaaagcttagaggatcaaaacttgaaagaccaagatcatctttatgaggaggaaataggagcagtaggtggaattgactacaatgacacaaatcagaatgcccagtctgaacaaaatggttcaagtgatttattatgtgacttgaatacaagttcttatgacacttctgctctttgtaatggctttcctttggaaaatatatgtacccaggtcatagaccagaatcagaatttacatggtgattcaaaacaaagtaacttaacaaatggagactgtgtggcatcatcagatggcacttcaaaaccttccagctcacttgcggtggcagcacaacttagggaaataataccatccagtgctttgcctaatggcacagttcagcatatcctcatgccagatgatgaaggtgaaggtgaattgtgttggaaaaaagtagacttaggggacatgaagaatgtggatgtcttatctttcagtcatgctccttcattcaattttctttctaattcatgttggtctaaaccaaaggaagataaagcagtagatacatcagatttggaagttgcagaagatcctatgggcctccaaggaatagatctgatcacagcagcattgcttttttgtctaggagattctccaggagggaggggtatatctgatagccgcatggctgatatttatcacattgacgttgggactcagactttttcacttccatctgcaatattagctacaagtacaatggttggggagatagcttcagcttcagcttgtgatcatgccaatccacagctttcaaatccaagtccgtttcagacacttgggctggatttagtattggaatgtgtcgctaggtaccaacccaagcagcgttcaatgtttacctttgtgtgtggacagttatttagaaggaaagaattttcttcccactttaagaatgtgcatggtgacattcatgctggactcaatggctggatggaacagaggtgccctttagcttactatggttgtacctattctcagcgtagattttgtccatcaatacaaggagcaaagattatacatgaccgccaattgaggtcatttggagttcagccatgtgtatctacagtattagtggagcctgctagaaactgtgtgttgggattacataatgaccatctaagtagtcttccttttgaggtcctgcagcatattgcaggctttctcgatggcttcagcttatgtcagctctcatgtgtatccaagttaatgagggatgtgtgtggcagcctgcttcagtctcgtggcatggtcatactgcagtgggggaaaaggaagtatccagaaggaaattcatcatggcagataaaagaaaagatttgctgacatcctaagcatggcagaccacttgaagaaatgcagttacaatgttgtcgagaaacgggaggaagcaatccctttgccatgtatgtgtgtgacacgagaactcactaaagaaggacgttcactacgctcagttttaaaacctgtactttaaaagttgtaatattactagcacatatatgcaagcacctagtataatttctttgtaatatgtgaaactttattaatgtattaaatattacaactagctaaatttattgtcactgtgtatataatgttttgaagtgacatctatttttataaagtactgtttagttggaaaaagttgccttaatgtttgaaatgtgtgaaatttttggaacttgctggacagggtgatttaatttttagctacataattttaagaattagtattttcagtggtgtgcatattttggttcttaaatttttgcttcttaaactaaaaaaatcctgaccaatttatttgttgttttctgtgggttgcgacccatgcaatcaaaaagcaaaattttgattgagattttttacagcataggtttttcatataaaaatattctgaatttgttaagcactgccataatatcattataatgtttttgtcttttagtgcttccctatacaattgttaatgcacaaatgatctctaatatatacttacatacgtaaaatcataaagtttggtaatgcagtttatcgttttaaaaataatccacaaagatgtttttatctcacatacttacaactcaacacacagagtgaccatgtgcagctttcttttttgttagatgccacatccgaagactcatcgcagtgtgttatatgacaggacaaagcaaaaacaaacaaaaagcaagcctgtgaatataatttaatttgaaactgctcctggtattatatatttgctagttatctaatgttttaaaagaaaatatacctcatttaggtttgaattgggcgtattgtgtaaatttcaaatattcagaatgcaaagggcttgactattaaatgtttgcctttgatgtttataaacattacaactatgttgttttaagacatttaaaaacgtgaaatttgttatctttgtaaaatgacaatcatgtagaaacctgtcttggttgacaatctctttgaaacatttccgagttaatttcccataggcttcaccaccaagaaagtaagaattgcatctttacataatgatcaaggtataatggaaaaatatacctattcttgaagtagtttattatagttttcaaattgatttataccattattaacctgatgtggtctgcttaaaaaatgaatatatcagtatttagaaataaattgcaaaggtgggaatatatacttaaataatttgtcttaagtaaattagcatttggtagtctgaaatggtgacagattacttgttaaaattgtgaaaactctgttgtgtcctctcttcctacatttgtccctgagagtactccacgattactaggttcttgattcccttatatggcaatcaggcagaggcgttccttaagcattagagagttctgaagcttaagatttgttttggttggatgaagtccttagtacagttgaaaaacagagcattaaagactaatcaattgttttgcctcaccagtcattttaaatagtagaatacttatttctcagtgcttaaaatttctttttcaactgtgagattgaataaacagtctctatttctgtggaaaaaacaacagaaaagagatattaaataccataaaatgtaactctgccttttaaagttttgctgaagaatgtgtctgtggttaggatagcacaagcattaacttttgttttatagttatgctttttaaaattcattgtttttaaatttagacttcttatttccacactggattatgagatacttaacaatttttccaccttatatttcttttacacattttgctgttctcttttttgttattgttatgccaccataccattttgttaaaatgttttctttgtgaaacatttgttcaagttctaataaaattaatgttttcccttaac

SEQ ID NO: 346459 - DNA, 684 bp, Homo sapiens
aaataataaatatcatagtaatttagggaattgccatttctagttttacacttatgaaatatagcttaggaagtgaaagttaaatattagaacaaattctatgtcaagcaaattaagtaaacatctatgaagagactgaaaatggaatgtttttggaagtaaatagaaattgctaagcacctagcaataaagaattacaacaactcaaggaaatatgtttattagcaggatcatgaattaattgacccatttccggtacctctggtcataattggaagtaaatatgatgtttttcaggtaagctcttccgcttctagctgagtttgttgtacatatatggctgtgctttttatgagggaggtacaaaaataatatcaaaataagaaaaataattatttgaaggaatccggtttaagtcatgcatcttaaagattttggaaaagacatagttgggacagaaaaaaataggtaaagaaaataaatgcagtgattagaatggggataaggcagatttagaaaatgaatcttgccgggcacagtgcttatgccagtagtcccagcactttgggaggctgaagggggaggatcaattgagcccaggaatttgaggttacagtgagctgtaatcacaccactatactccagcctgggttacacagtgagacacttgtctcaaaaaaaaaa

SEQ ID NO: 346460 - DNA, 1397 bp, Homo sapiens
aacccagaaggcctcactcccagactccttgcggagctcgccgcctgattctaggctggtcactactccgagcctgtgacgtttgcggcagccaggccgtcgacgatgcccagtgaaactctctgggaaattgcaaaagctgaagtggaaaaaaggggaattaatggaagtgaaggtgatggagctgaaattgcagaaaaatttgttttcttcattggcagtaaaaatgggggaaagactactattattctaaggtgtcttgacagagatgaaccaccaaaaccaaccttagctttggaatatacatatggaagaagagcaaaagggcacaacacaccaaaagatatcgctcacttttgggaactcggtggaggaacctctttattggacttaatcagcatacccatcacaggtgacaccttacggacgttttctcttgttctcgttctggatctttcaaaacctaatgatctctggcccaccatggaaaatctcttgcaagccacaaaaagccatgtagacaaagtgataatgaaactgggaaagacaaatgctaaagcagtttctgaaatgagacagaagatctggaataatatgccgaaggatcatcctgatcatgaattaattgacccatttccggtacctctggtcataattggaagtaaatatgatgtttttcaggattttgagtctgagaagagaaaggtaatatgcaagacacttcgatttgttgcacattattatggagcatcattaatgtttaccagtaaatcagaagctctattactaaaaatacgtggagttatcaaccagttggcatttggcattgacaaaagcaaatcaatatgtgtggatcagaataaaccgctgtttatcacagcaggattggattctttcggtcaaataggatctcctcctgttcctgaaaatgacattggaaagcttcatgcccactcacctatggagttgtggaaaaaagtgtatgaaaagctctttccaccaaagagtattaacacgctgaaagatatcaaggaccctgcgagagatcctcagtatgctgaaaatgaagtcgatgagatgagaattcagaaggatctggaactggaacagtacaaaagaagttcttccaagtcttggaaacaaatcgagcttgattcttgaacctatttcaattattgtatatttatttcttcttttccaaatacaaataagattatactgtgaattaactattgtggcaatatgtgaagaaagttaaactgtataatttgttaaaggacaagctggatttcttggactagtgcatctccctgtatatcttgaagctttttaaaaggaaaaattattgtagaaccacgtgtaattttttttaaaataaaagaatcttctactaccta

SEQ ID NO: 346461 - DNA, 676 bp, Homo sapiens
aacccagaaggcctcactcccagactccttgcggagctcgccgcctgattctaggctggtcactactccgagcctgtgacgtttgcggcagccaggccgtcgacgatgcccagtgaaactctctgggaaattgcaaaagctgaagtggaaaaaaggggaattaatggaagtgaaggtgatggagctgaaattgcagaaaaatttgttttcttcattggcagtaaaaatgggggaaagactactattattctaaggtgtcttgacagagatgaaccaccaaaaccaaccttagctttggaatatacatatggaagaagagcaaaagggcacaacacaccaaaagatatcgctcacttttgggaactcggtggaggaacctctttattggacttaatcagcatacccatcacaggtgacaccttacgctcctggcaactatcatccctactgcctgtctctatgaatttgaccactccagtacctcatataaatgaaatcattcattatttgtccttttgttatttatttcatttagcataacgtcttcagggttcttccgtttgtagtatgtgtcaggatttccctcacttctaaggctaaataatgttccattgtgtaaacaaataccacagttcagttatccgttaatccatgcagaacatttgggttgttttca

SEQ ID NO: 346462 - DNA, 401 bp, Homo sapiens
aggattcattgatatatctaaaaaatgagaaggcagttttaaggtgcctccttgaattagtaaagttgatttttcttaaagtgatacatatttttgttttaggaactggaacagtacaaaagaagttcttccaagtcttggaaacaaatcgagcttgattcttgaacctatttcaattattgtatatttatttcttcttttccaaatacaaataagattatactgtgaattaactattgtggcaatatgtgaagaaagttaaactgtataatttgttaaaggacaagctggatttcttggactagtgcatctccctgtatatcttgaagctttttaaaaggaaaaattattgtagaaccacgtgtaattttttttaaaataaaagaatcttctactaccta

SEQ ID NO: 346463 - DNA, 826 bp, Homo sapiens
ccccttaaggtatattttagttattcttagataaatttcagtacattaggatttcaaaatggtaattattttgagtcttttttgaaaagtgtttttatttctttaggacgttttctcttgttctcgttctggatctttcaaaacctaatgatctctggcccaccatggaaaatctcttgcaagccacaaaaagccatgtagacaaagtgataatgaaactgggaaagacaaatgctaaagcagtttctgaaatgagacagaagatctggaataatatgccgaaggatcatcctgtgagttgctgtttgggattattactggaatccttagtcccatttatagttaatgataacatcacaaacaattctttagatttttatgcatgacttgaaattcatttgatgtagatgaacctgttcactggaaaattacagcaatttattaaaacctcagtaagagcaaaacaaggaagaagattccttatatcttcttgttagacatcttctgtgattgttatggcatattacaccaatcagagaaatagagttttaaagtagtggtttgatattgattttataatctctgtaaaaatgaagataaaaagccagattgtacaaaagtcacctgacaaagactagatgaagctacaactttaagcaaggggtagagttgtaatagccttcaccatcactctgtattttacattcatttcgtttctgtcacttattcagtatctttttatcatctgacagctaattaaattataaagttgctatgatggtaacacaagttcttcaaatacaataataaatatcatcatctggaa

SEQ ID NO: 346464 - DNA, 1559 bp, Homo sapiens
aacccagaaggcctcactcccagactccttgcggagctcgccgcctgattctaggctggtcactactccgagcctgtgacgtttgcggcagccaggccgtcgacgatgcccagtgaaactctctgggaaattgcaaaagctgaagtggaaaaaaggggaattaatggaagtgaaggtgatggagctgaaattgcagaaaaatttgttttcttcattggcagtaaaaatgggggaaagactactattattctaaggtgtcttgacagagatgaaccaccaaaaccaaccttagctttggaatatacatatggaagaagagcaaaagggcacaacacaccaaaagatatcgctcacttttgggaactcggtggaggaacctctttattggacttaatcagcatacccatcacaggtgacaccttacggacgttttctcttgttctcgttctggatctttcaaaacctaatgatctctggcccaccatggaaaatctcttgcaagccacaaaaagccatgtagacaaagtgataatgaaactgggaaagacaaatgctaaagcagtttctgaaatgagacagaagatctggaataatatgccgaaggatcatcctgatcatgaattaattgacccatttccggtacctctggtcataattggaagtaaatatgatgtttttcaggattttgagtctgagaagagaaaggtaatatgcaagacacttcgatttgttgcacattattatggagcatcattaatgtttaccagtaaatcagaagctctattactaaaaatacgtggagttatcaaccagttggcatttggcattgacaaaagcaaatcaatatgtgtggatcagaataaaccgctgtttatcacagcaggattggattctttcggtcaaataggatctcctcctgttcctgaaaatgacattggaaagcttcatgcccactcacctatggagttgtggaaaaaagtgtatgaaaagctctttccaccaaagagtattaacacgctgaaagatatcaaggaccctgcgagagatcctcagtatgctgaaaatgaagtcgatgagatgagaattcagaaggatctggtattatcctaaacatttacttaatttcatctgaaattttaacacaaaacctggggtgccttgggaattccttacatttttctctatgtatttacttagagtatcttctttactattaaaattatttaagtagtacatctatttaaataacacactaatagtatactgtagaaaaaataaaaatttgatatgaataaagaaaaatttttaaatcacctgtcatcccaccacccagacatgacttagtgttcacataaacctttttgattttccagttttcattatattaaagatgagtggtgattcttaaaaaaaaaaaagaaaagaaaaaaaacattgtggggcggcgcggcccagaaaagttttaaaaccattgggggggcgggcccgggtggacatgggcagtgggtcccagagaacgggcaaaaggggggttccccaaaaaaaggcggggacgggtt

SEQ ID NO: 346465 - DNA, 1345 bp, Homo sapiens
aacccagaaggcctcactcccagactccttgcggagctcgccgcctgattctaggctggtcactactccgagcctgtgacgtttgcggcagccaggccgtcgacgatgcccagtgaaactctctgggaaattgcaaaagctgaagtggaaaaaaggggaattaatggaagtgaaggtgatggagctgaaattgcagaaaaatttgttttcttcattggcagtaaaaatgggggaaagactactattattctaaggtgtcttgacagagatgaaccaccaaaaccaaccttagctttggaatatacatatggaagaagagcaaaagggcacaacacaccaaaagatatcgctcacttttgggaactcggtggaggaacctctttattggacttaatcagcatacccatcacaggtgacaccttacggacgttttctcttgttctcgttctggatctttcaaaacctaatgatctctggcccaccatggaaaatctcttgcaagccacacagtttctgaaatgagacagaagatctggaataatatgccgaaggatcatcctgatcatgaattaattgacccatttccggtacctctggtcataattggaagtaaatatgatgtttttcaggattttgagtctgagaagagaaaggtaatatgcaagacacttcgatttgttgcacattattatggagcatcattaatgtttaccagtaaatcagaagctctattactaaaaatacgtggagttatcaaccagttggcatttggcattgacaaaagcaaatcaatatgtgtggatcagaataaaccgctgtttatcacagcaggattggattctttcggtcaaataggatctcctcctgttcctgaaaatgacattggaaagcttcatgcccactcacctatggagttgtggaaaaaagtgtatgaaaagctctttccaccaaagagtattaacacgctgaaagatatcaaggaccctgcgagagatcctcagtatgctgaaaatgaagtcgatgagatgagaattcagaaggatctggaactggaacagtacaaaagaagttcttccaagtcttggaaacaaatcgagcttgattcttgaacctatttcaattattgtatatttatttcttcttttccaaatacaaataagattatactgtgaattaactattgtggcaatatgtgaagaaagttaaactgtataatttgttaaaggacaagctggatttcttggactagtgcatctccctgtatatcttgaagctttttaaaaggaaaaattattgtagaaccacgtgtaattttttttaaaataaaagaatcttctactaccta

SEQ ID NO: 346466 - DNA, 1279 bp, Homo sapiens
aacccagaaggcctcactcccagactccttgcggagctcgccgcctgattctaggctggtcactactccgagcctgtgacgtttgcggcagccaggccgtcgacgatgcccagggaaagactactattattctaaggtgtcttgacagagatgaaccaccaaaaccaaccttagctttggaatatacatatggaagaagagcaaaagggcacaacacaccaaaagatatcgctcacttttgggaactcggtggaggaacctctttattggacttaatcagcatacccatcacaggtgacaccttacggacgttttctcttgttctcgttctggatctttcaaaacctaatgatctctggcccaccatggaaaatctcttgcaagccacaaaaagccatgtagacaaagtgataatgaaactgggaaagacaaatgctaaagcagtttctgaaatgagacagaagatctggaataatatgccgaaggatcatcctgatcatgaattaattgacccatttccggtacctctggtcataattggaagtaaatatgatgtttttcaggattttgagtctgagaagagaaaggtaatatgcaagacacttcgatttgttgcacattattatggagcatcattaatgtttaccagtaaatcagaagctctattactaaaaatacgtggagttatcaaccagttggcatttggcattgacaaaagcaaatcaatatgtgtggatcagaataaaccgctgtttatcacagcaggattggattctttcggtcaaataggatctcctcctgttcctgaaaatgacattggaaagcttcatgcccactcacctatggagttgtggaaaaaagtgtatgaaaagctctttccaccaaagagtattaacacgctgaaagatatcaaggaccctgcgagagatcctcagtatgctgaaaatgaagtcgatgagatgagaattcagaaggatctggaactggaacagtacaaaagaagttcttccaagtcttggaaacaaatcgagcttgattcttgaacctatttcaattattgtatatttatttcttcttttccaaatacaaataagattatactgtgaattaactattgtggcaatatgtgaagaaagttaaactgtataatttgttaaaggacaagctggatttcttggactagtgcatctccctgtatatcttgaagctttttaaaaggaaaaattattgtagaaccacgtgtaattttttttaaaataaaagaatcttctactaccta

SEQ ID NO: 346467 - DNA, 728 bp, Homo sapiens
  misc_feature (13)..(13): n is a, c, g, or t
  misc_feature (16)..(17): n is a, c, g, or t
tgctaggctgtcnccnncgcgtatggctatgtcgacccagcgctcggtaagacactggactctgtgcacattattatggagcatcattactttaccagtaaatcagaagctctattactaaaaatacgtggagttatcaaccagttggcatttggcattgacaaaagcaaatcaatatgtgtggatcagaataaaccgctgtttatcacagcaggattggattctttcggtcaaataggatctcctcctgttcctgaaaatgacattggaaagcttcatgcccactcacctatggagttgtggaaaaaagtgtatgaaaagctctttccaccaaagagtattaacacgctgaaagatatcaaggaccctgcgagagatcctcagtatgctgaaaatgaagtcgatgagatgagaattcagaaggatctggaactggaacagtacaaaagaagttcttccaagtcttggaaacaaatcgagcttgattcttgaacctatttcaattattgtatatttatttcttcttttccaaatacaaataagattatactgtgaattaactattgtggcaatatgtgaagaaagttaaactgtataatttgttaaaggacaagctggatttcttggactagtgcatctccctgtatatcttgaagctttttaaaaggaaaaattattgtagaaccacgtgtaattttttttaaaataaaagaatcttctactaccta

SEQ ID NO: 346468 - DNA, 912 bp, Homo sapiens
gtgattatggtccatttgtgtgagtagctgaaatgatgagtacataaacacaagtcctttccacatcatgtactcattaagtttgaagaacgagttaaagttaccaagatttctttattcaggttttgttttgtctactcaaacagaagtatttgctgggcaacaaaacagtgattctctttgtaatctgtatttgttcaaagccatatttattttacctgtttctgtgattggaaaatagagcatgtaatttgttctcctgatttgtttaaagtttaccagtaaatcagaagctctattactaaaaatacgtggagttatcaaccagttggcatttggcattgacaaaagcaaatcaatatgtgtggatcagaataaaccgctgtttatcacagcaggattggattctttcggtcaaataggatctcctcctgttcctgaaaatgacattggaaagcttcatgcccactcacctatggagttgtggaaaaaagtgtatgaaaagctctttccaccaaagagtattaacacgctgaaagatatcaaggaccctgcgagagatcctcagtatgctgaaaatgaagtcgatgagatgagaattcagaaggatctggaactggaacagtacaaaagaagttcttccaagtcttggaaacaaatcgagcttgattcttgaacctatttcaattattgtatatttatttcttcttttccaaatacaaataagattatactgtgaattaactattgtggcaatatgtgaagaaagttaaactgtataatttgttaaaggacaagctggatttcttggactagtgcatctccctgtatatcttgaagctttttaaaaggaaaaattattgtagaaccacgtgtaattttttttaaaataaaagaatcttctactaccta

SEQ ID NO: 346469 - DNA, 986 bp, Homo sapiens
caaccaaaatgttacataacatttagtttgaggctggaataaaataatgataatattatactagctccctgatttcttttacttcctttcccacacttcagtagcttccctctactatcactttcttttactgatttgaaatggaattgaaaattttggtatgtatcttcttagccttgctacttctcttggttttgatttaaggtaatagggtctgtcactttttttcctataaaatgtttatttatgctatatgttaatttttgaaatcacttaaattgatagtcactcattcattcggggcaatgctctcattagtggctaaatgtaaaactagccgataatattgctgtcatatttacaggagagcgtggcagcaaatctaattgctaaactaatttagaatctttctcttctccacgtagcaaatcaatatgtgtggatcagaataaaccgctgtttatcacagcaggattggattctttcggtcaaataggatctcctcctgttcctgaaaatgacattggaaagcttcatgcccactcacctatggagttgtggaaaaaagtgtatgaaaagctctttccaccaaagagtattaacacgctgaaagatatcaaggaccctgcgagagatcctcagtatgctgaaaatgaagtcgatgagatgagaattcagaaggatctggaactggaacagtacaaaagaagttcttccaagtcttggaaacaaatcgagcttgattcttgaacctatttcaattattgtatatttatttcttcttttccaaatacaaataagattatactgtgaattaactattgtggcaatatgtgaagaaagttaaactgtataatttgttaaaggacaagctggatttcttggactagtgcatctccctgtatatcttgaagctttttaaaaggaaaaattattgtagaaccacgtgtaattttttttaaaataaaagaatcttctactaccta

SEQ ID NO: 346470 - DNA, 1068 bp, Homo sapiens
aacccagaaggcctcactcccagactccttgcggagctcgccgcctgattctaggctggtcactactccgagcctgtgacgtttgcggcagccaggccgtcgacgatgcccagtgaaactctctgggaaattgcaaaagctgaagtggaaaaaaggggaattaatggaagtgaaggtgatggagctgaaattgcagaaaaatttgttttcttcattggcagtaaaaatgggggaaagactactattattctaaggtgtcttgacagagatgaaccaccaaaaccaaccttagctttggaatatacatatggaagaagagcaaaagggcacaacacaccaaaagatatcgctcacttttgggaactcggtggaggaacctctttattggacttaatcagcatacccatcacaggtgacaccttacggacgttttctcttgttctcgttctggatctttcaaaacctaatgatctctggcccaccatggaaaatctcttgcaagccacaaaaagccatgtagacaaagtgataatgaaactgggaaagacaaatgctaaagcagtttctgaaatgagacagaagatctggaataatatgccgaaggatcatcctgatcatgaattaattgacccatttccggtacctctggtcataattggaagtaaatatgatgtttttcaggtaagctcttccgcttctagctgagtttgttgtacatatatggctgtgctttttatgagggaggtacaaaaataatatcaaaataagaaaaataattatttgaaggaatccggtttaagtcatgcatcttaaagattttggaaaagacatagttgggacagaaaaaaataggtaaagaaaataaatgcagtgattagaatggggataaggcagatttagaaaatgaatcttgccgggcacagtgcttatgccagtagtcccagcactttgggaggctgaagggggaggatcaattgagcccaggaatttgaggttacagtgagctgtaatcacaccactatactccagcctgggttacacagtgagacacttgtctcaaaaaaaaaa

SEQ ID NO: 346471 - DNA, 494 bp, Homo sapiens
tgattatggtccatttgtgtgagtagctgaaatgatgagtacataaacacaagtcctttccacatcatgtactcattaagtttgaagaacgagttaaagttaccaagatttctttattcaggttttgttttgtctactcaaacagaagtatttgctgggcaacaaaacagtgattctctttgtaatctgtatttgttcaaagccatatttattttacctgtttctgtgattggaaaatagagcatgtaatttgttctcctgatttgtttaaagtttaccagtaaatcagaagctctattactaaaaatacgtggagttatcaaccagttggcatttggcattgacaaaaggtactgctaagatattttttatatcatttattgagtgattgatttagccaatgttgtctcatctgattattgttctactcagtctcttgtgtcttgaccaggaaagtgacccagatggcttttcttaaagggataatttctttt

SEQ ID NO: 346472 - DNA, 1145 bp, Homo sapiens
aacccagaaggcctcactcccagactccttgcggagctcgccgcctgattctaggctggtcactactccgagcctgtgacgtttgcggcagccaggccgtcgacgatgcccagtgaaactctctgggaaattgcaaaagctgaagtggaaaaaaggggaattaatggaagtgaaggtgatggagctgaaattgcagaaaaatttgttttcttcattggcagtaaaaatgggggaaagactactattattctaaggtgtcttgacagagatgaaccaccaaaaccaaccttagctttggaatatacatatggaagaagagcaaaagggcacaacacaccaaaagatatcgctcacttttgggaactcggtggaggaacctctttattggacttaatcagcatacccatcacaggtgacaccttacggacgttttctcttgttctcgttctggatctttcaaaacctaatgatctctggcccaccatggaaaatctcttgcaagccacaaaaagccatgtagacaaagtgataatgaaactgggaaagacaaatgctaaagcagtttctgaaatgagacagaagatctggaataatatgccgaaggatcatcctgtgagttgctgtttgggattattactggaatccttagtcccatttatagttaatgataacatcacaaacaattctttagatttttatgcatgacttgaaattcatttgatgtagatgaacctgttcactggaaaattacagcaatttattaaaacctcagtaagagcaaaacaaggaagaagattccttatatcttcttgttagacatcttctgtgattgttatggcatattacaccaatcagagaaatagagttttaaagtagtggtttgatattgattttataatctctgtaaaaatgaagataaaaagccagattgtacaaaagtcacctgacaaagactagatgaagctacaactttaagcaaggggtagagttgtaatagccttcaccatcactctgtattttacattcatttcgtttctgtcacttattcagtatctttttatcatctgacagctaattaaattataaagttgctatgatggtaacacaagttcttcaaatacaataataaatatcatcatctggaa

SEQ ID NO: 346473 - DNA, 1407 bp, Homo sapiens
aacccagaaggcctcactcccagactccttgcggagctcgccgcctgattctaggctggtcactactccgagcctgtgacgtttgcggcagccaggccgtcgacgatgcccagtgaaactctctgggaaattgcaaaagctgaagtggaaaaaaggggaattaatggaagtgaaggtgatggagctgaaattgcagaaaaatttgttttcttcattggcagtaaaaatgggggaaagactactattattctaaggtgtcttgacagagatgaaccaccaaaaccaaccttagctttggaatatacatatggaagaagagcaaaagggcacaacacaccaaaagatatcgctcacttttgggaactcggtggaggaacctctttattggacttaatcagcatacccatcacaggtgacaccttacggacgttttctcttgttctcgttctggatctttcaaaacctaatgatctctggcccaccatggaaaatctcttgcaagccacaaaaagccatgtagacaaagtgataatgaaactgggaaagacaaatgctaaagcagtttctgaaatgagacagaagatctggaataatatgccgaaggatcatcctgatcatgaattaattgacccatttccggtacctctggtcataattggaagtaaatatgatgtttttcaggattttgagtctgagaagagaaaggtaatatgcaagacacttcgatttgttgcacattattatggagcatcattaatgtttaccagtaaatcagaagctctattactaaaaatacgtggagttatcaaccagttggcatttggcattgacaaaagcaaatcaatatgtgtggatcagaataaaccgctgtttatcacagcaggattggattctttcggtcaaataggatctcctcctgttcctgaaaatgacattggaaagcttcatgcccactcacctatggagttgtggaaaaaagtgtatgaaaagctctttccaccaaagagtattaacacgctgaaagatatcaaggaccctgcgagagatcctcagtatgctgaaaatgaagtcgatgagatgagaattcagaaggatctggtattatcctaaacatttacttaatttcatctgaaattttaacacaaaacctggggtgccttgggaattccttacatttttctctatgtatttacttagagtatcttctttactattaaaattatttaagtagtacatctatttaaataacacactaatagtatactgtagaaaaaataaaaatttgatatgaataaagaaaaatttttaaatcacctgtcatcccaccacccagacatgacttagtgttcacataaacctttttgattttccagttttcattatattaaagatgagtggtgattctta

SEQ ID NO: 346474 - DNA, 2062 bp, Homo sapiens
aacccagaaggcctcactcccagactccttgcggagctcgccgcctgattctaggctggtcactactccgagcctgtgacgtttgcggcagccaggccgtcgacgatgcccagtgaaactctctgggaaattgcaaaagctgaagtggaaaaaaggggaattaatggaagtgaaggtgatggagctgaaattgcagaaaaatttgttttcttcattggcagtaaaaatgggggaaagactactattattctaaggtgtcttgacagagatgaaccaccaaaaccaaccttagctttggaatatacatatggaagaagagcaaaagggcacaacacaccaaaagatatcgctcacttttgggaactcggtggaggaacctctttattggacttaatcagcatacccatcacaggtgacaccttacggacgttttctcttgttctcgttctggatctttcaaaacctaatgatctctggcccaccatggaaaatctcttgcaagccacaaaaagccatgtagacaaagtgataatgaaactgggaaagacaaatgctaaagcagtttctgaaatgagacagaagatctggaataatatgccgaaggatcatcctgatcatgaattaattgacccatttccggtacctctggtcataattggaagtaaatatgatgtttttcaggattttgagtctgagaagagaaaggtaatatgcaagacacttcgatttgttgcacattattatggagcatcattaatgtttaccagtaaatcagaagctctattactaaaaatacgtggagttatcaaccagttggcatttggcattgacaaaagcaaatcaatatgtgtggatcagaataaaccgctgtttatcacagcaggattggattctttcggtcaaataggatctcctcctgttcctgaaaatgacattggaaagcttcatgcccactcacctatggagttgtggaaaaaagtgtatgaaaagctctttccaccaaagagtattaacacgctgaaagatatcaaggaccctgcgagagatcctcagtatgctgaaaatgaagtcgatgagatgagaattcagaaggatctggtattatcctaaacatttacttaatttcatctgaaattttaacacaaaacctggggtgccttgggaattccttacatttttctctatgtatttacttagagtatcttctttactattaaaattatttaagtagtacatctatttaaataacacactaatagtatactgtagaaaaaataaaaatttgatatgaataaagaaaaatttttaaatcacctgtcatcccaccacccagacatgacttagtgttcacataaacctttttgattttccagttttcattatattaaagatgagtggtgattcttaccttgctgctggagagacattttcttaatagtctttggtttgtggaattacatgaagagctttgtttttgattaggacattcagacatacctatactttccttgtactagaaaacgtatcttgcccagttaaggactgaaagcacgatctgaaagcacacagacatacctgacataacccaggttctctcaggaaaatgcttaaaagtggacaccaccatcccatgtatcactagatagccccatttgaacacacaagtctgatgtaagaatgttaagagttggcaaattcaccatcactcaaatacttagatttttcttttctttttctttttcttttttttttaagacgagtctcacactgtcgcccaggctggagtgcagtggcatgacctcggctcactacaacctccgcctcccgggttcaagcaattctctgcttcagcctcctgagtggctgggattacaggtgcctgccaccacacctggctaattttttttgcttttttagtagaaacggggtttcaccatcttggccaggctggtcttgaactcctgacctcgtgatccatccgccttggcctcccaaagtgctgggattacaggcatgagccagtgcgcctggcctagatttttctaaaaacaaacaagcaaac

SEQ ID NO: 346475 - DNA, 1343 bp, Homo sapiens
aacccagaaggcctcactcccagactccttgcggagctcgccgcctgattctaggctggtcactactccgagcctgtgacgtttgcggcagccaggccgtcgacgatgcccagtgaaactctctgggaaattgcaaaagctgaagtggaaaaaaggggaattaatggaagtgaaggtgatggagctgaaattgcagaaaaatttgttttcttcattggcagtaaaaatgggggaaagactactattattctaaggtgtcttgacagagatgaaccaccaaaaccaaccttagctttggaatatacatatggaagaagagcaaaagggcacaacacattaatcagcatacccatcacaggtgacaccttacggacgttttctcttgttctcgttctggatctttcaaaacctaatgatctctggcccaccatggaaaatctcttgcaagccacaaaaagccatgtagacaaagtgataatgaaactgggaaagacaaatgctaaagcagtttctgaaatgagacagaagatctggaataatatgccgaaggatcatcctgatcatgaattaattgacccatttccggtacctctggtcataattggaagtaaatatgatgtttttcaggattttgagtctgagaagagaaaggtaatatgcaagacacttcgatttgttgcacattattatggagcatcattaatgtttaccagtaaatcagaagctctattactaaaaatacgtggagttatcaaccagttggcatttggcattgacaaaagcaaatcaatatgtgtggatcagaataaaccgctgtttatcacagcaggattggattctttcggtcaaataggatctcctcctgttcctgaaaatgacattggaaagcttcatgcccactcacctatggagttgtggaaaaaagtgtatgaaaagctctttccaccaaagagtattaacacgctgaaagatatcaaggaccctgcgagagatcctcagtatgctgaaaatgaagtcgatgagatgagaattcagaaggatctggaactggaacagtacaaaagaagttcttccaagtcttggaaacaaatcgagcttgattcttgaacctatttcaattattgtatatttatttcttcttttccaaatacaaataagattatactgtgaattaactattgtggcaatatgtgaagaaagttaaactgtataatttgttaaaggacaagctggatttcttggactagtgcatctccctgtatatcttgaagctttttaaaaggaaaaattattgtagaaccacgtgtaattttttttaaaataaaagaatcttctactaccta

SEQ ID NO: 346476 - DNA, 1013 bp, Homo sapiens
aaataataaatatcatagtaatttagggaattgccatttctagttttacacttatgaaatatagcttaggaagtgaaagttaaatattagaacaaattctatgtcaagcaaattaagtaaacatctatgaagagactgaaaatggaatgtttttggaagtaaatagaaattgctaagcacctagcaataaagaattacaacaactcaaggaaatatgtttattagcaggatcatgaattaattgacccatttccggtacctctggtcataattggaagtaaatatgatgtttttcaggattttgagtctgagaagagaaaggtaatatgcaagacacttcgatttgttgcacattattatggagcatcattaatgtttaccagtaaatcagaagctctattactaaaaatacgtggagttatcaaccagttggcatttggcattgacaaaagcaaatcaatatgtgtggatcagaataaaccgctgtttatcacagcaggattggattctttcggtcaaataggatctcctcctgttcctgaaaatgacattggaaagcttcatgcccactcacctatggagttgtggaaaaaagtgtatgaaaagctctttccaccaaagagtattaacacgctgaaagatatcaaggaccctgcgagagatcctcagtatgctgaaaatgaagtcgatgagatgagaattcagaaggatctggaactggaacagtacaaaagaagttcttccaagtcttggaaacaaatcgagcttgattcttgaacctatttcaattattgtatatttatttcttcttttccaaatacaaataagattatactgtgaattaactattgtggcaatatgtgaagaaagttaaactgtataatttgttaaaggacaagctggatttcttggactagtgcatctccctgtatatcttgaagctttttaaaaggaaaaattattgtagaaccacgtgtaattttttttaaaataaaagaatcttctactaccta

SEQ ID NO: 346477 - DNA, 899 bp, Homo sapiens
aacccagaaggcctcactcccagactccttgcggagctcgccgcctgattctaggctggtcactactccgagcctgtgacgtttgcggcagccaggccgtcgacgatgcccagtgaaactctctgggaaattgcaaaagctgaagtggaaaaaaggggaattaatggaagtgaaggtgatggagctgaaattgcagaaaaatttgttttcttcattggcagtaaaaatgggggaaagactactattattctaaggtgtcttgacagagatgaaccaccaaaaccaaccttagctttggaatatacatatggaagaagagcaaaagggcacaacacaccaaaagatatcgctcacttttgggaactcggtggaggaacctctttattggacttaatcagcatacccatcacaggtgacaccttacggacgttttctcttgttctcgttctggatctttcaaaacctaatgatctctggcccaccatggaaaatctcttgcaagccacaagtattaacacgctgaaagatatcaaggaccctgcgagagatcctcagtatgctgaaaatgaagtcgatgagatgagaattcagaaggatctggaactggaacagtacaaaagaagttcttccaagtcttggaaacaaatcgagcttgattcttgaacctatttcaattattgtatatttatttcttcttttccaaatacaaataagattatactgtgaattaactattgtggcaatatgtgaagaaagttaaactgtataatttgttaaaggacaagctggatttcttggactagtgcatctccctgtatatcttgaagctttttaaaaggaaaaattattgtagaaccacgtgtaattttttttaaaataaaagaatcttctactaccta

SEQ ID NO: 346478 - DNA, 2753 bp, Homo sapiens
gaacccgcgacggccgccacgcgccccggtccattgtttcgcttatctgggttccaggcaggtgcgggcggcgcgcggggtccgcacgtgtcaccccggcggctggggcgccgggacccgcgggcgccggcaggggcgttcccgggcgcgcggcggcgatgaagcacctgaagcggtggtggtcggccggcggcggcctcctgcacctcaccctcctgctgagcttggcggggctccgcgtagacctagatctttacctgctgctgccgccgcccaccctgctgcaggacgagctgctgttcctgggcggcccggccagctccgcctacgcgctcagccccttctcggcctcgggagggtgggggcgcgcgggccacttgcaccccaagggccgggagctggaccctgccgcgccgcccgagggccagctgctccgggaggtgcgcgcgctcggggtccccttcgtccctcgcaccagcgtggatgcatggctggtgcacagcgtggctgccgggagcgcggacgaggcccacgggctgctcggcgccgccgccgcctcgtccaccggaggagccggcgccagcgtggacggcggcagccaggctgtgcaggggggcggcggggacccccgagcggctcggagtggccccttggacgccggggaagaggagaaggcacccgcggaaccgacggctcaggtgccggacgctggcggatgtgcgagcgaggagaatggggtactaagagaaaagcacgaagctgtggatcatagttcccagcatgaggaaaatgaagaaagggtgtcagcccagaaggagaactcacttcagcagaatgatgatgatgaaaacaaaatagcagagaaacctgactgggaggcagaaaagaccactgaatctagaaatgagagacatctgaatgggacagatacttctttctctctggaagacttattccagttgctttcatcacagcctgaaaattcactggagggcatctcattgggagatattcctcttccaggcagtatcagtgatggcatgaattcttcagcacattatcatgtaaacttcagccaggctataagtcaggatgtgaatcttcatgaggccatcttgctttgtcccaacaatacatttagaagagatccaacagcaaggacttcacagtcacaagaaccatttctgcagttaaattctcataccaccaatcctgagcaaacccttcctggaactaatttgacaggatttctttcaccggttgacaatcatatgaggaatctaacaagccaagacctactgtatgaccttgacataaatatatttgatgagataaacttaatgtcattggccacagaagacaactttgatccaatcgatgtttctcagctttttgatgaaccagattctgattctggcctttctttagattcaagtcacaataatacctctgtcatcaagtctaattcctctcactctgtgtgtgatgaaggtgctataggttattgcactgaccatgaatctagttcccatcatgacttagaaggtgctgtaggtggctactacccagaacccagtaagctttgtcacttggatcaaagtgattctgatttccatggagatcttacatttcaacacgtatttcataaccacacttaccacttacagccaactgcaccagaatctacttctgaaccttttccgtggcctgggaagtcacagaagataaggagtagataccttgaagacacagatagaaacttgagccgtgatgaacagcgtgctaaagctttgcatatccctttttctgtagatgaaattgtcggcatgcctgttgattctttcaatagcatgttaagtagatattatctgacagacctacaagtctcacttatccgtgacatcagacgaagagggaaaaataaagttgctgcgcagaactgtcgtaaacgcaaattggacataattttgaatttagaagatgatgtatgtaacttgcaagcaaagaaggaaactcttaagagagagcaagcacaatgtaacaaagctattaacataatgaaacagaaactgcatgacctttatcatgatatttttagtagattaagagatgaccaaggtaggccagtcaatcccaaccactatgctctccagtgtacccatgatggaagtatcttgatagtacccaaagaactggtggcctcaggccacaaaaaggaaacccaaaagggaaagagaaagtgagaagaaactgaagatggactctattatgtgaagtagtaatgttcagaaactgattatttggatcagaaaccattgaaactgcttcaagaattgtatctttaagtactgctacttgaataactcagttaacgctgttttgaagcttacatggacaaatgtttaggacttcaagatcacacttgtgggcaatctgggggagccacaacttttcatgaagtgcattgtatacaaaattcatagttatgtccaaagaataggttaacatgaaaacccagtaagactttccatcttggcagccatcctttttaagagtaagttggttacttcaaaaagagcaaacactggggatcaaattattttaagaggtatttcagttttaaatgcaaaatagccttattttcatttagtttgttagcactatagtgagcttttcaaacactattttaatctttatatttaacttataaattttgctttctatggaaataaattttgtatttgtattaaaaa

SEQ ID NO: 346479 - DNA, 832 bp, Homo sapiens
aaggttttcagtgtatcaaagggacacctgcacccccatgtttattgcagcaatattcacaatagccttgtagttttagcgcttagaggcatttaaacagcctctctcctccagactacttcactgtagtttattatccctgaccctccacaatgtgattaccaaccgctaggatgagttgcatcttattataaagtagcaaattacaagattgtaacattagactttttaagaaaatccagtcagcttttatactaatccatcttaatttctaggttactcagaattccaggtattctgatttggactcacatctcgtattgtattgcctgtatttaactaggaagttactgccaacagcatctatctctattaaatgtagaggaattgacaaaagaggggaaagaaagttgttaggtaatagaactgcttcagaaatagggctattcatgtttgaagtgtttctccttcgtttttcagggcatctcattgggagatattcctcttccaggcagtatcagtgatggcatgaattcttcagcacattatcatgtaaacttcagccaggctataagtcaggatgtgaatcttcatgaggccatcttgctttgtcccaacaatacatttagaagagatccaacagcaaggacttcacagtcacaagaaccatttctgcagttaaattctcataccaccaatcctgagcaaacccttcctggaactaatttgacagtaggtcttggcttgttagattcctcatatgattgtcaaccggtgaaagaaatcctgtcaaattagttccaggaagggtttctttcaccggttgacaatc

SEQ ID NO: 346480 - DNA, 3106 bp, Homo sapiens
  misc_feature (3106)..(3106): n is a, c, g, or t
gaacccgcgacggccgccacgcgccccggtccattgtttcgcttatctgggttccaggcaggtgcgggcggcgcgcggggtccgcacgtgtcaccccggcggctggggcgccgggacccgcgggcgccggcaggggcgttcccgggcgcgcggcggcgatgaagcacctgaagcggtggtggtcggccggcggcggcctcctgcacctcaccctcctgctgagcttggcggggctccgcgtagacctagatctttacctgctgctgccgccgcccaccctgctgcaggacgagctgctgttcctgggcggcccggccagctccgcctacgcgctcagccccttctcggcctcgggagggtgggggcgcgcgggccacttgcaccccaagggccgggagctggaccctgccgcgccgcccgagggccagctgctccgggaggtgcgcgcgctcggggtccccttcgtccctcgcaccagcgtggatgcatggctggtgcacagcgtggctgccgggagcgcggacgaggcccacgggctgctcggcgccgccgccgcctcgtccaccggaggagccggcgccagcgtggacggcggcagccaggctgtgcaggggggcggcggggacccccgagcggctcggagtggccccttggacgccggggaagaggagaaggcacccgcggaaccgacggctcaggtgccggacgctggcggatgtgcgagcgaggagaatggggtactaagagaaaagcacgaagctgtggatcatagttcccagcatgaggaaaatgaagaaagggtgtcagcccagaaggagaactcacttcagcagaatgatgatgatgaaaacaaaatagcagagaaacctgactgggaggcagaaaagaccactgaatctagaaatgagagacatctgaatgggacagatacttctttctctctggaagacttattccagttgctttcatcacagcctgaaaattcactggagggcatctcattgggagatattcctcttccaggcagtatcagtgatggcatgaattcttcagcacattatcatgtaaacttcagccaggctataagtcaggatgtgaatcttcatgaggccatcttgctttgtcccaacaatacatttagaagagatccaacagcaaggacttcacagtcacaagaaccatttctgcagttaaattctcataccaccaatcctgagcaaacccttcctggaactaatttgacaggatttctttcaccggttgacaatcatatgaggaatctaacaagccaagacctactgtatgaccttgacataaatatatttgatgagataaacttaatgtcattggccacagaagacaactttgatccaatcgatgtttctcagctttttgatgaaccagattctgattctggcctttctttagattcaagtcacaataatacctctgtcatcaagtctaattcctctcactctgtgtgtgatgaaggtgctataggttattgcactgaccatgaatctagttcccatcatgacttagaaggtgctgtaggtggctactacccagaacccagtaagctttgtcacttggatcaaagtgattctgatttccatggagatcttacatttcaacacgtatttcataaccacacttaccacttacagccaactgcaccagaatctacttctgaaccttttccgtggcctgggaagtcacagaagataaggagtagataccttgaagacacagatagaaacttgagccgtgatgaacagcgtgctaaagctttgcatatccctttttctgtagatgaaattgtcggcatgcctgttgattctttcaatagcatgttaagtagatattatctgacagacctacaagtctcacttatccgtgacatcagacgaagagggaaaaataaagttgctgcgcagaactgtcgtaaacgcaaattggacataattttgaatttagaagatgatgtatgtaacttgcaagcaaagaaggaaactcttaagagagagcaagcacaatgtaacaaagctattaacataatgaaacagaaactgcatgacctttatcatgatatttttagtagattaagagatgaccaaggtaggccagtcaatcccaaccactatgctctccagtgtacccatgatggaagtatcttgatagtacccaaagaactggtggcctcaggccacaaaaaggaaacccaaaagggaaagagaaagtgagaagaaactgaagatggactctattatgtgaagtagtaatgttcagaaactgattatttggatcagaaaccattgaaactgcttcaagaattgtatctttaagtactgctacttgaataactcagttaacgctgttttgaagcttacatggacaaatgtttaggacttcaagatcacacttgtgggcaatctgggggagccacaacttttcatgaagtgcattgtatacaaaattcatagttatgtccaaagaataggttaacatgaaaacccagtaagactttccatcttggcagccatcctttttaagagtaagttggttacttcaaaaagagcaaacactggggatcaaattattttaagaggtatttcagttttaaatgcaaaatagccttattttcatttagtttgttagcactatagtgagcttttcaaacactattttaatctttatatttaacttataaattttgctttctatggaaataaattttgtatttgtattaaaaaaaaaaaaaaaaaaaaaaaaaaaaaaaaaaaaaaaaaaaaaaaaaaaaaggggggggcgcaaaaagatacagccacggagagggccccacagatgagaggctcccacacgcagttcttcggtcacaaagagggcccccaatcataggcgactcaatgaacaaacgcaagcaccgaggccgcagcttaacaaaacgacggcaacagtgggaaaaacaaggaagccgggggacacactccggaaaagagcaaacccccaactgagacggacaacaactgggagcagaccaccccagcacaagaagtgagagcccacgcggaatagaacagatctcgggctacaaggcgtgaacaan

SEQ ID NO: 346481 - DNA, 2025 bp, Homo sapiens
gaacccgcgacggccgccacgcgccccggtccattgtttcgcttatctgggttccaggcaggtgcgggcggcgcgcggggtccgcacgtgtcaccccggcggctggggcgccgggacccgcgggcgccggcaggggcgttcccgggcgcgcggcggcgatgaagcacctgaagcggtggtggtcggccggcggcggcctcctgcacctcaccctcctgctgagcttggcggggctccgcgtagacctagatctttacctgctgctgccgccgcccaccctgctgcaggacgagctgctgttcctgggcggcccggccagctccgcctacgcgctcagccccttctcggcctcgggagggtgggggcgcgcgggccacttgcaccccaagggccgggagctggaccctgccgcgccgcccgagggccagctgctccgggaggtgcgcgcgctcggggtccccttcgtccctcgcaccagcgtggatgcatggctggtgcacagcgtggctgccgggagcgcggacgaggcccacgggctgctcggcgccgccgccgcctcgtccaccggaggagccggcgccagcgtggacggcggcagccaggctgtgcaggggggcggcggggacccccgagcggctcggagtggccccttggacgccggggaagaggagaaggcacccgcggaaccgacggctcaggtgccggacgctggcggatgtgcgagcgaggagaatggggtactaagagaaaagcacgaagctgtggatcatagttcccagcatgaggaaaatgaagaaagggtgtcagcccagaaggagaactcacttcagcagaatgatgatgatgaaaacaaaatagcagagaaacctgactgggaggcagaaaagaccactgaatctagaaatgagagacatctgaatgggacagatacttctttctctctggaagacttattccagttgctttcatcacagcctgaaaattcactggagggcatctcattgggagatattcctcttccaggcagtatcagtgatggcatgaattcttcagcacattatcatgtaaacttcagccaggctataagtcaggatgtgaatcttcatgaggccatcttgctttgtcccaacaatacatttagaagagatccaacagcaaggacttcacagtcacaagaaccatttctgcagttaaattctcataccaccaatcctgagcaaacccttcctggaactaatttgacaggatttctttcaccggttgacaatcatatgaggaatctaacaagccaagacctactgtatgaccttgacataaatatatttgatgagataaacttaatgtcattggccacagaagacaactttgatccaatcgatgtttctcagctttttgatgaaccagattctgattctggcctttctttagattcaagtcacaataatacctctgtcatcaagtctaattcctctcactctgtgtgtgatgaaggtgctataggttattgcactgaccatgaatctagttcccatcatgacttagaaggtgctgtaggtggctactacccagaacccagtaagctttgtcacttggatcaaagtgattctgatttccatggagatcttacatttcaacacgtatttcataaccacacttaccacttacagccaactgcaccagaatctacttctgaaccttttccgtggcctgggaagtcacagaagataaggagtagataccttgaagacacagatagaaacttgagccgtgatgaacagcgtgctaaagctttgcatatccctttttctgtagatgaaattgtcggcatgcctgttgattctttcaatagcatgttaagtagatattatctgacagacctacaagtctcacttatccgtgacatcagacgaagagggaaaaataaagttgctgcgcagaacttcccgggccagcatccaccacatcaaacccactgagcactgggatacaggatccagctcacccgctccccaaccacagtcagga

SEQ ID NO: 346482 - DNA, 1083 bp, Homo sapiens
gaacccgcgacggccgccacgcgccccggtccattgtttcgcttatctgggttccaggcaggtgcgggcggcgcgcggggtccgcacgtgtcaccccggcggctggggcgccgggacccgcgggcgccggcaggggcgttcccgggcgcgcggcggcgatgaagcacctgaagcggtggtggtcggccggcggcggcctcctgcacctcaccctcctgctgagcttggcggggctccgcgtagacctagatctttacctgctgctgccgccgcccaccctgctgcaggacgagctgctgttcctgggcggcccggccagctccgcctacgcgctcagccccttctcggcctcgggagggtgggggcgcgcgggccacttgcaccccaagggccgggagctggaccctgccgcgccgcccgagggccagctgctccgggaggtgcgcgcgctcggggtccccttcgtccctcgcaccagcgtggatgcatggctggtgcacagcgtggctgccgggagcgcggacgaggcccacgggctgctcggcgccgccgccgcctcgtccaccggaggagccggcgccagcgtggacggcggcagccaggctgtgcaggggggcggcggggacccccgagcggctcggagtggccccttggacgccggggaagaggagaaggcacccgcggaaccgacggctcaggtgccggacgctggcggatgtgcgagcgaggagaatggggtactaagagaaaagcacgaagctgtggatcatagttcccagcatgaggaaaatgaagaaagggtgtcagcccagaaggagaactcacttcagcagaatgatgatgatgaaaacaaaatagcagagaaacctgactgggaggcagaaaagaccactgaatctagaaatgagagacatctgaatgggacagatacttctttctctctggaagacttattccagttgctttcatcacagcctgaaaattcactggaggtaattggaactttggcttttatcctcgcaggaacatatctgcactgaccttttggtgaacaaatacaactcctttacttggatgacacag

SEQ ID NO: 346483 - DNA, 2780 bp, Homo sapiens
gaacccgcgacggccgccacgcgccccggtccattgtttcgcttatctgggttccaggcaggtgcgggcggcgcgcggggtccgcacgtgtcaccccggcggctggggcgccgggacccgcgggcgccggcaggggcgttcccgggcgcgcggcggcgatgaagcacctgaagcggtggtggtcggccggcggcggcctcctgcacctcaccctcctgctgagcttggcggggctccgcgtagacctagatctttacctgctgctgccgccgcccaccctgctgcaggacgagctgctgttcctgggcggcccggccagctccgcctacgcgctcagccccttctcggcctcgggagggtgggggcgcgcgggccacttgcaccccaagggccgggagctggaccctgccgcgccgcccgagggccagctgctccgggaggtgcgcgcgctcggggtccccttcgtccctcgcaccagcgtggatgcatggctggtgcacagcgtggctgccgggagcgcggacgaggcccacgggctgctcggcgccgccgccgcctcgtccaccggaggagccggcgccagcgtggacggcggcagccaggctgtgcaggggggcggcggggacccccgagcggctcggagtggccccttggacgccggggaagaggagaaggcacccgcggaaccgacggctcaggtgccggacgctggcggatgtgcgagcgaggagaatggggtactaagagaaaagcacgaagctgtggatcatagttcccagcatgaggaaaatgaagaaagggtgtcagcccagaaggagaactcacttcagcagaatgatgatgatgaaaacaaaatagcagagaaacctgactgggaggcagaaaagaccactgaatctagaaatgagagacatctgaatgggacagatacttctttctctctggaagacttattccagttgctttcatcacagcctgaaaattcactggagggcatctcattgggagatattcctcttccaggcagtatcagtgatggcatgaattcttcagcacattatcatgtaaacttcagccaggctataagtcaggatgtgaatcttcatgaggccatcttgctttgtcccaacaatacatttagaagagatccaacagcaaggacttcacagtcacaagaaccatttctgcagttaaattctcataccaccaatcctgagcaaacccttcctggaactaatttgacaggatttctttcaccggttgacaatcatatgaggaatctaacaagccaagacctactgtatgaccttgacataaatatatttgatgagataaacttaatgtcattggccacagaagacaactttgatccaatcgatgtttctcagctttttgatgaaccagattctgattctggcctttctttagattcaagtcacaataatacctctgtcatcaagtctaattcctctcactctgtgtgtgatgaaggtgctataggttattgcactgaccatgaatctagttcccatcatgacttagaaggtgctgtaggtggctactacccagaacccagtaagctttgtcacttggatcaaagtgattctgatttccatggagatcttacatttcaacacgtatttcataaccacacttaccacttacagccaactgcaccagaatctacttctgaaccttttccgtggcctgggaagtcacagaagataaggagtagataccttgaagacacagatagaaacttgagccgtgatgaacagcgtgctaaagctttgcatatccctttttctgtagatgaaattgtcggcatgcctgttgattctttcaatagcatgttaagtagatattatctgacagacctacaagtctcacttatccgtgacatcagacgaagagggaaaaataaagttgctgcgcagaactgtcgtaaacgcaaattggacataattttgaatttagaagatgatgtatgtaacttgcaagcaaagaaggaaactcttaagagagagcaagcacaatgtaacaaagctattaacataatgaaacagaaactgcatgacctttatcatgatatttttagtagattaagagatgaccaaggtaggccagtcaatcccaaccactatgctctccagtgtacccatgatggaagtatcttgatagtacccaaagaactggtggcctcaggccacaaaaaggaaacccaaaagggaaagagaaagtgagaagaaactgaagatggactctattatgtgaagtagtaatgttcagaaactgattatttggatcagaaaccattgaaactgcttcaagaattgtatctttaagtactgctacttgaataactcagttaacgctgttttgaagcttacatggacaaatgtttaggacttcaagatcacacttgtgggcaatctgggggagccacaacttttcatgaagtgcattgtatacaaaattcatagttatgtccaaagaataggttaacatgaaaacccagtaagactttccatcttggcagccatcctttttaagagtaagttggttacttcaaaaagagcaaacactggggatcaaattattttaagaggtatttcagttttaaatgcaaaatagccttattttcatttagtttgttagcactatagtgagcttttcaaacactattttaatctttatatttaacttataaattttgctttctatggaaataaattttgtatttgtattaaaaattaacttttcccttttatacagaaaaa

SEQ ID NO: 346484 - DNA, 2268 bp, Homo sapiens
aaggttttcagtgtatcaaagggacacctgcacccccatgtttattgcagcaatattcacaatagccttgtagttttagcgcttagaggcatttaaacagcctctctcctccagactacttcactgtagtttattatccctgaccctccacaatgtgattaccaaccgctaggatgagttgcatcttattataaagtagcaaattacaagattgtaacattagactttttaagaaaatccagtcagcttttatactaatccatcttaatttctaggttactcagaattccaggtattctgatttggactcacatctcgtattgtattgcctgtatttaactaggaagttactgccaacagcatctatctctattaaatgtagaggaattgacaaaagaggggaaagaaagttgttaggtaatagaactgcttcagaaatagggctattcatgtttgaagtgtttctccttcgtttttcagggcatctcattgggagatattcctcttccaggcagtatcagtgatggcatgaattcttcagcacattatcatgtaaacttcagccaggctataagtcaggatgtgaatcttcatgaggccatcttgctttgtcccaacaatacatttagaagagatccaacagcaaggacttcacagtcacaagaaccatttctgcagttaaattctcataccaccaatcctgagcaaacccttcctggaactaatttgacaggatttctttcaccggttgacaatcatatgaggaatctaacaagccaagacctactgtatgaccttgacataaatatatttgatgagataaacttaatgtcattggccacagaagacaactttgatccaatcgatgtttctcagctttttgatgaaccagattctgattctggcctttctttagattcaagtcacaataatacctctgtcatcaagtctaattcctctcactctgtgtgtgatgaaggtgctataggttattgcactgaccatgaatctagttcccatcatgacttagaaggtgctgtaggtggctactacccagaacccagtaagctttgtcacttggatcaaagtgattctgatttccatggagatcttacatttcaacacgtatttcataaccacacttaccacttacagccaactgcaccagaatctacttctgaaccttttccgtggcctgggaagtcacagaagataaggagtagataccttgaagacacagatagaaacttgagccgtgatgaacagcgtgctaaagctttgcatatccctttttctgtagatgaaattgtcggcatgcctgttgattctttcaatagcatgttaagtagatattatctgacagacctacaagtctcacttatccgtgacatcagacgaagagggaaaaataaagttgctgcgcagaactgtcgtaaacgcaaattggacataattttgaatttagaagatgatgtatgtaacttgcaagcaaagaaggaaactcttaagagagagcaagcacaatgtaacaaagctattaacataatgaaacagaaactgcatgacctttatcatgatatttttagtagattaagagatgaccaaggtaggccagtcaatcccaaccactatgctctccagtgtacccatgatggaagtatcttgatagtacccaaagaactggtggcctcaggccacaaaaaggaaacccaaaagggaaagagaaagtgagaagaaactgaagatggactctattatgtgaagtagtaatgttcagaaactgattatttggatcagaaaccattgaaactgcttcaagaattgtatctttaagtactgctacttgaataactcagttaacgctgttttgaagcttacatggacaaatgtttaggacttcaagatcacacttgtgggcaatctgggggagccacaacttttcatgaagtgcattgtatacaaaattcatagttatgtccaaagaataggttaacatgaaaacccagtaagactttccatcttggcagccatcctttttaagagtaagttggttacttcaaaaagagcaaacactggggatcaaattattttaagaggtatttcagttttaaatgcaaaatagccttattttcatttagtttgttagcactatagtgagcttttcaaacactattttaatctttatatttaacttataaattttgctttctatggaaataaattttgtatttgtattaaaaattaacttttcccttttatacagaaaaa

SEQ ID NO: 346485 - DNA, 2300 bp, Homo sapiens
gaacccgcgacggccgccacgcgccccggtccattgtttcgcttatctgggttccaggcaggtgcgggcggcgcgcggggtccgcacgtgtcaccccggcggctggggcgccgggacccgcgggcgccggcaggggcgttcccgggcgcgcggcggcgatgaagcacctgaagcggtggtggtcggccggcggcggcctcctgcacctcaccctcctgctgagcttggcggggctccgcgtagacctagatctttacctgctgctgccgccgcccaccctgctgcaggacgagctgctgttcctgggcggcccggccagctccgcctacgcgctcagccccttctcggcctcgggagggtgggggcgcgcgggccacttgcaccccaagggccgggagctggaccctgccgcgccgcccgagggccagctgctccgggaggtgcgcgcgctcggggtccccttcgtccctcgcaccagcgtggatgcatggctggtgcacagcgtggctgccgggagcgcggacgaggcccacgggctgctcggcgccgccgccgcctcgtccaccggaggagccggcgccagcgtggacggcggcagccaggctgtgcaggggggcggcggggacccccgagcggctcggagtggccccttggacgccggggaagaggagaaggcacccgcggaaccgacggctcaggtgccggacgctggcggatgtgcgagcgaggagaatggggtactaagagaaaagcacgaagctgtggatcatagttcccagcatgaggaaaatgaagaaagggtgtcagcccagaaggagaactcacttcagcagaatgatgatgatgaaaacaaaatagcagagaaacctgactgggaggcagaaaagaccactgaatctagaaatgagagacatctgaatgggacagatacttctttctctctggaagacttattccagttgctttcatcacagcctgaaaattcactggagggcatctcattgggagatattcctcttccaggcagtatcagtgatggcatgaattcttcagcacattatcatgtaaacttcagccaggctataagtcaggatgtgaatcttcatgaggccatcttgctttgtcccaacaatacatttagaagagatccaacagcaaggacttcacagtcacaagaaccatttctgcagttaaattctcataccaccaatcctgagcaaacccttcctggaactaatttgacaggatttctttcaccggttgacaatcatatgaggaatctaacaagccaagacctactgtatgaccttgacataaatatatttgatgagataaacttaatgtcattggccacagaagacaactttgatccaatcgatgtttctcagctttttgatgaaccagattctgattctggcctttctttagattcaagtcacaataatacctctgtcatcaagtctaattcctctcactctgtgtgtgatgaaggtgctataggttattgcactgaccatgaatctagttcccatcatgacttagaaggtgctgtaggtggctactacccagaacccagtaagctttgtcacttggatcaaagtgattctgatttccatggagatcttacatttcaacacgtatttcataaccacacttaccacttacagccaactgcaccagaatctacttctgaaccttttccgtggcctgggaagtcacagaagataaggagtagataccttgaagacacagatagaaacttgagccgtgatgaacagcgtgctaaagctttgcatatccctttttctgtagatgaaattgtcggcatgcctgttgattctttcaatagcatgttaagtagatattatctgacagacctacaagtctcacttatccgtgacatcagacgaagagggaaaaataaagttgctgcgcagaactgtcgtaaacgcaaattggacataattttgaatttagaagatgatgtatgtaacttgcaagcaaagaaggaaactcttaagagagagcaagcacaatgtaacaaaaggttaacatgaaaacccagtaagactttccatcttggcagccatcctttttaagagtaagttggttacttcaaaaagagcaaacactggggatcaaattattttaagaggtatttcagttttaaatgcaaaatagccttattttcatttagtttgttagcactatagtgagcttttcaaacactattttaatctttatatttaacttataaattttgctttctatggaaataaattttgtatttgtattaaaaa

SEQ ID NO: 346486 - DNA, 1799 bp, Homo sapiens
  misc_feature (1644)..(1644): n is a, c, g, or t
  misc_feature (1648)..(1648): n is a, c, g, or t
gccctacgtgtgcaatctgtgcggcaagtccttccgggggagctcgcacctgattcgccatcagaagattcattctggggagaagctatagaaagaggagcccacacaaagcttgaaagcctgtgccagatggagcctttattccacgtcgcgtggtctccaagaccccacctacctccctgatgctgaatggaaaccttcccacctaagcgctcttgaacatcccactagcaggaaggccctgtgtggccctgggccaagcacgccagctctcagcaggttttctgcatggaagggaaggtggggtgatagggagggcagccagaaaagacagctggccttcagtttctccttcttgcatttgactcccaagcctacaggatttcattttgccctgtcttcacatttcccagaatctagaagaataaatgccaagagggagaaagttgaattaaacccaggaaaatatcagaagaactctttaaaacaggctgcagtctggcacttttagaagacagaaaccacactcacagtccaaagcagtagaagaaaaatgaattcaaaagtagatgtgtcagcagcaaagtagaattttctcactgcgttgggcattggtggggacaaccaaaacaggtctgcagagcaaaggcaggtctggagggtgggtcttgagattggggatgagggtggtgagcccctgggcgtggcctcttaaccctctccttagccctagggcagtttccctcagacagctctgttacaggaggatagagatttgatcctgttggccagaggatgtttgacacccagccgtgactcagcctggacaccggacatgactgccctccaggaataacccctccctgagacatagtgtccccaagaccacagtgtgccttggacatcagcagggcctgggtctggtctgttctggcaatgatgcagccctcctgccccagtgtcaggggacctgggaagctgggtggcttgttggaggaggctgtgttctaatcagaaggtctgggttcaagtcctagttccaccccctcctacctgggtgagcttgaacaagtcctgtaacttccccaggctccattcccccatccaagagttggggtaatgggaactggccacgtgcctctaagggttggtgccaggctgtcattcagaacacagccactgtgaaagtgctttggcaactgtgagcagtcatggtgactgaggacagagacccagagtgacccctgccccacccctgtgcatttccacggactggagagatgttcccgtctggtttctgagcagtgggacctctcattgaacagggctttctctccctccaccccttgcagcctgggctgtgtatgcctgcggatgcagtgtcccacacaaggacacttcctctaggatgccatcctgagcctcctgtagcagcagtgtcattctgcacttccacattctgtctgtcttccccgcctgccaactaggagttcacgtggggcttgtttaaacagtaccattgcttgtgtcccacctggaccagttcagtcagccccagtggtggcatgttttaaagctccccaggtgattataacttcctagtgtgcagccaggctgtgggccctgtgcttgggcttttttganatgngtgtgcctggcgcaggtgatgaggggagactagtagaaagcagaacgggtaagaatcctgtttccccggacgcgccaagtggcaacgggaaattcctcgcacgctaccggacagaaaatagctacctccaggggaaaaccgcacgagacac

SEQ ID NO: 346487 - DNA, 859 bp, Homo sapiens
gaggtggaggttgcaggtagctgtgattgtgccaccacactcctgcctgggcaagagagtgagactctcaaaaagaaaacataatagtatcatctaacacatattgtggttagtatattaaaagcactattctaagtgcttacccacattaactcttaatcttcacaaccatcccattggaatattatccatgttatatagaatgtatctgcttataaaactttacaattagattcattatttaagagaaagaagcaaagtcacaatttcactcttgaaaacagtagtaattgtcctagaaacaaacagccctttaccaaatagtttacagtggtcataggcagtaatattttgctgattttgtcctttaccctctggctctgaactcattttatcttattctatggtgagttttcagttgaattccgaccactctcttaccttctgcctgcagaaggacatcacagaacacatcactctgctgctggtgatgaagctgcagaaaagctaacctgaggaaccgggggttcctgtataggattttgggactggcaggagagcacatgttggcaagagtcttaacaaaccttctaggttttcacagatcagactcctgtaggtgagataatacatttcagaggcatggttacatctaatttgttttttgtctttgaaatggcaggggaattttgaaagtgagagataatagtatgagttgaggaaacatcagcccagaaattgtgccaaggatatctcaagaaagaaaattatcatagtggttacatgtgggagctcagagataagcctaggtttgggtcttggctctatttattagcctggctgtataatctcacacagg

SEQ ID NO: 346488 - DNA, 297 bp, Homo sapiens
aggcagaggttgcagtgagccgagactgcacgactgcactccagcctgggtgacagagcaagactccgtctcaaaaaaaaaaagagttgggcatatttgccttctgtcactgcctcaagcagtgggcacatcttttttctttttcttggtctaaaaactgaaaaatgactaaaacaaatagaaaaaaaaatagaacaagggtttattttatattctctggcattttccttagctgtgtgtatgccactcttttgtattcacccatccttatcttttcttccattatgtagacttaca

SEQ ID NO: 346489 - DNA, 1679 bp, Homo sapiens
attcagccctggaggtgccatcccgggccgcgactccgctccaggcaggacccccaacccgcccagcccgctccgccttgcgccccggacccgcggccgaccccagacccgctgcccgcttcgcgcccgaggcctgcgccccgacggacgcccgtgcccagcttgccacgcccacgcccggcgccccgaccgcggaggactccccgaggtgccggcggagggggtggctcgcggctcaggctgcccccgacgtgcccggctcaccgccccctcccctgcagccccgcccgccatggcccggatcccgacggccgccctgggttgcatcagcctcctctgcctgcagctccctggctcgctgtcccgcagcctgggcggggacccgcgacccgtcaaacccagggagcccccagcccggagcccttccagcagcctgcagcccaggcaccccgcaccccgacctgtggtctggaagcttcaccgggccctccaggcacagaggggtgccggcctggcccctgttatgggtcagcctctccgggatggtggccgccaacactcgggcccccgcaggacccaagcccagctcctgcgagtgggctgcgtgctgggcacctgccaggtgcagaatctcagccaccgcctgtggcaactcatgggaccggccggccggcaggactcagctcctgtggaccccagcagcccccacagctatggctgaggtggggccgggccacacccctgcccatcccagccagggtgctgtgcccccgtccagagctgcagctgagccccatctgaagcccagtccctcggagctgcagacagcaggtcctgcagcaacaatacctgcacggctttgcacacgtaaacctaggctggtctacacgcagtgctggtacgtcaaggagcctaaacaccctgaaattgtgaccccctgggggacagctgccagacacagctggcggcagcaccagatgctaagcgcttcagagaggaggtgtctgcccagagatgtggagcagaagctgggccctgaacacacggggccatgtctggacgagcaggggagagaggctgaactggccagaagtggcccctccgctgctggtccagtcagactgaagcccggccttgtgcctgggctgttcctgccctcatgcacaaccagcccttccacgtgcctgcctgtgggacaggagggggagcgtgggatgctgtagcccccggggttgggcaagggaaggatggtggccctccagaggtcatgaagggacctctgtggctccagctgccaaccctggagcccagaccgaggtggccatggagactccacctggatcccctgtaggaggccagggaggggaactcagcagttcaggagccaccccaaaccattctgggacagggacacccctttctaccccagggcagggcagggctgggtggggcaagatcccccagcccgactagacccacctcacctgaagggggtgagacccttgttggcagccagacaagggtggggctccacaggcagcacaggcgccccaccaccacccagtttggggacccagtgggaccaggtgcgggggcagagggtgacttaccaagagccagggagggcagcccaggcccaagtgacagcaagaacaagaaccactgccggcgtgcacaga

SEQ ID NO: 346490 - DNA, 358 bp, Homo sapiens
tccgcctcatgacttcttggctggtacttttgttctaattcgtactgagcaggaattgactacatgtagattaaaaccttccgtatgtccccaaatcccccagaacaaaaaaccaacaaaaaagctgggcgcagtggctcacgcctgtaaccagcactttttgagaggttgaggctggcagatcatgaggtcaggagttcaagaccagcctggccaacatggtgaaaccccatctctactaaaaatacaaaacttagccaggtgtggtggcacatgcctgtaatcccagctgctggagaggctgaggcaggagaatagcttgaacccaggagacagaggttgcagtgagccaagattg

SEQ ID NO: 346491 - DNA, 428 bp, Homo sapiens
aaggactttggacaacaatttctttgactgaaactggggtcagagttgcagactccctggaacatgaaaagtcaataatctagttcccaaaaggcagacaagaaactattcccaagatgaacaaatgatgagaatagaggtaaaggtgaaaatgatgctttgatgcctgaaggtacaacaaacatctcatgactatgaggggatgaaaatggataccaaggataccaagatgatggaacaaaaagaattgatttggaacatgacggcactatggattcatcgtattggacctctgtgatataattctgaacttttcatataagactaatatacccctacttgtttaatacaactgtagagttatctgctacttgcagccaaatgtaatcctaactaatataggcaataaatcatgtttttatatcact

SEQ ID NO: 346492 - DNA, 312 bp, Homo sapiens
ctccaaaatcttctgggtctcatcttgtgaacatgcagaaatagcacagtccttttgaaactgtgatcactgaaggaacaattgggggttttacttttgtttccgttaacggaggggtaaattttatttaatagaggtttggggacttgcctagagtcacacagacaattccaagactgaaacacaaacatttctgttctatccaggacactaactttcaaaattcttttaaaatatagacttcttattcatcatttagtcaaccgcctagctgtaaaggtaattttttttttggcaagagtaaattaatct

SEQ ID NO: 346493 - DNA, 501 bp, Homo sapiens
gtctacataaaatgctatattaatttttcccaatgaatattttagcatgacactaatgtatgaagttggttctcctccctcttagcaaggtactgcaacccactattgactatgttaaagtctaaaaataaagaagataataaaggtaataaaatggtgattaccttcttcaagttgcttagaagtctgaagaggcaccaactcttacaaactaaattttcactttggctgactcagtctcatttcttaattttttctttacatcaccccacctcccagccttatgcctcatcacttactacctactgatcagtttaatgggcctcagaaaggctatggaaatcctaaaatgcagagtcatttacaaacttccctcacatgagccctccaatccctatgggtgcactggaatatccattttgttggtgatttatgggttagaaagagcccttaattgcttcactagcatggacttctctgtgaccaagaaaaaataaaaaa

SEQ ID NO: 346494 - DNA, 475 bp, Homo sapiens
tacattagtgtccatattctcatgaaactcatctttgttatttaacttgttttcttgaaatctgatctattagaacaagattttccatttgagttatttcttaaatcaagtttttttctctaatgtgtttcttatttgaggatttatttttcttaaatacaacctatttatgtcttattaagacttgcctactttgggccgggcacagtggctcaggcctgtaatcccagcactttgggaggccgaggcgggcagatcatgaggtcaggagatggagaccatcctggctaacatggtgaaaccctgtctctactaaaaatacaaaaaattagccaggcgtggtggcgggcgcctgtagtcccagctactcgggaggctgatgtaggagaatggcatgaacctgggaggcagagcttacagtgagctgagatcgtgccactacagtccagcctgggtgacagagtgagactccgtc

SEQ ID NO: 346495 - DNA, 464 bp, Homo sapiens
ggctaatttttttttgtactttttttgtagagatagggtttcatcgtgttgcctaggctggtctcgaactcctgggctcaagcagtcagcccaccttggggtcccaaagtgctaagattagaggtgtgaggcactgtccccagctgaggcaacccttttcactctggtatatttcacggatcagtcattgaatgttttttctgagtggtgtcttgcattatctgccctcttttcttatcctgctaccacttggctgatatgcgggcatttgtcattttggaaaatgcgccgtcatgacttcttcctgattggactggatttatctaccattcagttgctctctttccctgggccagcctctccacctgtaaaggtcagtgggtacttcaggttctttgggtcctgtacactcgatgacataatgttacctccctcctcactgcccttcacccagctgcttgagg

SEQ ID NO: 346496 - DNA, 1583 bp, Homo sapiens
cagcaatgcataagttgaatttgaaattaaaaacacaataccattttacattagcgtgtcccaaaatgaaatatttaagtacagatctaacaaaattagtacaagatatatgaggaaaaatgttttagaactctgatgaaagaaatcaaataactaaataatgaagagctattccatgacccgtgagagacaactcaatattgacagaaaaagtcagatggacactactgatttcaagatttactgtaaagctacagtagtcaagatggtgtggtactgacaaaagaactgacaaaacagaccaacgaaacagaatagagagcccagaaatggacccacatagtcaaaggagcaatggcagtatttgacaaagaggcaaaggcaatacaatgaagaaaatagtctttttcaataaacagtggtaataactgaacatccacatgcaaaaaaaaaaaagagtctagacacaggtcttacacccttcacaaaaataaactcaaaataaaccagagaattaaatgtaaaactcaaaactataaaactcctagaggataacataagaaaaaatctagatcttgggtttggtgatgacttttagatacggcaccaaaggtaccaaccatgaagaaaagaactgataagccagacttcattaaaattgtctacttgtttcttaaaaattgttgtcttttgcaaaagacaatgtcaagagtatgaaaagacaagccacagatagggaggaaatatttacataagacacatctgataaagaactattaactaaaatgtgtaaggaggctgggtgtggtggctcacatcccagcactttgggaggccaaggtgggtggatcacctgaggtcaggaggtcgagaccagcctggctaacatagtgaaaccccgtgtctactaaaaatacaaaaattagccaggtgtggtggtgcacgggtataaacccagctactcgggaggctgacgcaggagaatcacttgaacccaggtggcagaggttgcagggagccaagactgtgccactgtactgcaacctgggtgacagagcgaggctctgtctcaacagacagacagacagacagacaagacagacagagacagtgtaaggaactcttaaaattccacaagaaaacaaacaacccaattaaaaaattggccaacaaccttaacagacacctcaccaaagatatacagatggcaattcagcatatgaaaagatgtcccacacatcatatggcatcagagaaacacaaattaaaattataagatacctctacacacctatcagaatggacaaaattcagaacactgataacaccaaatactggtgaagatgtagagcaaaagaaacactcactcattgctggtgaaaaatgtaaaaggatagcgtcatattagaagacagtttggatgtttcctacaaaactaaacacttttaccataagatccagcaattgcactccctagtatttacagaaagtcgctgaaaacctaagtccacacaaaaacctgcacaccgatatctacagcagttttattcataattagcaaaatgtggaagcaaccacaatgt

SEQ ID NO: 346497 - DNA, 556 bp, Homo sapiens
tgcagtggtgcaatgttggctcactgcaacctctgcctcctgggttcaagagattctcgtgcctcagcctcctgagtagctgggattacaggtgcgtgccaccaagcccggctgattttttgtatttttttttagtagagacggggtttcaccatgttggccaggctggtctccaactcctggcccactctggcctcccaaagtgctgggattacaggcataagccactgtgcctggccatttttctttattcttatgtattgttttgttaagtacagatttctagtttggaaataatgtttcctcagatttctgtgagcatttattgatttccagcttccagaatttctgtggaatccagtgctattttgattcccaaccttttgtatagaacctgtttttccatttatttttggaaaccttgtgtccctttttatccttatttaatggattttggcatgaaatcttctcatttcatatgagcccttttattttatcaacttttgttctgggacattttattatattactccttttatcacttctttcttcccaa

SEQ ID NO: 346498 - DNA, 409 bp, Homo sapiens
tccatctccatggagtgtgctgcgggtgatggatgagactgttgtctatctgaatggaaacctgctttcataggaagggtggaggtgggagaggaccagtgaagggcagagctctaaaattctggcaactagagtgaatataccctttcctcctttcatccttcttcctttgctccctccctccctcgcttcctttttgctacgtctctttttggtagatcactgtagttaaccttcgttctggccaagaccaagaagggttaatggacacccggctcctgacaccttccaggtcagcttggcttgcgaacttccaacgcaggaattggaggattaccggggaaggaatgcgaggtacccgatagcctcacacctgaacacggtcgcttcaatccactgggattcattt

SEQ ID NO: 346499 - DNA, 765 bp, Homo sapiens
cataatgagtgagtggcagagaccttagaagtcaggtcccagtggctaaagtacatcctgaaaaagagagaatttaacgagacttctttttgattttcagtctgggatgattttaatacagaatgcctggattcagtaacaccagaaaaaacaatccacaggatgtttgtgttaaaaagattcagaggcagtcatctagcacagtaaatcctaaattttttagaccacatcccacagttaaagcacacattgtgtgtgcaaagcatacattgtgtatatacatgtgtattatatctatgtgttatatatacatgtggatacattctgctagattttatatatatatatatatacacacgcatagatattaatatatatatcttatagaaagaaaagttcctgaaacaatggctgtccttaccacatgagatgcagcttgacataatcttttcattataaagaatgttacaaaggataggtctgggtacagtggctcatgcctgtaatcccagcacttttggaggccaagatgggtggatcgcttcaggccaggagttcgagaccagcctggccaacatggtgaaaccctgtctctactaaaaatacaaaaattagcctggcattggcacacgcatgtagtcctaactactcgggaggctgacgtgggagaatcacttgagcctgggaggcggaagttgcagtgagctgagattgtgtcactgcactccagcctgggtgacagagtgagaccctgtctcagaaaaa

SEQ ID NO: 346500 - DNA, 494 bp, Homo sapiens
gagagaagagaagctggcgaggggatagggaggaagggaagggaggaacaaaggaagcgagactggagggagaacggattgcttgggagagagctctttcctctattcccttttccctacacccccagcaataaagctctccttaggagaatacgatcaccctcactggggcggcctgagtgagtgtgtgtgtgtgtgtgtgtgagagagagagagagcgagagaacgcgagaggagagggagagagagaaagaaagagagagggagaaagtgagaccacttggcgctgtgaggaccacaaagccttggtttcggtgttctggccatctctaaaccaggccccactttccgccatccagcctacctgcccgggctaagcaccagcctcgggggacctctggctagtccttggggtcacgcccagctccagagagggaggaggggagactacctcaacccccgcctctggtgacggtcagcagaggggacgctcc

SEQ ID NO: 346501 - DNA, 474 bp, Homo sapiens
ccccagaggtcgaggctgtagtgacccgtgattgtgccactatactccagcctgggtgacagagcgagaccctgtctcaaaaaaaaagctgaggggcgggggtggaaataacttattaacaagtcagacctacagtttcctttcttctctagtttgagtatttctagactccagatataaatatttcttctggccgagcacagtggctcacacctataatcctgacagtttgagaggctgaggcaggaggatcatttgagaacaatagttcaagaccagcctgggcaacatagtgagaccccatctctacaaaaaaatctaaaattagctgggcatggtgaggcacatctgtagtcctagctactcagaaggctgaggaagcaagatcgctagagtccaggagctcaaggttatagtgagctatggtcacgttactacactccaacctgggcaacagcgcaagaccctgtctcc

SEQ ID NO: 346502 - DNA, 292 bp, Homo sapiens
  misc_feature (44)..(44): n is a, c, g, or t
ggttttattatattagaacatataatgttgtgcggtcaccctcngccgtgcgagttttccaagtctcattaacagtttgtttcttcaaaaacatcaagaatataatccatgcagaaatgtgacctttggatttcaatttgttcagaagaaaccagttaattcttaaaaaatcacattatattattttattccaaaaacgttttgaattgtattaaataacagatgtattcaaattattaattatatgtaatattgaattactgaatactataataaaacattcatgaaatta

SEQ ID NO: 346503 - DNA, 1111 bp, Homo sapiens
cgaacgcagcatttcagggactggatgaggagcttacggttttttacagaatcatcagtatcttggaagaaaaagaatgttaagaaataacaaaacaataattattaagtactttcttaatctcattaatggagctttctggttctggacttttattcatgggattggtgcatggctcttattagatagaaataattttttaacagcttttgatgaaaataatcacttcatagtacctatttctcaaattttgattggaatgggatcttctactgttcttttttgtctattgggttatataggaattcacaacgaaatcagatggctcctaattgtggtggagtctcgctctgtcactaggctggagtgcagtggcacgatctcggctcactgcaacctccacctcccggattcaagcgattctcctgcctcagattccgaagtagctggaattacagtatgcagtattgataacatggacctttgctgttcaggttgtactttcagcattcatcatcacaaagaaagaggaggttcagcaactatggcatgacaaaattgattttgtcatttctgagtatggatctaaagataagcctgaagatataaccaagtggactattctgaatgccttacagaaaacattacagtgttgtggccaacataattacacagactggataaagaataagaacaaagaaaattcaggacaggtgccatgttcttgcacaaagtcaactttaagaaaatggttttgtgatgagccactgaatgcaacttaccttgagggttgtgaaaataaaatcagtgcatggtataatgttaatgtgttaaccttaatcggaattaactttggacttttaacttcagaggttttccaagtctcattaacagtttgtttcttcaaaaacatcaagaatataatccatgcagaaatgtgacctttggatttcaatttgttcagaagaaaccagttaattcttaaaaaatcacattatattattttattccaaaaacgttttgaattgtattaaataacagatgtattcaaattattaattatatgtaatattgaattactgaatactataataaaacattcatgaaatta

SEQ ID NO: 346504 - DNA, 646 bp, Homo sapiens
attgagatgaagttttgttgtgaggcaacggtaataagataagtaactaaccaaggtttttttttaatgttcagcaactatggcatgacaaaattgattttgtcatttctgagtatggatctaaagataagcctgaagatataaccaagtggactattctgaatgccttacagaaaacattacagtgttgtggccaacataattacacagactggataaagaataagaacaaagaaaattcaggacaggtgccatgttcttgcacaaagtcaactttaagaaaatggttttgtgatgagccactgaatgcaacttaccttgagggttgtgaaaataaaatcagtgcatggtataatgttaatgtgttaaccttaatcggaattaactttggacttttaacttcagaggttttccaagtctcattaacagtttgtttcttcaaaaacatcaagaatataatccatgcagaaatgtgacctttggatttcaatttgttcagaagaaaccagttaattcttaaaaaatcacattatattattttattccaaaaacgttttgaattgtattaaataacagatgtattcaaattattaattatatgtaatattgaattactgaatactataataaaacattcatgaaatta

SEQ ID NO: 346505 - DNA, 1027 bp, Homo sapiens
cgaacgcagcatttcagggactggatgaggagcttacggttttttacagaatcatcagtatcttggaagaaaaagaatgttaagaaataacaaaacaataattattaagtactttcttaatctcattaatggagctttctggttctggacttttattcatgggattggtgcatggctcttattagatagaaataattttttaacagcttttgatgaaaataatcacttcatagtacctatttctcaaattttgattggaatgggatcttctactgttcttttttgtctattgggttatataggaattcacaacgaaatcagatggctcctaattgtggtggagtctcgctctgtcactaggctggagtgcagtggcacgatctcggctcactgcaacctccacctcccggattcaagcgattctcctgcctcagattccgaagtagctggaattacagtatgcagtattgataacatggacctttgctgttcaggttgtactttcagcattcatcatcacaaagaaagaggaggttcagcaactatggcatgacaaaattgattttgtcatttctgagtatggatctaaagataagcctgaagatataaccaagtggactattctgaatgccttacagaaaacattacagtgttgtggccaacataattacacagactggataaagaataagaacaaagaaaattcaggacaggtgccatgttcttgcacaaagtcaactttaagaaaatggttttgtgatgagccactgaatgcaacttaccttgaggttttccaagtctcattaacagtttgtttcttcaaaaacatcaagaatataatccatgcagaaatgtgacctttggatttcaatttgttcagaagaaaccagttaattcttaaaaaatcacattatattattttattccaaaaacgttttgaattgtattaaataacagatgtattcaaattattaattatatgtaatattgaattactgaatactataataaaacattcatgaaatta

SEQ ID NO: 346506 - DNA, 990 bp, Homo sapiens
cgaacgcagcatttcagggactggatgaggagcttacggttttttacagaatcatcagtatcttggaagaaaaagaatgttaagaaataacaaaacaataattattaagtactttcttaatctcattaatggagctttctggttctggacttttattcatgggattggtgcatggctcttattagatagaaataattttttaacagcttttgatgaaaataatcacttcatagtacctatttctcaaattttgattggaatgggatcttctactgttcttttttgtctattgggttatataggaattcacaacgaaatcagatggctcctaattgtgtatgcagtattgataacatggacctttgctgttcaggttgtactttcagcattcatcatcacaaagaaagaggaggttcagcaactatggcatgacaaaattgattttgtcatttctgagtatggatctaaagataagcctgaagatataaccaagtggactattctgaatgccttacagaaaacattacagtgttgtggccaacataattacacagactggataaagaataagaacaaagaaaattcaggacaggtgccatgttcttgcacaaagtcaactttaagaaaatggttttgtgatgagccactgaatgcaacttaccttgagggttgtgaaaataaaatcagtgcatggtataatgttaatgtgttaaccttaatcggaattaactttggacttttaacttcagaggttttccaagtctcattaacagtttgtttcttcaaaaacatcaagaatataatccatgcagaaatgtgacctttggatttcaatttgttcagaagaaaccagttaattcttaaaaaatcacattatattattttattccaaaaacgttttgaattgtattaaataacagatgtattcaaattattaattatatgtaatattgaattactgaatactataataaaacattcatgaaatta

SEQ ID NO: 346507 - DNA, 4603 bp, Homo sapiens
acgtgacctggtgacagtgctggcttggctgtacagctcgatctaggttctgcggcacgggatggcggaggcgcctcctgtctcaggtacttttaaattcaatacagatgctgctgaattcattcctcaggagaaaaaaaattctggtctaaattgtgggactcaaaggagactagactctaataggattggtagaagaaattacagttcaccacctccctgtcacctttccaggcaggtcccttatgatgaaatctctgctgttcatcagcatagttatcatccgtcaggaagcaaacctaagagtcagcagacgtctttccagtcctctccttgtaataaatcgcccaagagccatggccttcagaatcaaccttggcagaaattgaggaatgagaagcaccatatcagagtcaagaaagcacagagtcttgctgagcagacctcagatacagctggattagagagctcgaccagatcagagagtgggacagacctcagagagcatagtccttctgagagtgagaaggaagttgtgggtgcagatcccaggggagcaaaacccaaaaaagcaacacagtttgtatacagctatggtagaggaccaaaagtcaaggggaaactcaaatgtgaatggagtaaccgaacaactccaaaaccggaggatgctggacccgaaagtaccaaacctgtgggggttttccaccctgactcttcagaggcatcctctagaaaaggagtattggatgggtatggagccagacgaaatgagcagagaagatacccacagaaaaggcctccctgggaagtggagggggccaggccacgaccaggcagaaatccaccaaaacaggagggccaccgacatacaaacgcaggacacagaaacaacatgggccccattccaaaggatgacctcaatgaaagaccagcaaaatctacctgtgacagtgagaacttggcagtcatcaacaagtcttccaggagggttgaccaagagaaatgcactgtacggaggcaggatcctcaagtagtatctcctttctcccgaggcaaacagaaccatgtgctaaagaatgtggaaacgcacacaggttctctaattgaacaactaacaacagaaaaatacgagtgcatggtgtgctgtgaattggttcgtgtcacggccccagtgtggagttgtcagagctgttaccatgtgtttcatttgaactgcataaagaaatgggcaaggtctccagcatctcaagcagatggccagagtggttggaggtgccctgcctgtcagaatgtttctgcacatgttcctaatacctacacttgtttctgtggcaaggtaaagaatcctgagtggagcagaaatgaaattccacatagctgtggtgaggtttgtagaaagaaacagcctggccaggactgcccacattcctgtaaccttctctgccatccaggaccctgcccaccctgccctgcctttatgacaaaaacatgtgaatgtggacgaaccaggcacacagttcgctgtggtcaggctgtctcagtccactgttctaacccatgtgagaatattttgaactgtggtcagcaccagtgtgctgagctgtgccatgggggtcagtgccagccttgccagatcattttgaaccaggtatgctattgcggcagcacctcccgagatgtgttatgtggaaccgatgtaggaaagtctgatggatttggggatttcagctgtttaaagatatgtggcaaggacttgaaatgcggtaaccatacatgttcgcaagtgtgccaccctcagccctgccagcaatgcccacggctcccccagctggtgcgctgttgcccctgtggccaaactcctctcagccaattgctagaacttggaagtagtagtcggaaaacatgcatggaccctgtgccttcatgtggaaaagtgtgcggcaagcctctgccttgtggttccttagatttcattcatacctgtgaaaagctctgccatgaaggagactgtggaccatgctctcgcacatcagttatttcctgcagatgctctttcagaacaaaggagcttccatgtaccagtctcaaaagtgaagatgctacatttatgtgtgacaagcggtgtaacaagaaacggttgtgtggacggcataaatgtaatgagatatgctgtgtggataaggagcacaagtgtcctttgatttgtgggaggaaactccgttgtggccttcataggtgtgaagaaccttgtcatcgtggaaactgccagacatgctggcaagccagttttgatgaattaacctgccattgtggtgcatcagtgatttaccctccagttccctgtggtactaggccccctgaatgtacccaaacctgcgctagagtccatgagtgtgaccatccagtatatcattcttgtcatagtgaggagaagtgtcccccttgcactttcctaactcagaagtggtgcatgggcaagcatgagtttcggagcaacatcccctgtcacctggttgatatctcttgcggattaccctgcagtgccacgctaccatgtgggatgcacaaatgtcagagactctgtcacaaaggggagtgtcttgtggatgagccctgcaagcagccctgcaccacccccagagctgactgtggtcacccgtgtatggcaccctgccataccagctcaccctgccctgtgactgcttgtaaagctaaggtagagctacagtgtgaatgtggacgaagaaaagagatggtgatttgctctgaagcatctagtacttatcaaagaatagctgcaatctccatggcctctaagataacagacatgcagcttggaggttcagtggagatcagcaagttaattaccaaaaaggaagttcatcaagccaggctggagtgtgatgaggagtgttcagccttggaaaggaaaaagagattagcagaggcatttcatatcagtgaggattctgatcctttcaatatacgttcttcagggtcaaaattcagtgatagtttgaaagaagatgccaggaaggacttaaagtttgtcagtgacgttgagaaggaaatggaaaccctcgtggaggccgtgaataagggaaagaatagtaagaaaagccacagcttccctcccatgaacagagaccaccgccggatcatccatgacttggcccaagtttatggcctggagagcgtgagctatgacagtgaaccgaagcgcaatgtggtggtcactgccatcagggggaagtccgtttgtcctcctaccacgctgacaggtgtgcttgaaagggaaatgcaggcacggcctccaccaccgattcctcatcacagacatcagtcagacaagaatcctgggagcagtaatttacagaaaataaccaaggagccaataattgactattttgacgtccaggactaagaagatcatgatgcacttagataaaagaatgattaggtatagtggagacttatttgccagcagataaatcatgcccgttcccctctgcctggcagaatcacagtctcacatactgtcttgtactgacacatccaaagcatgagtgtgtcagaaatcccttgtctattcctgtctgtataaagtgtttcattatgaccagatctctgattgtatggtcactaggtatgcaatcacgcattcaaagaggctctttacaccatcactgtgattgctctgagagttgagggactattgggctttatttggacaaaccaaacttttagcctgaaaccaactttatgccactaagtcatagcctcagttgtcccagttatttgtcctcctgaaaatgcctgaaacatcagacagacattgcttgctttacccaaactgatcaaaatctttaggagcacaaatgaattttttagtctgaaataccaaataatgaattggtataccatatccggaatcacacatgttatcttaaacccagccatcatacctaagtcttttgccaaaacctctcataggtatatctagctgaacttattttggcattttcaatgtgatcagttctagacctagaagggggtcaggctgctttacagaattctatttccttaagtccctggcacttctcataccacatcactgaacctgttcagtaacaatcagtttggccgtcccccatgatggtaggaaatatagagagcaagttcttctgccagggtcacactgtggtctctgaactgaccagtatatccctaactcctctttgatagagaaagagtctcaaatggacaactgtcctgtgttgctttccctaggccttcagcagcctattggctctccctgcctctgagctctggactctgtttgaatattccaagtagtatatggacagtccagggcttatgcccagcagcccactggaggcattcttcaggctcctttaaggcaggtgcattgatagttccattagtgtgacccttgcattggcacccctccagcctggaggccaggcttccagcaacttccttctgccctagagcaagccatgagccccagagcagtagcaggagacttgagaagtagagtgacaaaaacaagcacttaattaaattataaaatttaacttta

SEQ ID NO: 346508 - DNA, 391 bp, Homo sapiens
ctcctagaccccatgccaataacctcccccacctgtccttcagagggacctcatccagccattcctggattggggtccctggggaaatggtatttctagggcaaggttactaatggaaactgaagagcaggtggcctcacaggctgcttcctggcctgagggattgttttttggcaagagtcagctgtgcttccaggttgactgagacttccttttcttgctggatgggagctgtacagtctgtattctgactttaattttttttcatttgcttatcaaggctggagtgtgatgaggagtgttcagccttggaaaggaaaaagtaagtagttgcagctgcttttttaatctccttgcccttgagctctgtgaaattaatgggagggtacca

SEQ ID NO: 346509 - DNA, 253 bp, Homo sapiens
ttgtgctcctggcaagctgttctggagatggccaaccaggctcatgctgcttctgggctgtagtgcttgtctccttggtcttgagaccaggcctgaccatgtagcagagataggtgtggacgtgggcttcatctcacccccagcagttacagctttgatagtccagatttgagcagtatgagtaaataatagtgtttattttaatcctggaaataagtcattggtatttataatcagattttttataaaccag

SEQ ID NO: 346510 - DNA, 4493 bp, Homo sapiens
atggaattcagcagcatctgtattgaatttaaaagtaccttgagacaggaggcgcctccgccatcccgtgccgcagaacctagatcgagctgtacagttcaccacctccctgtcacctttccaggcaggtcccttatgatgaaatctctgctgttcatcagcatagttatcatccgtcaggaagcaaacctaagagtcagcagacgtctttccagtcctctccttgtaataaatcgcccaagagccatggccttcagaatcaaccttggcagaaattgaggaatgagaagcaccatatcagagtcaagaaagcacagagtcttgctgagcagacctcagatacagctggattagagagctcgaccagatcagagagtgggacagacctcagagagcatagtccttctgagagtgagaaggaagttgtgggtgcagatcccaggggagcaaaacccaaaaaagcaacacagtttgtatacagctatggtagaggaccaaaagtcaaggggaaactcaaatgtgaatggagtaaccgaacaactccaaaaccggaggatgctggacccgaaagtaccaaacctgtgggggttttccaccctgactcttcagaggcatcctctagaaaaggagtattggatgggtatggagccagacgaaatgagcagagaagatacccacagaaaaggcctccctgggaagtggagggggccaggccacgaccaggcagaaatccaccaaaacaggagggccaccgacatacaaacgcaggacacagaaacaacatgggccccattccaaaggatgacctcaatgaaagaccagcaaaatctacctgtgacagtgagaacttggcagtcatcaacaagtcttccaggagggttgaccaagagaaatgcactgtacggaggcaggatcctcaagtagtatctcctttctcccgaggcaaacagaaccatgtgctaaagaatgtggaaacgcacacaggttctctaattgaacaactaacaacagaaaaatacgagtgcatggtgtgctgtgaattggttcgtgtcacggccccagtgtggagttgtcagagctgttaccatgtgtttcatttgaactgcataaagaaatgggcaaggtctccagcatctcaagcagatggccagagtggttggaggtgccctgcctgtcagaatgtttctgcacatgttcctaatacctacacttgtttctgtggcaaggtaaagaatcctgagtggagcagaaatgaaattccacatagctgtggtgaggtttgtagaaagaaacagcctggccaggactgcccacattcctgtaaccttctctgccatccaggaccctgcccaccctgccctgcctttatgacaaaaacatgtgaatgtggacgaaccaggcacacagttcgctgtggtcaggctgtctcagtccactgttctaacccatgtgagaatattttgaactgtggtcagcaccagtgtgctgagctgtgccatgggggtcagtgccagccttgccagatcattttgaaccaggtatgctattgcggcagcacctcccgagatgtgttatgtggaaccgatgtaggaaagtctgatggatttggggatttcagctgtttaaagatatgtggcaaggacttgaaatgcggtaaccatacatgttcgcaagtgtgccaccctcagccctgccagcaatgcccacggctcccccagctggtgcgctgttgcccctgtggccaaactcctctcagccaattgctagaacttggaagtagtagtcggaaaacatgcatggaccctgtgccttcatgtggaaaagtgtgcggcaagcctctgccttgtggttccttagatttcattcatacctgtgaaaagctctgccatgaaggagactgtggaccatgctctcgcacatcagttatttcctgcagatgctctttcagaacaaaggagcttccatgtaccagtctcaaaagtgaagatgctacatttatgtgtgacaagcggtgtaacaagaaacggttgtgtggacggcataaatgtaatgagatatgctgtgtggataaggagcacaagtgtcctttgatttgtgggaggaaactccgttgtggccttcataggtgtgaagaaccttgtcatcgtggaaactgccagacatgctggcaagccagttttgatgaattaacctgccattgtggtgcatcagtgatttaccctccagttccctgtggtactaggccccctgaatgtacccaaacctgcgctagagtccatgagtgtgaccatccagtatatcattcttgtcatagtgaggagaagtgtcccccttgcactttcctaactcagaagtggtgcatgggcaagcatgagtttcggagcaacatcccctgtcacctggttgatatctcttgcggattaccctgcagtgccacgctaccatgtgggatgcacaaatgtcagagactctgtcacaaaggggagtgtcttgtggatgagccctgcaagcagccctgcaccacccccagagctgactgtggtcacccgtgtatggcaccctgccataccagctcaccctgccctgtgactgcttgtaaagctaaggtagagctacagtgtgaatgtggacgaagaaaagagatggtgatttgctctgaagcatctagtacttatcaaagaatagctgcaatctccatggcctctaagataacagacatgcagcttggaggttcagtggagatcagcaagttaattaccaaaaaggaagttcatcaagccaggctggagtgtgatgaggagtgttcagccttggaaaggaaaaagagattagcagaggcatttcatatcagtgaggattctgatcctttcaatatacgttcttcagggtcaaaattcagtgatagtttgaaagaagatgccaggaaggacttaaagtttgtcagtgacgttgagaaggaaatggaaaccctcgtggaggccgtgaataagggaaagaatagtaagaaaagccacagcttccctcccatgaacagagaccaccgccggatcatccatgacttggcccaagtttatggcctggagagcgtgagctatgacagtgaaccgaagcgcaatgtggtggtcactgccatcagggggaagtccgtttgtcctcctaccacgctgacaggtgtgcttgaaagggaaatgcaggcacggcctccaccaccgattcctcatcacagacatcagtcagacaagaatcctgggagcagtaatttacagaaaataaccaaggagccaataattgactattttgacgtccaggactaagaagatcatgatgcacttagataaaagaatgattaggtatagtggagacttatttgccagcagataaatcatgcccgttcccctctgcctggcagaatcacagtctcacatactgtcttgtactgacacatccaaagcatgagtgtgtcagaaatcccttgtctattcctgtctgtataaagtgtttcattatgaccagatctctgattgtatggtcactaggtatgcaatcacgcattcaaagaggctctttacaccatcactgtgattgctctgagagttgagggactattgggctttatttggacaaaccaaacttttagcctgaaaccaactttatgccactaagtcatagcctcagttgtcccagttatttgtcctcctgaaaatgcctgaaacatcagacagacattgcttgctttacccaaactgatcaaaatctttaggagcacaaatgaattttttagtctgaaataccaaataatgaattggtataccatatccggaatcacacatgttatcttaaacccagccatcatacctaagtcttttgccaaaacctctcataggtatatctagctgaacttattttggcattttcaatgtgatcagttctagacctagaagggggtcaggctgctttacagaattctatttccttaagtccctggcacttctcataccacatcactgaacctgttcagtaacaatcagtttggccgtcccccatgatggtaggaaatatagagagcaagttcttctgccagggtcacactgtggtctctgaactgaccagtatatccctaactcctctttgatagagaaagagtctcaaatggacaactgtcctgtgttgctttccctaggccttcagcagcctattggctctccctgcctctgagctctggactctgtttgaatattccaagtagtatatggacagtccagggcttatgcccagcagcccactggaggcattcttcaggctcctttaaggcaggtgcattgatagttccattagtgtgacccttgcattggcacccctccagcctggaggccaggcttccagcaacttccttctgccctagagcaagccatgagccccagagcagtagcaggagacttgagaagtagagtgacaaaaacaagcacttaattaaattataaaatttaacttta

SEQ ID NO: 346511 - DNA, 5474 bp, Homo sapiens
acgagatatgtcatagtgcgggctgggttgtgatttcggccggggccggtctataaagcacagagtcttgctgagcagacctcagatacagctggattagagagctcgaccagatcagagagtgggacagacctcagagagcatagtccttctgagagtgagaaggaagttgtgggtgcagatcccaggggagcaaaacccaaaaaagcaacacagtttgtatacagctatggtagaggaccaaaagtcaaggggaaactcaaatgtgaatggagtaaccgaacaactccaaaaccggaggatgctggacccgaaagtaccaaacctgtgggggttttccaccctgactcttcagaggcatcctctagaaaaggagtattggatgggtatggagccagacgaaatgagcagagaagatacccacagaaaaggcctccctgggaagtggagggggccaggccacgaccaggcagaaatccaccaaaacaggagggccaccgacatacaaacgcaggacacagaaacaacatgggccccattccaaaggatgacctcaatgaaagaccagcaaaatctacctgtgacagtgagaacttggcagtcatcaacaagtcttccaggagggttgaccaagagaaatgcactgtacggaggcaggatcctcaagtagtatctcctttctcccgaggcaaacagaaccatgtgctaaagaatgtggaaacgcacacaggttctctaattgaacaactaacaacagaaaaatacgagtgcatggtgtgctgtgaattggttcgtgtcacggccccagtgtggagttgtcagagctgttaccatgtgtttcatttgaactgcataaagaaatgggcaaggtctccagcatctcaagcagatggccagagtggttggaggtgccctgcctgtcagaatgtttctgcacatgttcctaatacctacacttgtttctgtggcaaggtaaagaatcctgagtggagcagaaatgaaattccacatagctgtggtgaggtttgtagaaagaaacagcctggccaggactgcccacattcctgtaaccttctctgccatccaggaccctgcccaccctgccctgcctttatgacaaaaacatgtgaatgtggacgaaccaggcacacagttcgctgtggtcaggctgtctcagtccactgttctaacccatgtgagaatattttgaactgtggtcagcaccagtgtgctgagctgtgccatgggggtcagtgccagccttgccagatcattttgaaccaggtatgctattgcggcagcacctcccgagatgtgttatgtggaaccgatgtaggaaagtctgatggatttggggatttcagctgtttaaagatatgtggcaaggacttgaaatgcggtaaccatacatgttcgcaagtgtgccaccctcagccctgccagcaatgcccacggctcccccagctggtgcgctgttgcccctgtggccaaactcctctcagccaattgctagaacttggaagtagtagtcggaaaacatgcatggaccctgtgccttcatgtggaaaagtgtgcggcaagcctctgccttgtggttccttagatttcattcatacctgtgaaaagctctgccatgaaggagactgtggaccatgctctcgcacatcagttatttcctgcagatgctctttcagaacaaaggagcttccatgtaccagtctcaaaagtgaagatgctacatttatgtgtgacaagcggtgtaacaagaaacggttgtgtggacggcataaatgtaatgagatatgctgtgtggataaggagcacaagtgtcctttgatttgtgggaggaaactccgttgtggccttcataggtgtgaagaaccttgtcatcgtggaaactgccagacatgctggcaagccagttttgatgaattaacctgccattgtggtgcatcagtgatttaccctccagttccctgtggtactaggccccctgaatgtacccaaacctgcgctagagtccatgagtgtgaccatccagtatatcattcttgtcatagtgaggagaagtgtcccccttgcactttcctaactcagaagtggtgcatgggcaagcatgagtttcggagcaacatcccctgtcacctggttgatatctcttgcggattaccctgcagtgccacgctaccatgtgggatgcacaaatgtcagagactctgtcacaaaggggagtgtcttgtggatgagccctgcaagcagccctgcaccacccccagagctgactgtggtcacccgtgtatggcaccctgccataccagctcaccctgccctgtgactgcttgtaaagctaaggtagagctacagtgtgaatgtggacgaagaaaagagatggtgatttgctctgaagcatctagtacttatcaaagaatagctgcaatctccatggcctctaagataacagacatgcagcttggaggttcagtggagatcagcaagttaattaccaaaaaggaagttcatcaagccaggctggagtgtgatgaggagtgttcagccttggaaaggaaaaagagattagcagaggcatttcatatcagtgaggattctgatcctttcaatatacgttcttcagggtcaaaattcagtgatagtttgaaagaagatgccaggaaggacttaaagtttgtcagtgacgttgagaaggaaatggaaaccctcgtggaggccgtgaataaggttgaagtcgaaacatcccactggacatttctctaaggccagcttgatgaaaaaaaaaaagcaatcaagtcctggaaacactttcaacctagagtagttgtaggaaaaagtcacaacttctttgaggatccttatctttctcaaaacacagccattataacatctgtggaagcctgtcctggttcaggacagttgactgcagaaaagatctacagtcggctgggcacagtgtctcatgcctgtaatgccagcactttgggaggccaaggcaggcagatcacttgaggtcaggagttctagatcagcttggccaacatgacgaaaccctgtctctactaaaaatataaaaattagctgggtgtggtggcgggcacctgttattccagctacttgcaaggcttaggcaggagaattccttgaacccgggaggcagaggttgctgtgagctgagattctgccactgcactccagcctgggcaacaagagtgaaactctgtctcaaaaagaaagaaagaaagaaagaaagctctgcagtcagctgtaagtaaatgccaggcacggtggctcacacctgtaatcccagcgctttgggaggctgaggcagcaggcggatcacttgagtccaggagttcacgaccagcctgggcaacgtggcaaaaccctgtctctacaaaaaataaaaaattagccaggtgtggtggtgcacacccataatcccagctactcagggggctgaggcaggaggattgcttaagcccaggaggtcaagcctgcagtaagctgaggttgagtcactgtactccagcttggatctccagcttgagatcctgtctcaataaaaaagaaagaaagaaaaagaaaataaagatgctggccaagtgcctaagaatggatgaagaaactctgggtgagggggctcaatagtgatagttgagtgactgtgtgggacacttaggaagacactctagcccctcagatctttgaagggctattgtatgctaggaaagcccactgttctttataattccaaaggcaggaatgtcccctttgggaaggatgaaagttgtatgactacagctggagagcagtgggatagactccttcagaagagggagacccctgtcctggaggcggccagggatgtcacggaggtagctttaagtggaaaagtcttgagtttagtcagaagcccccagcgctgcattggcttcctcccccttccatcaggggggacgggaaagaatagtaagaaaagccacagcttccctcccatgaacagagaccaccgccggatcatccatgacttggcccaagtttatggcctggagagcgtgagctatgacagtgaaccgaagcgcaatgtggtggtcactgccatcagggggaagtccgtttgtcctcctaccacgctgacaggtgtgcttgaaagggaaatgcaggcacggcctccaccaccgattcctcatcacagacatcagtcagacaagaatcctgggagcagtaatttacagaaaataaccaaggagccaataattgactattttgacgtccaggactaagaagatcatgatgcacttagataaaagaatgattaggtatagtggagacttatttgccagcagataaatcatgcccgttcccctctgcctggcagaatcacagtctcacatactgtcttgtactgacacatccaaagcatgagtgtgtcagaaatcccttgtctattcctgtctgtataaagtgtttcattatgaccagatctctgattgtatggtcactaggtatgcaatcacgcattcaaagaggctctttacaccatcactgtgattgctctgagagttgagggactattgggctttatttggacaaaccaaacttttagcctgaaaccaactttatgccactaagtcatagcctcagttgtcccagttatttgtcctcctgaaaatgcctgaaacatcagacagacattgcttgctttacccaaactgatcaaaatctttaggagcacaaatgaattttttagtctgaaataccaaataatgaattggtataccatatccggaatcacacatgttatcttaaacccagccatcatacctaagtcttttgccaaaacctctcataggtatatctagctgaacttattttggcattttcaatgtgatcagttctagacctagaagggggtcaggctgctttacagaattctatttccttaagtccctggcacttctcataccacatcactgaacctgttcagtaacaatcagtttggccgtcccccatgatggtaggaaatatagagagcaagttcttctgccagggtcacactgtggtctctgaactgaccagtatatccctaactcctctttgatagagaaagagtctcaaatggacaactgtcctgtgttgctttccctaggccttcagcagcctattggctctccctgcctctgagctctggactctgtttgaatattccaagtagtatatggacagtccagggcttatgcccagcagcccactggaggcattcttcaggctcctttaaggcaggtgcattgatagttccattagtgtgacccttgcattggcacccctccagcctggaggccaggcttccagcaacttccttctgccctagagcaagccatgagccccagagcagtagcaggagacttgagaagtagagtgacaaaaacaagcacttaattaaattataaaatttaacttta

SEQ ID NO: 346512 - DNA, 3562 bp, Homo sapiens
acgtgacctggtgacagtgctggcttggctgtacagctcgatctaggttctgcggcacgggatggcggaggcgcctcctgtctcaggtacttttaaattcaatacagatgctgctgaattcattcctcaggagaaaaaaaattctggtctaaattgtgggactcaaaggagactagactctaataggattggtagaagaaattacagttcaccacctccctgtcacctttccaggcaggtcccttatgatgaaatctctgctgttcatcagcatagttatcatccgtcaggaagcaaacctaagagtcagcagacgtctttccagtcctctccttgtaataaatcgcccaagagccatggccttcagaatcaaccttggcagaaattgaggaatgagaagcaccatatcagagtcaagaaagcacagagtcttgctgagcagacctcagatacagctggattagagagctcgaccagatcagagagtgggacagacctcagagagcatagtccttctgagagtgagaaggaagttgtgggtgcagatcccaggggagcaaaacccaaaaaagcaacacagtttgtatacagctatggtagaggaccaaaagtcaaggggaaactcaaatgtgaatggagtaaccgaacaactccaaaaccggaggatgctggacccgaaagtaccaaacctgtgggggttttccaccctgactcttcagaggcatcctctagaaaaggagtattggatgggtatggagccagacgaaatgagcagagaagatacccacagaaaaggcctccctgggaagtggagggggccaggccacgaccaggcagaaatccaccaaaacaggagggccaccgacatacaaacgcaggacacagaaacaacatgggccccattccaaaggatgacctcaatgaaagaccagcaaaatctacctgtgacagtgagaacttggcagtcatcaacaagtcttccaggagggttgaccaagagaaatgcactgtacggaggcaggatcctcaagtagtatctcctttctcccgaggcaaacagaaccatgtgctaaagaatgtggaaacgcacacaggttctctaattgaacaactaacaacagaaaaatacgagtgcatggtgtgctgtgaattggttcgtgtcacggccccagtgtggagttgtcagagctgttaccatgtgtttcatttgaactgcataaagaaatgggcaaggtctccagcatctcaagcagatggccagagtggttggaggtgccctgcctgtcagaatgtttctgcacatgttcctaatacctacacttgtttctgtggcaaggtaaagaatcctgagtggagcagaaatgaaattccacatagctgtggtgaggtttgtagaaagaaacagcctggccaggactgcccacattcctgtaaccttctctgccatccaggaccctgcccaccctgccctgcctttatgacaaaaacatgtgaatgtggacgaaccaggcacacagttcgctgtggtcaggctgtctcagtccactgttctaacccatgtgagaatattttgaactgtggtcagcaccagtgtgctgagctgtgccatgggggtcagtgccagccttgccagatcattttgaaccaggtatgctattgcggcagcacctcccgagatgtgttatgtggaaccgatgtaggaaagtctgatggatttggggatttcagctgtttaaagatatgtggcaaggacttgaaatgcggtaaccatacatgttcgcaagtgtgccaccctcagccctgccagcaatgcccacggctcccccagctggtgcgctgttgcccctgtggccaaactcctctcagccaattgctagaacttggaagtagtagtcggaaaacatgcatggaccctgtgccttcatgtggaaaagtgtgcggcaagcctctgccttgtggttccttagatttcattcatacctgtgaaaagctctgccatgaaggagactgtggaccatgctctcgcacatcagttatttcctgcagatgctctttcagaacaaaggagcttccatgtaccagtctcaaaagtgaagatgctacatttatgtgtgacaagcggtgtaacaagaaacggttgtgtggacggcataaatgtaatgagatatgctgtgtggataaggagcacaagtgtcctttgatttgtgggaggaaactccgttgtggccttcataggtgtgaagaaccttgtcatcgtggaaactgccagacatgctggcaagccagttttgatgaattaacctgccattgtggtgcatcagtgatttaccctccagttccctgtggtactaggccccctgaatgtacccaaacctgcgctagagtccatgagtgtgaccatccagtatatcattcttgtcatagtgaggagaagtgtcccccttgcactttcctaactcagaagtggtgcatgggcaagcatgagcagtcccactactgggcgtctacccagaagaaaagaagtcattatatgaaaaagatacctgcacacgcatgtttatagcagcacaattcacaattgcaaaaatgtggaaccagcccaactgcccatcagtcaacaagtggataaagaaattgtggtgtatctatacgtaccatggaatactactcagccaggaacgaaataatggcattcacagcaacctggatggatttggagaccattattctaagtgaagtaactcaggaatggaaaaccaaacatcgtatgttctcaattataagagggagctaagctatgaggacgcaaaggcatgagaatgatacaatggactttggggactctggggaaaggacgggaggcgggtgagggataaaaaactacacactgggtccgagcacggtggctcatgcctataatcccagcactttgggaggccaaggcaggtagattatgaggtcgggagttcgaaaccagcctggccaacaaggtgagaccccccccatctctactaaaataattagccgggcctggtggcgcatccctgtaatcccagctactttacttgggaggctgaggcaggagaattgcttgaactcgggaggcggatgttgcagtgagccaatatcgcaccactgcactccagcctgggcaacagagcaagactccgtctcgaaaaaaaaaataaattttaaaaactacacattgggtacaatgtacactcctcgggtgatgggtgcaccaaaatctcaaaaatcactactaaggaacttatccatgtaaccaaacaccacctgttccccaagaactattgaaataagaaaaaagaaaaaaaaaaatcactgattgcaggtcaccctaacagatataataatgaaaaagtctgagatgttgcgagaattaccaaaatgtgatgcagacacgaaatgagcatgtgctgttggaaaagtggaacagatagacttgctggagacagggttgccacaaagtttcaatttgtaaaaaatgtgatatctatgaaatgcaataaagtgaagtccaataagaaatgcatatttattg

SEQ ID NO: 346513 - DNA, 4818 bp, Homo sapiens
tgtatatgtgattttaaaaatgtgatgtttttataatactgcatttattctgatcattagatcttatactctcatgccaatttttaaatttctttttggcaacggggacctttttacaagtgttttatgtaaaacctgacataaagtatgaaacctgtgcttcttgggttgaagtgaggatgggaaatccagatgtcaactcctccaccactactaccagcttagcttgtctatctcctgtaacatcaccagaggacccgcaggagcctcacagtgaatggtgttcaaccacggccttatggaccagatagtgttctcttaatttagaggttgcttcactctgatgctgttcttggaatgtgctgcagaggcactatgagatattaatagtttaacaaggcttttttaatttcttcctatggtaaagctcttaggcgggtcttagagctgctgtatgaactatactcatttctgcataggtctgatcagtactctatttggcctcgcacatttacaggcatgagcgactgtgccaggcccgcattttgtattttcttatagattatttgtgacattttaagaacccatacatgttactaacgttttgtttttgaaattttctcttcaagtatgctattgcggcagcacctcccgagatgtgttatgtggaaccgatgtaggaaagtctgatggatttggggatttcagctgtttaaagatatgtggcaaggacttgaaatgcggtaaccatacatgttcgcaagtgtgccaccctcagccctgccagcaatgcccacggctcccccagctggtgcgctgttgcccctgtggccaaactcctctcagccaattgctagaacttggaagtagtagtcggaaaacatgcatggaccctgtgccttcatgtggaaaagtgtgcggcaagcctctgccttgtggttccttagatttcattcatacctgtgaaaagctctgccatgaaggagactgtggaccatgctctcgcacatcagttatttcctgcagatgctctttcagaacaaaggagcttccatgtaccagtctcaaaagtgaagatgctacatttatgtgtgacaagcggtgtaacaagaaacggttgtgtggacggcataaatgtaatgagatatgctgtgtggataaggagcacaagtgtcctttgatttgtgggaggaaactccgttgtggccttcataggtgtgaagaaccttgtcatcgtggaaactgccagacatgctggcaagccagttttgatgaattaacctgccattgtggtgcatcagtgatttaccctccagttccctgtggtactaggccccctgaatgtacccaaacctgcgctagagtccatgagtgtgaccatccagtatatcattcttgtcatagtgaggagaagtgtcccccttgcactttcctaactcagaagtggtgcatgggcaagcatgagtttcggagcaacatcccctgtcacctggttgatatctcttgcggattaccctgcagtgccacgctaccatgtgggatgcacaaatgtcagagactctgtcacaaaggggagtgtcttgtggatgagccctgcaagcagccctgcaccacccccagagctgactgtggtcacccgtgtatggcaccctgccataccagctcaccctgccctgtgactgcttgtaaagctaaggtagagctacagtgtgaatgtggacgaagaaaagagatggtgatttgctctgaagcatctagtacttatcaaagaatagctgcaatctccatggcctctaagataacagacatgcagcttggaggttcagtggagatcagcaagttaattaccaaaaaggaagttcatcaagccaggctggagtgtgatgaggagtgttcagccttggaaaggaaaaagagattagcagaggcatttcatatcagtgaggattctgatcctttcaatatacgttcttcagggtcaaaattcagtgatagtttgaaagaagatgccaggaaggacttaaagtttgtcagtgacgttgagaaggaaatggaaaccctcgtggaggccgtgaataaggttgaagtcgaaacatcccactggacatttctctaaggccagcttgatgaaaaaaaaaaagcaatcaagtcctggaaacactttcaacctagagtagttgtaggaaaaagtcacaacttctttgaggatccttatctttctcaaaacacagccattataacatctgtggaagcctgtcctggttcaggacagttgactgcagaaaagatctacagtcggctgggcacagtgtctcatgcctgtaatgccagcactttgggaggccaaggcaggcagatcacttgaggtcaggagttctagatcagcttggccaacatgacgaaaccctgtctctactaaaaatataaaaattagctgggtgtggtggcgggcacctgttattccagctacttgcaaggcttaggcaggagaattccttgaacccgggaggcagaggttgctgtgagctgagattctgccactgcactccagcctgggcaacaagagtgaaactctgtctcaaaaagaaagaaagaaagaaagaaagctctgcagtcagctgtaagtaaatgccaggcacggtggctcacacctgtaatcccagcgctttgggaggctgaggcagcaggcggatcacttgagtccaggagttcacgaccagcctgggcaacgtggcaaaaccctgtctctacaaaaaataaaaaattagccaggtgtggtggtgcacacccataatcccagctactcagggggctgaggcaggaggattgcttaagcccaggaggtcaagcctgcagtaagctgaggttgagtcactgtactccagcttggatctccagcttgagatcctgtctcaataaaaaagaaagaaagaaaaagaaaataaagatgctggccaagtgcctaagaatggatgaagaaactctgggtgagggggctcaatagtgatagttgagtgactgtgtgggacacttaggaagacactctagcccctcagatctttgaagggctattgtatgctaggaaagcccactgttctttataattccaaaggcaggaatgtcccctttgggaaggatgaaagttgtatgactacagctggagagcagtgggatagactccttcagaagagggagacccctgtcctggaggcggccagggatgtcacggaggtagctttaagtggaaaagtcttgagtttagtcagaagcccccagcgctgcattggcttcctcccccttccatcaggggggacgggaaagaatagtaagaaaagccacagcttccctcccatgaacagagaccaccgccggatcatccatgacttggcccaagtttatggcctggagagcgtgagctatgacagtgaaccgaagcgcaatgtggtggtcactgccatcagggggaagtccgtttgtcctcctaccacgctgacaggtgtgcttgaaagggaaatgcaggcacggcctccaccaccgattcctcatcacagacatcagtcagacaagaatcctgggagcagtaatttacagaaaataaccaaggagccaataattgactattttgacgtccaggactaagaagatcatgatgcacttagataaaagaatgattaggtatagtggagacttatttgccagcagataaatcatgcccgttcccctctgcctggcagaatcacagtctcacatactgtcttgtactgacacatccaaagcatgagtgtgtcagaaatcccttgtctattcctgtctgtataaagtgtttcattatgaccagatctctgattgtatggtcactaggtatgcaatcacgcattcaaagaggctctttacaccatcactgtgattgctctgagagttgagggactattgggctttatttggacaaaccaaacttttagcctgaaaccaactttatgccactaagtcatagcctcagttgtcccagttatttgtcctcctgaaaatgcctgaaacatcagacagacattgcttgctttacccaaactgatcaaaatctttaggagcacaaatgaattttttagtctgaaataccaaataatgaattggtataccatatccggaatcacacatgttatcttaaacccagccatcatacctaagtcttttgccaaaacctctcataggtatatctagctgaacttattttggcattttcaatgtgatcagttctagacctagaagggggtcaggctgctttacagaattctatttccttaagtccctggcacttctcataccacatcactgaacctgttcagtaacaatcagtttggccgtcccccatgatggtaggaaatatagagagcaagttcttctgccagggtcacactgtggtctctgaactgaccagtatatccctaactcctctttgatagagaaagagtctcaaatggacaactgtcctgtgttgctttccctaggccttcagcagcctattggctctccctgcctctgagctctggactctgtttgaatattccaagtagtatatggacagtccagggcttatgcccagcagcccactggaggcattcttcaggctcctttaaggcaggtgcattgatagttccattagtgtgacccttgcattggcacccctccagcctggaggccaggcttccagcaacttccttctgccctagagcaagccatgagccccagagcagtagcaggagacttgagaagtagagtgacaaaaacaagcacttaattaaattataaaatttaacttta

SEQ ID NO: 346514 - DNA, 4367 bp, Homo sapiens
  misc_feature (19)..(19): n is a, c, g, or t
  misc_feature (25)..(25): n is a, c, g, or t
aataagctagtacgaggcnggttgnaatcggccgaggcgcacacagttcgctgtggtcaggctgtctcagtccactgttctaacccatgtgagaatattttgaactgtggtcagcaccagtgtgctgagctgtgccatgggggtcagtgccagccttgccagatcattttgaaccaggtatgctattgcggcagcacctcccgagatgtgttatgtggaaccgatgtaggaaagtctgatggatttggggatttcagctgtttaaagatatgtggcaaggacttgaaatgcggtaaccatacatgttcgcaagtgtgccaccctcagccctgccagcaatgcccacggctcccccagctggtgcgctgttgcccctgtggccaaactcctctcagccaattgctagaacttggaagtagtagtcggaaaacatgcatggaccctgtgccttcatgtggaaaagtgtgcggcaagcctctgccttgtggttccttagatttcattcatacctgtgaaaagctctgccatgaaggagactgtggaccatgctctcgcacatcagttatttcctgcagatgctctttcagaacaaaggagcttccatgtaccagtctcaaaagtgaagatgctacatttatgtgtgacaagcggtgtaacaagaaacggttgtgtggacggcataaatgtaatgagatatgctgtgtggataaggagcacaagtgtcctttgatttgtgggaggaaactccgttgtggccttcataggtgtgaagaaccttgtcatcgtggaaactgccagacatgctggcaagccagttttgatgaattaacctgccattgtggtgcatcagtgatttaccctccagttccctgtggtactaggccccctgaatgtacccaaacctgcgctagagtccatgagtgtgaccatccagtatatcattcttgtcatagtgaggagaagtgtcccccttgcactttcctaactcagaagtggtgcatgggcaagcatgagtttcggagcaacatcccctgtcacctggttgatatctcttgcggattaccctgcagtgccacgctaccatgtgggatgcacaaatgtcagagactctgtcacaaaggggagtgtcttgtggatgagccctgcaagcagccctgcaccacccccagagctgactgtggtcacccgtgtatggcaccctgccataccagctcaccctgccctgtgactgcttgtaaagctaaggtagagctacagtgtgaatgtggacgaagaaaagagatggtgatttgctctgaagcatctagtacttatcaaagaatagctgcaatctccatggcctctaagataacagacatgcagcttggaggttcagtggagatcagcaagttaattaccaaaaaggaagttcatcaagccaggctggagtgtgatgaggagtgttcagccttggaaaggaaaaagagattagcagaggcatttcatatcagtgaggattctgatcctttcaatatacgttcttcagggtcaaaattcagtgatagtttgaaagaagatgccaggaaggacttaaagtttgtcagtgacgttgagaaggaaatggaaaccctcgtggaggccgtgaataaggttgaagtcgaaacatcccactggacatttctctaaggccagcttgatgaaaaaaaaaaagcaatcaagtcctggaaacactttcaacctagagtagttgtaggaaaaagtcacaacttctttgaggatccttatctttctcaaaacacagccattataacatctgtggaagcctgtcctggttcaggacagttgactgcagaaaagatctacagtcggctgggcacagtgtctcatgcctgtaatgccagcactttgggaggccaaggcaggcagatcacttgaggtcaggagttctagatcagcttggccaacatgacgaaaccctgtctctactaaaaatataaaaattagctgggtgtggtggcgggcacctgttattccagctacttgcaaggcttaggcaggagaattccttgaacccgggaggcagaggttgctgtgagctgagattctgccactgcactccagcctgggcaacaagagtgaaactctgtctcaaaaagaaagaaagaaagaaagaaagctctgcagtcagctgtaagtaaatgccaggcacggtggctcacacctgtaatcccagcgctttgggaggctgaggcagcaggcggatcacttgagtccaggagttcacgaccagcctgggcaacgtggcaaaaccctgtctctacaaaaaataaaaaattagccaggtgtggtggtgcacacccataatcccagctactcagggggctgaggcaggaggattgcttaagcccaggaggtcaagcctgcagtaagctgaggttgagtcactgtactccagcttggatctccagcttgagatcctgtctcaataaaaaagaaagaaagaaaaagaaaataaagatgctggccaagtgcctaagaatggatgaagaaactctgggtgagggggctcaatagtgatagttgagtgactgtgtgggacacttaggaagacactctagcccctcagatctttgaagggctattgtatgctaggaaagcccactgttctttataattccaaaggcaggaatgtcccctttgggaaggatgaaagttgtatgactacagctggagagcagtgggatagactccttcagaagagggagacccctgtcctggaggcggccagggatgtcacggaggtagctttaagtggaaaagtcttgagtttagtcagaagcccccagcgctgcattggcttcctcccccttccatcaggggggacgggaaagaatagtaagaaaagccacagcttccctcccatgaacagagaccaccgccggatcatccatgacttggcccaagtttatggcctggagagcgtgagctatgacagtgaaccgaagcgcaatgtggtggtcactgccatcagggggaagtccgtttgtcctcctaccacgctgacaggtgtgcttgaaagggaaatgcaggcacggcctccaccaccgattcctcatcacagacatcagtcagacaagaatcctgggagcagtaatttacagaaaataaccaaggagccaataattgactattttgacgtccaggactaagaagatcatgatgcacttagataaaagaatgattaggtatagtggagacttatttgccagcagataaatcatgcccgttcccctctgcctggcagaatcacagtctcacatactgtcttgtactgacacatccaaagcatgagtgtgtcagaaatcccttgtctattcctgtctgtataaagtgtttcattatgaccagatctctgattgtatggtcactaggtatgcaatcacgcattcaaagaggctctttacaccatcactgtgattgctctgagagttgagggactattgggctttatttggacaaaccaaacttttagcctgaaaccaactttatgccactaagtcatagcctcagttgtcccagttatttgtcctcctgaaaatgcctgaaacatcagacagacattgcttgctttacccaaactgatcaaaatctttaggagcacaaatgaattttttagtctgaaataccaaataatgaattggtataccatatccggaatcacacatgttatcttaaacccagccatcatacctaagtcttttgccaaaacctctcataggtatatctagctgaacttattttggcattttcaatgtgatcagttctagacctagaagggggtcaggctgctttacagaattctatttccttaagtccctggcacttctcataccacatcactgaacctgttcagtaacaatcagtttggccgtcccccatgatggtaggaaatatagagagcaagttcttctgccagggtcacactgtggtctctgaactgaccagtatatccctaactcctctttgatagagaaagagtctcaaatggacaactgtcctgtgttgctttccctaggccttcagcagcctattggctctccctgcctctgagctctggactctgtttgaatattccaagtagtatatggacagtccagggcttatgcccagcagcccactggaggcattcttcaggctcctttaaggcaggtgcattgatagttccattagtgtgacccttgcattggcacccctccagcctggaggccaggcttccagcaacttccttctgccctagagcaagccatgagccccagagcagtagcaggagacttgagaagtagagtgacaaaaacaagcacttaattaaattataaaatttaacttta

SEQ ID NO: 346515 - DNA, 1731 bp, Homo sapiens
gttgagtatggatacaggtgaaaagataattaccagaaccgtctcttgtactctacataaaggagattagcagaggcatttcatatcagtgaggattctgatcctttcaatatacgttcttcagggtcaaaattcagtgatagtttgaaagaagatgccaggaaggacttaaagtttgtcagtgacgttgagaaggaaatggaaaccctcgtggaggccgtgaataagggaaagaatagtaagaaaagccacagcttccctcccatgaacagagaccaccgccggatcatccatgacttggcccaagtttatggcctggagagcgtgagctatgacagtgaaccgaagcgcaatgtggtggtcactgccatcagggggaagtccgtttgtcctcctaccacgctgacaggtgtgcttgaaagggaaatgcaggcacggcctccaccaccgattcctcatcacagacatcagtcagacaagaatcctgggagcagtaatttacagaaaataaccaaggagccaataattgactattttgacgtccaggactaagaagatcatgatgcacttagataaaagaatgattaggtatagtggagacttatttgccagcagataaatcatgcccgttcccctctgcctggcagaatcacagtctcacatactgtcttgtactgacacatccaaagcatgagtgtgtcagaaatcccttgtctattcctgtctgtataaagtgtttcattatgaccagatctctgattgtatggtcactaggtatgcaatcacgcattcaaagaggctctttacaccatcactgtgattgctctgagagttgagggactattgggctttatttggacaaaccaaacttttagcctgaaaccaactttatgccactaagtcatagcctcagttgtcccagttatttgtcctcctgaaaatgcctgaaacatcagacagacattgcttgctttacccaaactgatcaaaatctttaggagcacaaatgaattttttagtctgaaataccaaataatgaattggtataccatatccggaatcacacatgttatcttaaacccagccatcatacctaagtcttttgccaaaacctctcataggtatatctagctgaacttattttggcattttcaatgtgatcagttctagacctagaagggggtcaggctgctttacagaattctatttccttaagtccctggcacttctcataccacatcactgaacctgttcagtaacaatcagtttggccgtcccccatgatggtaggaaatatagagagcaagttcttctgccagggtcacactgtggtctctgaactgaccagtatatccctaactcctctttgatagagaaagagtctcaaatggacaactgtcctgtgttgctttccctaggccttcagcagcctattggctctccctgcctctgagctctggactctgtttgaatattccaagtagtatatggacagtccagggcttatgcccagcagcccactggaggcattcttcaggctcctttaaggcaggtgcattgatagttccattagtgtgacccttgcattggcacccctccagcctggaggccaggcttccagcaacttccttctgccctagagcaagccatgagccccagagcagtagcaggagacttgagaagtagagtgacaaaaacaagcacttaattaaattataaaatttaacttta

SEQ ID NO: 346516 - DNA, 2385 bp, Homo sapiens
acgtgacctggtgacagtgctggcttggctgtacagctcgatctaggttctgcggcacgggatggcggaggcgcctcctgtctcaggtacttttaaattcaatacagatgctgctgaattcattcctcaggagaaaaaaaattctggtctaaattgtgggactcaaaggagactagactctaataggattggtagaagaaattacagttcaccacctccctgtcacctttccaggcaggtcccttatgatgaaatctctgctgttcatcagcatagttatcatccgtcaggaagcaaacctaagagtcagcagacgtctttccagtcctctccttgtaataaatcgcccaagagccatggccttcagaatcaaccttggcagaaattgaggaatgagaagcaccatatcagagtcaagaaagcacagagtcttgctgagcagacctcagatacagctggattagagagctcgaccagatcagagagtgggacagacctcagagagcatagtccttctgagagtgagaaggaagttgtgggtgcagatcccaggggagcaaaacccaaaaaagcaacacagtttgtatacagctatggtagaggaccaaaagtcaaggggaaactcaaatgtgaatggagtaaccgaacaactccaaaaccggaggatgctggacccgaaagtaccaaacctgtgggggttttccaccctgactcttcagaggcatcctctagaaaaggagtattggatgggtatggagccagacgaaatgagcagagaagatacccacagaaaaggcctccctgggaagtggagggggccaggccacgaccaggcagaaatccaccaaaacaggagggccaccgacatacaaacgcaggacacagaaacaacatgggccccattccaaaggatgacctcaatgaaagaccagcaaaatctacctgtgacagtgagaacttggcagtcatcaacaagtcttccaggagggttgaccaagagaaatgcactgtacggaggcaggatcctcaagtagtatctcctttctcccgaggcaaacagaaccatgtgctaaagaatgtggaaacgcacacaggttctctaattgaacaactaacaacagaaaaatacgagtgcatggtgtgctgtgaattggttcgtgtcacggccccagtgtggagttgtcagagctgttaccatgtgtttcatttgaactgcataaagaaatgggcaaggtctccagcatctcaagcagatggccagagtggttggaggtgccctgcctgtcagaatgtttctgcacatgttcctaatacctacacttgtttctgtggcaaggtaaagaatcctgagtggagcagaaatgaaattccacatagctgtggtgaggtttgtagaaagaaacagcctggccaggactgcccacattcctgtaaccttctctgccatccaggaccctgcccaccctgccctgcctttatgacaaaaacatgtgaatgtggacgaaccaggcacacagttcgctgtggtcaggctgtctcagtccactgttctaacccatgtgagaatattttgaactgtggtcagcaccagtgtgctgagctgtgccatgggggtcagtgccagccttgccagatcattttgaaccaggtatgctattgcggcagcacctcccgagatgtgttatgtggaaccgatgtaggaaagtctgatggatttggggatttcagctgtttaaagatatgtggcaaggacttgaaatgcggtaaccatacatgttcgcaagtgtgccaccctcagccctgccagcaatgcccacggctcccccagctggtgcgctgttgcccctgtggccaaactcctctcagccaattgctagaacttggaagtagtagtcggaaaacatgcatggaccctgtgccttcatgtggaaaagtgtgcggcaagcctctgccttgtggttccttagatttcattcatacctgtgaaaagctctgccatgaaggagactgtggaccatgctctcgcacatcagttatttcctgcagatgctctttcagaacaaaggagcttccatgtaccagtctcaaaagtgaagatgctacatttatgtgtgacaagcggtgtaacaaactattgaaataagaaaaaagaaaaaaaaaaatcactgattgcaggtcaccctaacagatataataatgaaaaagtctgagatgttgcgagaattaccaaaatgtgatgcagacacgaaatgagcatgtgctgttggaaaagtggaacagatagacttgctggagacagggttgccacaaagtttcaatttgtaaaaaatgtgatatctatgaaatgcaataaagtgaagtccaataagaaatgcatatttattg

SEQ ID NO: 346517 - DNA, 2239 bp, Homo sapiens
acgtgacctggtgacagtgctggcttggctgtacagctcgatctaggttctgcggcacgggatggcggaggcgcctcctgtctcaggtacttttaaattcaatacagatgctgctgaattcattcctcaggagaaaaaaaattctggtctaaattgtgggactcaaaggagactagactctaataggattggtagaagaaattacagttcaccacctccctgtcacctttccaggcaggtcccttatgatgaaatctctgctgttcatcagcatagttatcatccgtcaggaagcaaacctaagagtcagcagacgtctttccagtcctctccttgtaataaatcgcccaagagccatggccttcagaatcaaccttggcagaaattgaggaatgagaagcaccatatcagagtcaagaaagcacagagtcttgctgagcagacctcagatacagctggattagagagctcgaccagatcagagagtgggacagacctcagagagcatagtccttctgagagtgagaaggaagttgtgggtgcagatcccaggggagcaaaacccaaaaaagcaacacagtttgtatacagctatggtagaggaccaaaagtcaaggggaaactcaaatgtgaatggagtaaccgaacaactccaaaaccggaggatgctggacccgaaagtaccaaacctgtgggggttttccaccctgactcttcagaggcatcctctagaaaaggagtattggatgggtatggagccagacgaaatgagcagagaagatacccacagaaaaggcctccctgggaagtggagggggccaggccacgaccaggcagaaatccaccaaaacaggagggccaccgacatacaaacgcaggacacagaaacaacatgggccccattccaaaggatgacctcaatgaaagaccagcaaaatctacctgtgacagtgagaacttggcagtcatcaacaagtcttccaggagggttgaccaagagaaatgcactgtacggaggcaggatcctcaagtagtatctcctttctcccgaggcaaacagaaccatgtgctaaagaatgtggaaacgcacacaggttctctaattgaacaactaacaacagaaaaatacgagtgcatggtgtgctgtgaattggttcgtgtcacggccccagtgtggagttgtcagagctgttaccatgtgtttcatttgaactgcataaagaaatgggcaaggtctccagcatctcaagcagatggccagagtggttggaggtgccctgcctgtcagaatgtttctgcacatgttcctaatacctacacttgtttctgtggcaaggtaaagaatcctgagtggagcagaaatgaaattccacatagctgtggtgaggtttgtagaaagaaacagcctggccaggactgcccacattcctgtaaccttctctgccatccaggaccctgcccaccctgccctgcctttatgacaaaaacatgtgaatgtggacgaaccaggcacacagttcgctgtggtcaggctgtctcagtccactgttctaacccatgtgagaatattttgaactgtggtcagcaccagtgtgctgagctgtgccatgggggtcagtgccagccttgccagatcattttgaaccaggtatgctattgcggcagcacctcccgagatgtgttatgtggaaccgatgtaggaaagtctgatggatttggggatttcagctgtttaaagatatgtggcaaggacttgaaatgcggtaaccatacatgttcgcaagtgtgccaccctcagccctgccagcaatgcccacggctcccccagctggtgcgctgttgcccctgtggccaaactcctctcagccaattgctagaacttggaagtagtagtcggaaaacatgcatggaccctgtgccttcatgtggaaaagtgtgcggcaagcctctgccttgtggttccttagatttcattcatacctgtgaaaagctctgccatgaaggagactgtggaccatgctctcgcacatcagttatttcctgcagatgctctttcagaacaaaggagcttccatgtaccagtctcaaaagtgaaggtatgactggggtggggcatgagggaatttctggggtgaaagtgtcgtcactctgaatcttgttagggagttgggttatgtatttgtcaaaattcagtgaaggcatacttaagatttgtggtataactttcacctcaaaagga

SEQ ID NO: 346518 - DNA, 1707 bp, Homo sapiens
acgtgacctggtgacagtgctggcttggctgtacagctcgatctaggttctgcggcacgggatggcggaggcgcctcctgtctcaggtacttttaaattcaatacagatgctgctgaattcattcctcaggagaaaaaaaattctggtctaaattgtgggactcaaaggagactagactctaataggattggtagaagaaattacagttcaccacctccctgtcacctttccaggcaggtcccttatgatgaaatctctgctgttcatcagcatagttatcatccgtcaggaagcaaacctaagagtcagcagacgtctttccagtcctctccttgtaataaatcgcccaagagccatggccttcagaatcaaccttggcagaaattgaggaatgagaagcaccatatcagagtcaagaaagcacagagtcttgctgagcagacctcagatacagctggattagagagctcgaccagatcagagagtgggacagacctcagagagcatagtccttctgagagtgagaaggaagttgtgggtgcagatcccaggggagcaaaacccaaaaaagcaacacagtttgtatacagctatggtagaggaccaaaagtcaaggggaaactcaaatgtgaatggagtaaccgaacaactccaaaaccggaggatgctggacccgaaagtaccaaacctgtgggggttttccaccctgactcttcagaggcatcctctagaaaaggagtattggatgggtatggagccagacgaaatgagcagagaagatacccacagaaaaggcctccctgggaagtggagggggccaggccacgaccaggcagaaatccaccaaaacaggagggccaccgacatacaaacgcaggacacagaaacaacatgggccccattccaaaggatgacctcaatgaaagaccagcaaaatctacctgtgacagtgagaacttggcagtcatcaacaagtcttccaggagggttgaccaagagaaatgcactgtacggaggcaggatcctcaagtagtatctcctttctcccgaggcaaacagaaccatgtgctaaagaatgtggaaacgcacacaggttctctaattgaacaactaacaacagaaaaatacgagtgcatggtgtgctgtgaattggttcgtgtcacggccccagtgtggagttgtcagagctgttaccatgtgtttcatttgaactgcataaagaaatgggcaaggtctccagcatctcaagcagatggccagagtggttggaggtgccctgcctgtcagaatgtttctgcacatgttcctaatacctacacttgtttctgtggcaaggtaaagaatcctgagtggagcagaaatgaaattccacatagctgtggtgaggtttgtagaaagaaacagcctggccaggactgcccacattcctgtaaccttctctgccatccaggaccctgcccaccctgccctgcctttatgacaaaaacatgtgaatgtggacgaaccaggcacacagttcgctgtggtcaggctgtctcagtccactgttctaacccatgtgagaatattttgaactgtggtcagcaccagtgtgctgagctgtgccatgggggtcagtgccagccttgccagatcattttgaaccagggtaagtggtgggcacaccagctagcaatgcttgtgttcttttctggaaccttattaat

SEQ ID NO: 346519 - DNA, 1490 bp, Homo sapiens
acgtgacctggtgacagtgctggcttggctgtacagctcgatctaggttctgcggcacgggatggcggaggcgcctcctgtctcaggtacttttaaattcaatacagatgctgctgaattcattcctcaggagaaaaaaaattctggtctaaattgtgggactcaaaggagactagactctaataggattggtagaagaaattacagttcaccacctccctgtcacctttccaggcaggtcccttatgatgaaatctctgctgttcatcagcatagttatcatccgtcaggaagcaaacctaagagtcagcagacgtctttccagtcctctccttgtaataaatcgcccaagagccatggccttcagaatcaaccttggcagaaattgaggaatgagaagcaccatatcagagtcaagaaagcacagagtcttgctgagcagacctcagatacagctggattagagagctcgaccagatcagagagtgggacagacctcagagagcatagtccttctgagagtgagaaggaagttgtgggtgcagatcccaggggagcaaaacccaaaaaagcaacacagtttgtatacagctatggtagaggaccaaaagtcaaggggaaactcaaatgtgaatggagtaaccgaacaactccaaaaccggaggatgctggacccgaaagtaccaaacctgtgggggttttccaccctgactcttcagaggcatcctctagaaaaggagtattggatgggtatggagccagacgaaatgagcagagaagatacccacagaaaaggcctccctgggaagtggagggggccaggccacgaccaggcagaaatccaccaaaacaggagggccaccgacatacaaacgcaggacacagaaacaacatgggccccattccaaaggatgacctcaatgaaagaccagcaaaatctacctgtgacagtgagaacttggcagtcatcaacaagtcttccaggagggttgaccaagagaaatgcactgtacggaggcaggatcctcaagtagtatctcctttctcccgaggcaaacagaaccatgtgctaaagaatgtggaaacgcacacaggttctctaattgaacaactaacaacagaaaaatacgagtgcatggtgtgctgtgaattggttcgtgtcacggccccagtgtggagttgtcagagctgttaccatgtgtttcatttgaactgcataaagaaatgggcaaggtctccagcatctcaagcagatggccagagtggttggaggtgccctgcctgtcagaatgtttctgcacatgttcctaatacctacacttgtttctgtggcaaggtaaagaatcctgagtggagcagaaatgaaattccacatagctgtggtgaggtttgtagaaagaaacagcctggccaggactgcccacattcctgtaaccttctctgccatccaggacctgcccacctgcctgaatgggccccagaggggatcc

SEQ ID NO: 346520 - DNA, 765 bp, Homo sapiens
tgaggtacttgtcagaatcgcagacttctaggtcccacccagctctcatcaatcagtttagtgagggtggtgcccaggactctgattttaaacatacccctagaaagattctgatacaggtagaggtgagaagccctggtttagaagcagctcggcctcccttcatggtgggaccagggccagcagggaatgtcagggccacccctgaccttcactgtgactctgctgcagagggtggcctggaggagatggtggaggagctcaacagcgggaaggtgatgtacgccttctgcagagtgaaggaccccaactctggactgcccaaatttgtcctcatcaactggacaggcgagggcaacagagcaagactccgtctcgaaaaaaaaaataaattttaaaaactacacattgggtacaatgtacactcctcgggtgatgggtgcaccaaaatctcaaaaatcactactaaggaacttatccatgtaaccaaacaccacctgttccccaagaactattgaaataagaaaaaagaaaaaaaaaaatcactgattgcaggtcaccctaacagatataataatgaaaaagtctgagatgttgcgagaattaccaaaatgtgatgcagacacgaaatgagcatgtgctgttggaaaagtggaacagatagacttgctggagacagggttgccacaaagtttcaatttgtaaaaaatgtgatatctatgaaatgcaataaagtgaagtccaataagaaatgcatatttattg

SEQ ID NO: 346521 - DNA, 592 bp, Homo sapiens
  misc_feature (293)..(293): n is a, c, g, or t
  misc_feature (298)..(298): n is a, c, g, or t
  misc_feature (301)..(302): n is a, c, g, or t
  misc_feature (305)..(305): n is a, c, g, or t
  misc_feature (321)..(321): n is a, c, g, or t
  misc_feature (355)..(355): n is a, c, g, or t
  misc_feature (358)..(358): n is a, c, g, or t
  misc_feature (372)..(372): n is a, c, g, or t
  misc_feature (377)..(377): n is a, c, g, or t
  misc_feature (406)..(406): n is a, c, g, or t
  misc_feature (430)..(430): n is a, c, g, or t
  misc_feature (446)..(446): n is a, c, g, or t
  misc_feature (476)..(476): n is a, c, g, or t
  misc_feature (509)..(509): n is a, c, g, or t
  misc_feature (515)..(515): n is a, c, g, or t
  misc_feature (522)..(522): n is a, c, g, or t
  misc_feature (545)..(545): n is a, c, g, or t
acgtgacctggtgacagtgctggcttggctgtacagctcgatctaggttctgcggcacgggatggcggaggcgcctcctgtctcaggtacttttaaattcaatacagatgctgctgaattcattcctcaggagaaaaaaaattctggtctaaattgtgggactcaaaggagactagactctaataggattggtagaagaaattacagttcaccacctccctgtcacctttccaggcaggtcccttatgatgaaatctctgctgttcatcagcatagttatcatcggggagggnggganggnnagnggggggggaggggagnagggggggggggggggggagaggggggggccggnggnaaggggagagggcngagcngggaggggagggggggggggcgagagcgnggggcagcggaggagaggggcggngggagggagggggggngggggggggagagggggcgagggggggtgngggggggggagggggggcgggggggggggggcngggggngaggggngggggggggcgggggagggggcngggggggggggggcaggagaaggggggggcccgggaggggggggggc

SEQ ID NO: 346522 - DNA, 316 bp, Homo sapiens
aggtgaaaagataattaccagaaccgtctcttgtactctacataaaggtgaaacctctatcctaatttctctttagattagtttttgaactttatgtaagtgatgaaatcatgtagtttgtattatttttgtctggcttctttcgttatatttttgtgacattcactcctgttgttgcatgtagcaatgctttattcatttttattcctgcatgattttttttgtattactattcatttacccattatactgttaatggatatctttgtattaactgttagactattacaaataaaactgttaagaattctttttt

SEQ ID NO: 346523 - DNA, 568 bp, Homo sapiens
aatagtttaacaaggcttttttaatttcttcctatggtaaagctcttaggcgggtcttagagctgctgtatgaactatactcatttctgcataggtctgatcagtactctatttggcctcgcacatttacaggcatgagcgactgtgccaggcccgcattttgtattttcttatagattatttgtgacattttaagaacccatacatgttactaacgttttgtttttgaaattttctcttcaagtatgctattgcggcagcacctcccgagatgtgttatgtggaaccgatgtaggaaagtctgatggatttggggatttcagctgtttaaagatatgtggcaagtaaggttttacgttttcttcagttgaactaaagctgcactttatgcaacaattatgtaatagtgtgttttcttaacagggacttgaaatgcggtaaccatacatgttcgcaagtgtgccaccctcagccctgccagcaatgcccacggctcccccagctggtgcgctgttgcccctgtggccaaactcctctcagccaattgctagaacttggaagtagtagt

SEQ ID NO: 346524 - DNA, 433 bp, Homo sapiens
taacattgaaattattaccactacttcaatattgtgtcttcctatagatttaaatttttttaattacatgtagcttttggaagaaaatttatttggcctactcccatttttcctgacagatggccagagtggttggaggtgccctgcctgtcagaatgtttctgcacatgttcctaatacctacacttgtttctgtggtaagtttgtttatatacactggagtctcttttactacatacattgtacctcagttcaggaaaggtggtctgcggggcatgttttagaagttactaatgagacttcaaagctctaggagtctataagactgtaattatgtggtccatcacacagctagagccacagcctttgtgctcctggcaagctgttctggagatggccaaccaggctcatgctgcttctgggctgtagtgct

SEQ ID NO: 346525 - DNA, 426 bp, Homo sapiens
aattgagaaaataagaattggaggagggagacataggaaaaagtgagggaaatgaagttagagaaaggcttagtgggttttgaggggagagttaggggccgcagtgttagtttggttgtccaacaggaacttttacactgatgctgtctttacatctattgtctttacaggcgcacacagttcgctgtggtcaggctgtctcagtccactgttctaacccatgtgagaatattttgaactgtggtcagcaccagtgtgctgagctgtgccatgggggtcagtgccagccttgccagatcattttgaaccagggtaagtggtgggcacaccagctagcaatgcttgtgttcttttctggaaccttattaatgattgtcttgataaactttgattggtgtcagacttttagtcacaaagaccttgagt

SEQ ID NO: 346526 - DNA, 5838 bp, Homo sapiens
acgtgacctggtgacagtgctggcttggctgtacagctcgatctaggttctgcggcacgggatggcggaggcgcctcctgtctcaggtacttttaaattcaatacagatgctgctgaattcattcctcaggagaaaaaaaattctggtctaaattgtgggactcaaaggagactagactctaataggattggtagaagaaattacagttcaccacctccctgtcacctttccaggcaggtcccttatgatgaaatctctgctgttcatcagcatagttatcatccgtcaggaagcaaacctaagagtcagcagacgtctttccagtcctctccttgtaataaatcgcccaagagccatggccttcagaatcaaccttggcagaaattgaggaatgagaagcaccatatcagagtcaagaaagcacagagtcttgctgagcagacctcagatacagctggattagagagctcgaccagatcagagagtgggacagacctcagagagcatagtccttctgagagtgagaaggaagttgtgggtgcagatcccaggggagcaaaacccaaaaaagcaacacagtttgtatacagctatggtagaggaccaaaagtcaaggggaaactcaaatgtgaatggagtaaccgaacaactccaaaaccggaggatgctggacccgaaagtaccaaacctgtgggggttttccaccctgactcttcagaggcatcctctagaaaaggagtattggatgggtatggagccagacgaaatgagcagagaagatacccacagaaaaggcctccctgggaagtggagggggccaggccacgaccaggcagaaatccaccaaaacaggagggccaccgacatacaaacgcaggacacagaaacaacatgggccccattccaaaggatgacctcaatgaaagaccagcaaaatctacctgtgacagtgagaacttggcagtcatcaacaagtcttccaggagggttgaccaagagaaatgcactgtacggaggcaggatcctcaagtagtatctcctttctcccgaggcaaacagaaccatgtgctaaagaatgtggaaacgcacacaggttctctaattgaacaactaacaacagaaaaatacgagtgcatggtgtgctgtgaattggttcgtgtcacggccccagtgtggagttgtcagagctgttaccatgtgtttcatttgaactgcataaagaaatgggcaaggtctccagcatctcaagcagatggccagagtggttggaggtgccctgcctgtcagaatgtttctgcacatgttcctaatacctacacttgtttctgtggcaaggtaaagaatcctgagtggagcagaaatgaaattccacatagctgtggtgaggtttgtagaaagaaacagcctggccaggactgcccacattcctgtaaccttctctgccatccaggaccctgcccaccctgccctgcctttatgacaaaaacatgtgaatgtggacgaaccaggcacacagttcgctgtggtcaggctgtctcagtccactgttctaacccatgtgagaatattttgaactgtggtcagcaccagtgtgctgagctgtgccatgggggtcagtgccagccttgccagatcattttgaaccaggtatgctattgcggcagcacctcccgagatgtgttatgtggaaccgatgtaggaaagtctgatggatttggggatttcagctgtttaaagatatgtggcaaggacttgaaatgcggtaaccatacatgttcgcaagtgtgccaccctcagccctgccagcaatgcccacggctcccccagctggtgcgctgttgcccctgtggccaaactcctctcagccaattgctagaacttggaagtagtagtcggaaaacatgcatggaccctgtgccttcatgtggaaaagtgtgcggcaagcctctgccttgtggttccttagatttcattcatacctgtgaaaagctctgccatgaaggagactgtggaccatgctctcgcacatcagttatttcctgcagatgctctttcagaacaaaggagcttccatgtaccagtctcaaaagtgaagatgctacatttatgtgtgacaagcggtgtaacaagaaacggttgtgtggacggcataaatgtaatgagatatgctgtgtggataaggagcacaagtgtcctttgatttgtgggaggaaactccgttgtggccttcataggtgtgaagaaccttgtcatcgtggaaactgccagacatgctggcaagccagttttgatgaattaacctgccattgtggtgcatcagtgatttaccctccagttccctgtggtactaggccccctgaatgtacccaaacctgcgctagagtccatgagtgtgaccatccagtatatcattcttgtcatagtgaggagaagtgtcccccttgcactttcctaactcagaagtggtgcatgggcaagcatgagtttcggagcaacatcccctgtcacctggttgatatctcttgcggattaccctgcagtgccacgctaccatgtgggatgcacaaatgtcagagactctgtcacaaaggggagtgtcttgtggatgagccctgcaagcagccctgcaccacccccagagctgactgtggtcacccgtgtatggcaccctgccataccagctcaccctgccctgtgactgcttgtaaagctaaggtagagctacagtgtgaatgtggacgaagaaaagagatggtgatttgctctgaagcatctagtacttatcaaagaatagctgcaatctccatggcctctaagataacagacatgcagcttggaggttcagtggagatcagcaagttaattaccaaaaaggaagttcatcaagccaggctggagtgtgatgaggagtgttcagccttggaaaggaaaaagagattagcagaggcatttcatatcagtgaggattctgatcctttcaatatacgttcttcagggtcaaaattcagtgatagtttgaaagaagatgccaggaaggacttaaagtttgtcagtgacgttgagaaggaaatggaaaccctcgtggaggccgtgaataaggttgaagtcgaaacatcccactggacatttctctaaggccagcttgatgaaaaaaaaaaagcaatcaagtcctggaaacactttcaacctagagtagttgtaggaaaaagtcacaacttctttgaggatccttatctttctcaaaacacagccattataacatctgtggaagcctgtcctggttcaggacagttgactgcagaaaagatctacagtcggctgggcacagtgtctcatgcctgtaatgccagcactttgggaggccaaggcaggcagatcacttgaggtcaggagttctagatcagcttggccaacatgacgaaaccctgtctctactaaaaatataaaaattagctgggtgtggtggcgggcacctgttattccagctacttgcaaggcttaggcaggagaattccttgaacccgggaggcagaggttgctgtgagctgagattctgccactgcactccagcctgggcaacaagagtgaaactctgtctcaaaaagaaagaaagaaagaaagaaagctctgcagtcagctgtaagtaaatgccaggcacggtggctcacacctgtaatcccagcgctttgggaggctgaggcagcaggcggatcacttgagtccaggagttcacgaccagcctgggcaacgtggcaaaaccctgtctctacaaaaaataaaaaattagccaggtgtggtggtgcacacccataatcccagctactcagggggctgaggcaggaggattgcttaagcccaggaggtcaagcctgcagtaagctgaggttgagtcactgtactccagcttggatctccagcttgagatcctgtctcaataaaaaagaaagaaagaaaaagaaaataaagatgctggccaagtgcctaagaatggatgaagaaactctgggtgagggggctcaatagtgatagttgagtgactgtgtgggacacttaggaagacactctagcccctcagatctttgaagggctattgtatgctaggaaagcccactgttctttataattccaaaggcaggaatgtcccctttgggaaggatgaaagttgtatgactacagctggagagcagtgggatagactccttcagaagagggagacccctgtcctggaggcggccagggatgtcacggaggtagctttaagtggaaaagtcttgagtttagtcagaagcccccagcgctgcattggcttcctcccccttccatcaggggggacgggaaagaatagtaagaaaagccacagcttccctcccatgaacagagaccaccgccggatcatccatgacttggcccaagtttatggcctggagagcgtgagctatgacagtgaaccgaagcgcaatgtggtggtcactgccatcagggggaagtccgtttgtcctcctaccacgctgacaggtgtgcttgaaagggaaatgcaggcacggcctccaccaccgattcctcatcacagacatcagtcagacaagaatcctgggagcagtaatttacagaaaataaccaaggagccaataattgactattttgacgtccaggactaagaagatcatgatgcacttagataaaagaatgattaggtatagtggagacttatttgccagcagataaatcatgcccgttcccctctgcctggcagaatcacagtctcacatactgtcttgtactgacacatccaaagcatgagtgtgtcagaaatcccttgtctattcctgtctgtataaagtgtttcattatgaccagatctctgattgtatggtcactaggtatgcaatcacgcattcaaagaggctctttacaccatcactgtgattgctctgagagttgagggactattgggctttatttggacaaaccaaacttttagcctgaaaccaactttatgccactaagtcatagcctcagttgtcccagttatttgtcctcctgaaaatgcctgaaacatcagacagacattgcttgctttacccaaactgatcaaaatctttaggagcacaaatgaattttttagtctgaaataccaaataatgaattggtataccatatccggaatcacacatgttatcttaaacccagccatcatacctaagtcttttgccaaaacctctcataggtatatctagctgaacttattttggcattttcaatgtgatcagttctagacctagaagggggtcaggctgctttacagaattctatttccttaagtccctggcacttctcataccacatcactgaacctgttcagtaacaatcagtttggccgtcccccatgatggtaggaaatatagagagcaagttcttctgccagggtcacactgtggtctctgaactgaccagtatatccctaactcctctttgatagagaaagagtctcaaatggacaactgtcctgtgttgctttccctaggccttcagcagcctattggctctccctgcctctgagctctggactctgtttgaatattccaagtagtatatggacagtccagggcttatgcccagcagcccactggaggcattcttcaggctcctttaaggcaggtgcattgatagttccattagtgtgacccttgcattggcacccctccagcctggaggccaggcttccagcaacttccttctgccctagagcaagccatgagccccagagcagtagcaggagacttgagaagtagagtgacaaaaacaagcacttaattaaattataaaatttaacttta

SEQ ID NO: 346527 - DNA, 5774 bp, Homo sapiens
acgtgacctggtgacagtgctggcttggctgtacagctcgatctaggttctgcggcacgggatggcggaggcgcctcctgtctcaggtacttttaaattcaatacagatgctgctgaattcattcctcaggagaaaaaaaattctggtctaaattgtgggactcaaaggagactagactctaataggattggtagaagaaattacagttcaccacctccctgtcacctttccaggcaggtcccttatgatgaaatctctgctgttcatcagcatagttatcatccgtcaggaagcaaacctaagagtcagcagacgtctttccagtcctctccttgtaataaatcgcccaagagccatggccttcagaatcaaccttggcagaaattgaggaatgagaagcaccatatcagagtcaagaaagcacagagtcttgctgagcagacctcagatacagctggattagagagctcgaccagatcagagagtgggacagacctcagagagcatagtccttctgagagtgagaaggaagttgtgggtgcagatcccaggggagcaaaacccaaaaaagcaacacagtttgtatacagctatggtagaggaccaaaagtcaaggggaaactcaaatgtgaatggagtaaccgaacaactccaaaaccggaggatgctggacccgaaagtaccaaacctgtgggggttttccaccctgactcttcagaggcatcctctagaaaaggagtattggatgggtatggagccagacgaaatgagcagagaagatacccacagaaaaggcctccctgggaagtggagggggccaggccacgaccaggcagaaatccaccaaaacaggagggccaccgacatacaaacgcaggacacagaaacaacatgggccccattccaaaggatgacctcaatgaaagaccagcaaaatctacctgtgacagtgagaacttggcagtcatcaacaagtcttccaggagggttgaccaagagaaatgcactgtacggaggcaggatcctcaagtagtatctcctttctcccgaggcaaacagaaccatgtgctaaagaatgtggaaacgcacacaggttctctaattgaacaactaacaacagaaaaatacgagtgcatggtgtgctgtgaattggttcgtgtcacggccccagtgtggagttgtcagagctgttaccatgtgtttcatttgaactgcataaagaaatgggcaaggtctccagcatctcaagcagatggccagagtggttggaggtgccctgcctgtcagaatgtttctgcacatgttcctaatacctacacttgtttctgtggcaaggtaaagaatcctgagtggagcagaaatgaaattccacatagctgtggtgaggtttgtagaaagaaacagcctggccaggactgcccacattcctgtaaccttctctgccatccaggaccctgcccaccctgccctgcctttatgacaaaaacatgtgaatgtggacgaaccaggcacacagttcgctgtggtcaggctgtctcagtccactgttctaacccatgtgagaatattttgaactgtggtcagcaccagtgtgctgagctgtgccatgggggtcagtgccagccttgccagatcattttgaaccaggtatgctattgcggcagcacctcccgagatgtgttatgtggaaccgatgtaggaaagtctgatggatttggggatttcagctgtttaaagatatgtggcaaggacttgaaatgcggtaaccatacatgttcgcaagtgtgccaccctcagccctgccagcaatgcccacggctcccccagctggtgcgctgttgcccctgtggccaaactcctctcagccaattgctagaacttggaagtagtagtcggaaaacatgcatggaccctgtgccttcatgtggaaaagtgtgcggcaagcctctgccttgtggttccttagatttcattcatacctgtgaaaagctctgccatgaaggagactgtggaccatgctctcgcacatcagttatttcctgcagatgctctttcagaacaaagagaaacggttgtgtggacggcataaatgtaatgagatatgctgtgtggataaggagcacaagtgtcctttgatttgtgggaggaaactccgttgtggccttcataggtgtgaagaaccttgtcatcgtggaaactgccagacatgctggcaagccagttttgatgaattaacctgccattgtggtgcatcagtgatttaccctccagttccctgtggtactaggccccctgaatgtacccaaacctgcgctagagtccatgagtgtgaccatccagtatatcattcttgtcatagtgaggagaagtgtcccccttgcactttcctaactcagaagtggtgcatgggcaagcatgagtttcggagcaacatcccctgtcacctggttgatatctcttgcggattaccctgcagtgccacgctaccatgtgggatgcacaaatgtcagagactctgtcacaaaggggagtgtcttgtggatgagccctgcaagcagccctgcaccacccccagagctgactgtggtcacccgtgtatggcaccctgccataccagctcaccctgccctgtgactgcttgtaaagctaaggtagagctacagtgtgaatgtggacgaagaaaagagatggtgatttgctctgaagcatctagtacttatcaaagaatagctgcaatctccatggcctctaagataacagacatgcagcttggaggttcagtggagatcagcaagttaattaccaaaaaggaagttcatcaagccaggctggagtgtgatgaggagtgttcagccttggaaaggaaaaagagattagcagaggcatttcatatcagtgaggattctgatcctttcaatatacgttcttcagggtcaaaattcagtgatagtttgaaagaagatgccaggaaggacttaaagtttgtcagtgacgttgagaaggaaatggaaaccctcgtggaggccgtgaataaggttgaagtcgaaacatcccactggacatttctctaaggccagcttgatgaaaaaaaaaaagcaatcaagtcctggaaacactttcaacctagagtagttgtaggaaaaagtcacaacttctttgaggatccttatctttctcaaaacacagccattataacatctgtggaagcctgtcctggttcaggacagttgactgcagaaaagatctacagtcggctgggcacagtgtctcatgcctgtaatgccagcactttgggaggccaaggcaggcagatcacttgaggtcaggagttctagatcagcttggccaacatgacgaaaccctgtctctactaaaaatataaaaattagctgggtgtggtggcgggcacctgttattccagctacttgcaaggcttaggcaggagaattccttgaacccgggaggcagaggttgctgtgagctgagattctgccactgcactccagcctgggcaacaagagtgaaactctgtctcaaaaagaaagaaagaaagaaagaaagctctgcagtcagctgtaagtaaatgccaggcacggtggctcacacctgtaatcccagcgctttgggaggctgaggcagcaggcggatcacttgagtccaggagttcacgaccagcctgggcaacgtggcaaaaccctgtctctacaaaaaataaaaaattagccaggtgtggtggtgcacacccataatcccagctactcagggggctgaggcaggaggattgcttaagcccaggaggtcaagcctgcagtaagctgaggttgagtcactgtactccagcttggatctccagcttgagatcctgtctcaataaaaaagaaagaaagaaaaagaaaataaagatgctggccaagtgcctaagaatggatgaagaaactctgggtgagggggctcaatagtgatagttgagtgactgtgtgggacacttaggaagacactctagcccctcagatctttgaagggctattgtatgctaggaaagcccactgttctttataattccaaaggcaggaatgtcccctttgggaaggatgaaagttgtatgactacagctggagagcagtgggatagactccttcagaagagggagacccctgtcctggaggcggccagggatgtcacggaggtagctttaagtggaaaagtcttgagtttagtcagaagcccccagcgctgcattggcttcctcccccttccatcaggggggacgggaaagaatagtaagaaaagccacagcttccctcccatgaacagagaccaccgccggatcatccatgacttggcccaagtttatggcctggagagcgtgagctatgacagtgaaccgaagcgcaatgtggtggtcactgccatcagggggaagtccgtttgtcctcctaccacgctgacaggtgtgcttgaaagggaaatgcaggcacggcctccaccaccgattcctcatcacagacatcagtcagacaagaatcctgggagcagtaatttacagaaaataaccaaggagccaataattgactattttgacgtccaggactaagaagatcatgatgcacttagataaaagaatgattaggtatagtggagacttatttgccagcagataaatcatgcccgttcccctctgcctggcagaatcacagtctcacatactgtcttgtactgacacatccaaagcatgagtgtgtcagaaatcccttgtctattcctgtctgtataaagtgtttcattatgaccagatctctgattgtatggtcactaggtatgcaatcacgcattcaaagaggctctttacaccatcactgtgattgctctgagagttgagggactattgggctttatttggacaaaccaaacttttagcctgaaaccaactttatgccactaagtcatagcctcagttgtcccagttatttgtcctcctgaaaatgcctgaaacatcagacagacattgcttgctttacccaaactgatcaaaatctttaggagcacaaatgaattttttagtctgaaataccaaataatgaattggtataccatatccggaatcacacatgttatcttaaacccagccatcatacctaagtcttttgccaaaacctctcataggtatatctagctgaacttattttggcattttcaatgtgatcagttctagacctagaagggggtcaggctgctttacagaattctatttccttaagtccctggcacttctcataccacatcactgaacctgttcagtaacaatcagtttggccgtcccccatgatggtaggaaatatagagagcaagttcttctgccagggtcacactgtggtctctgaactgaccagtatatccctaactcctctttgatagagaaagagtctcaaatggacaactgtcctgtgttgctttccctaggccttcagcagcctattggctctccctgcctctgagctctggactctgtttgaatattccaagtagtatatggacagtccagggcttatgcccagcagcccactggaggcattcttcaggctcctttaaggcaggtgcattgatagttccattagtgtgacccttgcattggcacccctccagcctggaggccaggcttccagcaacttccttctgccctagagcaagccatgagccccagagcagtagcaggagacttgagaagtagagtgacaaaaacaagcacttaattaaattataaaatttaacttta

SEQ ID NO: 346528 - DNA, 5435 bp, Homo sapiens
atgagtcatcttagaagactagacacttgttcctggattgttttcaatgtttaaactttatttaagaattatcagagcttgtttaggagtttcatagaaactaaacattccagccagaccactttataagcacactaatgttttacagcaaattctgttacccatctgattaattagtcttggctctgattggcttttgattcccaaagggttgtaatttgccacctagaatatacccctcctactccaaaaacagttgtcgtagaagttcccaaaatgttttaagtagtggtatttctgtaccactgtgtaatttgccaaagtgtctgctttgaagagggcagtatatatttgaatatacaaattccgtattgtaacttttttctattggtctctataatatagctcctaaaatagcatttttcagagggctaattctgacctatagcatatcactcagcccagttctttccatgacccccttccctttcattctctccatgttactcactagcatgcctcccctcatgtcagccttcttttcactgttccattgtttgcccagtgcctgattattacttcactagctgatagtatgtctgtacttcttacggaccaggtagatttgagttctattactttgcttagactctgatcttctacaggaccctattagccattctgccttttacctgagtagcaaactatttttatccccacacactgctgtaagtgggccaagactgtatttgaaaatgtcatctttgactctcagacccaaatataaccagtattttgacttgggatttacttctgtggttaaatagtctgtggtgataatgatgtcgattttttgcacataaaagtacagttgatatctttgttcaaatagtttaatcaactttaaacaaatacaaagacatgtcatagtagatgtatttgttgccatattcacaataagacccagctgggacagctttgttcgggtttggatacatggctgtggtttattcagtgaaacctttctctttcagtctctgccatccaggaccctgcccaccctgccctgcctttatgacaaaaacatgtgaatgtggacgaaccaggcacacagttcgctgtggtcaggctgtctcagtccactgttctaacccatgtgagaatattttgaactgtggtcagcaccagtgtgctgagctgtgccatgggggtcagtgccagccttgccagatcattttgaaccaggtatgctattgcggcagcacctcccgagatgtgttatgtggaaccgatgtaggaaagtctgatggatttggggatttcagctgtttaaagatatgtggcaaggacttgaaatgcggtaaccatacatgttcgcaagtgtgccaccctcagccctgccagcaatgcccacggctcccccagctggtgcgctgttgcccctgtggccaaactcctctcagccaattgctagaacttggaagtagtagtcggaaaacatgcatggaccctgtgccttcatgtggaaaagtgtgcggcaagcctctgccttgtggttccttagatttcattcatacctgtgaaaagctctgccatgaaggagactgtggaccatgctctcgcacatcagttatttcctgcagatgctctttcagaacaaaggagcttccatgtaccagtctcaaaagtgaagatgctacatttatgtgtgacaagcggtgtaacaagaaacggttgtgtggacggcataaatgtaatgagatatgctgtgtggataaggagcacaagtgtcctttgatttgtgggaggaaactccgttgtggccttcataggtgtgaagaaccttgtcatcgtggaaactgccagacatgctggcaagccagttttgatgaattaacctgccattgtggtgcatcagtgatttaccctccagttccctgtggtactaggccccctgaatgtacccaaacctgcgctagagtccatgagtgtgaccatccagtatatcattcttgtcatagtgaggagaagtgtcccccttgcactttcctaactcagaagtggtgcatgggcaagcatgagtttcggagcaacatcccctgtcacctggttgatatctcttgcggattaccctgcagtgccacgctaccatgtgggatgcacaaatgtcagagactctgtcacaaaggggagtgtcttgtggatgagccctgcaagcagccctgcaccacccccagagctgactgtggtcacccgtgtatggcaccctgccataccagctcaccctgccctgtgactgcttgtaaagctaaggtagagctacagtgtgaatgtggacgaagaaaagagatggtgatttgctctgaagcatctagtacttatcaaagaatagctgcaatctccatggcctctaagataacagacatgcagcttggaggttcagtggagatcagcaagttaattaccaaaaaggaagttcatcaagccaggctggagtgtgatgaggagtgttcagccttggaaaggaaaaagagattagcagaggcatttcatatcagtgaggattctgatcctttcaatatacgttcttcagggtcaaaattcagtgatagtttgaaagaagatgccaggaaggacttaaagtttgtcagtgacgttgagaaggaaatggaaaccctcgtggaggccgtgaataaggttgaagtcgaaacatcccactggacatttctctaaggccagcttgatgaaaaaaaaaaagcaatcaagtcctggaaacactttcaacctagagtagttgtaggaaaaagtcacaacttctttgaggatccttatctttctcaaaacacagccattataacatctgtggaagcctgtcctggttcaggacagttgactgcagaaaagatctacagtcggctgggcacagtgtctcatgcctgtaatgccagcactttgggaggccaaggcaggcagatcacttgaggtcaggagttctagatcagcttggccaacatgacgaaaccctgtctctactaaaaatataaaaattagctgggtgtggtggcgggcacctgttattccagctacttgcaaggcttaggcaggagaattccttgaacccgggaggcagaggttgctgtgagctgagattctgccactgcactccagcctgggcaacaagagtgaaactctgtctcaaaaagaaagaaagaaagaaagaaagctctgcagtcagctgtaagtaaatgccaggcacggtggctcacacctgtaatcccagcgctttgggaggctgaggcagcaggcggatcacttgagtccaggagttcacgaccagcctgggcaacgtggcaaaaccctgtctctacaaaaaataaaaaattagccaggtgtggtggtgcacacccataatcccagctactcagggggctgaggcaggaggattgcttaagcccaggaggtcaagcctgcagtaagctgaggttgagtcactgtactccagcttggatctccagcttgagatcctgtctcaataaaaaagaaagaaagaaaaagaaaataaagatgctggccaagtgcctaagaatggatgaagaaactctgggtgagggggctcaatagtgatagttgagtgactgtgtgggacacttaggaagacactctagcccctcagatctttgaagggctattgtatgctaggaaagcccactgttctttataattccaaaggcaggaatgtcccctttgggaaggatgaaagttgtatgactacagctggagagcagtgggatagactccttcagaagagggagacccctgtcctggaggcggccagggatgtcacggaggtagctttaagtggaaaagtcttgagtttagtcagaagcccccagcgctgcattggcttcctcccccttccatcaggggggacgggaaagaatagtaagaaaagccacagcttccctcccatgaacagagaccaccgccggatcatccatgacttggcccaagtttatggcctggagagcgtgagctatgacagtgaaccgaagcgcaatgtggtggtcactgccatcagggggaagtccgtttgtcctcctaccacgctgacaggtgtgcttgaaagggaaatgcaggcacggcctccaccaccgattcctcatcacagacatcagtcagacaagaatcctgggagcagtaatttacagaaaataaccaaggagccaataattgactattttgacgtccaggactaagaagatcatgatgcacttagataaaagaatgattaggtatagtggagacttatttgccagcagataaatcatgcccgttcccctctgcctggcagaatcacagtctcacatactgtcttgtactgacacatccaaagcatgagtgtgtcagaaatcccttgtctattcctgtctgtataaagtgtttcattatgaccagatctctgattgtatggtcactaggtatgcaatcacgcattcaaagaggctctttacaccatcactgtgattgctctgagagttgagggactattgggctttatttggacaaaccaaacttttagcctgaaaccaactttatgccactaagtcatagcctcagttgtcccagttatttgtcctcctgaaaatgcctgaaacatcagacagacattgcttgctttacccaaactgatcaaaatctttaggagcacaaatgaattttttagtctgaaataccaaataatgaattggtataccatatccggaatcacacatgttatcttaaacccagccatcatacctaagtcttttgccaaaacctctcataggtatatctagctgaacttattttggcattttcaatgtgatcagttctagacctagaagggggtcaggctgctttacagaattctatttccttaagtccctggcacttctcataccacatcactgaacctgttcagtaacaatcagtttggccgtcccccatgatggtaggaaatatagagagcaagttcttctgccagggtcacactgtggtctctgaactgaccagtatatccctaactcctctttgatagagaaagagtctcaaatggacaactgtcctgtgttgctttccctaggccttcagcagcctattggctctccctgcctctgagctctggactctgtttgaatattccaagtagtatatggacagtccagggcttatgcccagcagcccactggaggcattcttcaggctcctttaaggcaggtgcattgatagttccattagtgtgacccttgcattggcacccctccagcctggaggccaggcttccagcaacttccttctgccctagagcaagccatgagccccagagcagtagcaggagacttgagaagtagagtgacaaaaacaagcacttaattaaattataaaatttaacttta

SEQ ID NO: 346529 - DNA, 1818 bp, Homo sapiens
  misc_feature (19)..(19): n is a, c, g, or t
  misc_feature (25)..(25): n is a, c, g, or t
aataagctagtacgaggcnggttgnaatcggccgaggcagacatgcagcttggaggttcagtggagatcagcaagttaattaccaaaaaggaagttcatcaagccaggctggagtgtgatgaggagtgttcagccttggaaaggaaaaagagattagcagaggcatttcatatcagtgaggattctgatcctttcaatatacgttcttcagggtcaaaattcagtgatagtttgaaagaagatgccaggaaggacttaaagtttgtcagtgacgttgagaaggaaatggaaaccctcgtggaggccgtgaataagggaaagaatagtaagaaaagccacagcttccctcccatgaacagagaccaccgccggatcatccatgacttggcccaagtttatggcctggagagcgtgagctatgacagtgaaccgaagcgcaatgtggtggtcactgccatcagggggaagtccgtttgtcctcctaccacgctgacaggtgtgcttgaaagggaaatgcaggcacggcctccaccaccgattcctcatcacagacatcagtcagacaagaatcctgggagcagtaatttacagaaaataaccaaggagccaataattgactattttgacgtccaggactaagaagatcatgatgcacttagataaaagaatgattaggtatagtggagacttatttgccagcagataaatcatgcccgttcccctctgcctggcagaatcacagtctcacatactgtcttgtactgacacatccaaagcatgagtgtgtcagaaatcccttgtctattcctgtctgtataaagtgtttcattatgaccagatctctgattgtatggtcactaggtatgcaatcacgcattcaaagaggctctttacaccatcactgtgattgctctgagagttgagggactattgggctttatttggacaaaccaaacttttagcctgaaaccaactttatgccactaagtcatagcctcagttgtcccagttatttgtcctcctgaaaatgcctgaaacatcagacagacattgcttgctttacccaaactgatcaaaatctttaggagcacaaatgaattttttagtctgaaataccaaataatgaattggtataccatatccggaatcacacatgttatcttaaacccagccatcatacctaagtcttttgccaaaacctctcataggtatatctagctgaacttattttggcattttcaatgtgatcagttctagacctagaagggggtcaggctgctttacagaattctatttccttaagtccctggcacttctcataccacatcactgaacctgttcagtaacaatcagtttggccgtcccccatgatggtaggaaatatagagagcaagttcttctgccagggtcacactgtggtctctgaactgaccagtatatccctaactcctctttgatagagaaagagtctcaaatggacaactgtcctgtgttgctttccctaggccttcagcagcctattggctctccctgcctctgagctctggactctgtttgaatattccaagtagtatatggacagtccagggcttatgcccagcagcccactggaggcattcttcaggctcctttaaggcaggtgcattgatagttccattagtgtgacccttgcattggcacccctccagcctggaggccaggcttccagcaacttccttctgccctagagcaagccatgagccccagagcagtagcaggagacttgagaagtagagtgacaaaaacaagcacttaattaaattataaaatttaacttta

SEQ ID NO: 346530 - DNA, 2627 bp, Homo sapiens
acgtgacctggtgacagtgctggcttggctgtacagctcgatctaggttctgcggcacgggatggcggaggcgcctcctgtctcaggtacttttaaattcaatacagatgctgctgaattcattcctcaggagaaaaaaaattctggtctaaattgtgggactcaaaggagactagactctaataggattggtagaagaaattacagttcaccacctccctgtcacctttccaggcaggtcccttatgatgaaatctctgctgttcatcagcatagttatcatccgtcaggaagcaaacctaagagtcagcagacgtctttccagtcctctccttgtaataaatcgcccaagagccatggccttcagaatcaaccttggcagaaattgaggaatgagaagcaccatatcagagtcaagaaagcacagagtcttgctgagcagacctcagatacagctggattagagagctcgaccagatcagagagtgggacagacctcagagagcatagtccttctgagagtgagaaggaagttgtgggtgcagatcccaggggagcaaaacccaaaaaagcaacacagtttgtatacagctatggtagaggaccaaaagtcaaggggaaactcaaatgtgaatggagtaaccgaacaactccaaaaccggaggatgctggacccgaaagtaccaaacctgtgggggttttccaccctgactcttcagaggcatcctctagaaaaggagtattggatgggtatggagccagacgaaatgagcagagaagatacccacagaaaaggcctccctgggaagtggagggggccaggccacgaccaggcagaaatccaccaaaacaggagggccaccgacatacaaacgcaggacacagaaacaacatgggccccattccaaaggatgacctcaatgaaagaccagcaaaatctacctgtgacagtgagaacttggcagtcatcaacaagtcttccaggagggttgaccaagagaaatgcactgtacggaggcaggatcctcaagtagtatctcctttctcccgaggcaaacagaaccatgtgctaaagaatgtggaaacgcacacaggttctctaattgaacaactaacaacagaaaaatacgagtgcatggtgtgctgtgaattggttcgtgtcacggccccagtgtggagttgtcagagctgttaccatgtgtttcatttgaactgcataaagaaatgggcaaggtctccagcatctcaagcagatggccagagtggttggaggtgccctgcctgtcagaatgtttctgcacatgttcctaatacctacacttgtttctgtggcaaggtaaagaatcctgagtggagcagaaatgaaattccacatagctgtggtgaggtttgtagaaagaaacagcctggccaggactgcccacattcctgtaaccttctctgccatccaggaccctgcccaccctgccctgcctttatgacaaaaacatgtgaatgtggacgaaccaggcacacagttcgctgtggtcaggctgtctcagtccactgttctaacccatgtgagaatattttgaactgtggtcagcaccagtgtgctgagctgtgccatgggggtcagtgccagccttgccagatcattttgaaccaggtatgctattgcggcagcacctcccgagatgtgttatgtggaaccgatgtaggaaagtctgatggatttggggatttcagctgtttaaagatatgtggcaaggacttgaaatgcggtaaccatacatgttcgcaagtgtgccaccctcagccctgccagcaatgcccacggctcccccagctggtgcgctgttgcccctgtggccaaactcctctcagccaattgctagaacttggaagtagtagtcggaaaacatgcatggaccctgtgccttcatgtggaaaagtgtgcggcaagcctctgccttgtggttccttagatttcattcatacctgtgaaaagctctgccatgaaggagactgtggaccatgctctcgcacatcagttatttcctgcagatgctctttcagaacaaaggagcttccatgtaccagtctcaaaagtgaagatgctacatttatgtgtgacaagcggtgtaacaagaaacggttgtgtggacggcataaatgtaatgagatatgctgtgtggtaagtggacttattaggcataatcagattccattcatccaggtgctgggcttctggaagcctgagccatgtggagaatgcagcccggatttaaaagtcactgggacaggcccctaagcagcagtcagagagctctcatagtccccataacctctctgcaaagagacagactgggcctttttagcctcacccaggttaagaagtcagccagtggcatctggtagcaacacagaggaagagaaagagataagagaaggtctcacaccccagagcccaagacccctagatgagcacacagtcttcggcagaagattgtgtgttgtcccaacacaaactggcctggacttagcaacttgggcttcaggtttcatgtactgcttaggtcaggtcagtaggaaaaattattaggacattttttaaaaagattttttaaaataaaatatttatttaa

SEQ ID NO: 346531 - DNA, 1490 bp, Homo sapiens
acgtgacctggtgacagtgctggcttggctgtacagctcgatctaggttctgcggcacgggatggcggaggcgcctcctgtctcaggtacttttaaattcaatacagatgctgctgaattcattcctcaggagaaaaaaaattctggtctaaattgtgggactcaaaggagactagactctaataggattggtagaagaaattacagttcaccacctccctgtcacctttccaggcaggtcccttatgatgaaatctctgctgttcatcagcatagttatcatccgtcaggaagcaaacctaagagtcagcagacgtctttccagtcctctccttgtaataaatcgcccaagagccatggccttcagaatcaaccttggcagaaattgaggaatgagaagcaccatatcagagtcaagaaagcacagagtcttgctgagcagacctcagatacagctggattagagagctcgaccagatcagagagtgggacagacctcagagagcatagtccttctgagagtgagaaggaagttgtgggtgcagatcccaggggagcaaaacccaaaaaagcaacacagtttgtatacagctatggtagaggaccaaaagtcaaggggaaactcaaatgtgaatggagtaaccgaacaactccaaaaccggaggatgctggacccgaaagtaccaaacctgtgggggttttccaccctgactcttcagaggcatcctctagaaaaggagtattggatgggtatggagccagacgaaatgagcagagaagatacccacagaaaaggcctccctgggaagtggagggggccaggccacgaccaggcagaaatccaccaaaacaggagggccaccgacatacaaacgcaggacacagaaacaacatgggccccattccaaaggatgacctcaatgaaagaccagcaaaatctacctgtgacagtgagaacttggcagtcatcaacaagtcttccaggagggttgaccaagagaaatgcactgtacggaggcaggatcctcaagtagtatctcctttctcccgaggcaaacagaaccatgtgctaaagaatgtggaaacgcacacaggttctctaattgaacaactaacaacagaaaaatacgagtgcatggtgtgctgtgaattggttcgtgtcacggccccagtgtggagttgtcagagctgttaccatgtgtttcatttgaactgcataaagaaatgggcaaggtctccagcatctcaagcagatggccagagtggttggaggtgccctgcctgtcagaatgtttctgcacatgttcctaatacctacacttgtttctgtggcaaggtaaagaatcctgagtggagcagaaatgaaattccacatagctgtggtgaggtttgtagaaagaaacagcctggccaggactgcccacattcctgtaaccttctctgccatccaggacctgcctctatgtcgttttcgggaacctctagagcac

SEQ ID NO: 346532 - DNA, 1590 bp, Homo sapiens
acgtgacctggtgacagtgctggcttggctgtacagctcgatctaggttctgcggcacgggatggcggaggcgcctcctgtctcaggtacttttaaattcaatacagatgctgctgaattcattcctcaggagaaaaaaaattctggtctaaattgtgggactcaaaggagactagactctaataggattggtagaagaaattacagttcaccacctccctgtcacctttccaggcaggtcccttatgatgaaatctctgctgttcatcagcatagttatcatccgtcaggaagcaaacctaagagtcagcagacgtctttccagtcctctccttgtaataaatcgcccaagagccatggccttcagaatcaaccttggcagaaattgaggaatgagaagcaccatatcagagtcaagaaagcacagagtcttgctgagcagacctcagatacagctggattagagagctcgaccagatcagagagtgggacagacctcagagagcatagtccttctgagagtgagaaggaagttgtgggtgcagatcccaggggagcaaaacccaaaaaagcaacacagtttgtatacagctatggtagaggaccaaaagtcaaggggaaactcaaatgtgaatggagtaaccgaacaactccaaaaccggaggatgctggacccgaaagtaccaaacctgtgggggttttccaccctgactcttcagaggcatcctctagaaaaggagtattggatgggtatggagccagacgaaatgagcagagaagatacccacagaaaaggcctccctgggaagtggagggggccaggccacgaccaggcagaaatccaccaaaacaggagggccaccgacatacaaacgcaggacacagaaacaacatgggccccattccaaaggatgacctcaatgaaagaccagcaaaatctacctgtgacagtgagaacttggcagtcatcaacaagtcttccaggagggttgaccaagagaaatgcactgtacggaggcaggatcctcaagtagtatctcctttctcccgaggcaaacagaaccatgtgctaaagaatgtggaaacgcacacaggttctctaattgaacaactaacaacagaaaaatacgagtgcatggtgtgctgtgaattggttcgtgtcacggccccagtgtggagttgtcagagcaagactccgtctcgaaaaaaaaaataaattttaaaaactacacattgggtacaatgtacactcctcgggtgatgggtgcaccaaaatctcaaaaatcactactaaggaacttatccatgtaaccaaacaccacctgttccccaagaactattgaaataagaaaaaagaaaaaaaaaaatcactgattgcaggtcaccctaacagatataataatgaaaaagtctgagatgttgcgagaattaccaaaatgtgatgcagacacgaaatgagcatgtgctgttggaaaagtggaacagatagacttgctggagacagggttgccacaaagtttcaatttgtaaaaaatgtgatatctatgaaatgcaataaagtgaagtccaataagaaatgcatatttattg

SEQ ID NO: 346533 - DNA, 452 bp, Homo sapiens
caaatatgatggaagtttatttctcacccctcagtccaggagaatgtcttagatgttagggtggctttcctcctcagagtcattaagggacccgggctctttctagcttatttgtccactaactcccagagcattgtcctcttctgaattgtcaaagttggtgggtgacaagtactgtctgttgccagtggggggtggaaaatatggaggaagcacatcttaagggccccagctcagaagttctacctgttacttccggtcacattctattggagagaacttaatcacatagcttcatctgcaagagaggctggcaagtgtggtctaaccgtataccatcctatgtaaagctttaggaagagtgcttgacacatagtaaacacctgcttttgtcatcgataatagtttattattattatttttttttgagacggagtctcgctctgtcgcca

SEQ ID NO: 346534 - DNA, 420 bp, Homo sapiens
ctgcagattgtctcattcggggaagctccagggttctcaagcggaattcgtgtttcattttgtgtagcacccgtcagaaagacaagccaggcatgaggatccatgatgagcgctcttctgagttgccatttggagctgcccgtttagaaagcaaatctgcatttccctcattcctagtttccttcatcctcttttaagtgtcatcttttccatgaagcctactagatcacacagttgaaaattgcaaagtcttcacaccgcagcttcccctttctttgttgctttggttttctccgtgggacttcccaccatccgtaaaattaggtgtttttgcctgttttattcactgctacgtctccaatggttagaacctgacatttagtgggtgctcaataatatttgttgaagtaatgtataata

SEQ ID NO: 346535 - DNA, 148 bp, Homo sapiens
ggcttttgcttctacagttctacacagtctatgctgttcttttttggttttgtattttatacataatctgcttactttgtactgtggaagaataggattgagccctctaattccactaaccccctccacacccctttccccttctgtc

SEQ ID NO: 346536 - DNA, 340 bp, Homo sapiens
acaaagtccatgttacacttaggttaaaaagaagaatgaaaacccctcaagccagattttatgactttttatatcacactgaaaagtccaatgaactacagatttcaaccatggagatttgtgccctactatgaaacggtaactgtaacacagattgatgaaagattctgcaggacgacaaaggttaaagatgtagacccggagctagaagccagcactgacactgatggagtggactgcgatgagaatgcccacgttattgtcctatcctctgataaccaatgtaatatgaaaaccgactacagaagaaaggaacaaattaaatccattaatcaagcat

SEQ ID NO: 346537 - DNA, 451 bp, Homo sapiens
acaaagtccatgttacacttaggttaaaaagaagaatgaaaacccctcaagccagattttatgactttttatatcacactgaaaagtccaatgaactacagatttcaaccatggagatttgtgccctactatgaaacggtaactgtaacacagattgatgaaagattctgcaggacgacaaaggttaaagatgtagacccggagctagaagccagcactgacactgatggagtggactgcgatgagaatgcccacgttattgtcctatcctctgataaccaatgtaatatgaaaaccgactacagaagaaaggaacaaattaaatccattaatcaagcatatctctgctaaacagttgttcgaaactgatgaacaaatgaaaaatttactgtttgttttcatgcttgcaaggattggggaagaaaattaattataaggtactggccacact

SEQ ID NO: 346538 - DNA, 151 bp, Homo sapiens
caatgcatcttcttatacttgtgtaattagggaacacatctattggatatctcttctcgtatcagagaactcttgaaataagtcaggctttctaagttctgcttttattgccagagttgttgccttatacctttgaaatatagtgaagtca

SEQ ID NO: 346539 - DNA, 1365 bp, Homo sapiens
tctggagagtgaagagggcaaagatctacaaggagctcagatttgtgctctagagggatgtgtgttaaggggcaagttgatgacttgggagcagaaggattcatttaaatattattcagacaacagaatgtgtgcatgggtttgtcttcacagaagttatcattatcactctccatctgttacctaaagattaatcttcggattagatctggtctacaagtatcaaaatggaggtcatcaaaatgtaattctgctggactggagaaaggtgaaactcaagcacctgctgcatggttagctaacctgtagcaagagaatcagtgaaaactgaataaatattctaaggaccaatctcaagaaacaatttgtttcagtacacataagaaaacaaagagtaatatgacacattcttacccattaggagtgtagcatttattcaacaaacatttatgaagtgcctcctctatgcaaagtatgcaggggataagaggccaagaaggtcccttccctcaaggacctcacactctacacagagacagctctaaacaactaactacaataaaatatagagagggaagtgcaatcagtgcatcttcacataaaacagtctttctatggcttgcataatgcaatgcttggatataaatctcttttaaagctaaagcaacaggcagtctgcttccaaggagacagaattttaatactattagtatcaaagggcagtttttaaatgtgtccagcccagaaagcttctaatagcacacatacaaggtctggctcaagcccctcatctccaaaaacctttctctccatttactgaatgtgtacaaaatttattagttgttccctcttatcctgacatgtcacatataacggtgtttacatagatttttttttaagtggtttcaggtattgtcattcatacttgatttataaactctttgatagaagggaccaggtatcttgtatcttgcaattcttttgattaatttacttaacggctacttattgagtgccaactctgtgcgcccaagtatcaatgtattaacagctacccaattttataaaaagggcattggggctggaaaatatgaagaactgacagctgccccaaagattccatgtgagagcctatgagcaaggagatcagaatagatagaagaaaggtatttactgtgtttctgaaatcctgtgggacatttagagtcaactctccttgtggacatatatttaattaaggtccaccctgtcaaatgaaatcgtttcagaagtttaaaaagtaaagttagtgtaacatgaagcagcaatcaatattgttctcagaattccaataacataatttgcaacttttaactctgagatatt

SEQ ID NO: 346540 - DNA, 293 bp, Homo sapiens
gttgtctaggctggtctcgaactcctggcttcaagtgattttcctacctcagcctcccaattagctgggactacaggtgtgggccaccatgcctgttgcatttgaaagctaaccctactgtaataagcatcatgaagaaaggattgaagaggaagagaaaggttacacgtgagaagaccagttaggtggtaggtacatgacacataatagaaaatcacaattaaatgccaacactagctaatcctactaaaaaagtaatccattatggatatttttaaaggttattgaatatt

SEQ ID NO: 346541 - DNA, 573 bp, Homo sapiens
tcattctttttacccttgccggctggtttcatagcttccctgggttctctcttgccttgttctcaggcacttccttgatctctttctctctcttcccagccttctggtcccttctggtctcaaatcccggaaacaacaacaacacaaatattttcagtccttcctgcatccctaccctgaactggccttcacagccccagcctggcttttgccccacccaggtgttcctgggggagagggggaaggccaatttaggatcaaaagaggcttcactttgggaccagtgcccacttggggatgacaatgaaattggtttggataagaccctgtcttcctcacattggccccacctgcaaagtctctgtgaccctagtggccttggactgagagcaaagcctcaggctgggggggcatggggaaagcagatcccacagctcctgaaactatggggaggggagcagagttcaagtaccaaattgtggttcacccttctctggctttcagcccctaaaatcttagagctttcccttaagacatctgaggaggagatttagagaactagggatttataga

SEQ ID NO: 346542 - DNA, 702 bp, Homo sapiens
aaagtgcaaaaatgtgacagataagaatttaatttactgataaaaagtaaaatagtataaaaaaagcattttgattaatactaagatagagaaaatttgactgaaaatttttggcagataataacatttttaaacgaacactttatctctttgattaaagttagcatcaggtgtaaaaaaactatcatctttttactgttattttaattatagtttattgggggactataaaatggtacattatttattttaaatactttttcttatttcagtcagatttagttaggataatgtactactttaattttttaaatttattttactcttttttcaaaaaataaaataatagcatgcagtaatagtaattatttgaaataaggtaatatgcaatagtaaatttgcagcaatttggaattatatgtgtttttcatgtttaattttgtttaaaaatcatcatagatacagttttatgggaaatatgcaaagaaaatatctcagttgataaaaactaagttgataatcatgaagatatcttgcctctgggtaaaagattcagtatacttaaaagtgctactgtttgttgttatttaatattgttttctattaaacataacttaaaaaagagaactttcaccaaaaaaaagtaaattttttcatggatgtaaattttaagtactgacatattttaaactcacgtaagtt

SEQ ID NO: 346543 - DNA, 700 bp, Homo sapiens
  misc_feature (665)..(665): n is a, c, g, or t
aaagtgcaaaaatgtgacagataagaatttaatttactgataaaaagtaaaatagtataaaaaaagcattttgattaatactaagatagagaaaatttgactgaaaatttttggcagataataacatttttaaacgaacactttatctctttgattaaagttagcatcaggtgtaaaaaaactatcatctttttactgttattttaattatagtttattgggggactataaaatggtacattatttattttaaatactttttcttatttcagtcagatttagttaggataatgtactactttaattttttaaatttattttactcttttttcaaaaaataaaataatagcatgcagtaatagtaattatttgaaataaggtaatatgcaatagtaaatttgcagcaatttggaattatatgtgtttttcatgtttaattttgtttaaaaatcatcatagatacagttttatgggaaatatgcaaagaaaatatctcagttgataaaaactaagttgataatcatgaagatatcttgcctctgggtaaaagattcagtatacttaaaagtgctactgtttgttgttatttaatattgttttctattaaaccttaccttataaaggacaccttctcccgacgtaaagctaatccgcttatcggtcgnctcttcagcacgtccatctcgttttccctcggctt

SEQ ID NO: 346544 - DNA, 910 bp, Homo sapiens
ataaataaagtcaattaattatatttgcatctgggaaatagagaaagtacatataagccatgattttgaagtcaaaagagagagaatatttggcaaggaggggtgagttatagtatgtaattataacatatagtagttttttgtatgctggtaactaattttaatttcctacatttttatgtagatttctgctattcttgtgctgttttcctaatcacctttctatatggatgactacataagtctgagaataccaaaagagacagacacagaaccaatcggattcctttcttcttgaagcttctgcacagcagaagaaactgtcaacagagtgaacagacaacctacagaataggagaaaactgttgcaacaatgcatgtgacaaagatctaatgtccaacactgataaggaacttaaacaaatttacaagaaaaaaaaaatctcattagaaagtgggcaaaggacataaacagacacttcaaaagaagacacacatgcggccaacaagcatatgaaaaaaagcccaatatcgctgatcattagagaaatgcaaatcaaaaccacaatggcataccatctcacaccagtcagaatggttattattaaaaagtcaacgccgggcatggtggctcacgcctataatcccagcacttcaggaggccaaggcaggcagatcgcatgaggtcaggagttccagaccagcctgcacaacctggcgaaaccccgtctctactaaaaatacaaaaattagcccagcgtggtggcgggcgcctgtaatcccagctactcaggatgctgaggcaggagaatcgcttgaacccgggaggcagaggttgtagtgagccgcgatcatgccactgcactctccagcttaggtgacagagcgagactctgtctcaaaaaaaaaa

SEQ ID NO: 346545 - DNA, 2521 bp, Homo sapiens
  misc_feature (1925)..(1925): n is a, c, g, or t
tccacattggggggtggggtgagactctcatcacataggcagttaggaaccccagaggctcttcagttttaaacgtgtagcttccaacgtcatcttgagaactgatattcagcagtggaaggagaaagaacagggaggatatacatttatggcttttatgtgaggcaggccttgcattggcacatacccttctgcctaaatctgattataagcagaatgcattccgatggtcacagcttactgcgggggctagcaaatgtctgcttgtttttcaaggaataggaagaaatgtttagtgaatacctagcagtctgttgccagagatggtttttgttgtttcaattccattgtacattcttcttagcatttaaaaaattatttgaacttttgaacaggcaatatcttcacatactttaaaagtttgaaaatctgaaaagttacacagtaaaatgtttgcttatcattcctgccccacatctactcagatcccactaggtaatcatggttattactttatcatgtatacttccagaaaccttttgtttaaaaaagcaaatatgaattatatatatatatatatgaaatctcttcctcccttattacatagatggagccataatatacccagtactttgtacttggctgttttcccttagtagtataagatagttattttaaattttgtattattcagtctcagtgacaaggtggcgttcccagcgtcagggaatttctaatctaatctggtcaaggtataatctactagtaaggaggaagagatacaagtagtggaagcttttgtactaaaatcaaatacttacctgttactcactctataactcaataccacatttagagcaaatgagtaatacctttataagtcaaattagatttttagaaaactgctttaggaaattaggcatgctaagataattcttggcatttaaatcacataattaagggaatagaaaatggtttgtgttaggaaatagatctttgactacatttttgcatgactttctgatgtactaagtacattttagtggtcaatgttctctacattaaatggcttttgttttggtaaacccatatgtttggagtattaatggttgtatttctaatttgttaccctggcccaaatgatgaagtaatagaatgttgcatatttccttccacttaacatttaatttgtgttaatgaaaccaaatgtcacttttaactctggaacttctaaaatgaactacaccgggaagccctctgtattctttgtggtttcccatgttccatgagccagcaaccgggtgttcacttgcagtgactctggtttactcagcccctggggatgcattactgctcggaaatgggaagggagagtagcaggtggtgcgtaattgagagctgtgtttgattgggactgacctggtgcccctttcctctgccgggttgaatgagagtttaaaggaggaactgctgctgctaagaacaaaatgaacccgagtgcctcttactgtttgtcccgactgtcagtgcatagggattaactaacatccaggaacttttagctggcctctgctttgttcttcaacattcggaccttcagtgagctctagacctgcacaaacgacctgcagcaaatggcagctttcatttgggctgaggaagaggaatattggagagaatgaggagaaggaaataaatatctttcctttttggcccttcctgctttatctttctccatctttatgcctttattaatgaggattttccaaatatcggtcttcaaaaatgccataagaagacttcattttctgtggttttaatgtcataaaatatctccttatgtgaaataactagatatgctggatcaagcataacaaacatccctttaggacattgctgaatctgtatttaaaacataagggaanaactgagggaacagatggaaaaaggaactggaaatggaagtgaattgactgctgcagctgccctctgggctcctgcagatcttggtaatcaaaaggattggggttcaactgccttgtgggagacaggagacagggtcttgggtccatttaagttagagataccatagtaacgtgagacactcaaaggactgtggtctcagtagagaggtgacaaatacgtcttgacctgttcttgcctgaggaaaacgtttctaagaattcttaaccacaggccctccctcatagattttcagtttcaatttatactctgtgtggtctggcaatttccaagctgtgaaacttatttaaaacagtctgatggtactcacataaatcaccaagttaaaaaaatgcaaaatagaataaaaaatatgagcatggaaaataaatactatcaaaagggctcagattgatttaaaaaggaaacacagacaattctttaagactgaatggactaaagaactcattcatgtaaccaaaaaccatttctgccacaaaaactattgaaattaaaaaaagaatgacttaaataagaatggatcttatactccaaaaag

SEQ ID NO: 346546 - DNA, 680 bp, Homo sapiens
aggaggattcctttgtcatgaaataatctaaataagtagttcagggaaacacacctatgtaattaaactacttcttaaataagagactggtaaacctaaatttcaggcaggtggttccctctgggtcaggcaggtgcaagagtggggaagaggcacaagggcacaggtcccctgatttcctagggtgatgggttcaaatgcatccactctgctggtacaattcatgactaacactgcctttattcttttgtatgaataaactgatacggccaaaaaattcagagacattcacacacaaacccagcctaggaccctggaaggcaaaggctctgcaaacctgcagatgtgtaggaagctattacatatagggtttggggttcgagtgtgcagctttcctacaagcagcaacaatgaatgggacctttagttacaggtttacatctccttctctaagcatccaaatgcactaattattgccataataaataacaatgacatgattatagtgtgaggcagttttttctacttttagaaccaacctatagacaaagctcaggacacttaattatagcttcagaatacattgtaaatgttgtaaaaccttactttcttaaaaaagtaatataactcttcagaatacattgttagaaaactttaattcctaaaaaatataactcttc

SEQ ID NO: 346547 - DNA, 310 bp, Homo sapiens
cgcatcttctcccatcagtagtaaaaaccagttaatttttaaccctgtgcaggaatggctgatgggagaagatgcgcccatcagggggtagccttgcttaaaaagtactgggatattagactagaaaaccttttctaggtgaatcaggtcacacacagctaaatttagtgagacacgaatcatggattaaacagttgcttcgcttatagaatgtattattttgtccaagatacacagtgtttcattggtgtgctaggcactgtacttgctgatgggacgaagactggaggatcctctagagtcacctcgc

SEQ ID NO: 346548 - DNA, 2652 bp, Homo sapiens
agcggctcttcttcccctccgccgcggcccgccccggcccgcaaacccaaacactccaggcgcccgcccgccgcgcgtgattctcgcctcgccgcagcccagccctgcgcgccttgcccggcggcccccgcccggccgctccgggcccctggccccgcggagcgatgctgctgctggctgccgccttcctcgtggccttcgtgctgctgctgtacatggtgtctccgctcatcagccccaagcccctcgccctgcccggggcgcatgtggtggttacaggaggttccagtggcatcgggaagtgcattgctatcgagtgctataaacaaggagcttttataactctggttgcacgaaatgaggataagctgctgcaggcaaagaaagaaattgaaatgcactctattaatgacaaacaggtggtgctttgcatatcagttgatgtatctcaagactataaccaagtagagaatgtcataaaacaagcacaggagaaactgggtccagtggacatgctggtaaattgtgcaggaatggcagtgtcaggaaaatttgaagatcttgaagttagtacctttgaaaggttaatgagcatcaattacctgggcagcgtgtaccccagccgggccgtgatcaccaccatgaaggagcgccgggtgggcaggatcgtgtttgtgtcctcccaggcaggacagttgggattattcggtttcacagcctactctgcatccaagtttgccataaggggattggcagaagctttgcagatggaggtgaagccatataatgtctacatcacagttgcttacccaccagacacagacacacctggctttgccgaagaaaacagaacaaagcctttggagactcgacttatttcagagaccacatctgtgtgcaaaccagaacaggtggccaaacaaattgttaaagatgccatacaaggaaatttcaacagttcccttggctcagatgggtacatgctctcggccctgacctgtgggatggctccagtaacttctattactgaggggctccagcaggtggtcaccatgggccttttccgcactattgctttgttttaccttggaagttttgacagcatagttcgtcgctgcatgatgcagagagaaaaatctgaaaatgcagacaaaactgcctaatcttcttaccccttggaagaagactgtttccaaataatttgaacagcttgctgctaaatgggacccaatttttggcctatagacacttatgtattgttttcgaatacgtcagattggaccagtgctcttcaggaatgtggctgcaagcaaggggctagaagttcacctcctgacagtattattaatactatgcaaatatggaataggagaccatttgattttctaggctttgtggtagagaggtgaaggtatgagaattaatagcgtgtgaacaaagtaaagaacaggattccagaatgatcattaaatttgtttctatttattcttttttgcccccctagagattaagtccagaaatgtactttctggcacataaagaaatcttgaggactttgtttaaaccttccataaaaaaacaattttcggtttctcgggttctctctctctgtctctctgtctctctgtctctctgtctctctctgtctctctctctctctctctttctttctttgtgtattttattcaagatgagttggacccattgccagtgagtctgaatgtcactgacagccctgtgttgtgctcaggactcactctgctgctggtggaaactcatggcttctctctctctttgatcccataaagctacgagggggacgggagagggcagtgcaatgggaagtaaagagatattttccagtaggaaaagcaatgctttcttgtctttagactcaaatgcttagggaacgtttcatttctcattcatggggaaaggcagcctccttaaatgttttctgaagagcggtaaaatctagaagcttaagaatttacagttccttcaataaccatgatgacctgaagttcacctatcccattttagcatctacttgtttttcccatctcttcctttccaattttgcttatactgctgtaatatttttgtaaaaaaaaaaaaaaaggaaaaaaaagaccagctaaaattttcgacttgactttttaacttaactcatgaattaattaaagcaaatgaaaacaacttaataaaaaaagaaaacaaaaaaaaaaaaaaaaaaatttggtgggggggcctgggcccaagaaaaggtttttaaacaccattcgtgtgggggggggggaccatatggatttgggaacgtgggtcgtaggggttgcaagagaactcggggctggacaggtggtggggttttttcccaaaaaaaaaaggcgcgggcgggcgccaggcgtgtttggggcaaccctaaaaggggttgggggcggcaagggcgtcttcaaaagcgcgcgagcccgtgtactacacccgcggcggggtgggaccacaaaagaataaagagcataaaaagaacaaaacaacaaaaaagataacaaaagaaagaacgactaacgaaaaacaaaaaaacacaaaaaagacagaaagagatgagacacaacaagaaacacaacaaagacgcaattaaaacaatacaagaaa

SEQ ID NO: 346549 - DNA, 2550 bp, Homo sapiens
agcggctcttcttcccctccgccgcggcccgccccggcccgcaaacccaaacactccaggcgcccgcccgccgcgcgtgattctcgcctcgccgcagcccagccctgcgcgccttgcccggcggcccccgcccggccgctccgggcccctggccccgcggagcgatgctgctgctggctgccgccttcctcgtggccttcgtgctgctgctgtacatggtgtctccgctcatcagccccaagcccctcgccctgcccggggcgcatgtggtggttacaggaggttccagtggcatcgggaagtgcattgctatcgagtgctataaacaaggagcttttataactctggttgcacgaaatgaggataagctgctgcaggcaaagaaagaaattgaaatgcactctattaatgacaaacaggtggtgctttgcatatcagttgatgtatctcaagactataaccaagtagagaatgtcataaaacaagcacaggagaaactgggtccagtggacatgctggtaaattgtgcaggaatggcagtgtcaggaaaatttgaagatcttgaagttagtacctttgaaaggttaatgagcatcaattacctgggcagcgtgtaccccagccgggccgtgatcaccaccatgaaggagcgccgggtgggcaggatcgtgtttgtgtcctcccaggcaggacagttgggattattcggtttcacagcctactctgcatccaagtttgccataaggggattggcagaagctttgcagatggaggtgaagccatataatgtctacatcacagttgcttacccaccagacacagacacacctggctttgccgaagaaaacagaacaaagcctttggagactcgacttatttcagagaccacatctgtgtgcaaaccagaacaggtggccaaacaaattgttaaagatgccatagtggtcaccatgggccttttccgcactattgctttgttttaccttggaagttttgacagcatagttcgtcgctgcatgatgcagagagaaaaatctgaaaatgcagacaaaactgcctaatcttcttaccccttggaagaagactgtttccaaataatttgaacagcttgctgctaaatgggacccaatttttggcctatagacacttatgtattgttttcgaatacgtcagattggaccagtgctcttcaggaatgtggctgcaagcaaggggctagaagttcacctcctgacagtattattaatactatgcaaatatggaataggagaccatttgattttctaggctttgtggtagagaggtgaaggtatgagaattaatagcgtgtgaacaaagtaaagaacaggattccagaatgatcattaaatttgtttctatttattcttttttgcccccctagagattaagtccagaaatgtactttctggcacataaagaaatcttgaggactttgtttaaaccttccataaaaaaacaattttcggtttctcgggttctctctctctgtctctctgtctctctgtctctctgtctctctctgtctctctctctctctctctttctttctttgtgtattttattcaagatgagttggacccattgccagtgagtctgaatgtcactgacagccctgtgttgtgctcaggactcactctgctgctggtggaaactcatggcttctctctctctttgatcccataaagctacgagggggacgggagagggcagtgcaatgggaagtaaagagatattttccagtaggaaaagcaatgctttcttgtctttagactcaaatgcttagggaacgtttcatttctcattcatggggaaaggcagcctccttaaatgttttctgaagagcggtaaaatctagaagcttaagaatttacagttccttcaataaccatgatgacctgaagttcacctatcccattttagcatctacttgtttttcccatctcttcctttccaattttgcttatactgctgtaatatttttgtaaaaaaaaaaaaaaaggaaaaaaaagaccagctaaaattttcgacttgactttttaacttaactcatgaattaattaaagcaaatgaaaacaacttaataaaaaaagaaaacaaaaaaaaaaaaaaaaaaatttggtgggggggcctgggcccaagaaaaggtttttaaacaccattcgtgtgggggggggggaccatatggatttgggaacgtgggtcgtaggggttgcaagagaactcggggctggacaggtggtggggttttttcccaaaaaaaaaaggcgcgggcgggcgccaggcgtgtttggggcaaccctaaaaggggttgggggcggcaagggcgtcttcaaaagcgcgcgagcccgtgtactacacccgcggcggggtgggaccacaaaagaataaagagcataaaaagaacaaaacaacaaaaaagataacaaaagaaagaacgactaacgaaaaacaaaaaaacacaaaaaagacagaaagagatgagacacaacaagaaacacaacaaagacgcaattaaaacaatacaagaaa

SEQ ID NO: 346550 - DNA, 2740 bp, Homo sapiens
agtctgaattactatagatttcctgtcaatggtctttcatataaaaattatgctctccagccaggcacggtggctcatgcctgtaatcccagcacttttggaggccgaggcggctggatcgcttgagctcaggggtttgagaccagcctggccaacatggtgaaaccccatctctactaaaaatacaaaaattacccgggtgtggtggtgcatgcctgtaatcccagctacttgggagtctgaggcaggagaatcacttgaacctgggaggcagaggttgcagtgagcagagatcacaccactgcattccagcctgggccacagagtgagattctgtcgaaaataaataaataaacaatacaaatgatgctccatgaaagaagtggcagtttagcccttgacttcaggagctgcacaaggacttttgttccaggcagttgtcccgccctggaatgcagtgctgcggaagcgcgttgggcgcattctcatttgtcacacagagtattaagaagacatgtcctcgagggttgccattgaacaaaatgatgaattttcctgctttatcaagaggattttaaagcaaaactgacactttgatttttaaaagaattttagaacttgtattttctttgtgtattatttattactgcgagtgcgtgtggtagtagaggtgacaatgactcctagtacagtttggcaagaaccccgtggttcttgcccatgtctctgcagttttgcagaggcaaaactgtattttccatacaacacactgtggaaaagacaatgaatgtcttagtgttattaggacaatcatttgtccttgggggcccgcaggggtccgtggactcacttgttgagaactgccatctgccaaggccgtgcgtccatttctgagtgctgatcaatgctttgtgaccattttatctcacttaaagtgaacgagcacactccactgtttctgatgtgtccgactgatttctgtccacattactaggattccctctttctcttctttttcttctcttttagcaaggaaatttcaacagttcccttggctcagatgggtacatgctctcggccctgacctgtgggatggctccagtaacttctattactgaggggctccagcaggtggtcaccatgggccttttccgcactattgctttgttttaccttggaagttttgacagcatagttcgtcgctgcatgatgcagagagaaaaatctgaaaatgcagacaaaactgcctaatcttcttaccccttggaagaagactgtttccaaataatttgaacagcttgctgctaaatgggacccaatttttggcctatagacacttatgtattgttttcgaatacgtcagattggaccagtgctcttcaggaatgtggctgcaagcaaggggctagaagttcacctcctgacagtattattaatactatgcaaatatggaataggagaccatttgattttctaggctttgtggtagagaggtgaaggtatgagaattaatagcgtgtgaacaaagtaaagaacaggattccagaatgatcattaaatttgtttctatttattcttttttgcccccctagagattaagtccagaaatgtactttctggcacataaagaaatcttgaggactttgtttaaaccttccataaaaaaacaattttcggtttctcgggttctctctctctgtctctctgtctctctgtctctctgtctctctctgtctctctctctctctctctttctttctttgtgtattttattcaagatgagttggacccattgccagtgagtctgaatgtcactgacagccctgtgttgtgctcaggactcactctgctgctggtggaaactcatggcttctctctctctttgatcccataaagctacgagggggacgggagagggcagtgcaatgggaagtaaagagatattttccagtaggaaaagcaatgctttcttgtctttagactcaaatgcttagggaacgtttcatttctcattcatggggaaaggcagcctccttaaatgttttctgaagagcggtaaaatctagaagcttaagaatttacagttccttcaataaccatgatgacctgaagttcacctatcccattttagcatctacttgtttttcccatctcttcctttccaattttgcttatactgctgtaatatttttgtaaaaaaaaaaaaaaaggaaaaaaaagaccagctaaaattttcgacttgactttttaacttaactcatgaattaattaaagcaaatgaaaacaacttaataaaaaaagaaaacaaaaaaaaaaaaaaaaaaatttggtgggggggcctgggcccaagaaaaggtttttaaacaccattcgtgtgggggggggggaccatatggatttgggaacgtgggtcgtaggggttgcaagagaactcggggctggacaggtggtggggttttttcccaaaaaaaaaaggcgcgggcgggcgccaggcgtgtttggggcaaccctaaaaggggttgggggcggcaagggcgtcttcaaaagcgcgcgagcccgtgtactacacccgcggcggggtgggaccacaaaagaataaagagcataaaaagaacaaaacaacaaaaaagataacaaaagaaagaacgactaacgaaaaacaaaaaaacacaaaaaagacagaaagagatgagacacaacaagaaacacaacaaagacgcaattaaaacaatacaagaaa

SEQ ID NO: 346551 - DNA, 1526 bp, Homo sapiens
  misc_feature (1480)..(1480): n is a, c, g, or t
  misc_feature (1493)..(1493): n is a, c, g, or t
agcggctcttcttcccctccgccgcggcccgccccggcccgcaaacccaaacactccaggcgcccgcccgccgcgcgtgattctcgcctcgccgcagcccagccctgcgcgccttgcccggcggcccccgcccggccgctccgggcccctggccccgcggagcgatgctgctgctggctgccgccttcctcgtggccttcgtgctgctgctgtacatggtgtctccgctcatcagccccaagcccctcgccctgcccggggcgcatgtggtggttacaggaggttccagtggcatcgggaagtgcattgctatcgagtgctataaacaaggagcttttataactctggttgcacgaaatgaggataagctgctgcaggcaaagaaagaaattgaaatgcactctattaatgacaaacaggtggtgctttgcatatcagttgatgtatctcaagactataaccaagtagagaatgtcataaaacaagcacaggagaaactgggtccagtggacatgctggtaaattgtgcaggaatggcagtgtcaggaaaatttgaagatcttgaagttagtacctttgaaaggttaatgagcatcaattacctgggcagcgtgtaccccagccgggccgtgatcaccaccatgaaggagcgccgggtgggcaggatcgtgtttgtgtcctcccaggcaggacagttgggattattcggtttcacagcctactctgcatccaagtttgccataaggggattggcagaagctttgcagatggaggtgaagccatataatgtctacatcacagttgcttacccaccagacacagacacacctggctttgccgaagaaaacagaacaaagcctttggagactcgacttatttcagagaccacatctgtgtgcaaaccagaacaggtggccaaacaaattgttaaagatgccatacaaggaaatttcaacagttcccttggctcagatgggtacatgctctcggccctgacctgtgggatggctccagtaacttctattactgaggggctccagcaggtggtcaccatgggccttttccgcactattgctttgttttaccttggaagttttgacagcatagttcgtcgctgcatgatgcagagagaaaaatctgaaaatgcagacaaaactgcctaatcttcttaccccttggaagaagactgtttccaaataatttgaacagcttgctgctaaatgggacccaatttttggcctatagacacttatgtattgttttcgaatacgtcagattggaccagtgctcttcaggaatgtggctgcaagcaaggggctagaagttcacctcctgacagtattattaatactatgcaaatatggaataggagaccatttgattttctaggctttgtggtagagaggtgaaggtatgagaattaatagcgtgtgaacaaagtaaagaacaggattccgctgtgggtaatcatgtgccaaantgctgcgtccatnggccagcaccagagtccattaccatctgtccgg

SEQ ID NO: 346552 - DNA, 1150 bp, Homo sapiens
atacaagaggcactacctaaatagttttcggagagaaccagctatttccaagtttgtttaaaccttccataaaaaaacaattttcggtttctcgggttctctctctctgtctctctgtctctctgtctctctgtctctctctgtctctctctctctctctctttctttctttgtgtattttattcaagatgagttggacccattgccagtgagtctgaatgtcactgacagccctgtgttgtgctcaggactcactctgctgctggtggaaactcatggcttctctctctctttgatcccataaagctacgagggggacgggagagggcagtgcaatgggaagtaaagagatattttccagtaggaaaagcaatgctttcttgtctttagactcaaatgcttagggaacgtttcatttctcattcatggggaaaggcagcctccttaaatgttttctgaagagcggtaaaatctagaagcttaagaatttacagttccttcaataaccatgatgacctgaagttcacctatcccattttagcatctacttgtttttcccatctcttcctttccaattttgcttatactgctgtaatatttttgtaaaaaaaaaaaaaaaggaaaaaaaagaccagctaaaattttcgacttgactttttaacttaactcatgaattaattaaagcaaatgaaaacaacttaataaaaaaagaaaacaaaaaaaaaaaaaaaaaaatttggtgggggggcctgggcccaagaaaaggtttttaaacaccattcgtgtgggggggggggaccatatggatttgggaacgtgggtcgtaggggttgcaagagaactcggggctggacaggtggtggggttttttcccaaaaaaaaaaggcgcgggcgggcgccaggcgtgtttggggcaaccctaaaaggggttgggggcggcaagggcgtcttcaaaagcgcgcgagcccgtgtactacacccgcggcggggtgggaccacaaaagaataaagagcataaaaagaacaaaacaacaaaaaagataacaaaagaaagaacgactaacgaaaaacaaaaaaacacaaaaaagacagaaagagatgagacacaacaagaaacacaacaaagacgcaattaaaacaatacaagaaa

SEQ ID NO: 346553 - DNA, 1114 bp, Homo sapiens
  misc_feature (1089)..(1089): n is a, c, g, or t
  misc_feature (1098)..(1098): n is a, c, g, or t
  misc_feature (1114)..(1114): n is a, c, g, or t
agcggctcttcttcccctccgccgcggcccgccccggcccgcaaacccaaacactccaggcgcccgcccgccgcgcgtgattctcgcctcgccgcagcccagccctgcgcgccttgcccggcggcccccgcccggccgctccgggcccctggccccgcggagcgatgctgctgctggctgccgccttcctcgtggccttcgtgctgctgctgtacatggtgtctccgctcatcagccccaagcccctcgccctgcccggggcgcatgtggtggttacaggaggttccagtggcatcgggaagtgcattgctatcgagtgctataaacaaggagcttttataactctggttgcacgaaatgaggataagctgctgcaggcaaagaaagaaattgaaatgcactctattaatgacaaacaggtggtgctttgcatatcagttgatgtatctcaagactataaccaagtagagaatgtcataaaacaagcacaggagaaactgggtccagtggacatgctggtaaattgtgcaggaatggcagtgtcaggaaaatttgaagatcttgaagttagtacctttgaaaggttaatgagcatcaattacctgggcagcgtgtaccccagccgggccgtgatcaccaccatgaaggagcgccgggtgggcaggatcgtgtttgtgtcctcccaggcaggacagttgggattattcggtttcacagcctactctgcatccaagtttgccataaggggattggcagaagctttgcagatggaggtgaagccatataatgtctacatcacagttgcttacccaccagacacagacacacctggctttgccgaagaaaacagaacaaagcctttggagactcgacttatttcagagaccacatctgtgtgcaaaccagaacaggtggccaaacaaattgttaaagatgccatacaaggaaatttcaacagttcccttggctcagatgggtacatgctctcggccctgacctgtgggatggctccagtaacttctattactgaggggctccagcagaggtgggtcaccaatggggccttttcccgcaactaatggccttggnttttaaccnttgggaaagtttttgn

SEQ ID NO: 346554 - DNA, 765 bp, Homo sapiens
gactgatttctgtccacattactaggattccctctttctcttctttttcttctcttttagcaaggaaatttcaacagttcccttggctcagatgggtacatgctctcggccctgacctgtgggatggctccagtaacttctattactgaggggctccagcagggtaagctctgcctaggctagcaatcagacaggccgatggacaagagaaaaactgcctttcatcaaaccttgatgagaagaggttaagggaaaactaagtaactttatttgacaatgtatttttatggagctatcaacttttcctcttcctccaccaggaatgagtaaataggttaaagatataacttcaggaatttagaatggcaagaagtcttcagtgccgggccttgcagatagagaaataaaacaccgtatctgctgttgaggtgttaacctggattttcacctaagaaccactgctccaatgtgttttgaaaatggaatactcctctagagtaaggggtagccttgcttaaaaagtactgggatattagactagaaaaccttttctaggtgaatcaggtcacacacagctaaatttagtgagacacgaatcatggattaaacagttgcttcgcttatagaatgtattattttgtccaagatacacagtgtttcattggtgtgctaggcactgtacttgctgatggggaatcagatggaaggcgacctctccagcttcaggggcttacagtcaagtggaatgcactgaccaaaaaggtg

SEQ ID NO: 346555 - DNA, 2423 bp, Homo sapiens
agcggctcttcttcccctccgccgcggcccgccccggcccgcaaacccaaacactccaggcgcccgcccgccgcgcgtgattctcgcctcgccgcagcccagccctgcgcgccttgcccggcggcccccgcccggccgctccgggcccctggccccgcggagcgatgctgctgctggctgccgccttcctcgtggccttcgtgctgctgctgtacatggtgtctccgctcatcagccccaagcccctcgccctgcccggggcgcatgtggtggttacaggaggttccagtggcatcgggaagtgcattgctatcgagtgctataaacaaggagcttttataactctggttgcacgaaatgaggataagctgctgcaggcaaagaaagaaattgaaatgcactctattaatgacaaacaggtggtgctttgcatatcagttgatgtatctcaagactataaccaagtagagaatgtcataaaacaagcacaggagaaactgggtccagtggacatgctggtaaattgtgcaggaatggcagtgtcaggaaaatttgaagatcttgaagttagtacctttgaaaggttaatgagcatcaattacctgggcagcgtgtaccccagccgggccgtgatcaccaccatgaaggagcgccgggtgggcaggatcgtgtttgtgtcctcccaggcaggacagttgggattattcggtttcacagcctactctgcatccaagtttgccataaggggattggcagaagctttgcagatggaggtgaagccatataatgtctacatcacagttgcttacccaccagacacagacacacctggctttgccgaagaaaacagaacaaagcctttggagactcgacttatttcagagaccacatctgtgtgcaaaccagaacaggtggccaaacaaattgttaaagatgccatacaaggaaatttcaacagttcccttggctcagatgggtacatgctctcggccctgacctgtgggatggctccagtaacttctattactgaggggctccagcaggtggtcaccatgggccttttccgcactattgctttgttttaccttggaagttttgacagcatagttcgtcgctgcatgatgcagagagaaaaatctgaaaatgcagacaaaactgcctaatcttcttaccccttggaagaagactgtttccaaataatttgaacagcttgctgctaaatgggacccaatttttggcctatagacacttatgtattgttttcgaatacgtcagattggaccagtgctcttcaggaatgtggctgcaagcaaggggctagaagttcacctcctgacagtattattaatactatgcaaatatggaataggagaccatttgattttctaggctttgtggtagagaggtgaaggtatgagaattaatagcgtgtgaacaaagtaaagaacaggattccagaatgatcattaaatttgtttctatttattcttttttgcccccctagagattaagtccagaaatgtactttctggcacataaagaaatcttgaggactttgtttaaaccttccataaaaaaacaattttcggtttctcgggttctctctctctgtctctctgtctctctgtctctctgtctctctctgtctctctctctctctctctttctttctttgtgtattttattcaagatgagttggacccattgccagtgagtctgaatgtcactgacagccctgtgttgtgctcaggactcactctgctgctggtggaaactcatggcttctctctctctttgatcccataaagctacgagggggacgggagagggcagtgcaatgggaagtaaagagatattttccagtaggaaaagcaatgctttcttgtctttagactcaaatgcttagggaacgtttcatttctcattcatggggaaaggcagcctccttaaatgttttctgaagagcggtaaaatctagaagcttaagaatttacagttccttcaataaccatgatgacctgaagttcacctatcccattttagcatctacttgtttttcccatctcttcctttccaattttgcttatactgctgtaatatttttgtaaaaaaaaaaaaaaaggaaaaaaaagaccagctaaaattttcgacttgactttttaacttaactcatgaattaattaaagcaaatgaaaaaattaaaaagtgtgactttttctcggagcatatatgtagcttttaggaaaggctgatgatggtataaagtttgctcattaagaaaaaaagacaaggctgattttgaagagagttgcttttgaaataaaatgatcacctgttctttatgtgactctcccactgaacctgcagacattatttttataccacatgctaaggaagcccactcatctaactctgtagccctg

SEQ ID NO: 346556 - DNA, 2597 bp, Homo sapiens
agcggctcttcttcccctccgccgcggcccgccccggcccgcaaacccaaacactccaggcgcccgcccgccgcgcgtgattctcgcctcgccgcagcccagccctgcgcgccttgcccggcggcccccgcccggccgctccgggcccctggccccgcggagcgatgctgctgctggctgccgccttcctcgtggccttcgtgctgctgctgtacatggtgtctccgctcatcagccccaagcccctcgccctgcccggggcgcatgtggtggttacaggaggttccagtggcatcgggaagtgcattgctatcgagtgctataaacaaggagcttttataactctggttgcacgaaatgaggataagctgctgcaggcaaagaaagaaattgaaatgcactctattaatgacaaacaggtggtgctttgcatatcagttgatgtatctcaagactataaccaagtagagaatgtcataaaacaagcacaggagaaactgggtccagtggacatgctggtaaattgtgcaggaatggcagtgtcaggaaaatttgaagatcttgaagttagtacctttgaaaggttaatgagcatcaattacctgggcagcgtgtaccccagccgggccgtgatcaccaccatgaaggagcgccgggtgggcaggatcgtgtttgtgtcctcccaggcaggacagttgggattattcggtttcacagcctactctgcatccaagtttgccataaggggattggcagaagctttgcagatggaggtgaagccatataatgtctacatcacagttgcttacccaccagacacagacacacctggctttgccgaagaaaacagaacaaagcctttggagactcgacttatttcagagaccacatctgtgtgcaaaccagaacaggtggccaaacaaattgttaaagatgccatacaaggaaatttcaacagttcccttggctcagatgggtacatgctctcggccctgacctgtgggatggctccagtaacttctattactgaggggctccagcaggtggtcaccatgggccttttccgcactattgctttgttttaccttggaagttttgacagcatagttcgtcgctgcatgatgcagagagaaaaatctgaaaatgcagacaaaattgctgctaaatgggacccaatttttggcctatagacacttatgtattgttttcgaatacgtcagattggaccagtgctcttcaggaatgtggctgcaagcaaggggctagaagttcacctcctgacagtattattaatactatgcaaatatggaataggagaccatttgattttctaggctttgtggtagagaggtgaaggtatgagaattaatagcgtgtgaacaaagtaaagaacaggattccagaatgatcattaaatttgtttctatttattcttttttgcccccctagagattaagtccagaaatgtactttctggcacataaagaaatcttgaggactttgtttaaaccttccataaaaaaacaattttcggtttctcgggttctctctctctgtctctctgtctctctgtctctctgtctctctctgtctctctctctctctctctttctttctttgtgtattttattcaagatgagttggacccattgccagtgagtctgaatgtcactgacagccctgtgttgtgctcaggactcactctgctgctggtggaaactcatggcttctctctctctttgatcccataaagctacgagggggacgggagagggcagtgcaatgggaagtaaagagatattttccagtaggaaaagcaatgctttcttgtctttagactcaaatgcttagggaacgtttcatttctcattcatggggaaaggcagcctccttaaatgttttctgaagagcggtaaaatctagaagcttaagaatttacagttccttcaataaccatgatgacctgaagttcacctatcccattttagcatctacttgtttttcccatctcttcctttccaattttgcttatactgctgtaatatttttgtaaaaaaaaaaaaaaaggaaaaaaaagaccagctaaaattttcgacttgactttttaacttaactcatgaattaattaaagcaaatgaaaacaacttaataaaaaaagaaaacaaaaaaaaaaaaaaaaaaatttggtgggggggcctgggcccaagaaaaggtttttaaacaccattcgtgtgggggggggggaccatatggatttgggaacgtgggtcgtaggggttgcaagagaactcggggctggacaggtggtggggttttttcccaaaaaaaaaaggcgcgggcgggcgccaggcgtgtttggggcaaccctaaaaggggttgggggcggcaagggcgtcttcaaaagcgcgcgagcccgtgtactacacccgcggcggggtgggaccacaaaagaataaagagcataaaaagaacaaaacaacaaaaaagataacaaaagaaagaacgactaacgaaaaacaaaaaaacacaaaaaagacagaaagagatgagacacaacaagaaacacaacaaagacgcaattaaaacaatacaagaaa

SEQ ID NO: 346557 - DNA, 2038 bp, Homo sapiens
ctcatgaggaagctgttctgaaaagctctgttttaacctttggcaatgcagccgtaaccttgagtttgagaagcactgctctgaaatcctgtcttccattagctttggagccagcatccttctttaccatgagagagaaggcagaggggcagcacagacgtgaagccatataatgtctacatcacagttgcttacccaccagacacagacacacctggctttgccgaagaaaacagaacaaagcctttggagactcgacttatttcagagaccacatctgtgtgcaaaccagaacaggtggccaaacaaattgttaaagatgccatacaaggaaatttcaacagttcccttggctcagatgggtacatgctctcggccctgacctgtgggatggctccagtaacttctattactgaggggctccagcaggtggtcaccatgggccttttccgcactattgctttgttttaccttggaagttttgacagcatagttcgtcgctgcatgatgcagagagaaaaatctgaaaatgcagacaaaactgcctaatcttcttaccccttggaagaagactgtttccaaataatttgaacagcttgctgctaaatgggacccaatttttggcctatagacacttatgtattgttttcgaatacgtcagattggaccagtgctcttcaggaatgtggctgcaagcaaggggctagaagttcacctcctgacagtattattaatactatgcaaatatggaataggagaccatttgattttctaggctttgtggtagagaggtgaaggtatgagaattaatagcgtgtgaacaaagtaaagaacaggattccagaatgatcattaaatttgtttctatttattcttttttgcccccctagagattaagtccagaaatgtactttctggcacataaagaaatcttgaggactttgtttaaaccttccataaaaaaacaattttcggtttctcgggttctctctctctgtctctctgtctctctgtctctctgtctctctctgtctctctctctctctctctttctttctttgtgtattttattcaagatgagttggacccattgccagtgagtctgaatgtcactgacagccctgtgttgtgctcaggactcactctgctgctggtggaaactcatggcttctctctctctttgatcccataaagctacgagggggacgggagagggcagtgcaatgggaagtaaagagatattttccagtaggaaaagcaatgctttcttgtctttagactcaaatgcttagggaacgtttcatttctcattcatggggaaaggcagcctccttaaatgttttctgaagagcggtaaaatctagaagcttaagaatttacagttccttcaataaccatgatgacctgaagttcacctatcccattttagcatctacttgtttttcccatctcttcctttccaattttgcttatactgctgtaatatttttgtaaaaaaaaaaaaaaaggaaaaaaaagaccagctaaaattttcgacttgactttttaacttaactcatgaattaattaaagcaaatgaaaacaacttaataaaaaaagaaaacaaaaaaaaaaaaaaaaaaatttggtgggggggcctgggcccaagaaaaggtttttaaacaccattcgtgtgggggggggggaccatatggatttgggaacgtgggtcgtaggggttgcaagagaactcggggctggacaggtggtggggttttttcccaaaaaaaaaaggcgcgggcgggcgccaggcgtgtttggggcaaccctaaaaggggttgggggcggcaagggcgtcttcaaaagcgcgcgagcccgtgtactacacccgcggcggggtgggaccacaaaagaataaagagcataaaaagaacaaaacaacaaaaaagataacaaaagaaagaacgactaacgaaaaacaaaaaaacacaaaaaagacagaaagagatgagacacaacaagaaacacaacaaagacgcaattaaaacaatacaagaaa

SEQ ID NO: 346558 - DNA, 630 bp, Homo sapiens
agcggctcttcttcccctccgccgcggcccgccccggcccgcaaacccaaacactccaggcgcccgcccgccgcgcgtgattctcgcctcgccgcagcccagccctgcgcgccttgcccggcggcccccgcccggccgctccgggcccctggccccgcggagcgatgctgctgctggctgccgccttcctcgtggccttcgtgctgctgctgtacatggtgtctccgctcatcagccccaagcccctcgccctgcccggggcgcatgtggtggttacaggaggttccagtggcatcgggaagtgcattgctatcgagtgctataaacaaggagcttttataactctggttgcacgaaatgaggataagctgctgcaggcaaagaaagaaattgaaatgcactctattaatgacaaacaggtaaatctctgtcttcagaatgcattttctgtataactcagcacagctgtataaaggaaaaacagagttacttcacctgtgaatagttaattgaaagcatatatgtactgttttttaaaaggtggaattgtttgaatggtctagtaactcagaatatcacacacacgcaaaatgaatagactcccacacacattcatatctacaaatggtc

SEQ ID NO: 346559 - DNA, 258 bp, Homo sapiens
ctacgaggagagggaataagatgggctgtctctttccaaaatttaaaattataaaccagactgtgatctacagagtgtatctaatacccttatcttacagatgagtttaaaaatcatctcgtgttcatggcaataaagaaaatgagattatgtgaactcaccaagacacatctatccctctctcacccagcttccacaagtattaactcgtggcaaatcttatttcacctgtactatcacctactacccattccccta

SEQ ID NO: 346560 - DNA, 492 bp, Homo sapiens
ctttcatccatcctttcatcatggggaagattaaatgggacacatggagccaggaaaggtgggtgacagctgggagaaattttcttagaggcctcagagcacttccagaggattgatttgaatccattttctgccagttcctttagctttacccaggttatcatccctgcagggagctgggagctgtatctcattgaacttctgatatgttagacaactctagaacattcttaaatttccttaagcttgattccttagttaaaaaaatagaggtaaaaatctttacctcctctatttcttctaagaacaatataaagaaaatgcatttgcatttgaaaaaaatgatttttaacttgtgagggccatttgtgttgacttagtaaattgacttccccctgagtgcagtagaaaggcacagactgactttttacagcactgaacgtttagtggtaggtggtcagtggtttatattttattatcaagaagtcaaag

SEQ ID NO: 346561 - DNA, 257 bp, Homo sapiens
gctgacaggacatccaaccctctggctatggcatcttggaggaacaggcaggccttgaaaatagcagaaattccgaattcccctgccccgggaggactcaaaggaccctgctgaggacagagctgatatggcctcagaataaagatgagggaagaccatcccaaggaagacccctctagcccatggcaaaagggctggaatacgcaaggatttgaaaagcaagttttgctttccatataaacctaagcaagtcgctt

SEQ ID NO: 346562 - DNA, 1216 bp, Homo sapiens
tgggtgacagaatgagaccctgtctcaggaaaaaagatattactcactttcatgttttccttatagcttcagctttattgttgatgagcattttcctgcatcccttgtttaaagtacctctaaatctagacataacccagatacttggatgtgctgccgccaattgaaatgatccttgattaactcctgcttattctcttgatcaatttggctgtaaaagcttctcctctgctttaacagtttttaatgctttttactttacctgagccatttaaaacattttaccatggtcttgacattaaaagcaaaactgaagaaatcttacaccagcatcatccaaagctgccctccctgtgaattatagttttagagtcattttctaagcctagaacatttagtctattttcatttcactgttagtatttacaagtgtgaatacccttcagttaaagaccactaggagtacacctgtcatagagcaggttggatttattgctcattgcagcaaagaacacagaccgcagggaaccatggggtgtcctagtaacagggtgttataatgtattataggatttgggctttggataattttggggggaaggtctaaggacatgagggcttgctctagatagggtgctgtcggaaaacagaggcaattctatgattgggtatcaacagatcttatagagggggtcaagtagattgaggttaaagctgtaattggtgaagaaatagctgtcactcattcagcaagaaagagaattttgtattttgtgggttgtacagtgacctagttttttctcactttgccatggtcttggagtgactacttttgatattgacgttcagtgagattgtccaacaggagcgtggaatgtttaagctgtacatgtcagaacagtttgtagtaacaccaaggcttagcttgaacatcagattagttctcagaggtcaggggctgctgctttttactttcttgaacatattgaaatccagacagacttgaggtcaggatttagtagcagcgacatgctcggcaggcacaggttggaaccagctgaaatgatgccagcagtatgtttttacaaaacggagcaattggggagaatttggtggcatgttaaccagcattagacaagcaggatacattataggcaaaagcagcctcttcagatagtaccactagtttgccactggcgtatagaattttcccata

SEQ ID NO: 346563 - DNA, 386 bp, Homo sapiens
gttggtatagcaaccccagagaagtgcttcattttctttttatagtagaagcaggtccatgtcttttgtggtttccttcacatctttggagtagttatgacttctcagtttttccccccttaaactgcattgcctgttctcttttcctgacatgctatcaggtatcagtgtgttgaatacatactgcttgtgtgtcaaaaaaaaaaaaaagaattaaaattttgattagctgggcatggtggcatgtgcccatagtcccagctactcaggaggctgagacaaggagggttgcttgagcctgggaggtcaaggctgcagtgagccataatcatcactgcactccagcccaggcaacagagcaagaccctgtctcaagaaaaaaaaaa

SEQ ID NO: 346564 - DNA, 475 bp, Homo sapiens
tggcatgttttgttgatgttgttgtttattttttgaaatagagtcttgctctgtcacccaggctgtagtacagaggcacaatcataggtcactgcagcctcgaccttccaagctcaagtgatcctcccacctcagcccctggagtagccaggactacaggtgcacaccatcacaccctggctaatattttaattttccatacagatgaagtctcactgtattgcctagactggtcttgaattcctgggctcaagcaatctccctgcctcaaactcccatagtattgggattacaggtgtgagccactgtgtccagcctacctggcatgtttttgacattctctaaatgtttactgatgaacaattagttgaatttcattgctaacattatcctctcctttggtgaattttagtctgtgtctgcaatcctacatcatagacttatgaatttggattaaatggattttaaaatatca

SEQ ID NO: 346565 - DNA, 413 bp, Homo sapiens
tggagtgcaatggcgcgatcttggcccactgcaacctccgcttcccgggttcaagcgattctcctacctcagcctcccgagtagctgggattacaggcgttagccaccacgccaggctaatttttgtatttttagtagagactgggtttcaccatgttggtcaggctggtcttgaactcctgatatcagatgatccgcctgcttcggcctcccaaagtgctgggattacagacgtgagccaccgcgcctggcctatttttatttttttagaggcggggtctccctatattgcctaggctggcttctaacttctaggctcaagccatccttccgcctcagtctcccgagtgggactacggtgtgcgccactgcatcccgtctggttctaaatttaggggggcctagaggatctg

SEQ ID NO: 346566 - DNA, 5340 bp, Homo sapiens
  misc_feature (1)..(1): n is a, c, g, or t
nggggaactcggcggggcgccggccggcgggcggagaccgactcgggatctgtccgagcaggaagccagcctcagcccggccgctgtcgccgccctgtcctggtgcccgtccgcgtcgtcgccctcttcactggccctcatcacttctcaccgcgccctccagcttcacccgtacaggtagccccgccgccgcgcacctgccttcgctcccgcaccggtgacagtggatagtggaaacaggagatcgtggatcctccttcaaaaatggaggatggaaagcccgtttgggcgccacaccctacagatggatttcagatgggcaatattgtggatattggccccgacagcttaacaattgaacccttgaatcagaaaggcaagacatttttggctctcataaaccaagtgtttcctgcagaagaggacagtaaaaaagatgtggaagataactgttcactaatgtatttaaatgaagccacactgctccataatatcaaagttcgatatagtaaagacagaatttatacatatgtcgccaacattctgattgcagtgaatccatactttgacatacctaaaatatattcttcagaagcaataaagtcatatcaaggaaaatctcttgggacaagaccacctcatgtctttgcaattgctgataaagcttttcgagacatgaaggtgctcaagatgagtcagtctatcattgtatctggagaatcaggagccggcaaaacagaaaatacaaaatttgttctaagatacctgactgaatcctatggaacaggtcaagatattgatgacagaattgttgaagctaacccactcctagaagcctttggaaatgcgaagactgttcgcaacaataatagcagtcgatttgggaaatttgtagaaatacattttaatgaaaagagctcagttgttggaggatttgtttcacattatctcctagagaaatctaggatctgtgttcaaggcaaagaggaaagaaattatcatatcttttataggttgtgtgctggtgcttctgaagatattagagaaaaacttcatttgagttcaccagataattttcggtatttaaaccgaggctgcactagatactttgctaacaaagaaactgacaaacagattttacagaaccgcaaaagtcctgagtaccttaaggcaggttctatgaaagatcctctgctagatgaccatggtgattttattagaatgtgcacggctatgaaaaaaattggtttggatgatgaagaaaagcttgatctcttccgggtagtagctggcgtcctgcaccttggaaatattgattttgaggaagctggcagcacttcaggtggttgtaatctgaagaataaatctgctcagtctttggaatattgtgctgaattactgggtttggaccaagatgatcttcgagtaagtttgaccacaagagtcatgctaacaacagcagggggcaccaaaggaacagttataaaggtacctctgaaagtggagcaagcaaacaatgctcgtgatgccctggcaaagacagtgtatagccatctttttgatcatgtggtaaacagagtaaatcagtgttttccttttgaaacatcatcctattttattggagtcctagatattgctggttttgagtactttgagcataacagttttgaacaattttgcatcaactattgcaatgaaaaacttcaacaattttttaatgaaaggattctgaaggaggaacaagaactctatcaaaaagaaggtttaggtgttaatgaagtgcattatgtggataatcaggactgtatagatttaattgaagccaaattagtgggaatactggatattttggatgaagaaaatcgccttccccagccaagtgatcaacactttacatctgcagttcaccaaaagcacaaggatcattttcgactcactattcccagaaaatctaagctggcagttcataggaatatcagagacgacgaaggcttcattatcaggcattttgcgggggcagtgtgctatgaaacaacccagtttgtggagaaaaataatgatgctttacatatgtctcttgaatccttaatatgtgaatccagagataagtttatacgggaattatttgaatcatccacaaataacaacaaagatactaaacaaaaagcaggaaaacttagcttcatcagcgtgggaaacaagtttaagacacagttaaatttgcttctggataaacttcgaagtactggagcaagctttattcgttgcatcaaacctaacttaaagatgacaagccaccactttgaaggtgctcaaattctgtctcagcttcagtgttcagggatggtgtctgttttggacttgatgcagggtggttacccatcacgagcttcatttcatgaactctacaacatgtacaaaaagtatatgccagataaacttgcaagattggatccaagactattttgtaaggctttgtttaaagctttgggcttaaatgaaaatgactacaagtttgggttaaccaaagtattttttagacctggcaagtttgcagaatttgatcagatcatgaagtctgaccctgaccacttagcagagttggttaaaagagtcaatcactggctcacatgcagtcgctggaagaaagttcagtggtgctcactctcagtcatcaaattgaaaaacaaaataaaatatcgagctgaagcctgcattaaaatgcaaaaaactattcgaatgtggctttgcaagaggagacacaaacctcgcattgatggtctggttaaggtgggcacactgaaaaaacgacttgataaatttaatgaggtagtcagtgtgttgaaagatggaaaacccgagatgaataaacagatcaagaatctggaaatttctattgatactttgatggccaaaattaagtccactatgatgacgcaggaacaaatccagaaagaatatgatgcactggttaaaagctcagaggaactcctcagtgcattacagaaaaaaaaacagcaggaagaggaagcagaaaggctgaggcgtattcaagaagaaatggaaaaggaaagaaaaagacgtgaagaagacgaaaaacgtcgaagaaaggaagaggaggaaaggcggatgaaacttgagatggaagcaaagagaaaacaagaagaagaagagagaaagaaaagggaagatgatgaaaaacgcattcaagctgaagtggaggcacagctggcccgacagaaggaggaggaatcccaacagcaagcagttctggagcaggagcgcagggaccgggagctggccctgaggattgcccagagtgaagccgagctcatcagtgatgaggcccaggccgacctggcgctgcggagaaatgatggaacaagacccaaaatgacaccggaacaaatggccaaagaaatgtcagaatttttgagtagaggtcctgctgtactagccaccaaagcagctgctggtactaagaaatatgatcttagtaaatggaaatatgcagaactacgtgataccatcaatacttcttgtgatattgagctcctggcagcttgcagagaagaatttcataggagactaaaagtgtatcatgcttggaaatctaagaacaagaagagaaatactgaaacagagcaacgtgctccaaagtctgttactgattatgattttgcaccatttttgaacaattcacctcagcaaaacccagcagctcagattcctgccaggcagcgggagattgaaatgaaccgacagcaacgcttcttccgcatcccattcatccgccctgccgaccagtacaaagaccctcagagtaagaaaaaaggctggtggtatgcccattttgatggaccatggattgcccggcaaatggaactccatcctgacaagccacccatcctacttgtggctggtaaggacgacatggagatgtgtgagctgaatcttgaggagactggcctgactcggaagcgtggtgctgagatcttgccaagacagtttgaagaaatctgggaacgctgtggaggcatccagtaccttcagaatgcgattgagagcagacaggctcggcccacctatgcaacagccatgctgcagagtctgttaaagtagatgttgcacaccagccttacagctgggagcctttgccatggtacttaggtagggtgtgtgcccccagatttaaccattccataatcatgttagagttacttctataaagtgaacagattttattaatcacggcttttggtgaatttgtttaaggttaattatggtagcaaattttggacctaaacattatttttctgtatcccgctgtaattcccaaaactctcattattctctaactattacacatgggcatattctgatgtttctcatcctttgccagaagactaccttacatccatcgtaattgttctctaggaaaagagaacttttttcaaaattcaaaatactttttaaggatggcacagtaccatataactggagtaataaaacatgagcttacattcttacaataactaaaccacttaaaatgatcaaggcactaatgttttggtctgaaaagctgtgtactttatagacattttcagacatttttggaaatttccattaaaggtggaaaatctatttttttcctcctttgcagtgtcttagtttgaatgaaacacttcgaagttctagaattctagaaagagccttaatgtatttgatgtattctgtgataagaggtactaatagtatccagcacagatttgcttttctttgctagcacaatgtgtgttgctgtcagaatattctttttatattctgtggaaaattaaaggaaattcagattgtttaaatgcctaaaagttttgagataagttttgtttcaattagaaaaggaaataggttttaggtggcatagtggcttaactggactgaattcaaatattctttcaacttcatctcaatagtgatttttgtatcagaatcttgtccaagttgtttcattgatttagtaagtgttctgcttccaacatctttctttttaagaaattcctagtgtcttttttggcctttgaggttttggtaattgtagacctgtttcataagctttgtaattcagaaatccttgtatttagtaagtgcttgttttacataactgataattttaaaatgttttctttgtgtgctgttagtattgattcaatgtcagcagctttaagcctaatatttatgactttcacatttggaatttaaagacaaaaatacatcaaggagttatgctgacataattctaaggagttttgttgtattttagaataaaattataaagtaaaa

SEQ ID NO: 346567 - DNA, 5244 bp, Homo sapiens
  misc_feature (1)..(1): n is a, c, g, or t
nggggaactcggcggggcgccggccggcgggcggagaccgactcgggatctgtccgagcaggaagccagcctcagcccggccgctgtcgccgccctgtcctggtgcccgtccgcgtcgtcgccctcttcactggccctcatcacttctcaccgcgccctccagcttcacccgtacaggtagccccgccgccgcgcacctgccttcgctcccgcaccggtgacagtggatagtggaaacaggagatcgtggatcctccttcaaaaatggaggatggaaagcccgtttgggcgccacaccctacagatggatttcagatgggcaatattgtggatattggccccgacagcttaacaattgaacccttgaatcagaaaggcaagacatttttggctctcataaaccaagtgtttcctgcagaagaggacagtaaaaaagatgtggaagataactgttcactaatgtatttaaatgaagccacactgctccataatatcaaagttcgatatagtaaagacagaatttatacatatgtcgccaacattctgattgcagtgaatccatactttgacatacctaaaatatattcttcagaagcaataaagtcatatcaaggaaaatctcttgggacaagaccacctcatgtctttgcaattgctgataaagcttttcgagacatgaaggtgctcaagatgagtcagtctatcattgtatctggagaatcaggagccggcaaaacagaaaatacaaaatttgttctaagatacctgactgaatcctatggaacaggtcaagatattgatgacagaattgttgaagctaacccactcctagaagcctttggaaatgcgaagactgttcgcaacaataatagcagtcgatttgggaaatttgtagaaatacattttaatgaaaagagctcagttgttggaggatttgtttcacattatctcctagagaaatctaggatctgtgttcaaggcaaagaggaaagaaattatcatatcttttataggttgtgtgctggtgcttctgaagatattagagaaaaacttcatttgagttcaccagataattttcggtatttaaaccgaggctgcactagatactttgctaacaaagaaactgacaaacagattttacagaaccgcaaaagtcctgagtaccttaaggcaggttctatgaaagatcctctgctagatgaccatggtgattttattagaatgtgcacggctatgaaaaaaattggtttggatgatgaagaaaagcttgatctcttccgggtagtagctggcgtcctgcaccttggaaatattgattttgaggaagctggcagcacttcaggtggttgtaatctgaagaataaatctgctcagtctttggaatattgtgctgaattactgggtttggaccaagatgatcttcgagtaagtttgaccacaagagtcatgctaacaacagcagggggcaccaaaggaacagttataaaggtacctctgaaagtggagcaagcaaacaatgctcgtgatgccctggcaaagacagtgtatagccatctttttgatcatgtggtaaacagagtaaatcagtgttttccttttgaaacatcatcctattttattggagtcctagatattgctggttttgagtactttgagcataacagttttgaacaattttgcatcaactattgcaatgaaaaacttcaacaattttttaatgaaaggattctgaaggaggaacaagaactctatcaaaaagaaggtttaggtgttaatgaagtgcattatgtggataatcaggactgtatagatttaattgaagccaaattagtgggaatactggatattttggatgaagaaaatcgccttccccagccaagtgatcaacactttacatctgcagttcaccaaaagcacaaggatcattttcgactcactattcccagaaaatctaagctggcagttcataggaatatcagagacgacgaaggcttcattatcaggcattttgcgggggcagtgtgctatgaaacaacccagtttgtggagaaaaataatgatgctttacatatgtctcttgaatccttaatatgtgaatccagagataagtttatacgggaattatttgaatcatccacaaataacaacaaagatactaaacaaaaagcaggaaaacttagcttcatcagcgtgggaaacaagtttaagacacagttaaatttgcttctggataaacttcgaagtactggagcaagctttattcgttgcatcaaacctaacttaaagatgacaagccaccactttgaaggtgctcaaattctgtctcagcttcagtgttcagggatggtgtctgttttggacttgatgcagggtggttacccatcacgagcttcatttcatgaactctacaacatgtacaaaaagtatatgccagataaacttgcaagattggatccaagactattttgtaaggctttgtttaaagctttgggcttaaatgaaaatgactacaagtttgggttaaccaaagtattttttagacctggcaagtttgcagaatttgatcagatcatgaagtctgaccctgaccacttagcagagttggttaaaagagtcaatcactggctcacatgcagtcgctggaagaaagttcagtggtgctcactctcagtcatcaaattgaaaaacaaaataaaatatcgagctgaagcctgcattaaaatgcaaaaaactattcgaatgtggctttgcaagaggagacacaaacctcgcattgatggtctggttaaggtgggcacactgaaaaaacgacttgataaatttaatgaggtagtcagtgtgttgaaagatggaaaacccgagatgaataaacagatcaagaatctggaaatttctattgatactttgatggccaaaattaagtccactatgatgacgcaggaacaaatccagaaagaatatgatgcactggttaaaagctcagaggaactcctcagtgcattacagaaaaaaaaacagcaggaagaggaagcagaaaggctgaggcgtattcaagaagaaatggaaaaggaaagaaaaagacgtgaagaagacgaaaaacgtcgaagaaaggaagaggaggaaaggcggatgaaacttgagatggaagcaaagagaaaacaagaagaagaagagagaaagaaaagggaagatgatgaaaaacgcattcaagctgaagtggaggcacagctggcccgacagaaggaggaggaatcccaacagcaagcagttctggagcaggagcgcagggaccgggagctggccctgaggattgcccagagtgaagccgagctcatcagtgatgaggcccaggccgacctggcgctgcggagaggtcctgctgtactagccaccaaagcagctgctggtactaagaaatatgatcttagtaaatggaaatatgcagaactacgtgataccatcaatacttcttgtgatattgagctcctggcagcttgcagagaagaatttcataggagactaaaagtgtatcatgcttggaaatctaagaacaagaagagaaatactgaaacagagcaacgtgctccaaagtctgttactgattatgctcagcaaaacccagcagctcagattcctgccaggcagcgggagattgaaatgaaccgacagcaacgcttcttccgcatcccattcatccgccctgccgaccagtacaaagaccctcagagtaagaaaaaaggctggtggtatgcccattttgatggaccatggattgcccggcaaatggaactccatcctgacaagccacccatcctacttgtggctggtaaggacgacatggagatgtgtgagctgaatcttgaggagactggcctgactcggaagcgtggtgctgagatcttgccaagacagtttgaagaaatctgggaacgctgtggaggcatccagtaccttcagaatgcgattgagagcagacaggctcggcccacctatgcaacagccatgctgcagagtctgttaaagtagatgttgcacaccagccttacagctgggagcctttgccatggtacttaggtagggtgtgtgcccccagatttaaccattccataatcatgttagagttacttctataaagtgaacagattttattaatcacggcttttggtgaatttgtttaaggttaattatggtagcaaattttggacctaaacattatttttctgtatcccgctgtaattcccaaaactctcattattctctaactattacacatgggcatattctgatgtttctcatcctttgccagaagactaccttacatccatcgtaattgttctctaggaaaagagaacttttttcaaaattcaaaatactttttaaggatggcacagtaccatataactggagtaataaaacatgagcttacattcttacaataactaaaccacttaaaatgatcaaggcactaatgttttggtctgaaaagctgtgtactttatagacattttcagacatttttggaaatttccattaaaggtggaaaatctatttttttcctcctttgcagtgtcttagtttgaatgaaacacttcgaagttctagaattctagaaagagccttaatgtatttgatgtattctgtgataagaggtactaatagtatccagcacagatttgcttttctttgctagcacaatgtgtgttgctgtcagaatattctttttatattctgtggaaaattaaaggaaattcagattgtttaaatgcctaaaagttttgagataagttttgtttcaattagaaaaggaaataggttttaggtggcatagtggcttaactggactgaattcaaatattctttcaacttcatctcaatagtgatttttgtatcagaatcttgtccaagttgtttcattgatttagtaagtgttctgcttccaacatctttctttttaagaaattcctagtgtcttttttggcctttgaggttttggtaattgtagacctgtttcataagctttgtaattcagaaatccttgtatttagtaagtgcttgttttacataactgataattttaaaatgttttctttgtgtgctgttagtattgattcaatgtcagcagctttaagcctaatatttatgactttcacatttggaatttaaagacaaaaatacatcaaggagttatgctgacataattctaaggagttttgttgtattttagaataaaattataaagtaaaa

SEQ ID NO: 346568 - DNA, 3610 bp, Homo sapiens
caatttgatgactgagagtgagcaccactgaactttcttccagcgactgcatgtgagccagtgattgactcttttaaccaactctgctaagtggtcagggtcagacttcatgatctgatcaaattctgcaaacttgccaggtctaaaaaatactttggataatcaggactgtatagatttaattgaagccaaattagtgggaatactggatattttggatgaagaaaatcgccttccccagccaagtgatcaacactttacatctgcagttcaccaaaagcacaaggatcattttcgactcactattcccagaaaatctaagctggcagttcataggaatatcagagacgacgaaggcttcattatcaggcattttgcgggggcagtgtgctatgaaacaacccagtttgtggagaaaaataatgatgctttacatatgtctcttgaatccttaatatgtgaatccagagataagtttatacgggaattatttgaatcatccacaaataacaacaaagatactaaacaaaaagcaggaaaacttagcttcatcagcgtgggaaacaagtttaagacacagttaaatttgcttctggataaacttcgaagtactggagcaagctttattcgttgcatcaaacctaacttaaagatgacaagccaccactttgaaggtgctcaaattctgtctcagcttcagtgttcagggatggtgtctgttttggacttgatgcagggtggttacccatcacgagcttcatttcatgaactctacaacatgtacaaaaagtatatgccagataaacttgcaagattggatccaagactattttgtaaggctttgtttaaagctttgggcttaaatgaaaatgactacaagtttgggttaaccaaagtattttttagacctggcaagtttgcagaatttgatcagatcatgaagtctgaccctgaccacttagcagagttggttaaaagagtcaatcactggctcacatgcagtcgctggaagaaagttcagtggtgctcactctcagtcatcaaattgaaaaacaaaataaaatatcgagctgaagcctgcattaaaatgcaaaaaactattcgaatgtggctttgcaagaggagacacaaacctcgcattgatggtctggttaaggtgggcacactgaaaaaacgacttgataaatttaatgaggtagtcagtgtgttgaaagatggaaaacccgagatgaataaacagatcaagaatctggaaatttctattgatactttgatggccaaaattaagtccactatgatgacgcaggaacaaatccagaaagaatatgatgcactggttaaaagctcagaggaactcctcagtgcattacagaaaaaaaaacagcaggaagaggaagcagaaaggctgaggcgtattcaagaagaaatggaaaaggaaagaaaaagacgtgaagaagacgaaaaacgtcgaagaaaggaagaggaggaaaggcggatgaaacttgagatggaagcaaagagaaaacaagaagaagaagagagaaagaaaagggaagatgatgaaaaacgcattcaagctgaagtggaggcacagctggcccgacagaaggaggaggaatcccaacagcaagcagttctggagcaggagcgcagggaccgggagctggccctgaggattgcccagagtgaagccgagctcatcagtgatgaggcccaggccgacctggcgctgcggagaggtcctgctgtactagccaccaaagcagctgctggtactaagaaatatgatcttagtaaatggaaatatgcagaactacgtgataccatcaatacttcttgtgatattgagctcctggcagcttgcagagaagaatttcataggagactaaaagtgtatcatgcttggaaatctaagaacaagaagagaaatactgaaacagagcaacgtgctccaaagtctgttactgattatgctcagcaaaacccagcagctcagattcctgccaggcagcgggagattgaaatgaaccgacagcaacgcttcttccgcatcccattcatccgccctgccgaccagtacaaagaccctcagagtaagaaaaaaggctggtggtatgcccattttgatggaccatggattgcccggcaaatggaactccatcctgacaagccacccatcctacttgtggctggtaaggacgacatggagatgtgtgagctgaatcttgaggagactggcctgactcggaagcgtggtgctgagatcttgccaagacagtttgaagaaatctgggaacgctgtggaggcatccagtaccttcagaatgcgattgagagcagacaggctcggcccacctatgcaacagccatgctgcagagtctgttaaagtagatgttgcacaccagccttacagctgggagcctttgccatggtacttaggtagggtgtgtgcccccagatttaaccattccataatcatgttagagttacttctataaagtgaacagattttattaatcacggcttttggtgaatttgtttaaggttaattatggtagcaaattttggacctaaacattatttttctgtatcccgctgtaattcccaaaactctcattattctctaactattacacatgggcatattctgatgtttctcatcctttgccagaagactaccttacatccatcgtaattgttctctaggaaaagagaacttttttcaaaattcaaaatactttttaaggatggcacagtaccatataactggagtaataaaacatgagcttacattcttacaataactaaaccacttaaaatgatcaaggcactaatgttttggtctgaaaagctgtgtactttatagacattttcagacatttttggaaatttccattaaaggtggaaaatctatttttttcctcctttgcagtgtcttagtttgaatgaaacacttcgaagttctagaattctagaaagagccttaatgtatttgatgtattctgtgataagaggtactaatagtatccagcacagatttgcttttctttgctagcacaatgtgtgttgctgtcagaatattctttttatattctgtggaaaattaaaggaaattcagattgtttaaatgcctaaaagttttgagataagttttgtttcaattagaaaaggaaataggttttaggtggcatagtggcttaactggactgaattcaaatattctttcaacttcatctcaatagtgatttttgtatcagaatcttgtccaagttgtttcattgatttagtaagtgttctgcttccaacatctttctttttaagaaattcctagtgtcttttttggcctttgaggttttggtaattgtagacctgtttcataagctttgtaattcagaaatccttgtatttagtaagtgcttgttttacataactgataattttaaaatgttttctttgtgtgctgttagtattgattcaatgtcagcagctttaagcctaatatttatgactttcacatttggaatttaaagacaaaaatacatcaaggagttatgctgacataattctaaggagttttgttgtattttagaataaaattataaagtaaaa

SEQ ID NO: 346569 - DNA, 2970 bp, Homo sapiens
cattcacaaattattttggacttccgaacagtgattgacagtgctttgtgcttgttcgtgaatctagggatggtgtctgttttggacttgatgcagggtggttacccatcacgagcttcatttcatgaactctacaacatgtacaaaaagtatatgccagataaacttgcaagattggatccaagactattttgtaaggctttgtttaaagctttgggcttaaatgaaaatgactacaagtttgggttaaccaaagtattttttagacctggcaagtttgcagaatttgatcagatcatgaagtctgaccctgaccacttagcagagttggttaaaagagtcaatcactggctcacatgcagtcgctggaagaaagttcagtggtgctcactctcagtcatcaaattgaaaaacaaaataaaatatcgagctgaagcctgcattaaaatgcaaaaaactattcgaatgtggctttgcaagaggagacacaaacctcgcattgatggtctggttaaggtgggcacactgaaaaaacgacttgataaatttaatgaggtagtcagtgtgttgaaagatggaaaacccgagatgaataaacagatcaagaatctggaaatttctattgatactttgatggccaaaattaagtccactatgatgacgcaggaacaaatccagaaagaatatgatgcactggttaaaagctcagaggaactcctcagtgcattacagaaaaaaaaacagcaggaagaggaagcagaaaggctgaggcgtattcaagaagaaatggaaaaggaaagaaaaagacgtgaagaagacgaaaaacgtcgaagaaaggaagaggaggaaaggcggatgaaacttgagatggaagcaaagagaaaacaagaagaagaagagagaaagaaaagggaagatgatgaaaaacgcattcaagctgaagtggaggcacagctggcccgacagaaggaggaggaatcccaacagcaagcagttctggagcaggagcgcagggaccgggagctggccctgaggattgcccagagtgaagccgagctcatcagtgatgaggcccaggccgacctggcgctgcggagaggtcctgctgtactagccaccaaagcagctgctggtactaagaaatatgatcttagtaaatggaaatatgcagaactacgtgataccatcaatacttcttgtgatattgagctcctggcagcttgcagagaagaatttcataggagactaaaagtgtatcatgcttggaaatctaagaacaagaagagaaatactgaaacagagcaacgtgctccaaagtctgttactgattatgctcagcaaaacccagcagctcagattcctgccaggcagcgggagattgaaatgaaccgacagcaacgcttcttccgcatcccattcatccgccctgccgaccagtacaaagaccctcagagtaagaaaaaaggctggtggtatgcccattttgatggaccatggattgcccggcaaatggaactccatcctgacaagccacccatcctacttgtggctggtaaggacgacatggagatgtgtgagctgaatcttgaggagactggcctgactcggaagcgtggtgctgagatcttgccaagacagtttgaagaaatctgggaacgctgtggaggcatccagtaccttcagaatgcgattgagagcagacaggctcggcccacctatgcaacagccatgctgcagagtctgttaaagtagatgttgcacaccagccttacagctgggagcctttgccatggtacttaggtagggtgtgtgcccccagatttaaccattccataatcatgttagagttacttctataaagtgaacagattttattaatcacggcttttggtgaatttgtttaaggttaattatggtagcaaattttggacctaaacattatttttctgtatcccgctgtaattcccaaaactctcattattctctaactattacacatgggcatattctgatgtttctcatcctttgccagaagactaccttacatccatcgtaattgttctctaggaaaagagaacttttttcaaaattcaaaatactttttaaggatggcacagtaccatataactggagtaataaaacatgagcttacattcttacaataactaaaccacttaaaatgatcaaggcactaatgttttggtctgaaaagctgtgtactttatagacattttcagacatttttggaaatttccattaaaggtggaaaatctatttttttcctcctttgcagtgtcttagtttgaatgaaacacttcgaagttctagaattctagaaagagccttaatgtatttgatgtattctgtgataagaggtactaatagtatccagcacagatttgcttttctttgctagcacaatgtgtgttgctgtcagaatattctttttatattctgtggaaaattaaaggaaattcagattgtttaaatgcctaaaagttttgagataagttttgtttcaattagaaaaggaaataggttttaggtggcatagtggcttaactggactgaattcaaatattctttcaacttcatctcaatagtgatttttgtatcagaatcttgtccaagttgtttcattgatttagtaagtgttctgcttccaacatctttctttttaagaaattcctagtgtcttttttggcctttgaggttttggtaattgtagacctgtttcataagctttgtaattcagaaatccttgtatttagtaagtgcttgttttacataactgataattttaaaatgttttctttgtgtgctgttagtattgattcaatgtcagcagctttaagcctaatatttatgactttcacatttggaatttaaagacaaaaatacatcaaggagttatgctgacataattctaaggagttttgttgtattttagaataaaattataaagtaaaa

SEQ ID NO: 346570 - DNA, 5602 bp, Homo sapiens
tccatgctgaattccttatgggtgtcaatgagagactgcagggcctctgtgtcatcaggaagtgctccccgaaagcgaagcgtttgccggaattccgggatcgtggatcctccttcaaaaatggaggatggaaagcccgtttgggcgccacaccctacagatggatttcagatgggcaatattgtggatattggccccgacagcttaacaattgaacccttgaatcagaaaggcaagacatttttggctctcataaaccaagtgtttcctgcagaagaggacagtaaaaaagatgtggaagataactgttcactaatgtatttaaatgaagccacactgctccataatatcaaagttcgatatagtaaagacagaatttatacatatgtcgccaacattctgattgcagtgaatccatactttgacatacctaaaatatattcttcagaagcaataaagtcatatcaaggaaaatctcttgggacaagaccacctcatgtctttgcaattgctgataaagcttttcgagacatgaaggtgctcaagatgagtcagtctatcattgtatctggagaatcaggagccggcaaaacagaaaatacaaaatttgttctaagatacctgactgaatcctatggaacaggtcaagatattgatgacagaattgttgaagctaacccactcctagaagcctttggaaatgcgaagactgttcgcaacaataatagcagtcgatttgggaaatttgtagaaatacattttaatgaaaagagctcagttgttggaggatttgtttcacattatctcctagagaaatctaggatctgtgttcaaggcaaagaggaaagaaattatcatatcttttataggttgtgtgctggtgcttctgaagatattagagaaaaacttcatttgagttcaccagataattttcggtatttaaaccgaggctgcactagatactttgctaacaaagaaactgacaaacagattttacagaaccgcaaaagtcctgagtaccttaaggcaggttctatgaaagatcctctgctagatgaccatggtgattttattagaatgtgcacggctatgaaaaaaattggtttggatgatgaagaaaagcttgatctcttccgggtagtagctggcgtcctgcaccttggaaatattgattttgaggaagctggcagcacttcaggtggttgtaatctgaagaataaatctgctcagtctttggaatattgtgctgaattactgggtttggaccaagatgatcttcgagtaagtttgaccacaagagtcatgctaacaacagcagggggcaccaaaggaacagttataaaggtacctctgaaagtggagcaagcaaacaatgctcgtgatgccctggcaaagacagtgtatagccatctttttgatcatgtggtaaacagagtaaatcagtgttttccttttgaaacatcatcctattttattggagtcctagatattgctggttttgagtactttgagcataacagttttgaacaattttgcatcaactattgcaatgaaaaacttcaacaattttttaatgaaaggattctgaaggaggaacaagaactctatcaaaaagaaggtttaggtgttaatgaagtgcattatgtggataatcaggactgtatagatttaattgaagccaaattagtgggaatactggatattttggatgaagaaaatcgccttccccagccaagtgatcaacactttacatctgcagttcaccaaaagcacaaggatcattttcgactcactattcccagaaaatctaagctggcagttcataggaatatcagagacgacgaaggcttcattatcaggcattttgcgggggcagtgtgctatgaaacaacccagtttgtggagaaaaataatgatgctttacatatgtctcttgaatccttaatatgtgaatccagagataagtttatacgggaattatttgaatcatccacaaataacaacaaagatactaaacaaaaagcaggaaaacttagcttcatcagcgtgggaaacaagtttaagacacagttaaatttgcttctggataaacttcgaagtactggagcaagctttattcgttgcatcaaacctaacttaaagatgacaagccaccactttgaaggtgctcaaattctgtctcagcttcagtgttcagggatggtgtctgttttggacttgatgcagggtggttacccatcacgagcttcatttcatgaactctacaacatgtacaaaaagtatatgccagataaacttgcaagattggatccaagactattttgtaaggctttgtttaaagctttgggcttaaatgaaaatgactacaagtttgggttaaccaaagtattttttagacctggcaagtttgcagaatttgatcagatcatgaagtctgaccctgaccacttagcagagttggttaaaagagtcaatcactggctcacatgcagtcgctggaagaaagttcagtggtgctcactctcagtcatcaaattgaaaaacaaaataaaatatcgagctgaagcctgcattaaaatgcaaaaaactattcgaatgtggctttgcaagaggagacacaaacctcgcattgatggtctggttaaggtgggcacactgaaaaaacgacttgataaatttaatgaggtagtcagtgtgttgaaagatggaaaacccgagatgaataaacagatcaagaatctggaaatttctattgatactttgatggccaaaattaagtccactatgatgacgcaggaacaaatccagaaagaatatgatgcactggttaaaagctcagaggaactcctcagtgcattacagaaaaaaaaacagcaggaagaggaagcagaaaggctgaggcgtattcaagaagaaatggaaaaggaaagaaaaagacgtgaagaagacgaaaaacgtcgaagaaaggaagaggaggaaaggcggatgaaacttgagatggaagcaaagagaaaacaagaagaagaagagagaaagaaaagggaagatgatgaaaaacgcattcaagctgaagtggaggcacagctggcccgacagaaggaggaggaatcccaacagcaagcagttctggagcaggagcgcagggaccgggagctggccctgaggattgcccagagtgaagccgagctcatcagtgatgaggcccaggccgacctggcgctgcggagaggtcctgctgtactagccaccaaagcagctgctggtactaagaaatatgatcttagtaaatggaaatatgcagaactacgtgataccatcaatacttcttgtgatattgagctcctggcagcttgcagagaagaatttcataggagactaaaagtgtatcatgcttggaaatctaagaacaagaagagaaatactgaaacagagcaacgtgctccaaagtctgttactgattatgattttgcaccatttttgaacaattcacctcagcaaaacccagcagctcagattcctgccaggcagcgggagattgaaatgaaccgacagcaacgcttcttccgcatcccattcatccgccctgccgaccagtacaaagaccctcagagtaagaaaaaaggctggtggtatgcccattttgatggaccatggattgcccggcaaatggaactccatcctgacaagccacccatcctacttgtggctggtaaggacgacatggagatgtgtgagctgaatcttgaggagactggcctgactcggaagcgtggtgctgagatcttgccaagacagtttgaagaaatctgggaacgctgtggaggcatccagtaccttcagaatgcgattgagagcagacaggctcggcccacctatgcaacagccatgctgcagagtctgttaaagtagatgttgcacaccagccttacagctgggagcctttgccatggtacttaggtagggtgtgtgcccccagatttaaccattccataatcatgttagagttacttctataaagtgaacagattttattaatcacggcttttggtgaatttgtttaaggttaattatggtagcaaattttggacctaaacattatttttctgtatcccgctgtaattcccaaaactctcattattctctaactattacacatgggcatattctgatgtttctcatcctttgccagaagactaccttacatccatcgtaattgttctctaggaaaagagaacttttttcaaaattcaaaatactttttaaggatggcacagtaccatataactggagtaataaaacatgagcttacattcttacaataactaaaccacttaaaatgatcaaggcactaatgttttggtctgaaaagctgtgtactttatagacattttcagacatttttggaaatttccattaaaggtggaaaatctatttttttcctcctttgcagtgtcttagtttgaatgaaacacttcgaagttctagaattctagaaagagccttaatgtatttgatgtattctgtgataagaggtactaatagtatccagcacagatttgcttttctttgctagcacaatgtgtgttgctgtcagaatattctttttatattctgtggaaaattaaaggaaattcagattgtttaaatgcctaaaagttttgagataagttttgtttcaattagaaaaggaaataggttttaggtggcatagtggcttaactggactgaattcaaatattctttcaacttcatctcaatagtgatttttgtatcagaatcttgtccaagttgtttcattgatttagtaagtgttctgcttccaacatctttctttttaagaaattcctagtgtcttttttggcctttgaggttttggtaattgtagacctgtttcataagctttgtaattcagaaatccttgtatttagtaagtgcttgttttacataactgataattttaaaatgttttctttgtgtgctgttagtattgattcaatgtcagcagctttaagcctaatatttatgactttcacatttggaatttaaagacaaaaatacatcaaggagttatgctgacataattctaaggagttttgttgtattttagaataaaattataaagtaaaataaaatgattctctgtactgctttttcccccagtttttagagaccctaacctttgaaatgaaattccagtgatttcttttttccctagaaagattacctcagttagggaagtatttcccagctgactagtgtttgtgagccacagacactgtcttcagaattgcttctctcatgtcttagtagagaaatatttatttattatgatacattcaaatgattgtcaagttaaattaaatggttgtgtctgtgctattgagaatgcaaatgtgattatcttttgaaggctgtattactgcatagcttcacccaccctcgggtcatttcgtccctgtgattggggacagaaggtgtagctactgaagtaaatgacctattctctctcttccatctctcgcctttaactggtgtttttatttgtgtaggatagtgaatgataagcttttttcctaaccagtagtgagtaaagttcttgaac

SEQ ID NO: 346571 - DNA, 3440 bp, Homo sapiens
  misc_feature (1)..(1): n is a, c, g, or t
  misc_feature (3436)..(3436): n is a, c, g, or t
nggggaactcggcggggcgccggccggcgggcggagaccgactcgggatctgtccgagcaggaagccagcctcagcccggccgctgtcgccgccctgtcctggtgcccgtccgcgtcgtcgccctcttcactggccctcatcacttctcaccgcgccctccagcttcacccgtacaggtagccccgccgccgcgcacctgccttcgctcccgcaccggtgacagtggatagtggaaacaggagatcgtggatcctccttcaaaaatggaggatggaaagcccgtttgggcgccacaccctacagatggatttcagatgggcaatattgtggatattggccccgacagcttaacaattgaacccttgaatcagaaaggcaagacatttttggctctcataaaccaagtgtttcctgcagaagaggacagtaaaaaagatgtggaagataactgttcactaatgtatttaaatgaagccacactgctccataatatcaaagttcgatatagtaaagacagaatttatacatatgtcgccaacattctgattgcagtgaatccatactttgacatacctaaaatatattcttcagaagcaataaagtcatatcaaggaaaatctcttgggacaagaccacctcatgtctttgcaattgctgataaagcttttcgagacatgaaggtgctcaagatgagtcagtctatcattgtatctggagaatcaggagccggcaaaacagaaaatacaaaatttgttctaagatacctgactgaatcctatggaacaggtcaagatattgatgacagaattgttgaagctaacccactcctagaagcctttggaaatgcgaagactgttcgcaacaataatagcagtcgatttgggaaatttgtagaaatacattttaatgaaaagagctcagttgttggaggatttgtttcacattatctcctagagaaatctaggatctgtgttcaaggcaaagaggaaagaaattatcatatcttttataggttgtgtgctggtgcttctgaagatattagagaaaaacttcatttgagttcaccagataattttcggtatttaaaccgaggctgcactagatactttgctaacaaagaaactgacaaacagattttacagaaccgcaaaagtcctgagtaccttaaggcaggttctatgaaagatcctctgctagatgaccatggtgattttattagaatgtgcacggctatgaaaaaaattggtttggatgatgaagaaaagcttgatctcttccgggtagtagctggcgtcctgcaccttggaaatattgattttgaggaagctggcagcacttcaggtggttgtaatctgaagaataaatctgctcagtctttggaatattgtgctgaattactgggtttggaccaagatgatcttcgagtaagtttgaccacaagagtcatgctaacaacagcagggggcaccaaaggaacagttataaaggtacctctgaaagtggagcaagcaaacaatgctcgtgatgccctggcaaagacagtgtatagccatctttttgatcatgtggtaaacagagtaaatcagtgttttccttttgaaacatcatcctattttattggagtcctagatattgctggttttgagtactttgagcataacagttttgaacaattttgcatcaactattgcaatgaaaaacttcaacaattttttaatgaaaggattctgaaggaggaacaagaactctatcaaaaagaaggtttaggtgttaatgaagtgcattatgtggataatcaggactgtatagatttaattgaagccaaattagtgggaatactggatattttggatgaagaaaatcgccttccccagccaagtgatcaacactttacatctgcagttcaccaaaagcacaaggatcattttcgactcactattcccagaaaatctaagctggcagttcataggaatatcagagacgacgaaggcttcattatcaggcattttgcgggggcagtgtgctatgaaacaacccagtttgtggagaaaaataatgatgctttacatatgtctcttgaatccttaatatgtgaatccagagataagtttatacgggaattatttgaatcatccacaaataacaacaaagatactaaacaaaaagcaggaaaacttagcttcatcagcgtgggaaacaagtttaagacacagttaaatttgcttctggataaacttcgaagtactggagcaagctttattcgttgcatcaaacctaacttaaagatgacaagccaccactttgaaggtgctcaaattctgtctcagcttcagtgttcagggatggtgtctgttttggacttgatgcagggtggttacccatcacgagcttcatttcatgaactctacaacatgtacaaaaagtatatgccagataaacttgcaagattggatccaagactattttgtaaggctttgtttaaagctttgggcttaaatgaaaatgactacaagtttgggttaaccaaagtattttttagacctggcaagtttgcagaatttgatcagatcatgaagtctgaccctgaccacttagcagagttggttaaaagagtcaatcactggctcacatgcagtcgctggaagaaagttcagtggtgctcactctcagtcatcaaattgaaaaacaaaataaaatatcgagctgaagcctgcattaaaatgcaaaaaactattcgaatgtggctttgcaagaggagacacaaacctcgcattgatggtctggttaaggtgggcacactgaaaaaacgacttgataaatttaatgaggtagtcagtgtgttgaaagatggaaaacccgagatgaataaacagatcaagaatctggaaatttctattgatactttgatggccaaaattaagtccactatgatgacgcaggaacaaatccagaaagaatatgatgcactggttaaaagctcagaggaactcctcagtgcattacagaaaaaaaaacagcaggaagaggaagcagaaaggctgaggcgtattcaagaagaaatggaaaaggaaagaaaaagacgtgaagaagacgaaaaacgtcgaagaaaggaagaggaggaaaggcggatgaaacttgagatggaagcaaagagaaaacaagaagaagaagagagaaagaaaagggaagatgatgaaaaacgcattcaagctgaagtggaggcacagctggcccgacagaaggaggaggaatcccaacagcaagcagttctggagcaggagcgcagggaccgggagctggccctgaggattgcccagagtgaagccgagctcatcagtgatgaggcccaggccgacctggcgctgcggagtgcctgcgagaatgtgacagaccaaatgcccggacaatggcaagaatgcaaatttgatgagtctntgct

SEQ ID NO: 346572 - DNA, 5127 bp, Homo sapiens
tccatgctgaattccttatgggtgtcaatgagagactgcagggcctctgtgtcatcaggaagtgctccccgaaagcgaagcgtttgccggaattccgggatcgtggatcctccttcaaaaatggaggatggaaagcccgtttgggcgccacaccctacagatggatttcagatgggcaatattgtggatattggccccgacagcttaacaattgaacccttgaatcagaaaggcaagacatttttggctctcataaaccaagtgtttcctgcagaagaggacagtaaaaaagatgtggaagataactgttcactaatgtatttaaatgaagccacactgctccataatatcaaagttcgatatagtaaagacagaatttatacatatgtcgccaacattctgattgcagtgaatccatactttgacatacctaaaatatattcttcagaagcaataaagtcatatcaaggaaaatctcttgggacaagaccacctcatgtctttgcaattgctgataaagcttttcgagacatgaaggtgctcaagatgagtcagtctatcattgtatctggagaatcaggagccggcaaaacagaaaatacaaaatttgttctaagatacctgactgaatcctatggaacaggtcaagatattgatgacagaattgttgaagctaacccactcctagaagcctttggaaatgcgaagactgttcgcaacaataatagcagtcgatttgggaaatttgtagaaatacattttaatgaaaagagctcagttgttggaggatttgtttcacattatctcctagagaaatctaggatctgtgttcaaggcaaagaggaaagaaattatcatatcttttataggttgtgtgctggtgcttctgaagatattagagaaaaacttcatttgagttcaccagataattttcggtatttaaaccgaggctgcactagatactttgctaacaaagaaactgacaaacagattttacagaaccgcaaaagtcctgagtaccttaaggcaggttctatgaaagatcctctgctagatgaccatggtgattttattagaatgtgcacggctatgaaaaaaattggtttggatgatgaagaaaagcttgatctcttccgggtagtagctggcgtcctgcaccttggaaatattgattttgaggaagctggcagcacttcaggtggttgtaatctgaagaataaatctgctcagtctttggaatattgtgctgaattactgggtttggaccaagatgatcttcgagtaagtttgaccacaagagtcatgctaacaacagcagggggcaccaaaggaacagttataaaggtacctctgaaagtggagcaagcaaacaatgctcgtgatgccctggcaaagacagtgtatagccatctttttgatcatgtggtaaacagagtaaatcagtgttttccttttgaaacatcatcctattttattggagtcctagatattgctggttttgagtactttgagcataacagttttgaacaattttgcatcaactattgcaatgaaaaacttcaacaattttttaatgaaaggattctgaaggaggaacaagaactctatcaaaaagaaggtttaggtgttaatgaagtgcattatgtggataatcaggactgtatagatttaattgaagccaaattagtgggaatactggatattttggatgaagaaaatcgccttccccagccaagtgatcaacactttacatctgcagttcaccaaaagcacaaggatcattttcgactcactattcccagaaaatctaagctggcagttcataggaatatcagagacgacgaaggcttcattatcaggcattttgcgggggcagtgtgctatgaaacaacccagtttgtggagaaaaataatgatgctttacatatgtctcttgaatccttaatatgtgaatccagagataagtttatacgggaattatttgaatcatccacaaataacaacaaagatactaaacaaaaagcaggaaaacttagcttcatcagcgtgggaaacaagtttaagacacagttaaatttgcttctggataaacttcgaagtactggagcaagctttattcgttgcatcaaacctaacttaaagatgacaagccaccactttgaaggtgctcaaattctgtctcagcttcagtgttcagggatggtgtctgttttggacttgatgcagggtggttacccatcacgagcttcatttcatgaactctacaacatgtacaaaaagtatatgccagataaacttgcaagattggatccaagactattttgtaaggctttgtttaaagctttgggcttaaatgaaaatgactacaagtttgggttaaccaaagtattttttagacctggcaagtttgcagaatttgatcagatcatgaagtctgaccctgaccacttagcagagttggttaaaagagtcaatcactggctcacatgcagtcgctggaagaaagttcagtggtgctcactctcagtcatcaaattgaaaaacaaaataaaatatcgagctgaagcctgcattaaaatgcaaaaaactattcgaatgtggctttgcaagaggagacacaaacctcgcattgatggtctggttaaggtgggcacactgaaaaaacgacttgataaatttaatgaggtagtcagtgtgttgaaagatggaaaacccgagatgaataaacagatcaagaatctggaaatttctattgatactttgatggccaaaattaagtccactatgatgacgcaggaacaaatccagaaagaatatgatgcactggttaaaagctcagaggaactcctcagtgcattacagaaaaaaaaacagcaggaagaggaagcagaaaggctgaggcgtattcaagaagaaatggaaaaggaaagaaaaagacgtgaagaagacgaaaaacgtcgaagaaaggaagaggaggaaaggcggatgaaacttgagatggaagcaaagagaaaacaagaagaagaagagagaaagaaaagggaagatgatgaaaaacgcattcaagctgaagtggaggcacagctggcccgacagaaggaggaggaatcccaacagcaagcagttctggagcaggagcgcagggaccgggagctggccctgaggattgcccagagtgaagccgagctcatcagtgatgaggcccaggccgacctggcgctgcggagaggtcctgctgtactagccaccaaagcagctgctggtactaagaaatatgatcttagtaaatggaaatatgcagaactacgtgataccatcaatacttcttgtgatattgagctcctggcagcttgcagagaagaatttcataggagactaaaagtgtatcatgcttggaaatctaagaacaagaagagaaatactgaaacagagcaacgtgctccaaagtctgttactgattatgattttgcaccatttttgaacaattcacctcagcaaaacccagcagctcagattcctgccaggcagcgggagattgaaatgaaccgacagcaacgcttcttccgcatcccattcatccgccctgccgaccagtacaaagaccctcagagtaagaaaaaaggctggtggtatgcccattttgatggaccatggattgcccggcaaatggaactccatcctgacaagccacccatcctacttgtggctggtaaggacgacatggagatgtgtgagctgaatcttgaggagactggcctgactcggaagcgtggtgctgagatcttgccaagacagtttgaagaaatctgggaacgctgtggaggcatccagtaccttcagaatgcgattgagagcagacaggctcggcccacctatgcaacagccatgctgcagagtctgttaaagtagatgttgcacaccagccttacagctgggagcctttgccatggtacttaggtagggtgtgtgcccccagatttaaccattccataatcatgttagagttacttctataaagtgaacagattttattaatcacggcttttggtgaatttgtttaaggttaattatggtagcaaattttggacctaaacattatttttctgtatcccgctgtaattcccaaaactctcattattctctaactattacacatgggcatattctgatgtttctcatcctttgccagaagactaccttacatccatcgtaattgttctctaggaaaagagaacttttttcaaaattcaaaatactttttaaggatggcacagtaccatataactggagtaataaaacatgagcttacattcttacaataactaaaccacttaaaatgatcaaggcactaatgttttggtctgaaaagctgtgtactttatagacattttcagacatttttggaaatttccattaaaggtggaaaatctatttttttcctcctttgcagtgtcttagtttgaatgaaacacttcgaagttctagaattctagaaagagccttaatgtatttgatgtattctgtgataagaggtactaatagtatccagcacagatttgcttttctttgctagcacaatgtgtgttgctgtcagaatattctttttatattctgtggaaaattaaaggaaattcagattgtttaaatgcctaaaagttttgagataagttttgtttcaattagaaaaggaaataggttttaggtggcatagtggcttaactggactgaattcaaatattctttcaacttcatctcaatagtgatttttgtatcagaatcttgtccaagttgtttcattgatttagtaagtgttctgcttccaacatctttctttttaagaaattcctagtgtcttttttggcctttgaggttttggtaattgtagacctgtttcataagctttgtaattcagaaatccttgtatttagtaagtgcttgttttacataactgataattttaaaatgttttctttgtgtgctgttagtattgattcaatgtcagcagctttaagcctaatatttatgactttcacatttggaatttaaagacaaaaatacatcaaggagttatgctgacataattctaaggagttttgttgtattttagaataaaattataaagtaaaa

SEQ ID NO: 346573 - DNA, 5337 bp, Homo sapiens
  misc_feature (1)..(1): n is a, c, g, or t
nggggaactcggcggggcgccggccggcgggcggagaccgactcgggatctgtccgagcaggaagccagcctcagcccggccgctgtcgccgccctgtcctggtgcccgtccgcgtcgtcgccctcttcactggccctcatcacttctcaccgcgccctccagcttcacccgtacaggtagccccgccgccgcgcacctgccttcgctcccgcaccggtgacagtggatagtggaaacaggagatcgtggatcctccttcaaaaatggaggatggaaagcccgtttgggcgccacaccctacagatggatttcagatgggcaatattgtggatattggccccgacagcttaacaattgaacccttgaatcagaaaggcaagacatttttggctctcataaaccaagtgtttcctgcagaagaggacagtaaaaaagatgtggaagataactgttcactaatgtatttaaatgaagccacactgctccataatatcaaagttcgatatagtaaagacagaatttatacatatgtcgccaacattctgattgcagtgaatccatactttgacatacctaaaatatattcttcagaagcaataaagtcatatcaaggaaaatctcttgggacaagaccacctcatgtctttgcaattgctgataaagcttttcgagacatgaaggtgctcaagatgagtcagtctatcattgtatctggagaatcaggagccggcaaaacagaaaatacaaaatttgttctaagatacctgactgaatcctatggaacaggtcaagatattgatgacagaattgttgaagctaacccactcctagaagcctttggaaatgcgaagactgttcgcaacaataatagcagtcgatttgggaaatttgtagaaatacattttaatgaaaagagctcagttgttggaggatttgtttcacattatctcctagagaaatctaggatctgtgttcaaggcaaagaggaaagaaattatcatatcttttataggttgtgtgctggtgcttctgaagatattagagaaaaacttcatttgagttcaccagataattttcggtatttaaaccgaggctgcactagatactttgctaacaaagaaactgacaaacagattttacagaaccgcaaaagtcctgagtaccttaaggcaggttctatgaaagatcctctgctagatgaccatggtgattttattagaatgtgcacggctatgaaaaaaattggtttggatgatgaagaaaagcttgatctcttccgggtagtagctggcgtcctgcaccttggaaatattgattttgaggaagctggcagcacttcaggtggttgtaatctgaagaataaatctgctcagtctttggaatattgtgctgaattactgggtttggaccaagatgatcttcgagtaagtttgaccacaagagtcatgctaacaacagcagggggcaccaaaggaacagttataaaggtacctctgaaagtggagcaagcaaacaatgctcgtgatgccctggcaaagacagtgtatagccatctttttgatcatgtggtaaacagagtaaatcagtgttttccttttgaaacatcatcctattttattggagtcctagatattgctggttttgagtactttgagcataacagttttgaacaattttgcatcaactattgcaatgaaaaacttcaacaattttttaatgaaaggattctgaaggaggaacaagaactctatcaaaaagaaggtttaggtgttaatgaagtgcattatgtggataatcaggactgtatagatttaattgaagccaaattagtgggaatactggatattttggatgaagaaaatcgccttccccagccaagtgatcaacactttacatctgcagttcaccaaaagcacaaggatcattttcgactcactattcccagaaaatctaagctggcagttcataggaatatcagagacgacgaaggcttcattatcaggcattttgcgggggcagtgtgctatgaaacaacccagtttgtggagaaaaataatgatgctttacatatgtctcttgaatccttaatatgtgaatccagagataagtttatacgggaattatttgaatcatccacaaataacaacaaagatactaaacaaaaagcaggaaaacttagcttcatcagcgtgggaaacaagtttaagcggttttgttttagctggagtagtccagctcgggatggctagagaggactagttgagttgagagaggaaagcaggcacagccaggggcttcagacacagttaaatttgcttctggataaacttcgaagtactggagcaagctttattcgttgcatcaaacctaacttaaagatgacaagccaccactttgaaggtgctcaaattctgtctcagcttcagtgttcagggatggtgtctgttttggacttgatgcagggtggttacccatcacgagcttcatttcatgaactctacaacatgtacaaaaagtatatgccagataaacttgcaagattggatccaagactattttgtaaggctttgtttaaagctttgggcttaaatgaaaatgactacaagtttgggttaaccaaagtattttttagacctggcaagtttgcagaatttgatcagatcatgaagtctgaccctgaccacttagcagagttggttaaaagagtcaatcactggctcacatgcagtcgctggaagaaagttcagtggtgctcactctcagtcatcaaattgaaaaacaaaataaaatatcgagctgaagcctgcattaaaatgcaaaaaactattcgaatgtggctttgcaagaggagacacaaacctcgcattgatggtctggttaaggtgggcacactgaaaaaacgacttgataaatttaatgaggtagtcagtgtgttgaaagatggaaaacccgagatgaataaacagatcaagaatctggaaatttctattgatactttgatggccaaaattaagtccactatgatgacgcaggaacaaatccagaaagaatatgatgcactggttaaaagctcagaggaactcctcagtgcattacagaaaaaaaaacagcaggaagaggaagcagaaaggctgaggcgtattcaagaagaaatggaaaaggaaagaaaaagacgtgaagaagacgaaaaacgtcgaagaaaggaagaggaggaaaggcggatgaaacttgagatggaagcaaagagaaaacaagaagaagaagagagaaagaaaagggaagatgatgaaaaacgcattcaagctgaagtggaggcacagctggcccgacagaaggaggaggaatcccaacagcaagcagttctggagcaggagcgcagggaccgggagctggccctgaggattgcccagagtgaagccgagctcatcagtgatgaggcccaggccgacctggcgctgcggagaggtcctgctgtactagccaccaaagcagctgctggtactaagaaatatgatcttagtaaatggaaatatgcagaactacgtgataccatcaatacttcttgtgatattgagctcctggcagcttgcagagaagaatttcataggagactaaaagtgtatcatgcttggaaatctaagaacaagaagagaaatactgaaacagagcaacgtgctccaaagtctgttactgattatgctcagcaaaacccagcagctcagattcctgccaggcagcgggagattgaaatgaaccgacagcaacgcttcttccgcatcccattcatccgccctgccgaccagtacaaagaccctcagagtaagaaaaaaggctggtggtatgcccattttgatggaccatggattgcccggcaaatggaactccatcctgacaagccacccatcctacttgtggctggtaaggacgacatggagatgtgtgagctgaatcttgaggagactggcctgactcggaagcgtggtgctgagatcttgccaagacagtttgaagaaatctgggaacgctgtggaggcatccagtaccttcagaatgcgattgagagcagacaggctcggcccacctatgcaacagccatgctgcagagtctgttaaagtagatgttgcacaccagccttacagctgggagcctttgccatggtacttaggtagggtgtgtgcccccagatttaaccattccataatcatgttagagttacttctataaagtgaacagattttattaatcacggcttttggtgaatttgtttaaggttaattatggtagcaaattttggacctaaacattatttttctgtatcccgctgtaattcccaaaactctcattattctctaactattacacatgggcatattctgatgtttctcatcctttgccagaagactaccttacatccatcgtaattgttctctaggaaaagagaacttttttcaaaattcaaaatactttttaaggatggcacagtaccatataactggagtaataaaacatgagcttacattcttacaataactaaaccacttaaaatgatcaaggcactaatgttttggtctgaaaagctgtgtactttatagacattttcagacatttttggaaatttccattaaaggtggaaaatctatttttttcctcctttgcagtgtcttagtttgaatgaaacacttcgaagttctagaattctagaaagagccttaatgtatttgatgtattctgtgataagaggtactaatagtatccagcacagatttgcttttctttgctagcacaatgtgtgttgctgtcagaatattctttttatattctgtggaaaattaaaggaaattcagattgtttaaatgcctaaaagttttgagataagttttgtttcaattagaaaaggaaataggttttaggtggcatagtggcttaactggactgaattcaaatattctttcaacttcatctcaatagtgatttttgtatcagaatcttgtccaagttgtttcattgatttagtaagtgttctgcttccaacatctttctttttaagaaattcctagtgtcttttttggcctttgaggttttggtaattgtagacctgtttcataagctttgtaattcagaaatccttgtatttagtaagtgcttgttttacataactgataattttaaaatgttttctttgtgtgctgttagtattgattcaatgtcagcagctttaagcctaatatttatgactttcacatttggaatttaaagacaaaaatacatcaaggagttatgctgacataattctaaggagttttgttgtattttagaataaaattataaagtaaaa

SEQ ID NO: 346574 - DNA, 2847 bp, Homo sapiens
tgatgggtaaccaccctgcatcaagtccaaaacagacaccatccctgaacactgaagctgagactattttgtaaggctttgtttaaagctttgggcttaaatgaaaatgactacaagtttgggttaaccaaagtattttttagacctggcaagtttgcagaatttgatcagatcatgaagtctgaccctgaccacttagcagagttggttaaaagagtcaatcactggctcacatgcagtcgctggaagaaagttcagtggtgctcactctcagtcatcaaattgaaaaacaaaataaaatatcgagctgaagcctgcattaaaatgcaaaaaactattcgaatgtggctttgcaagaggagacacaaacctcgcattgatggtctggttaaggtgggcacactgaaaaaacgacttgataaatttaatgaggtagtcagtgtgttgaaagatggaaaacccgagatgaataaacagatcaagaatctggaaatttctattgatactttgatggccaaaattaagtccactatgatgacgcaggaacaaatccagaaagaatatgatgcactggttaaaagctcagaggaactcctcagtgcattacagaaaaaaaaacagcaggaagaggaagcagaaaggctgaggcgtattcaagaagaaatggaaaaggaaagaaaaagacgtgaagaagacgaaaaacgtcgaagaaaggaagaggaggaaaggcggatgaaacttgagatggaagcaaagagaaaacaagaagaagaagagagaaagaaaagggaagatgatgaaaaacgcattcaagctgaagtggaggcacagctggcccgacagaaggaggaggaatcccaacagcaagcagttctggagcaggagcgcagggaccgggagctggccctgaggattgcccagagtgaagccgagctcatcagtgatgaggcccaggccgacctggcgctgcggagaggtcctgctgtactagccaccaaagcagctgctggtactaagaaatatgatcttagtaaatggaaatatgcagaactacgtgataccatcaatacttcttgtgatattgagctcctggcagcttgcagagaagaatttcataggagactaaaagtgtatcatgcttggaaatctaagaacaagaagagaaatactgaaacagagcaacgtgctccaaagtctgttactgattatgctcagcaaaacccagcagctcagattcctgccaggcagcgggagattgaaatgaaccgacagcaacgcttcttccgcatcccattcatccgccctgccgaccagtacaaagaccctcagagtaagaaaaaaggctggtggtatgcccattttgatggaccatggattgcccggcaaatggaactccatcctgacaagccacccatcctacttgtggctggtaaggacgacatggagatgtgtgagctgaatcttgaggagactggcctgactcggaagcgtggtgctgagatcttgccaagacagtttgaagaaatctgggaacgctgtggaggcatccagtaccttcagaatgcgattgagagcagacaggctcggcccacctatgcaacagccatgctgcagagtctgttaaagtagatgttgcacaccagccttacagctgggagcctttgccatggtacttaggtagggtgtgtgcccccagatttaaccattccataatcatgttagagttacttctataaagtgaacagattttattaatcacggcttttggtgaatttgtttaaggttaattatggtagcaaattttggacctaaacattatttttctgtatcccgctgtaattcccaaaactctcattattctctaactattacacatgggcatattctgatgtttctcatcctttgccagaagactaccttacatccatcgtaattgttctctaggaaaagagaacttttttcaaaattcaaaatactttttaaggatggcacagtaccatataactggagtaataaaacatgagcttacattcttacaataactaaaccacttaaaatgatcaaggcactaatgttttggtctgaaaagctgtgtactttatagacattttcagacatttttggaaatttccattaaaggtggaaaatctatttttttcctcctttgcagtgtcttagtttgaatgaaacacttcgaagttctagaattctagaaagagccttaatgtatttgatgtattctgtgataagaggtactaatagtatccagcacagatttgcttttctttgctagcacaatgtgtgttgctgtcagaatattctttttatattctgtggaaaattaaaggaaattcagattgtttaaatgcctaaaagttttgagataagttttgtttcaattagaaaaggaaataggttttaggtggcatagtggcttaactggactgaattcaaatattctttcaacttcatctcaatagtgatttttgtatcagaatcttgtccaagttgtttcattgatttagtaagtgttctgcttccaacatctttctttttaagaaattcctagtgtcttttttggcctttgaggttttggtaattgtagacctgtttcataagctttgtaattcagaaatccttgtatttagtaagtgcttgttttacataactgataattttaaaatgttttctttgtgtgctgttagtattgattcaatgtcagcagctttaagcctaatatttatgactttcacatttggaatttaaagacaaaaatacatcaaggagttatgctgacataattctaaggagttttgttgtattttagaataaaattataaagtaaaa

SEQ ID NO: 346575 - DNA, 5462 bp, Homo sapiens
tccatgctgaattccttatgggtgtcaatgagagactgcagggcctctgtgtcatcaggaagtgctccccgaaagcgaagcgtttgccggaattccgggatcgtggatcctccttcaaaaatggaggatggaaagcccgtttgggcgccacaccctacagatggatttcagatgggcaatattgtggatattggccccgacagcttaacaattgaacccttgaatcagaaaggcaagacatttttggctctcataaaccaagtgtttcctgcagaagaggacagtaaaaaagatgtggaagataactgttcactaatgtatttaaatgaagccacactgctccataatatcaaagttcgatatagtaaagacagaatttatacatatgtcgccaacattctgattgcagtgaatccatactttgacatacctaaaatatattcttcagaagcaataaagtcatatcaaggaaaatctcttgggacaagaccacctcatgtctttgcaattgctgataaagcttttcgagacatgaaggtgctcaagatgagtcagtctatcattgtatctggagaatcaggagccggcaaaacagaaaatacaaaatttgttctaagatacctgactgaatcctatggaacaggtcaagatattgatgacagaattgttgaagctaacccactcctagaagcctttggaaatgcgaagactgttcgcaacaataatagcagtcgatttgggaaatttgtagaaatacattttaatgaaaagagctcagttgttggaggatttgtttcacattatctcctagagaaatctaggatctgtgttcaaggcaaagaggaaagaaattatcatatcttttataggttgtgtgctggtgcttctgaagatattagagaaaaacttcatttgagttcaccagataattttcggtatttaaaccgaggctgcactagatactttgctaacaaagaaactgacaaacagattttacagaaccgcaaaagtcctgagtaccttaaggcaggttctatgaaagatcctctgctagatgaccatggtgattttattagaatgtgcacggctatgaaaaaaattggtttggatgatgaagaaaagcttgatctcttccgggtagtagctggcgtcctgcaccttggaaatattgattttgaggaagctggcagcacttcaggtggttgtaatctgaagaataaatctgctcagtctttggaatattgtgctgaattactgggtttggaccaagatgatcttcgagtaagtttgaccacaagagtcatgctaacaacagcagggggcaccaaaggaacagttataaaggtacctctgaaagtggagcaagcaaacaatgctcgtgatgccctggcaaagacagtgtatagccatctttttgatcatgtggtaaacagagtaaatcagtgttttccttttgaaacatcatcctattttattggagtcctagatattgctggttttgagtactttgagcataacagttttgaacaattttgcatcaactattgcaatgaaaaacttcaacaattttttaatgaaaggattctgaaggaggaacaagaactctatcaaaaagaaggtttaggtgttaatgaagtgcattatgtggataatcaggactgtatagatttaattgaagccaaattagtgggaatactggatattttggatgaagaaaatcgccttccccagccaagtgatcaacactttacatctgcagttcaccaaaagcacaaggatcattttcgactcactattcccagaaaatctaagctggcagttcataggaatatcagagacgacgaaggcttcattatcaggcattttgcgggggcagtgtgctatgaaacaacccagtttgtggagaaaaataatgatgctttacatatgtctcttgaatccttaatatgtgaatccagagataagtttatacgggaattatttgaatcatccacaaataacaacaaagatactaaacaaaaagcaggaaaacttagcttcatcagcgtgggaaacaagtttaagacacagttaaatttgcttctggataaacttcgaagtactggagcaagctttattcgttgcatcaaacctaacttaaagatgacaagccaccactttgaaggtgctcaaattctgtctcagcttcagtgttcagggatggtgtctgttttggacttgatgcagggtggttacccatcacgagcttcatttcatgaactctacaacatgtacaaaaagtatatgccagataaacttgcaagattggatccaagactattttgtaaggctttgtttaaagctttgggcttaaatgaaaatgactacaagtttgggttaaccaaagtattttttagacctggcaagtttgcagaatttgatcagatcatgaagtctgaccctgaccacttagcagagttggttaaaagagtcaatcactggctcacatgcagtcgctggaagaaagttcagtggtgctcactctcagtcatcaaattgaaaaacaaaataaaatatcgagctgaagcctgcattaaaatgcaaaaaactattcgaatgtggctttgcaagaggagacacaaacctcgcattgatggtctggttaaggtgggcacactgaaaaaacgacttgataaatttaatgaggtagtcagtgtgttgaaagatggaaaacccgagatgaataaacagatcaagaatctggaaatttctattgatactttgatggccaaaattaagtccactatgatgacgcaggaacaaatccagaaagaatatgatgcactggttaaaagctcagaggaactcctcagtgcattacagaaaaaaaaacagcaggaagaggaagcagaaaggctgaggcgtattcaagaagaaatggaaaaggaaagaaaaagacgtgaagaagacgaaaaacgtcgaagaaaggaagaggaggaaaggcggatgaaacttgagatggaagcaaagagaaaacaagaagaagaagagagaaagaaaagggaagatgatgaaaaacgcattcaagctgaagtggaggcacagctggcccgacagaaggaggaggaatcccaacagcaagcagttctggagcaggagcgcagggaccgggagctggccctgaggattgcccagagtgaagccgagctcatcagtgatgaggcccaggccgacctggcgctgcggagaggtcctgctgtactagccaccaaagcagctgctggtactaagaaatatgatcttagtaaatggaaatatgcagaactacgtgataccatcaatacttcttgtgatattgagctcctggcagcttgcagagaagaatttcataggagactaaaagtgtatcatgcttggaaatctaagaacaagaagagaaatactgaaacagagcaacgtgctccaaagtctgttactgattatgattttgcaccatttttgaacaattcacctcagcaaaacccagcagctcagattcctgccaggcagcgggagattgaaatgaaccgacagcaacgcttcttccgcatcccattcatccgccctgccgaccagtacaaagaccctcagagtaagaaaaaaggctggtggtatgcccattttgatggaccatggattgcccggcaaatggaactccatcctgacaagccacccatcctacttgtggctggtaaggacgacatggagatgtgtgagctgaatcttgaggagactggcctgactcggaagcgtggtgctgagatcttgccaagacagtttgaagaaatctgggaacgctgtggaggcatccagtaccttcagaatgcgattgagagcagacaggctcggcccacctatgcaacagccatgctgcagagtctgttaaagtagatgttgcacaccagccttacagctgggagcctttgccatggtacttaggtagggtgtgtgcccccagatttaaccattccataatcatgttagagttacttctataaagtgaacagattttattaatcacggcttttggtgaatttgtttaaggttaattatggtagcaaattttggacctaaacattatttttctgtatcccgctgtaattcccaaaactctcattattctctaactattacacatgggcatattctgatgtttctcatcctttgccagaagactaccttacatccatcgtaattgttctctaggaaaagagaacttttttcaaaattcaaaatactttttaaggatggcacagtaccatataactggagtaataaaacatgagcttacattcttacaataactaaaccacttaaaatgatcaaggcactaatgttttggtctgaaaagctgtgtactttatagacattttcagacatttttggaaatttccattaaaggtggaaaatctatttttttcctcctttgcagtgtcttagtttgaatgaaacacttcgaagttctagaattctagaaagagccttaatgtatttgatgtattctgtgataagaggtactaatagtatccagcacagatttgcttttctttgctagcacaatgtgtgttgctgtcagaatattctttttatattctgtggaaaattaaaggaaattcagattgtttaaatgcctaaaagttttgagataagttttgtttcaattagaaaaggaaataggttttaggtggcatagtggcttaactggactgaattcaaatattctttcaacttcatctcaatagtgatttttgtatcagaatcttgtccaagttgtttcattgatttagtaagtgttctgcttccaacatctttctttttaagaaattcctagtgtcttttttggcctttgaggttttggtaattgtagacctgtttcataagctttgtaattcagaaatccttgtatttagtaagtgcttgttttacataactgataattttaaaatgttttctttgtgtgctgttagtattgattcaatgtcagcagctttaagcctaatatttatgactttcacatttggaatttaaagacaaaaatacatcaaggagttatgctgacataattctaaggagttttgttgtattttagaataaaattataaagtaaaacacgacacaacaccccacaacagcaaaaaaaaactcttttggggcgccttgggccccggaaaagttttaaaacccacctgcgtgtagggccccggcggggccccatatagtgaagtgagaagacgacggggggcaaaagagcggggggtccccaaggagaaaacccgggggccgagagaacaaagcggcggagggattcctcccccaatataaaaaacgcgccgcgggggaacccagagggcggctctgaggaaaactccgagagaggggctgtggaaggacaaaaacagggggactcatacacagcggggccacggagcggagaataatgaggg

SEQ ID NO: 346576 - DNA, 329 bp, Homo sapiens
acacaagtcaatcattatttcactaagttacttctactcagctatctacttttaaatgttactttggataaaatcaggcttagtctatagatcaactggcttatatggatctttccaatgggtttggcttgataatatatagagttgtctattaacttatactatttttcaggtcaaaaaataaattctgagatgcctataagagaatgaaaattggcacaggttggctttgaagacaaaaagaagaatcttctagagctcttgactggtaacaatcagcttattaacctaaaccttttcctaatattcctcttaaaagtgtgagtttc

SEQ ID NO: 346577 - DNA, 447 bp, Homo sapiens
cctaccccagaggcaatcactgttctcattttttccaccatgtactggtttcacttgttctgcaacttcatatagttactcactatgtatccttttgtccctggctattgtgagtaaagctactaggaacattcttgttcaggtcttttcgtaaataaatttatttctctggggtaaatacctggaagaagaggtgctaagttgtatgtttaactttctaaggagccatcatactgttttctaaagtgtgccattttatatccctcttagcagtgtatgaacattttatttagtttgtatccttaccaatagttgatagtcatcttttaaattttagtcattctggtttgtgtgtggtggtatctcattgtaattttaatttgcatttccttgatgactaatagtattgtgttcttttttatgtgctcattggccatttgtgtatct

SEQ ID NO: 346578 - DNA, 473 bp, Homo sapiens
tatctcacacctgtaatcccagcactttgggaggccaaggcaggcggatgacttgaggtcaggagttcacgactagcctagccaatatggcaaaactctgtctctactgaaaatacaaaaattagccaggcatggtggcacaggcctatagtcccagctactcgggaggctgaggtggaagaatcgcttgtacctaggaagcagagggtgcagtgagccaagattgcaccactgcactccagcctggatgacagagtgagattctgtctcaataaataaataaattgtattgaatgtttactaaatttaagaaatatacaaggtgctatggtttggatatttgcctccccaaacctcatgttgaaaattgatcccaatgttggaggtggagcctaacgggaggtgattgggtcacggaggtggatccgtcatgaaaagatcaatgccctaccttgggagggggatgattgcat

SEQ ID NO: 346579 - DNA, 781 bp, Homo sapiens
tatcagaatgcctatttcatttgttaaagcaaactgaagttagccaacgaggaactctgggagggccccatttccaaaactctggttagtcatgagtaatttttgtcaggctactttgactgccaccaccacctttaaaaacatatttctgttgtttgttagttccgttgagtatatttacgtagcaatcattgttttagcaaatacatacatgttttgaatttctgttgtttaaatgtaaaatgtgatagatgttaattaaaactttcagctaatgcaatttgagataacaaagcatagtattggcttcacctactttttcttggattttaaatcctggaaaatgtcttttttgttttgttttcagttcccaaacatttctcaaattagacatagtctgaaggaagaatacattccttccacaactattgaaaaaataatactgttaaaattgagttgtgccttcagcatctcacaggattacagtatttaaaatccagaggaagctttaaagattgccttttaaactcatgtaaacttgactaggtgttctttaaggagactatgtaaaaatcagtctgtatccacaaagtgctcaccaacttaatacagacatgtacgcacaaaactgagaggaaggtacatactggagtaattttgcactcagttatttataggttgtaattctcaaaaaccagctgatcagagagggaagagacttaaaaaaatggaaaattagccactaaatagaataatcaagatgagcaatgggcaagacctg

SEQ ID NO: 346580 - DNA, 1801 bp, Homo sapiens
ttcaaatagttgtagcaagaatgaaatagacattgatgcttttaggcattatagcttttctgatcaacctaagtgttcacagtacatatctgggctcatgagtgtacatggactcctcggatgcggccgtcctgcagcagaagcctcgagagcctccgggtgggtgccaagccgcctcccttccagcggtggccgagcgacagctggatcaggtgcggcgcgcaccgggactgggacgagcccccgccacgtggaggcaggatggacggctggagtggggaccgcgcccgggcggctgcacccaccggcctccagcctccaggctgcaaggaccacggctgctcctcgggaagccctttcagggatccagcggggtcctctgtgatacgcagtggcaaaggagaccgcccggaaggcccctccttcctcaggccgccggcagtgacagtcaagaagctgcagaagtggatgtacaaagggcgtctgctgtccctgggaatgaagggtcgtgcccgtgggacggctcccaaagtcacaggaacgcaggcagcctccccaaatgtgggcgctttgaaagtgcgtgaaaaccgtgtcctgtcggtgcctccagaccaaagaattacgctgacagatttatttgaaaatgcctatgggtcttcaatgaagggaagagaacttgaagagctgaaggataatattgaattcagaggtcataagccacttaacagcatcactgtttcaaagaaacgcaattggctatatcagagtactctgaggcctcttaatctggaagaagaaaataagaaatgccaagatagaagtcatttatccatctcacctgtgtctctacctaaacatcagctatcacagtctttcctcaaatcatctaaagagtactgtacatatgtggtatgtaacgctacaaactcttcattatcgaaaaactgtgctttagattttaatgaggaaaatgatgcagatgatgaaggagaaatatggtacaatcccattcctgaggatgatgaccttggtatatcaagtgccttgagttttggtgaggccgactctgctgttctgaagctccctgctgtcaatttgagcatgttgtctggcagtgacctgatgaaagcagagcggcatactgaagactcactgtgctcttccgaacatgcaggtgatattcagaccacacggtcaaatggaatgaatcctatacatcctgcccattccacagaatttgtgcagcagtacaagcaaaagctaggacacaagacacaagaaggtataatggtggaggacagtcccatgttgaaatctccttttgcaggttctgggatcctggctgctacaaatagtactgaattgggaattatggaaccatcttctccaaatcctagccctgtgaaaaaaggcagttcaattaattggtcattgccagataaaataaaatctccacgaactgtgaggaaactttccatgaaaatgaaaaagttgccagaatttagccgaaagctaagcgttaagggaacattgaattatataaacagtccagataatactccttctttgtctaaatataactgccgagaaattcatcatactgatattctgccctctgggaacacaaccaccgctgctaagaggaatgttataagccgataccatcttgataccagtgtatcctcccagcagagctaccagaagaaaaactctatgagttctaagtattcctgcaaaggtggttaccttagtgatggagactcacctgaacttacaactaaagctagcaaacatggatctg

SEQ ID NO: 346581 - DNA, 747 bp, Homo sapiens
tagcttttgatgtgaggttattagatctttctctataaggaataaagtatgaaaaattaaattaaattttaaataattgggataatgcagtattctgcttgaatatcatgatggaagttgacctgaacttctaatgaaatctccccattgagatgaaataagagaagaatttctgcctatgtgaaagcctgtttagttgatggtttataaaataagaataaaagaaatcaaaacatattgctttataacgtatttttctttctttcttttaaggttctgggatcctggctgctacaaatagtactgaattgggaattatggaaccatcttctccaaatcctagccctgtgaaaaaaggcagttcaattaattggtcattgccagataaaataaaatctccacgaactgtgaggaaactttccatgaaaatgaaaaagttgccagaatttagccgaaagctaagcgttaagggaacattgaattatataaacagtccagataatactccttctttgtctaaatataactgccgagaaattcatcatactgatattctgccctctgggaacacaaccaccgctgctaagaggaatgttataagccgataccatcttgataccagtgtatcctcccagcagagctaccagaagaaaaactctatgagttctaagtattcctgcaaaggtggttaccttagtgatggagactcacctgaacttacaactaaagctagcaaacatggatctg

SEQ ID NO: 346582 - DNA, 1844 bp, Homo sapiens
gcaggctgcggacccagttgcgagaggcctattatctgctgatccaggccatgcacgacctgccccctgactcgggcgcgcggcggggcggcaggggcttggcggatcacagcttccccgcgggagcccgggctccgggccagccgccttcccgcggcgccgcgtaccgccgagcctgcccccgggacggggagcggggaggcggcggacgccctcggcagcaggtgtccccgccccggtcgcctcagagggagccgcggggaggccagctgcggactcctcggatgcggccgtcctgcagcagaagcctcgagagcctccgggtgggtgccaagccgcctcccttccagcggtggccgagcgacagctggatcaggtgcggcgcgcaccgggactgggacgagcccccgccacgtggaggcaggatggacggctggagtggggaccgcgcccgggcggctgcacccaccggcctccagcctccaggctgcaaggaccacggctgctcctcgggaagccctttcagggatccagcggggtcctctgtgatacgcagtggcaaaggagaccgcccggaaggcccctccttcctcaggccgccggcagtgacagtcaagaagctgcagaagtggatgtacaaagggcgtctgctgtccctgggaatgaagggtcgtgcccgtgggacggctcccaaagtcacaggaacgcaggcagcctccccaaatgtgggcgctttgaaagtgcgtgaaaaccgtgtcctgtcggtgcctccagaccaaagaattacgctgacaggtaggatactttgcgatgaaaatgctagcaccgcgagccttactgtttaccgactgggcttctgtcttaagagccaagaaaaagttatgtttttgcgacagacaatggcatgaagaattgaggttgtgatttcttctcgaaaaaccagtgtgtctattccctaagtattacctaaaggagtaaagatttatttgaaaatgcctatgggtcttcaatgaagggaagagaacttgaagagctgaaggataatattgaattcagaggtcataagccacttaacagcatcactgtttcaaagaaacgcaattggctatatcagagtactctgaggcctcttaatctggaagaagaaaataagaaatgccaagatagaagtcatttatccatctcacctgtgtctctacctaaacatcagctatcacagtctttcctcaaatcatctaaagagtactgtacatatgtggtatgtaacgctacaaactcttcattatcgaaaaactgtgctttagattttaatgaggaaaatgatgcagatgatgaaggagaaatatggtacaatcccattcctgaggatgatgaccttggtatatcaagtgccttgagttttggtgaggccgactctgctgttctgaagctccctgctgtcaatttgagcatgttgtctggcagtgacctgatgaaagcagagcggcatactgaagactcactgtgctcttccgaacatgcaggtgatattcagaccacacggtcaaatggaatgaatcctatacatcctgcccattccacagaatttgtgcagcagtacaagcaaaagctaggacacaagacacaagaaggtataatggtggaggacagtcccatgttgaaatctccttttgcaggtaaaaatgatcatatatgtgtctttctttcttcttccatttttgaattatttgataatagctaaaactaaatataaaagatgtttgttatattcatgtactttttcttgtgaagtgaatatattttcatgaaaataaaactcaaaaagttttataaacattttaacg

SEQ ID NO: 346583 - DNA, 1760 bp, Homo sapiens
gcaggctgcggacccagttgcgagaggcctattatctgctgatccaggccatgcacgacctgccccctgactcgggcgcgcggcggggcggcaggggcttggcggatcacagcttccccgcgggagcccgggctccgggccagccgccttcccgcggcgccgcgtaccgccgagcctgcccccgggacggggagcggggaggcggcggacgccctcggcagcaggtgtccccgccccggtcgcctcagagggagccgcggggaggccagctgcggactcctcggatgcggccgtcctgcagcagaagcctcgagagcctccgggtgggtgccaagccgcctcccttccagcggtggccgagcgacagctggatcaggtgcggcgcgcaccgggactgggacgagcccccgccacgtggaggcaggatggacggctggagtggggaccgcgcccgggcggctgcacccaccggcctccagcctccaggctgcaaggaccacggctgctcctcgggaagccctttcagggatccagcggggtcctctgtgatacgcagtggcaaaggagaccgcccggaaggcccctccttcctcaggccgccggcagtgacagtcaagaagctgcagaagtggatgtacaaagggcgtctgctgtccctgggaatgaagggtcgtgcccgtgggacggctcccaaagtcacaggaacgcaggcagcctccccaaatgtgggcgctttgaaagtgcgtgaaaaccgtgtcctgtcggtgcctccagaccaaagaattacgctgacaggtaggatactttgcgatgaaaatgctagcaccgcgagccttactgtttaccgactgggcttctgtcttaagagccaagaaaaagttatgtttttgcgacagatttatttgaaaatgcctatgggtcttcaatgaagggaagagaacttgaagagctgaaggataatattgaattcagaggtcataagccacttaacagcatcactgtttcaaagaaacgcaattggctatatcagagtactctgaggcctcttaatctggaagaagaaaataagaaatgccaagatagaagtcatttatccatctcacctgtgtctctacctaaacatcagctatcacagtctttcctcaaatcatctaaagagtactgtacatatgtggtatgtaacgctacaaactcttcattatcgaaaaactgtgctttagattttaatgaggaaaatgatgcagatgatgaaggagaaatatggtacaatcccattcctgaggatgatgaccttggtatatcaagtgccttgagttttggtgaggccgactctgctgttctgaagctccctgctgtcaatttgagcatgttgtctggcagtgacctgatgaaagcagagcggcatactgaagactcactgtgctcttccgaacatgcaggtgatattcagaccacacggtcaaatggaatgaatcctatacatcctgcccattccacagaatttgtgcagcagtacaagcaaaagctaggacacaagacacaagaaggtataatggtggaggacagtcccatgttgaaatctccttttgcaggtaaaaatgatcatatatgtgtctttctttcttcttccatttttgaattatttgataatagctaaaactaaatataaaagatgtttgttatattcatgtactttttcttgtgaagtgaatatattttcatgaaaataaaactcaaaaagttttataaacattttaacg

SEQ ID NO: 346584 - DNA, 2066 bp, Homo sapiens
  misc_feature (2029)..(2029): n is a, c, g, or t
ctcactgggggtaaaaggggttctatttgcttaaactcatgctcgtaggcaattttagggctctctggggctctgaatggtttctccaccaccacctttcttccaccaatagaaagatgttgtccttacaaggccatgtctgagaagaccatggtttaactagtaaaagaagctcacattgcagagagctgaataataccaggctcttgactttgtactgtgtgtcacagtcatgattgggacagaaggaaccagtctgctgaaaagtcaagccagcacaaatatttggaaactaattccactgaaactcttgtatcattaaatcatactattgtagtttcagttaatgtaattatttaatatcaggcactaaattaaatagctttgcacaaaattttagaaaagatcaatcttgtaacaaaatttaatattaacagtaaaaagcacctgagaaaagaaaatatcgatctgttgtggtttatatacttgagttattcttagaactttgtggagattgacacatgctctgataaaaaggaagaaaatgttttgaattcaagaatgctagactaatagaaatagcccagtctctctgggccactgctcttcagtatggggtgctctctgtccctccttagcagatggggttgtttggaggctaaaatgagctaagggaagaagctatactgtgcctccaatatcccttatgtgtaattagagtgccgatctgggctgcaggctttattcaatgattcctttcccttacttgaggctttctctgtagagctgttatttctgagcctccattctgggatttacaaaggaaacagaatgatgaagaagtaacaatcagcattttacacacacgcacacacacacacacacacacactttttctaatatatgaggctagtctgcagagtccacagcccaggtgtccatttatttccacttcttcacctcccaaagatttagagctccatgatctaccaaggtgaagactgccaatcccaggttggagaagacccgtcagagtgtggaggtgccaaactgagaggcacaggaagcagacagccacatcaaacttttttgatgaactactgcaaattggtgtttgttctaggaaagaaagaggaagaaaaattacacaatgtgaattgaacataagagcagtgctctttacagagtatgagaagggaggatgggggagaatctgattaaaaaaatgattcattccttcacagacactaacaaacatggctaaaaagcacatgtcagaacacagaagcctaggtagatggttgacatttttataacttccttaagtgagtagttaaaccagcagtcttaattctgttggtcttccaagagtgtttaattacataagtattacctgtattcatttcccacaactgttgggtttttctttctttttttttttttttttttttttcctctgtgcatcctagaaaaactcccaggactagacttaggaggaggcaatcaagttatgtggtaaaacaagagtgccttttctgttggatatccactttagtttcctggcttccagggcataagatgtttagaaactttttttctctaaacataagaattattgtgtaccacaattttgaaccaccgatttccatatcttcagcagctatcaacttgccaattccctttgggtctcctttgtatattcttatgtttccttctgtttccagttgtcctcaaaaagagttgaggggggcatgactcttataaaatggataaaaatgaaactgtacagatgtttgcctcccttgtatctgtgagcatgatctctatcaggctggaaaatctgctttatcattttgtatatttgactattttgtattcagcattacttgactccttatgtgcatggcaatgtattaaaatgtgggatttctaaaaaaaaaaaaacactttctctatcttatcctcaccctttttaaatataaaaaaattaactggccgccgttttacaacggtcggacttgtgcctggnggtacccaaattacgccttgggcttccccttttgccg

SEQ ID NO: 346585 - DNA, 1947 bp, Homo sapiens
ctcactgggggtaaaaggggttctatttgcttaaactcatgctcgtaggcaattttagggctctctggggctctgaatggtttctccaccaccacctttcttccaccaatagaaagatgttgtccttacaaggccatgtctgagaagaccatggtttaactagtaaaagaagctcacattgcagagagctgaataataccaggctcttgactttgtactgtgtgtcacagtcatgattgggacagaaggaaccagtctgctgaaaagtcaagccagcacaaatatttggaaactaattccactgaaactcttgtatcattaaatcatactattgtagtttcagttaatgtaattatttaatatcaggcactaaattaaatagctttgcacaaaattttagaaaagatcaatcttgtaacaaaatttaatattaacagtaaaaagcacctgagaaaagaaaatatcgatctgttgtggtttatatacttgagttattcttagaactttgtggagattgacacatgctctgataaaaaggaagaaaatgttttgaattcaagaatgctagactaatagaaatagcccagtctctctgggccactgctcttcagtatggggtgctctctgtccctccttagcagatggggttgtttggaggctaaaatgagctaagggaagaagctatactgtgcctccaatatcccttatgtgtaattagagtgccgatctgggctgcaggctttattcaatgattcctttcccttacttgaggctttctctgtagagctgttatttctgagcctccattctgggatttacaaaggaaacagaatgatgaagaagtaacaatcagcattttacacacacgcacacacacacacacacacacactttttctaatatatgaggctagtctgcagagtccacagcccaggtgtccatttatttccacttcttcacctcccaaagatttagagctccatgatctaccaaggtgaagactgccaatcccaggttggagaagacccgtcagagtgtggaggtgccaaactgagaggcacaggaagcagacagccacatcaaacttttttgatgaactactgcaaattggtgtttgttctaggaaagaaagaggaagaaaaattacacaatgtgaattgaacataagagcagtgctctttacagagtatgagaagggaggatgggggagaatctgattaaaaaaatgattcattccttcacagacactaacaaacatggctaaaaagcacatgtcagaacacagaagcctaggtagatggttgacatttttataacttccttaagtgagtagttaaaccagcagtcttaattctgttggtcttccaagagtgtttaattacataagtattacctgtattcatttcccacaactgttgggtttttctttctttttttttttttttttttttttcctctgtgcatcctagaaaaactcccaggactagacttaggaggaggcaatcaagttatgtggtaaaacaagagtgccttttctgttggatatccactttagtttcctggcttccagggcataagatgtttagaaactttttttctctaaacataagaattattgtgtaccacaattttgaaccaccgatttccatatcttcagcagctatcaacttgccaattccctttgggtctcctttgtatattcttatgtttccttctgtttccagttgtcctcaaaaagagttgaggggggcatgactcttataaaatggataaaaatgaaactgtacagatgtttgcctcccttgtatctgtgagcatgatctctatcaggctggaaaatctgctttatcattttgtatatttgactattttggaatagccatcacttggcgccccagtgcccgggcagtgttaaaattggggttttttaccgggaaaaaaaaaaaa

SEQ ID NO: 346586 - DNA, 347 bp, Homo sapiens
gattagatactccagtgatttgaagtgttttactataagagatcaaataactcttttactataagagatcaaacgactaataagattaaatgaagaatgattgtgtgttcaggatctacagagctgaaaatggctgaattaccatactcagaaatatccatctcttctaacttccagaaaaaaactcaacaaaacagggtaatttgtaaccgggtgcggtggcttgtgcctgtaatcccagcactttgggagatcaaggtgggaggattgtttgaggccagagagtttgagatgagcctgggcaatatgatgaaacccccagtctttaaaaaaaaaaaaaaaaaacc

SEQ ID NO: 346587 - DNA, 522 bp, Homo sapiens
cagatgagagcagtgtggctcagcctacagtgagactgagagtctggagcccatctcctcgcctccattcatcgcccctgccagctccccctgctccctccagcccacatcccaactccgagaagctcagggtcctaccaagaacgatctgaaaagcactggcgtttgtgttaattaataatataaaaatctaggattagatactccagtgatttgaagtgttttactataagagatcaaataactcttttactataagagatcaaacgactaataagattaaatgaagaatgattgtgtgttcaggatctacagagctgaaaatggctgaattaccatactcagaaatatccatctcttctaacttccagaaaaaaactcaacaaaacagggtaatttgtaaccgggtgcggtggcttgtgcctgtaatcccagcactttgggagatcaaggtgggaggattgtttgaggccagagagtttgagatgagcctgggcaatatgatgaaacccccagtcttta

SEQ ID NO: 346588 - DNA, 185 bp, Homo sapiens
cagtaaaggctagttctcttccttctccctttgggaggttgcactctttggcctcaattttcctttaactctccatccattcttacacaagactatttttctttcttccactgtctgttggtaaaagttccctatggatcagtctttggccctcagccctttatttagatttttttttttttttt

SEQ ID NO: 346589 - DNA, 371 bp, Homo sapiens
ccttgtagcttgttttcttcacttactaatacatcatggaagttcctcccatctcagtaggtgtaattcatttccttcaacagctatatgatactccatgatatagatgttccacagttcagttagctctcccttattgacagattttacagttttttaaccacttttctacaaataatgtaataatcatccttgattttctatgttttacaagttagtacttgaatattttttacatgttagaactttaatatctctaaagtatttcttagaagtaaaattgctgagacaaaggatatagagtttttatttttatttatttatttatttatttatttatttatttattcatttatttttgagatggagtc

SEQ ID NO: 346590 - DNA, 703 bp, Homo sapiens
ggttttgatttgcatttctctgatgattagtgatgttgacattttttcatataccttttcacatttgtatgtcttcttttgagaaatgtctattcatggcctttgcccaccttttaattttatttatttatttctgttgctgttgtttgagttctttgtatactctattcctattatattggtcccttgttggatgaaaagttgcaaatatttttccgatcccataggttgtctctttactctgtaggttatttattttattgtgcagaagctttttagtttaacagagtctcacttgtctgtttttgtttttgttggctgtgcttttgaggtcttagtcataaattctttttagaccaatatccaggagagttttccataggttttcttctagaatttttgtagtttggggcctcatgtttaagtccaatccattttgagttgatttttgtatatggtgagagatatgggtccagtttcattcttctgcatgtggctattcaattttcccagcaccatttattgcagagggtgtcctttccccagtgtaagttcttgtcagctttgtcaaagattagttggctttaaatctggggctttatttctggattatctattctgttccattggtctgtgtgtgtatttttacaccagtatcatggtgttttgcttactattgctttgtagcataatttgaagtcag

SEQ ID NO: 346591 - DNA, 438 bp, Homo sapiens
tctccaagtgtctccccaagttagctcaagggcttgggagaaacaaagtgctgtccctcagcctgggctgctcagatcctcagtggaaaggatctacagtgactacaataaccaagtgctacaaaaacgctgtgacgaggaatctgaacaacagagatttgagggaaacaaaacactttcgacgaaggtcctgctgcttgtcttcagcttggtaccaattagagcttcactggaggtgaaaagggcagacacggttgctgagtggctggttggagagtccctgagagattacccaagaaactcagttgcggcacgtggtggagcagcctctcagaaaatggagttctaagtatagtaacaatttagttacatagttacttccatttccagagatgtgatcctttgctgtgtaagttatgttttctaataaaaatgata

SEQ ID NO: 346592 - DNA, 486 bp, Homo sapiens
tctccaagtgtctccccaagttagctcaagggcttgggagaaacaaagtgctgtccctcagcctgggctgctcagatcctcagtggaaaggatctacagtgactacaataaccaagtgctacaaaaacgctgtgacgaggaatctgaacaacagagatttgagggaaacaaaacactttcgacgaaggtcctgctgcttgtcttcagcttggtaccaattagagcttcactggaggtgaaaagggcagacacggttgctgagtggctggttggagagtccctgagagattacccaagaaactcagttgcggcacgtggtggagcagcctctcaggagatttttagggatgcaagatgaaaggagctaaacataactataggaaatggaggctgttatcagcatctagcttaggatggcgagccaagcatggctctcaggtgcaactcacatggagacgtggctctcaggtaaaagatacaactcag

SEQ ID NO: 346593 - DNA, 451 bp, Homo sapiens
tgtgtgtatcaactgagacaacccaacaattccatcagcatccctgcagtcagatatctgctaagctctgatatcatctgtcattactgagaacagagctctgtccttcacttagggtgagacaggacaagggaggagaggcaggccagtccacccagatccaaggatatgcaagaatggaagggtcaagagccacggatatgtatgcagtggaaatgtagggtgtgttgtacaagtatgatctgcaaagtattgttaaagccgtctaaggtgctctccaatcattcattcactattgatcacttagcaactgcctgcctagactagatgctaaagaaagagaaaagtaaacctaccccgtgccctcaacaaacacagtctagcaaaggagataccataccaattggagatttggagagactgttaaaatatagattgctgggtcccatcc

SEQ ID NO: 346594 - DNA, 402 bp, Homo sapiens
tctcctctagggtaagaaagacaccctaccacagtctctgccacaggggaagggcagaagggtttcccttggctggaggagatacccgcatttctagggaggttcttagggaggcacagcctcatctcccatcaccttctgtccctttgcccccgttcctactcccacatcctcctgtcctgggatttcccctactacaaagccttttgcacatgttgtttattcttttgatcagcaaatagttacaaataggcagtgtagaccaccacaggtggtccggcacacctactaagtgccgggcatgcgcaattcagcagtgactaagacaggcccggcctctgccctcatagggcttccagaccagggcagggatatagatgaacaacagacagtcaagaaggg

SEQ ID NO: 346595 - DNA, 470 bp, Homo sapiens
ggtctctaataatattaaggtcctgtgcaggaaaaaacaagatgtacttagggagcacagctgctgttttcatgttcaactggtttcatgatggttctgatcctaggttgagaaaggacttagagaatcaactggctactaggatactatttaaaaaaaaggatcttgattggggatcatgactgagggtacaagaataacgggttcaggtaggagattcatgttgttaatgctgctgacctgatccagaaggtttaagttgaattttgaggtggtgtataaaatgcccccataaaaccataaaagcataacacatatgacatcaaaagaaagaaaaatagttggctgtatagccgttaattctcaagagaaatatagcaaagtagaccaggaacaatatttatggctccagaaaagtctttacactgatgtgtatggaatggttgttttaaaaagtgatcgtgaattta

SEQ ID NO: 346596 - DNA, 838 bp, Homo sapiens
aggagggggcagggacgggacgtgggaaaatgactacgcgtcactcgtgatgtcgcgcatccgataggcccttttcagatggcaaaaggcctgagggtgaatctgggcgagctggttgagtccatgcgtttgtgcttcctctcagtccactttcgcttacgatggggcgactcttgtccatcgtcacctcaccgggaaacttttcctgccgggccagttaatggtcccctgtaccatccccatcctgagtgactactaagcagccgcagcgactcggggttgctccgtgaccacgttactcagttaaccttcttgttccctggagaggcggagctgaatggcccggacggggtttctccatgtttcccaggctggtctcaaactcctggactcaagcaatctgcccaccttgcctcccaaaatgctcctccaaaaaaggagtgtgccgccacacccagcctgagcaacttttgtttttaaggtgaaggacatgtttgcttccctttccaccatgattgcaagtttcctgaggcctccctagccatgctgaactgtgagtcaattaaacctctttcttttatgaattatccagtcttgggtatgtctttattagcagtgtgagaatggactaatacagaggtgtgctgtattaataatgctactcatttgtttcctaatttgctttaatagagaagagcagtttccttggcctggaattgtacaaaagccatggcttatcttttcatggcttatcctattgaaagtgacctctattgagatactattaatagttatagctacaaataaattagtttaatactttgcctgcaaccatttt

SEQ ID NO: 346597 - DNA, 787 bp, Homo sapiens
aggagggggcagggacgggacgtgggaaaatgactacgcgtcactcgtgatgtcgcgcatccgataggcccttttcagatggcaaaaggcctgagggtgaatctgggcgagctggttgagtccatgcgtttgtgcttcctctcagtccactttcgcttacgatggggcgactcttgtccatcgtcacctcaccgggaaacttttcctgccgggccagttaatggtcccctgtaccatccccatcctgagtgactactaagcagccgcagcgactcggggttgctccgtgaccacgttactcagttaaccttcttgttccctggagaggcggagctgaatggcccggacggggtttctccatgtttcccaggctggtctcaaactcctggactcaagcaatctgcccaccttgcctcccaaaatgctcctccaaaaaaggagtgtgccgccacacccagcctgagcaacttttgtttttaaggtgtcagccatcagaccccaagtctccagctgtgttgagttatctgcaggccctgattgtgtgtgccaaggtgcaaagaaataaattctgtcaacaatcaagtgactttggaagaggttcctgagcctcagatgagaccccagcctggccaacactttgaagccttgtgagaatgaccatccaactaagccttgccctgactcctgacccacggaaactgtgcgataataaatgtatattgttttaagctatgacgtttgggataatttcttacatcatagacaactattgcagccatttgttatt

SEQ ID NO: 346598 - DNA, 307 bp, Homo sapiens
acggggtttcaccatgttgccaaggctggtctcaacctcctgacctcatgatccgcccacctcagcctcccaaagtgctgggattacaggcgtgagccactgtgcccatcctgctaatttttgtatttttagtagagatgggggtggtttcaccatcttggccaggttggtctcgaactcctgacctcaggtgacccacccacctcggcctctcaaagtgctgggattacaggcatgagccaccacacccagccacagtttccatatcctgtgttcctcttcctggaagattcttcttagtggtctc

SEQ ID NO: 346599 - DNA, 130 bp, Homo sapiens
gtacatagaagagagagcaaaagaatataaagataaaataaattaagataataatagaaatgaaaaatatagaaagctgggcacacacatatctagacatgataaatacataggagagagagcaaaagaa

SEQ ID NO: 346600 - DNA, 332 bp, Homo sapiens
caaaatacatgtgataaaacatacacattagtcactctgcttagcacccaatgtcaaactggcaaggcttaaatttaccctcacatgggccctgtcatctttaatctccgactaggagtttcaacatgtggtctctaggcaagatggtcaccctgagtaacagagaagataagaaaagggaaaggagagaaggaaagtattgcctgtggcagggtggggaaggtgaatggtatagggaagccagagaaaagacccactcattgcagcaacactgaaaagttcaggtggctgcttctcggtagcaaagggatctttttcagcagtctcgttag

SEQ ID NO: 346601 - DNA, 2071 bp, Homo sapiens
ctcctgggtcacattctgctgttgttgggaaacagggagtgagtgaagggaacctgggaacccttctcccctcaccttttaaggatgttctggggtggaataaagagaggtggagggtggggtgcctgggcccagcctccctggctcctggtccttctttcttcagcagggagttctggcaaggcctgggcctggggagggggcctgggtgcagttttctcctgcggtgtggttggctcttttgtcttccaggatgggcctgtggggtctgtgtggggaaggaaggagctgggagcctgggctgcctgtgtgtcggctggatgctgccagcaccggcatggaccaagcaacttctctgagccagatgctggggacgcagaggtgaacccagagacatgatcccatctgctcagatcttcatgtcagaacacgctttattacagtctcggcaagggggtggctccatctgggccgcatctccaggactcctggcctggacttctctttggacctcgggtgaccttggattctggccacagtgacttagcggtcagactccggtggttttctagcccgctgggtgactccctgaagatctcatcctcttcacacctgttgggatggagcctcccatggataggaactcttcctggttgatgctcagcagatgactgatctggctctggaggacagctccaggggtatgagggaggcctggcagcccactactccctcctcacctgctcgggccctgcctgctgggccctattgtctgggtctgggggccctttcctgccccatgtgaacttgattcctcctcgcgtttctgtcggtgaccagacagagcctggcctgggccaagtccccactgaccacactttccccaaggctgggtctcaaaggaccctacaggatggggacaggaacaaggatgggagtcggggaggggctgtcaggcagagggcagatgcagctcctcgggtgccgctggctggagtcctttgtctccatttgctcagtgcgtaattgtcattttgtgggggacttccttggtggggcttttccatgcttttcctctccctgatggttacaaagaggagacagtcaggatctgggaggagctggagccttccccctgtgctgttgaactctgggaggggcagccagaggggctgagagtgcaccatcctgaaaagagagggtctttaagagataagatttaggctagggaaattcactagaaagagacaggtggccctgggttttttttcctgccatccaaagggaaccagtcttacccaaaggcttaaggggtcaccttagcccagtctcaggacactcttctccaatcagatcgctgcttctagttgcactgctcctggattctgttcttggggaacagaaggtggcaggacaggccccacaatctgcaattccagctccctccagaggggacagtcccagcgtttgcaagagagcagcttgtggcctcccttaggcaagtttaaaagccagatgtcctttttcccagaatgcggagtggtgtgtactattcatcagcttgggctgccacagcaccatgccagactggatggcttaaacatcaggaatttattttctgccagttctggaggctggaaagtccagatcaaggtgttaagacttggtttctggtgaggcctctctccttggcttgcaggtggcaccttctcactatgtcctcacatggccttttctctgtggagagggacagagagcatgagcaggctctggtgtctcctcctcttcttataaagacactaatatcaccatattagggcttaaacctatgacctcatttaaccttaaccccttaaaggtcccatctccaaaaacagtcacatagcaggctactgcttcaacatatgcatttgggggaggggacaccattcagttcttaacagggtggtcaccgcaaacatggaaagtcagagccttctcctctctttttttttccccgcatatgcagctttttgattgtacttgattttatagagacagcacagttccagcaaagacatcaaaaggggat

SEQ ID NO: 346602 - DNA, 2046 bp, Homo sapiens
ctcctgggtcacattctgctgttgttgggaaacagggagtgagtgaagggaacctgggaacccttctcccctcaccttttaaggatgttctggggtggaataaagagaggtggagggtggggtgcctgggcccagcctccctggctcctggtccttctttcttcagcagggagttctggcaaggcctgggcctggggagggggcctgggtgcagttttctcctgcggtgtggttggctcttttgtcttccaggatgggcctgtggggtctgtgtggggaaggaaggagctgggagcctgggctgcctgtgtgtcggctggatgctgccagcaccggcatggaccaagcaacttctctgagccagatgctggggacgcagaggtgaacccagagacatgatcccatctgctcagatcttcatgtcagaacacgctttattacagtctcggcaagggggtggctccatctgggccgcatctccaggactcctggcctggacttctctttggacctcgggtgaccttggattctggccacagtgacttagcggtcagactccggtggttttctagcccgctgggtgactccctgaagatctcatcctcttcacacctgttgggatggagcctcccatggataggaactcttcctggttgatgctcagcagatgactgatctggctctggaggacagctccaggggtatgagggaggcctggcagcccactactccctcctcacctgctcgggccctgcctgctgggccctattgtctgggtctgggggccctttcctgccccatgtgaacttgattcctcctcgcgtttctgtcggtgaccagacagagcctggcctgggccaagtccccactgaccacactttccccaaggctgggtctcaaaggaccctacaggatggggacaggaacaaggatgggagtcggggaggggctgtcaggcagagggcagatgcagctcctcgggtgccgctggctggagtcctttgtctccatttgctcagtgcgtaattgtcattttgtgggggacttccttggtggggcttttccatgcttttcctctccctgatggttacaaagaggagacagtcaggatctgggaggagctggagccttccccctgtgctgttgaactctgggaggggcagccagaggggctgagagtgcaccatcctgaaaagagagggtctttaagagataagatttaggctagggaaattcactagaaagagacaggtggccctgggttttttttcctgccatccaaagggaaccagtcttacccaaaggcttaaggggtcaccttagcccagtctcaggacactcttctccaatcagatcgctgcttctagttgcactgctcctggattctgttcttggggaacagaaggtggcaggacaggccccacaatctgcaattccagctccctccagaggggacagtcccagcgtttgcaagagagcagcttgtggcctcccttaggcaagtttaaaagccagatgtcctttttcccagaatgcggagtggtgtgtactattcatcagcttgggctgccacagcaccatgccagactggatggcttaaacatcaggaatttattttctgccagttctggaggctggaaagtccagatcaaggtgttaagacttggtttctggtgaggcctctctccttggcttgcaggtggcaccttctcactatgtcctcacatggccttttctcaactctgccacttcctgttgagtgagtttgagtaagtcacctcacttctctcaacctcagtttcctcagtggtagaatgcgagttctgataccttacaggttgcagtgaggattcccgtcaatataagggtctcagcacatggcagacacctaaaaaaaaaaaaagtatgaggatggaggaaggcccctcaaacctggttgaacacgtctgctgcctaggccctggcctctctgggtgttctgcacacagatccttctgcctggggcaagacacttggctttgaatccatgtcacttccccacattct

SEQ ID NO: 346603 - DNA, 386 bp, Homo sapiens
ccttaaaggtcccatctccaaaaacagtcacatagcaggctactgcttcaacatatgcatttgggggaggggacaccattcagttcttaacagggtggtcaccgcaaacatggaaagtcagagccttctccccttcagaattcccgcccccacccagggatggggaggaggagcagagaggtatgggaagcagacacggagagtggcaggtaccatgctggggtggctcaggagtgcttcggaggacatatggaactggcagggctcagtgcagggaggcggaggccctgggagagccgtgtcctgagaagggcctgggctacaaccctgggcaagttacttcacctctgagcctccgatgctctgtgaaatggaaggaatgtgct

SEQ ID NO: 346604 - DNA, 1945 bp, Homo sapiens
ctcctgggtcacattctgctgttgttgggaaacagggagtgagtgaagggaacctgggaacccttctcccctcaccttttaaggatgttctggggtggaataaagagaggtggagggtggggtgcctgggcccagcctccctggctcctggtccttctttcttcagcagggagttctggcaaggcctgggcctggggagggggcctgggtgcagttttctcctgcggtgtggttggctcttttgtcttccaggatgggcctgtggggtctgtgtggggaaggaaggagctgggagcctgggctgcctgtgtgtcggctggatgctgccaggtggctccatctgggccgcatctccaggactcctggcctggacttctctttggacctcgggtgaccttggattctggccacagtgacttagcggtcagactccggtggttttctagcccgctgggtgactccctgaagatctcatcctcttcacacctgttgggatggagcctcccatggataggaactcttcctggttgatgctcagcagatgactgatctggctctggaggacagctccaggggtatgagggaggcctggcagcccactactccctcctcacctgctcgggccctgcctgctgggccctattgtctgggtctgggggccctttcctgccccatgtgaacttgattcctcctcgcgtttctgtcggtgaccagacagagcctggcctgggccaagtccccactgaccacactttccccaaggctgggtctcaaaggaccctacaggatggggacaggaacaaggatgggagtcggggaggggctgtcaggcagagggcagatgcagctcctcgggtgccgctggctggagtcctttgtctccatttgctcagtgcgtaattgtcattttgtgggggacttccttggtggggcttttccatgcttttcctctccctgatggttacaaagaggagacagtcaggatctgggaggagctggagccttccccctgtgctgttgaactctgggaggggcagccagaggggctgagagtgcaccatcctgaaaagagagggtctttaagagataagatttaggctagggaaattcactagaaagagacaggtggccctgggttttttttcctgccatccaaagggaaccagtcttacccaaaggcttaaggggtcaccttagcccagtctcaggacactcttctccaatcagatcgctgcttctagttgcactgctcctggattctgttcttggggaacagaaggtggcaggacaggccccacaatctgcaattccagctccctccagaggggacagtcccagcgtttgcaagagagcagcttgtggcctcccttaggcaagtttaaaagccagatgtcctttttcccagaatgcggagtggtgtgtactattcatcagcttgggctgccacagcaccatgccagactggatggcttaaacatcaggaatttattttctgccagttctggaggctggaaagtccagatcaaggtgttaagacttggtttctggtgaggcctctctccttggcttgcaggtggcaccttctcactatgtcctcacatggccttttctctgtggagagggacagagagcatgagcaggctctggtgtctcctcctcttcttataaagacactaatatcaccatattagggcttaaacctatgacctcatttaaccttaaccccttaaaggtcccatctccaaaaacagtcacatagcaggctactgcttcaacatatgcatttgggggaggggacaccattcagttcttaacagggtggtcaccgcaaacatggaaagtcagagccttctcctctctttttttttccccgcatatgcagctttttgattgtacttgattttatagagacagcacagttccagcaaagacatcaaaaggggat

SEQ ID NO: 346605 - DNA, 1241 bp, Homo sapiens
ctcctgggtcacattctgctgttgttgggaaacagggagtgagtgaagggaacctgggaacccttctcccctcaccttttaaggatgttctggggtggaataaagagaggtggagggtggggtgcctgggcccagcctccctggctcctggtccttctttcttcagcagggagttctggcaaggcctgggcctggggagggggcctgggtgcagttttctcctgcggtgtggttggctcttttgtcttccaggatgggcctgtggggtctgtgtggggaaggaaggagctgggagcctgggctgcctgtgtgtcggctggatgctgccagcaccggcatggaccaagcaacttctctgagccagatgctggggacgcagaggtgaacccagagacatgatcccatctgctcagatcttcatgtcagaacacgctttattacagtctcggcaagggggtggctccatctgggccgcatctccaggactcctggcctggacttctctttggacctcgggtgaccttggattctggccacagtgacttagcggtcagactccggtggttttctagcccgctgggtgactccctgaagatctcatcctcttcacacctgttgggatggagcctcccatggataggaactcttcctggttgatgctcagcagatgactgatctggctctggaggacagctccagggaatgcggagtggtgtgtactattcatcagcttgggctgccacagcaccatgccagactggatggcttaaacatcaggaatttattttctgccagttctggaggctggaaagtccagatcaaggtgttaagacttggtttctggtgaggcctctctccttggcttgcaggtggcaccttctcactatgtcctcacatggccttttctctgtggagagggacagagagcatgagcaggctctggtgtctcctcctcttcttataaagacactaatatcaccatattagggcttaaacctatgacctcatttaaccttaaccccttaaaggtcccatctccaaaaacagtcacatagcaggctactgcttcaacatatgcatttgggggaggggacaccattcagttcttaacagggtggtcaccgcaaacatggaaagtcagagccttctcctctctttttttttccccgcatatgcagctttttgattgtacttgattttatagagacagcacagttccagcaaagacatcaaaaggggat

SEQ ID NO: 346606 - DNA, 144 bp, Homo sapiens
ccttcatcgcatcttgctcccatcagtaaatcaatgagtgcttgtttatcacgctcctgtagtgagtcaggtgttgtgcttgtgttttaaatatgtataaaacttgttctctactctatagaagctcctgatgggagaaactgg

SEQ ID NO: 346607 - DNA, 1715 bp, Homo sapiens
  misc_feature (439)..(439): n is a, c, g, or t
  misc_feature (548)..(548): n is a, c, g, or t
  misc_feature (1459)..(1459): n is a, c, g, or t
  misc_feature (1473)..(1474): n is a, c, g, or t
  misc_feature (1513)..(1513): n is a, c, g, or t
tccccccatcaaaaaaactggagaactataatgtgcataaagtgcacataacataaatgttgtttatatttaatttaatttaatttttgagacagggtctcactctgttcccagactggtctcaaactcctggctcaagtgatcctcctgtgtctgcttcccaaagtgctgtgactgcagacatgagccacctcacctggccaaaatattcagtttaataattatgaagcagatacccatgtaaacatcgttacaaaagatcattgctagcatgccagaagccccagtgtgcccctttccaatcatatccctctctctaaccctaataggtaaccactatcctgacctttgtaataattttcttgtttttaaaatgtagttctggcctggcgtggtggctcatgcctgtaatcccagcactctcaaactcctgacctcnggtgatccgcctacctcccaaggtgctgggattaaaggcgtgagccaccgcgcctagcatatgtttatttttaatttagaactcatcgtggcttgtctatatacattgnaataatgatgtgacacacaaactgttgtgaaaaatgtcagttactttgaatgtaagcattttttccaaaatcacttatgtgtctaaaccaattccttctataaatcagtaagaaaatgataaaacaattcaacaggaaaatgaacaaaggccagaaaactcagagaagaaacacaaatgttcaataaacatataaagatactaaattaaattcatgagtaatcagaaaaattcacatttagatggaatcccttttattcatccataacttcagcaaaaagttggagaatacccagcggtgaaaaggtgttgggaaatgaatgctgtcatattctgctgacaatagagtaagttggcacaaaatttttgaaggcaattaaaattttatatctacatagtcttcaccccaagaattccatttccagatatctatgctacaggaatacttgcacatgttcacaaagaagcatgtacagggatttcattgcagcaatgcatgtaacaagaaaactaagcataatctaaacattcatcaatgggggaattattaaataaaccatgatgcatccatactatggattatgcaggagtttaaatgaatggggtgaccctctcagtactgggaaggaaagaaatctaaggcatatcatgaagtgaaagaatcaagttgcaagatgttaccctttatgcgaagaaaaaattttaaaaccacaaaacaaatctattttgctttatgtaaatatgtatgtaggtaaatgaggaaaagtctggaagcatgtatactaaatgcagagtagcattacttcagggatgagggagtagggcacaaggagagtttttgttatatctgttattgcatttttatatattaaaaatggaatcatgggctgcgggtggtggctcatgcctgtnatatgaacactttnngaggccaaggtgggaggatcacttgagcccaggagttcnagaccagcctaagcagcataggaagaccctgtctctacaaaaaatacaaaattaggtgggtgtggtggcatgcacctgtggtcccagctactggggaggctgaggtgagaggatcacttgggcctgggaggtgaaggctgcagtgagctgtgattgtgccactgcactgcagcccagaggacaaagtaagaccctgtctctg

SEQ ID NO: 346608 - DNA, 698 bp, Homo sapiens
tccccccatcaaaaaaactggagaactataatgtgcataaagtgcacataacataaatgttgtttatatttaatttaatttaatttttgagacagggtctcactctgttcccagactggtctcaaactcctggctcaagtgatcctcctgtgtctgcttcccaaagtgctgtgactgcagacatgagccacctcacctggccaaaatattcagtttaataattatgaagcagatacccatgtaaacatcgttacaaaagatcattgctagcatgccagaagccccagtgtgcccctttccaatcatatccctctctctaaccctaataggtaaccactatcctgacctttgtaataattttcttgtttttaaaatgtagttctggcctggcgtggtggctcatgcctgtaatcccagcactctggaaagccaaggtgggtgaatcacccacggtcatgagtttgagaccagcctggccaacatggtgaaaccctgtctctactaaaaatataaaaattagctgggtgtgatggagggcacctgtaattccagctacccaggaggctgaggcaggagaatcccttgaacccgggaggtggaggttgcagtgagccaagatcgcaccattgcactccagcctgggcaacaagaacaaaattccatctgaaaaaataaataaagcaattctcctgcctcag

SEQ ID NO: 346609 - DNA, 1421 bp, Homo sapiens
caggtgcgcattgccaatgcctggctagtcttttaatttttaatagagatggagtttcactacgttgcccagactgatcttgagctcctgggctgaagggatcctcccaccttggcctcccaaagtactgggatcacaggcatgagccgtcacacctggccatggatgaaaacttttttctttttgtttctcttctcttttcttggctttcttttctttttgagacagtcttgctctgtcttgctctgtgaagtgacatcatcacagctctcaatagttttcacttcccagacctcccaagctcaaatgatcctccctcctcagcctcccgagcagctgagaccacaggcgcatgccaccatacccagatgattttttaattttttgtagagacaggcccagactggtcttgaactcctgggctctagcagtcctcccacctcggtctcccagaatgttggaattacaggcaggagccaccgcgtcccacttgttttccattttctgtcattttaggggctaggggctaggggctagaggaagcagaggtgaacgtcatcatgcatctttttctaactgtcttcttgctcacccctttcagaaaagcattgagctggccgggcgtagtaggtcacgcctgtgatcccagcactttgggaggctgaggtgggtggatcacctgaggttgggagttcaagaccagcctggccaaaatggagaaaccccatctctactaaaaaaatacaagattagccaggtgtgttagcaggtgcctgtaatcccagctactcaggagactgaggcaggagaatcacctgaaccctggaggcggagcttggagtgagccgagattgtgccattgtactccagcctgggcaacaagagcgagactccatctcaaacaaagaaagaacaagagaagcatgagctcttaggaacgtgacgtgcatccccagctacacttctgttaccacttcagcatcaccttcctccccacttcatcaagtcttttactccagacaggctgcagctggtgacatgaaagaccggtcaaggccagctaaggcatctgcttgaggcctcccgtgcctaggatggggcgcagcctgcagttggctgtcacagccttgtgtcagaaacaccctttaaaatttaatgtttccttcacgggtaccctttggcataaaaaaagcccaatctgagccggacgcagtggctcacgcctgtaatcccagcacattgggaagccaaggtgggtggatcacgaggtcaggagttcaagaacagcctgaccaacatggtgaaaccccgtctctactaaaaatacaaaaattagttaggcatggtggcacacatgcctgtaatcccagctactcaggagcctgaggtaggagaactgcttgaacccagaaggcagaggt

SEQ ID NO: 346610 - DNA, 687 bp, Homo sapiens
aatcgcttgaacccaggaggtggaggttgcagtgagccgagattgtgccactgcactccaacctgggtgacagagtgagattccatctgaaaaacaaaaacaaaaacagaaaacaaacaaacaaaaaacaaaaaatccccacaactttgtcaaataatgtacaggcaaacactttcaaatataatttccttcagtgaatacaaaatgttgatatcataggtgatgtacaatttagttttgaatgagttattatgttatcactgtgtctgatgttatctactttgaaaggcagtccagaaaagtgttctaagtgaactcttaagatctattttagataatttcaactaattaaataacctgttttactgcctgtacattccacattaataaagcgataccaatcttatatgaatgctaatattactaaaatgcactgatatcacttcttcttcccctgttgaaaagctttctcatgatcatatttcacccacatctcaccttgaagaaacttacaggtagacttaccttttcacttgtggaattaatcatatttaaatcttactttaaggctcaataaataatactcataatgtctcattttagtgactcctaaggctagtccttttataaacaactttttctgacatagcatttatgtataataaaccagacatttaaagtgtacaa

SEQ ID NO: 346611 - DNA, 465 bp, Homo sapiens
aaaaaaaaaaaagaaatgtaagaactggaagaaaattcaggaggcatttttaaaaataatttttaagtggaaaagatatttctaagcaagacacaaaactcagaagcccgaaaaggaaagactgatgaagttgagtacatgttcatttgtggagaacaaacatacagttaaaaaaacaaaactgggccgagagttattcatgcctgtaatcccagcaatttgggaggcagaggcgagcacatcacttgagctaggagtttgagaccagcctgagcaacatggagaaaccccgtctctgcaaaaaatacaaaaattagctgggcatggtggtgcatgcttgtagtcccagctactcgggaggctgaggtgggaggatcacttgagcccaggaggttgaggctgcagtaagcgagattgcaccacattccagcctgggtgacagagcgagaccttgccagaaaaaaa

SEQ ID NO: 346612 - DNA, 871 bp, Homo sapiens
atctgcagcctgtggcctcctgtcaccctcccacccaccatggaaatgccctggcccctagggtggattctgcttcttttgggaagccccctcatccacgctgagcctctgttcccgagagcctgatgtacctcccctcctcattcatggagaagatggtgctggtggctcttcatgctggctacatctttatccagacggagaagaccatctacacccctgagtacttggttcactaccgggtgttcactgtgaaccacaagatggaccctgtgaccaggacattcactctggacatcaaggtggtctttcccgatgaggggtggggggtggtggtggatcctggacactggggttacacggtgtgctgaagtcctgggggcatgagccaccagggccctcccagagggcagtcaccagccccaccccctatccccacagaacccaaagggaatcaccgtgattagccagagtctgatggccaaggatggcttctttttcagctcctttcacctcccagagcttgtcagtttggggacctggaccatcgaagccagctaccaaagtacacccaagcagaagttcgaggctgcctttgatgtgaaggaatatgtcctcccatcttttgaggtccagctggtcccaaataagactttcttttacctcaaggatgaggctctgggcgttgacatccaggctcggtgagcccccttcctcccagctctgccagaagaccagggacacaaagattgagtacagagaaacaagcaccaggtgctatggctcacatctgtaatcccagtgctttgggagaccaaggcaggaggatcacttgaggccaggagttctagaccagcctggacaacatggc

SEQ ID NO: 346613 - DNA, 472 bp, Homo sapiens
ggcccacctcctcacacctgtctcctgccttccaacttctgcccaccttgtctgggtcttatttcttggctttcttaatggtcttaagtgtgtctagctgcttggacattgcaaagaatgttcacttctattatttttgtcgttagtatatcattcaaaagaagcactccccaccagccttgtggactgttgtgagcagtctgtgagactggatatcaaggtgctttagggacttttagacaaagccacagaatcacaaattataaggcctgatttgtccacagggtggtgagccagctcctcccgccactgtcccctgaccccacaattctttccatgagccctgtcttcctttttcccatctccacgggccttggcaccagcccctgttctctaccagccctggttgtggcctctgccagtctctgttcccctgccggaaaggaaagcctggctcaggttttgcctctga

SEQ ID NO: 346614 - DNA, 319 bp, Homo sapiens
acaggtctcagcttgactatgaagttcccagggaaaaggccttccaaaagagcagcaccggcttttcacctgagacttccttcctggatagccaggtgatgactgctctgaagatggagagatacctgaagaagatccacttcctctatctcaatgtggctcccagccggtactttaggtgatagcctatgtccaggccccttctcctccccctgcctggtttccttctatgctatcttccccctcctctttctccacgtgcgcacccttctccctgtcctttctccacatactcctcctctgactctagtgtccctct

SEQ ID NO: 346615 - DNA, 345 bp, Homo sapiens
acaggtctcagcttgactatgaagttcccagggaaaaggccttccaaaagagcagcaccggcttttcacctgagacttccttcctggatagccaggtgatgactgctctgaagatggagagatacctgaagaagatccacttcctctatctcaatgtggctcccagccggtactttagagacggggttttgccacattggccaagctgatctcgaactcctggcttcaagtgatccacccacctcagcctcccaaagtgctgggattacaggcgtgagtcaccgcgcctggcctcgacatctttttaaaaacacattctctttattaaattcactttgttgaaat

SEQ ID NO: 346616 - DNA, 725 bp, Homo sapiens
aaaacatgtcggagactgctccacttgctcctaccattcctgcacccgcagaaaaaacacctgtgaagaaaaaggcgaagaaggcaggcgcaactgctgggaaacgcaaagcatccggacccccagtatctgagcttatcaccaaggcagtggcagcttctaaggagcgcagcggcgtttctctggccgcgcttaagaaagcgcttgcggctgctggctacgatgtagaaaaaaacaacagccgtatcaagcttggcctcaagagcttggtgagcaaaggtactctggtgcagaccaaaggtaccggtgcttctggctccttcaaactcaacaagaaagcggcttccggggaaggcaaacccaaggccaaaaaggctggcgcagccaagcctaggaagcctgctggggcagccaagaagcccaagaaggtggctggcgccgctaccccgaagaaaagcatcaaaaagactcctaagaaggtaaagaagccagcaaccgctgctgggaccaagaaagtggccaagagtgcgaaaaaggtgaaaacacctcagccaaaaaaagctgccaagagtccagctaaggccaaagcccctaagcccaaggcggccaagcctaagtcggggaagccgaaggttacaaaggcaaagaaggcagctccgaagaaaaagtgaaactggcgggacgttcccctttgaaaattttaaacggctcttttcagagccacc

SEQ ID NO: 346617 - DNA, 479 bp, Homo sapiens
tgggctgggcacagtggctcatgcctgtaatcccagcactttgggaggctgaggtgagtggatcacttgaggtcaggagtttgagaccagcctggccaacatggtaaaaccccatctctattgaaaatataaaaattagccaggcgtggtggcactagcctgtaatcccagctacttggaagactgaggcaggagaatcacttgaacctggggggcagaggttgcagtgagccgaaattgtcccactgcactccagcctgggtgacagaacgagactctgtctcaaaaacaacaacaacaaaaacacctcacagtggcttatcattacttttatggaaggagattgcaacattctcctccaaacccttcaatggcttttcttcatacttgaaaataaaacccgaactttttgtcagagcaaacaaaactctgcagatccggccctgcctgatctcttgaacctcacccctgccactcat

SEQ ID NO: 346618 - DNA, 440 bp, Homo sapiens
gttcaagggtatgaagaaaatccggtctcattccaatatgcagttagaaaaagaaggaaggattttaatagtcttttcaggtaattgtggctatatcaagtagcctctggaaaactcctccatatatccatggaagaatgagagtcaaaaggcaaataatatcttagcattattatgaaaacagttttgaccttgtggaccccctgaaagggttccaggggcctccagggtccccagactccaatgtgagaaccactgaaatggagacagcctggagaagggcctggacacagaggtggtcttctggagacgctgaatcctgtccctggcctatgtcttgctaggtcttaaagagcctattttcttctcctcccacacaccctctatggaggtagtgctgatgtctttctgtgctcacccaggtcctctgcccacctcct

SEQ ID NO: 346619 - DNA, 550 bp, Homo sapiens
gctcctctctctcccttgccctcaatgtctcaccagccagtgaattctcttgctgtcactgacttaattagccctcattctctctcatctggaatactgtctccttctcaccagcctacaggccatttttcattattctctcattggtctggtcttcccacccctcacaacctgagtcatagttcctagaagcaaatctgatcacatcacatccctactcaaaattctatacatcgtcacttttacccacagcatacaatgcacatttgttagcttcactcaaggcctttcaaaatctggctctattcttactttctttcttctcccacccctaactgaaataggccttctctttctaccatatatctaataactccccattcaggagaggcctttcctcaaactcatgcctttaaaaacccttttcctaagctagaaacatgggtggacaatctgctttcttctctactacaattaaaatatggtaaatatcactatttagcagcagtaggcctggataggatggtaaggtattgatgctgtctcttcc

SEQ ID NO: 346620 - DNA, 1800 bp, Homo sapiens
gcggccgcttcccccgcgccgagcgaggaggcaggctgcggcggcgagaggcggctgcgcggccatgggcgcgccagtgtcgccctagggcgggcgcacagaccacagccggagcggtggtggcagcctccgcagaaagccttcccgggcggcggcggcggcggcccctggagcagcgcggccgggatgagcgggagctgcgcggcgcccggcccgggctcgggctcctccccggccgcctgccgcttcgcgcactacttcgtgctgtgcgggatcgacgcggacagcgggctggagcctgacgagctggcgggcgaaaattttgaccagagtcctttgagaagaacattcaaatccaaagttctcgcccactatcctcagaatatagaatggaacccttttgatcaagatgcggtgaacatgattatcaacgcctgatgactgtggcagaaggcatcaccacacttttgttcccatttcaatggcaacatgtttatgtgcccattctacctgcttctctgctacattttcttgatgctcctgtcccttatctgatgggccttcagtcaaaagaaggaactgaccgttctaaactagaacttcctcaagaggctaatttgtgttttgtggacattgacaaccattttattgagttgcctgaagaatttccacagttccccaataaagtggattttatccaagaactctctgaggttcttgttcaatttgggatccctcctgagggcagcctacattgcagtgagagtaccagcaaactgaagaatatggttctgaaagacttggtcaatgacaaaaagaacggcaatgtctgtactaataacatcagcatgtatgagttactgaagggcaatgaaaccatagcccgcttgcaggctctggccaagcgtactggtgtggctgtggaaaaaatggacctctctgcttctctgggtgaaaaagacaaggatttaaaactgcattgtgaagaggcagaactaagggactaccagctcaatgtacagctccgagaggtctttgctaaccgttttacacagatgtttgcagattacgaagcatttgtcattcagactgcccaggacatggaatcctggctgaccaaccgggaacagatgcagaactttgacaaagtaaaaagaaccatagttttccttttgtggttattagtggctttattattgattttaacatttttaaattttttattcttctgtgcctatgcttacccatatattattgattttgttaaccttttttaaatgcagactttttgtcttccagccccattaagaacttttctttaccaagtatttttacattagataaaataattttacaagcaaataaaccagctcattgaactggtcattaaattgtgcgttaaattgcctgtaatctcattttcaatttttctttaccttaaagatgcttaaattatagaaactcaggccgggcacggtggctcatgcctgtaatcccagaactttgggaggccgaggcggacggatcacaaggtcaggagtttgagaccagcctggccaatatggtgaaaccccgtctctacgaaaaatacaaaaaattagctgggcgtggtggcgcacacctgtagtcccagctactcaggaggctgaggcaggagaatcgcttgaacccgggaggcagaggttgcagtgagccaagatagcgccactgtactccggcctgggcaacagagagagactccatctcaaaaaaaataaataaataaataaaaatttatagaaactcttacattttgcaggt

SEQ ID NO: 346621 - DNA, 1089 bp, Homo sapiens
gcggccgcttcccccgcgccgagcgaggaggcaggctgcggcggcgagaggcggctgcgcggccatgggcgcgccagtgtcgccctagggcgggcgcacagaccacagccggagcggtggtggcagcctccgcagaaagccttcccgggcggcggcggcggcggcccctggagcagcgcggccgggatgagcgggagctgcgcggcgcccggcccgggctcgggctcctccccggccgcctgccgcttcgcgcactacttcgtgctgtgcgggatcgacgcggacagcgggctggagcctgacgagctggcgggcgaaaattttgaccagagtcctttgagaagaacattcaaatccaaagttctcgcccactatcctcagaatatagaatggaacccttttgatcaagatgcggtgaacatgttgtgcatgcctaaagggctatctttcaggacacaaacggacaataaagacccccagtttcactcatttataattaccagggaagatggttctcgcacctatggttttgttctcactttttatgaagaagttacaagtaagcaaatctgcacagcaatgcagacactttaccagatgcacaacgctgagcaatacagcagtgtgtatgcttcatcttcctgcagtatggactcattggcaagtagtcttgatgaaggagatacaacttcccttttgaaactccagcgatacaactcctatgatattagcagagacaccctgtatgtttcaaaaagtatatgcttgatcacaccgttaccattcatgcaggcctgcaagaaattccttatccagctttacaaggctgttacctcacagcagccaccacccttgccacttgaaagctatatccacaatattctttatgaagtaccccttccacctccagggaggtcactgaaattttatggtgtttatgaacctgtcatctgccagaggctgggcccagtgaactccccctctctgattacccccttcgggaggcatttgagctcctgggattagagaacctggtgcaggtgtttacctgtgttcttttagagatgcaaatccttctctactcacaag

SEQ ID NO: 346622 - DNA, 1156 bp, Homo sapiens
gcggccgcttcccccgcgccgagcgaggaggcaggctgcggcggcgagaggcggctgcgcggccatgggcgcgccagtgtcgccctagggcgggcgcacagaccacagccggagcggtggtggcagcctccgcagaaagccttcccgggcggcggcggcggcggcccctggagcagcgcggccgggatgagcgggagctgcgcggcgcccggcccgggctcgggctcctccccggccgcctgccgcttcgcgcactacttcgtgctgtgcgggatcgacgcggacagcgggctggagcctgacgagctggcggtttggtaccaatgggctagaagcagatcgtcatggcaagagccaaggtgctgcaaatacgacttcaggcgaaaattttgaccagagtcctttgagaagaacattcaaatccaaagttctcgcccactatcctcagaatatagaatggaacccttttgatcaagatgcggtgaacatgttgtgcatgcctaaagggctatctttcaggacacaaacggacaataaagacccccagtttcactcatttataattaccagggaagatggttctcgcacctatggttttgttctcactttttatgaagaagttacaagtaagcaaatctgcacagcaatgcagacactttaccagatgcacaacgctgagcaatacagcagtgtgtatgcttcatcttcctgcagtatggactcattggcaagtagtcttgatgaaggagatacaacttcccttttgaaactccagcgatacaactcctatgatattagcagagacaccctgtatgtttcaaaaagtatatgcttgatcacaccgttaccattcatgcaggcctgcaagaaattccttatccagctttacaaggctgttacctcacagcagccaccacccttgccacttgaaagctatatccacaatattctttatgaagtaccccttccacctccagggaggtcactgaaattttatggtgtttatgaacctgtcatctgccagaggctgggcccagtgaactccccctctctgattacccccttcgggaggcatttgagctcctgggattagagaacctggtgcaggtgtttacctgtgttcttttagagatgcaaatccttctctactcacaag

SEQ ID NO: 346623 - DNA, 516 bp, Homo sapiens
agcgctgagccatacgcgatactccgccgcagcgctgagcaatacagcagtgtgtatgcttcatcttcctgcagtatggactcattggcaagtagtcttgatgaaggagatacaacttcccttttgaaactccagcgatacaactcctatgatattagcagagacaccctgtatgtttcaaaaagtatatgcttgatcacaccgttaccattcatgcaggcctgcaagaaattccttatccagctttacaaggctgttacctcacagcagccaccacccttgccacttgaaagctatatccacaatattctttatgaagtaccccttccacctccagggaggtcactgaaattttatggtgtttatgaacctgtcatctgccagaggctgggcccagtgaactccccctctctgattacccccttcgggaggcatttgagctcctgggattagagaacctggtgcaggtgtttacctgtgttcttttagagatgcaaatccttctctactcacaag

SEQ ID NO: 346624 - DNA, 1373 bp, Homo sapiens
gcggccgcttcccccgcgccgagcgaggaggcaggctgcggcggcgagaggcggctgcgcggccatgggcgcgccagtgtcgccctagggcgggcgcacagaccacagccggagcggtggtggcagcctccgcagaaagccttcccgggcggcggcggcggcggcccctggagcagcgcggccgggatgagcgggagctgcgcggcgcccggcccgggctcgggctcctccccggccgcctgccgcttcgcgcactacttcgtgctgtgcgggatcgacgcggacagcgggctggagcctgacgagctggcgggcgaaaattttgaccagagtcctttgagaagaacattcaaatccaaagttctcgcccactatcctcagaatatagaatggaacccttttgatcaagatgcggtgaacatgattatcaacgcctgatgactgtggcagaaggcatcaccacacttttgttcccatttcaatggcaacatgtttatgtgcccattctacctgcttctctgctacattttcttgatgctcctgtcccttatctgatgggccttcagtcaaaagaaggaactgaccgttctaaactagaacttcctcaagaggctaatttgtgttttgtggacattgacaaccattttattgagttgcctgaagaatttccacagttccccaataaagtggattttatccaagaactctctgaggttcttgttcaatttgggatccctcctgagggcagcctacattgcagtgagagtaccagcaaactgaagaatatggttctgaaagacttggtcaatgacaaaaagaacggcaatgtctgtactaataacatcagcatgtatgagttactgaagggcaatgaaaccatagcccgcttgcaggctctggccaagcgtactggtgtggctgtggaaaaaatggacctctctgcttctctgggtgaaaaagacaaggatttaaaactgcattgtgaagaggcagaactaagggactaccagctcaatgtacagctccgagaggtctttgctaaccgttttacacagatgtttgcagattacgaagcatttgtcattcagactgcccaggacatggaatcctggctgaccaaccgggaacagatgcagaactttgacaaagcttcctttctgtctgaccagcctgagccttacctgccatttctttcacgcttcattgaaacacagatgtttgccacctttattgataataaaattatgtctcagtgggaagagaaagatcctttgcttcgggtctttgacactcggattgataagataaggctgtataatgtaagggcacccaccttgcggacatctatatatcagaaatgcagcactttaaaa

SEQ ID NO: 346625 - DNA, 513 bp, Homo sapiens
ccaggagtatcagcgatactcacgccgcaggctgagcaatacagcagtgtgtatgcttcatcttcctgcagtatggactcattggcaagtagtcttgatgaaggagatacaacttcccttttgaaactccagcgatacaactcctatgatattagcagagacaccctgtatgtttcaaaaagtatatgcttgatcacaccgttaccattcatgcaggcctgcaagaaattccttatccagctttacaaggctgttacctcacagcagccaccacccttgccacttgaaagctatatccacaatattctttatgaagtaccccttccacctccagggaggtcactgaaattttatggtgtttatgaacctgtcatctgccagaggctgggcccagtgaactccccctctctgattacccccttcgggaggcatttgagctcctgggattagagaacctggtgcaggtgtttacctgtgttcttttagagatgcaaatccttctctactcacaag

SEQ ID NO: 346626 - DNA, 423 bp, Homo sapiens
aaaatatacttctaattcttggctttattttcagttataaacatcagctggcctatctggtggtgtgcaagtagtatactgtgggcagtttcatctgtttagatgaggaatttattgcagggaattggaccaggacacctgacgcagctgggtcaaaagtctttcagtgattttcgtcttggtgacttctaatatagctcaggctgtcacatacttgtttaccttattttatttgcctatcttgttagcttggtaagaagttccttcattgttcagagatgatcttttatataggcaattcgtgtaaggattttcaggagctttttatttttcataaagaggatattcttcaaacatctttgtataactgttcctcaagaagttggtggaagctgttaaataatcttgtgtagttaatgttaa

SEQ ID NO: 346627 - DNA, 790 bp, Homo sapiens
tgtgcggcggccgcatctgacatcggatgccgtggcgctgctgcgggacaacgtcactccacgtgaaaacgagctctggacctcgctgggggactcgtggacccgccccgggctggagctgtccccggaggagggacccccatacagacccgagttcttcagcggctgggagccgccggtcactgacccgcagagccgcgcctgggaggacccagttgagaaacagctacagcacgagcggaggcgccggcagcaaagcgccccccaggtcgctgtcaatggtcaccgagacttggagccagaatctgagcctcagctggagtcagagacagcaggaaaatgggtcctgtgtaattatgacttccaggcccgcaacagcagtgagctgtcggtcaagcagcgggacgtactggaggtcctggatgacagtcgtaagtggtggaaggttcgggacccagcggggcaggagggatatgtgccctacaacatcctgacaccctaccccggaccccggctgcaccacagccaaagccctgcccgcagcctgaacagcactcctcctccaccaccagccccagccccggccccacctccagctctggctcggcccgctgggacaggccccgctgggacagctgcgatagctcaacggcttggaccccagcgagaaggagaaattctcccagatgctcatcgtcaacgaggaactgcaggcgcgcctggccagggccgctcgggaccgagccgcgcagtcccagggccccgcgccccggaaccgcagctcagcccg

SEQ ID NO: 346628 - DNA, 503 bp, Homo sapiens
acagggggtgccgcggccctgaagaccccccctctcccctgcacagtcaccgagacttggagccagaatctgagcctcagctggagtcagagacagcaggaaaatgggtcctgtgtaattatgacttccaggcccgcaacagcagtgagctgtcggtcaagcagcgggacgtactggaggtcctggatgacagtcgtaagtggtggaaggttcgggacccagcggggcaggagggatatgtgcccccaccttcacgtttccctggctcgcggctgctgggcatgaggctttgtgtctcccttcccgcctcaccaacgttctcacttcattccttcctgcgtcctggccctgcccctctccaaacgctcccaagcgttcaacctctgaggtttgcacctgctgtctctgctggctgaaacggccattccctgcctggcgaactcctgttcagcctccctggcccagctcaaacactcactgtggggaagcctgccctcatcccc

SEQ ID NO: 346629 - DNA, 846 bp, Homo sapiens
ataaagacctgtctggtccttccccacttccctaatccatctgtctcccttgctatgtctctaaaccttctccagccaggacatcggaggtacccagacattgttatgaaactccgcatgtgcccctggtggacgctgctggacccagcatgcacacttctcggctaagagtcaccctggatgaaccaccattgccagcggggagcatgttgcagctttcccacgcagtggatgagaacgaaggttacgaccattgtgtgggaggcgtctgtgtagcaattgctggaatcacttgtggcattgtagaaagactgagcgtgggaaagaagacgcattctgaagtcaccccgatttatgttaaattatcaccttgactactgctatagaacgaatgtttatgtcccccacccaaattcgtatgctaagacctaatagccaataagatagtattaatagatggggcctttgggaggtgagtggctcatgagggcagagtcctcaaaaccagataagtgcccgaataaaaggggccccagagagatcccttgcaccgtctaccatgtgaagtgtagaacacagcgagaaggccacctatgagccagaacgtgggccctcaccagaacccagttgtgctggcaccctgatcctggacttccagcctccaaaatgacgacaaagaagtttgtttttcctgagccatccacttcaaagtattctgtcatagctccccaaatagactaagacatctacttaaccttggtcaagttaactggggtcagccttgaatgtgcataaccgggttttccacttaggatccgataaatgtgttttatcgaatgattgttt

SEQ ID NO: 346630 - DNA, 649 bp, Homo sapiens
tgactcaccggtaaccacttcctgcagaaatcctccagccctgttagaaatgcctcagccagggggactcatctcctcaaacctgggggaccgagacctatgagaggtcacagcatgagccaggacatcggaggtacccagacattgttatgaaactccgcatgtgcccctggtggacgctgctggacccagcatgcacacttctcggctaagagtcaccctggatgaaccaccattgccagcggggagcatgttgcagctttcccacgcagtggatgagaacgaaggttacgaccattgtgtgggaggcgtctgtgtagcaattgctggaatcactaatgcagaggataaagcaagcaaacaaaaaaacttccagaagaatcacagagttttagacctagaaaaaaactgaaaaatcatccattccactctcctcattttacagatgagggcatcgagcctcagagaaatgaaacttgcccaagaccacacagcaagtgagtgggggactcatgacccaagacactttttccaggcttccttctaccacatcatgctgcagaaaacacagcagatgggaagagacgaggcatgtggttgccatttctgtattacatccaattcatatttcatttagaaaatgtatttc

SEQ ID NO: 346631 - DNA, 890 bp, Homo sapiens
tgactcaccggtaaccacttcctgcagaaatcctccagccctgttagaaatgcctcagccagggggactcatctcctcaaacctgggggaccgagacctatgagaggtcacagcatgagccaggacatcggaggtacccagacattgttatgaaactccgcatgtgcccctggtggacgctgctggacccagcatgcacacttctcggctaagagtcaccctggatgaaccaccattgccagcggggagcatgttgcagctttcccacgcagtggatgagaacgaaggttacgaccattgtgtgggaggcgtctgtgtagcaattgctggaatcacttgtggcattgtagaaagactgagcgtgggaaagaagacgcattctgaagtcaccccgatttatgttaaattatcaccttgactactgctatagaacgaatgtttatgtcccccacccaaattcgtatgctaagacctaatagccaataagatagtattaatagatggggcctttgggaggtgagtggctcatgagggcagagtcctcaaaaccagataagtgcccgaataaaaggggccccagagagatcccttgcaccgtctaccatgtgaagtgtagaacacagcgagaaggccacctatgagccagaacgtgggccctcaccagaacccagttgtgctggcaccctgatcctggacttccagcctccaaaatgacgacaaagaagtttgtttttcctgagccatccacttcaaagtattctgtcatagctccccaaatagactaagacatctacttaaccttggtcaagttaactggggtcagccttgaatgtgcataaccgggttttccacttaggatccgataaatgtgttttatcgaatgattgttt

SEQ ID NO: 346632 - DNA, 844 bp, Homo sapiens
cctagttttagaagtttcaatagcatacgaatttgggggggggaccgagacctatgagaggtcacagcatgagccaggacatcggaggtacccagacattgttatgaaactccgcatgtgcccctggtggacgctgctggacccagcatgcacacttctcggctaagagtcaccctggatgaaccaccattgccagcggggagcatgttgcagctttcccacgcagtggatgagaacgaaggttacgaccattgtgtgggaggcgtctgtgtagcaattgctggaatcacttgtggcattgtagaaagactgagcgtgggaaagaagacgcattctgaagtcaccccgatttatgttaaattatcaccttgactactgctatagaacgaatgtttatgtcccccacccaaattcgtatgctaagacctaatagccaataagatagtattaatagatggggcctttgggaggtgagtggctcatgagggcagagtcctcaaaaccagataagtgcccgaataaaaggggccccagagagatcccttgcaccgtctaccatgtgaagtgtagaacacagcgagaaggccacctatgagccagaacgtgggccctcaccagaacccagttgtgctggcaccctgatcctggacttccagcctccaaaatgacgacaaagaagtttgtttttcctgagccatccacttcaaagtattctgtcatagctccccaaatagactaagacatctacttaaccttggtcaagttaactggggtcagccttgaatgtgcataaccgggttttccacttaggatccgataaatgtgttttatcgaatgattgttt

SEQ ID NO: 346633 - DNA, 471 bp, Homo sapiens
tgcactaacacaaatgataaaaaattaaggaatttttagattacttgaagtatgagctgtgttttcttccttaactggaaatggctttccactgatggattcattcttgaccaattccctttaggacaatggcaaaatacagacaagaaggcatactatatggcctaacccagactgaatcaatgatcttggtctcattaataacagtgactttttatgatgctataacaagaattattcaccatgttcttaacaccaatatctacttatattacaggtacctattaaacacaaaaaaagaactgacgatgttttcctacccaatatggcagaaaatgttcaactgacagcttttcaggttcaaacagctccatccagattcccatttagagctgactggtgatgatatcttctttttccaacctttatttctatgagtatttgaatgaataaaaatgactccaaatgcca

SEQ ID NO: 346634 - DNA, 509 bp, Homo sapiens
tgggccaactgcagcagaaaaaaatgaagagggacctccaccagatgagaagccggcttgcccaggagcgcagtgtgaagctggatgctctccagcgtgcagaggagctgcagggtcaacttcacgatgcccagcggtcagctgtccccatgggctcgtcaggcgaccttatatcccaggctcaatactccccaacttctgcttccacatcatccagatactcccagcaacgctttttaaagactaatctcaaaggcagtaaaataacaagatggattcaaaggccacagactgtacctattaaacacaaaaaaagaactgacgatgttttcctacccaatatggcagaaaatgttcaactgacagcttttcaggttcaaacagctccatccagattcccatttagagctgactggtgatgatatcttctttttccaacctttatttctatgagtatttgaatgaataaaaatgactccaaatgccattaaatctcttacttaatttta

SEQ ID NO: 346635 - DNA, 435 bp, Homo sapiens
tgggccaactgcagcagaaaaaaatgaagagggacctccaccagatgagaagccggcttgcccaggagcgcagtgtgaagctggatgctctccagcgtgcagaggagctgcagggtcaacttcacgatgcccagcggtcagctgtccccatgggctcgtcaggcgatactcccagcaacgctttttaaagactaatctcaaaggcagtaaaataacaagatggattcaaaggccacagactgtacctattaaacacaaaaaaagaactgacgatgttttcctacccaatatggcagaaaatgttcaactgacagcttttcaggttcaaacagctccatccagattcccatttagagctgactggtgatgatatcttctttttccaacctttatttctatgagtatttgaatgaataaaaatgactccaaatgcca

SEQ ID NO: 346636 - DNA, 359 bp, Homo sapiens
tgggccaactgcagcagaaaaaaatgaagagggacctccaccagatgagaagccggcttgcccaggagcgcagtgtgaagctggatgctctccagcgtgcagaggagctgcagggtcaacttcacgatgcccagcggtcagctgtccccatgggctcgtcaggcggtacctattaaacacaaaaaaagaactgacgatgttttcctacccaatatggcagaaaatgttcaactgacagcttttcaggttcaaacagctccatccagattcccatttagagctgactggtgatgatatcttctttttccaacctttatttctatgagtatttgaatgaataaaaatgactccaaatgcca

SEQ ID NO: 346637 - DNA, 487 bp, Homo sapiens
tgggccaactgcagcagaaaaaaatgaagagggacctccaccagatgagaagccggcttgcccaggagcgcagtgtgaagctggatgctctccagcgtgcagaggagctgcagggtcaacttcacgatgcccagcggtcagctgtccccatgggctcgtcaggcgaccttatatcccaggctcaatactccccaacttctgcttccacatcatccagatactcccagcaacgctttttaaagactaatctcaaaggcagtaaaataacaagatggattcaaaggccacagactgtacctattaaacacaaaaaaagaactgacgatgttttcctacccaatatggcagaaaatgttcaactgacagcttttcaggttcaaacagctccatccagattcccatttagagctgactggtgatgatatcttctttttccaacctttatttctatgagtatttgaatgaataaaaatgactccaaatgcca

SEQ ID NO: 346638 - DNA, 551 bp, Homo sapiens
ttaaagcaaatgtaatttagaagtacatctaccacacataactaagagcctgcaaaggggaaaatacgcttaatcacaaatcatgaatccaatagcaaagaaagttcagagtttactgtttggtttttgagaagatactgtcactggggactttgtttctgtgtcatgaccaagtcatggggaaaaagagaaaagtggagggatgtgagggcctagacaggggaaaaaggagaacaggaggctcaagactggtgaggaaggggagtgggctgggcgtgcggctcatgcctgtcatcccagcacttcgggaggccaagggaggaggattgcttgagcacaggtgttcaaggctagcctgggcaacacaacaagaccccatctctacaaaaaaaaaaattaagccaggtatcgtggcatgcacctgaaacccagatgccagggagactgaggtgggaagatcacctgagcccagggagactgaggctgcagtgagccgtgatcgcaccattgcactccagcctgggcaacagagtgagaccctgcctcaaaaa

SEQ ID NO: 346639 - DNA, 550 bp, Homo sapiens
ttaaacataatcttttgctttgttaattctgaaataaaaagaaacaccttttctaaaatgtcttctaggtaattttgattggagggaggtcagagaaaagatgatttatgataaggactgatgtgaacatggcttagatgtttttacaaacataccaaagttcttgtgctttcttttctttaaagaaaagttgggctgagcgtggtgggtcactcctgtaatcctagcactttgggaggttgaggtgggcagattgcttgagctcaggagttcagcagcctgggcaacatggagaaactctgtctttacaaaaaatattatacaaaaataagccgggcatggtggcgcacgcctgtggtccaagctacttgggtggctgaagcaggaggatcacttaaccgcaggaggtccaggctgcagtgagctgtgactgtgccaccgcactccagcctgggcaacagagtgagaccctgtctcaagaaaaaaaaagaaaaattggtaattgctaatatagcttgaagaaagaagggggaaaagtaatgaaggagag

SEQ ID NO: 346640 - DNA, 486 bp, Homo sapiens
acttctgaaagaatgctgcgggagaggaggaaggagagcatcctggcttctggcagcagagccccactgtgacaggacctagcattcaccttcctcttctgttccgagtgcgagaagacttcagggacctctgtttcatggacattatcatattcttctcaagagtacccagcaagaggtttgcaaagaggagttattcagtgagtaagtgattcatgtagctctctaacaggcatctggattttgggtgctacagcttgcaattagagaacaaaatagaaggattatccacagtccttgtctgttatctcacgtttggtgggctgtagaatccatcaactttttcagggtattcaaaagttgatgaacaattgtggataatattgtcaagatctaaaacaaactcccttaaagacaaatcagaccactattaaggttcagttttttgggttttttggtttgtttgttttttgagacaaagtcttg

SEQ ID NO: 346641 - DNA, 471 bp, Homo sapiens
aactaacagtgagtgagtatgatgttatgagttattaaatcttaactaccaattgggtaattgaataaaatgctttataaatagaaaccatcgtaacaagaaattagtacctggcgttattgatttctgaaacagtaaaccaaattttttactcttagtatctggagaggctgaaagtttatttggtagtttgtataatttcatgctagtgtcagaaattctctatgctcctaccaccaaatctcactattgacatctctgtgcatattttctgcctccctttgattataattaatgaggtttttatgcacctattcaaaaccaattcctcctctgatacactggaacttatctcctttagtttactcagggacatcattcctgtggttttccgcttttttttaagcatcatctttctctctccttcagttaaacattctccatcagaatacagacgtgtgtattagctcc

SEQ ID NO: 346642 - DNA, 648 bp, Homo sapiens
gctgaagaactgttatccctctgcagtacatgggggtttgagctcacgtcaatgtgcctgacctaagggcaaatggagctaagcaggagggagaattagacacttgccacggcttggagacagggtctactgctctctgctgaaccagaggaaagaacacactggctcctgaaccttcgcaggaagacaaggcgagggctgctgggtgcccgtcgctgctcacagcacagaacgtcccactcctcagactctttgtccccgtcctaagactgtccttcacttggtccatccaatccaaaatatgggcatacgaaacacacctcatccttcacacacacaacatgctcaaccttcactagccacgtgactttctttctcacatcatcctgaatttgcttttctgaaatttacttttcaatcttctgacttttcttcatacctaagaagactggacaaagtgcttgaaaagcaaatggaaacattttatgaataactacgcaaaggaaagacatataaatatttttaaagtttcccttctacagaaatgagcttaagtcaacactacagttgccactaagtgtaaggattcgtgaaggggaaaacgacggactcccttccctctgttcttctcaagtaatgcaaattaga

SEQ ID NO: 346643 - DNA, 607 bp, Homo sapiens
gctgaagaactgttatccctctgcagtacatgggggtttgagctcacgtcaatgtgcctgacctaagggcaaatggagctaagcaggagggagaattagacacttgccacggcttggagacagggtctactgctctctgctgaaccagaggaaagaacacactggctcctgaaccttcgcaggaagacaaggcgagggctgctgggtgcccgtcgctgctcacagcacagaacgtcccactcctcagactctttgtccccgtcctaagactgtccttcacttggtccatccaatccaaaatatgggcatacgaaacacacctcatccttcacacacacaacatgctcaaccttcactagccacgtgactttctttctcacatcatcctgaatttgcttttctgaagactggacaaagtgcttgaaaagcaaatggaaacattttatgaataactacgcaaaggaaagacatataaatatttttaaagtttcccttctacagaaatgagcttaagtcaacactacagttgccactaagtgtaaggattcgtgaaggggaaaacgacggactcccttccctctgttcttctcaagtaatgcaaattaga

SEQ ID NO: 346644 - DNA, 486 bp, Homo sapiens
tatagggtaacgtatacacttcccatcgcgtagttttcctgctcaaaacttttttctgactcctcccaacccgcactttttaaagtccttaccgcgaggcggattcccgccctgggcgcctcccagtcttgtcttaaggcgccgtcgccccccacctccctcctcgtgccgggcccttatgctccccaggtcttccctccgtaatcaccgtttctcctgagcccgcgttggggaggtgcccggggctgtcctatgacaccgtgtgttcttgcctgccctgcaccagcctctggaaaatgcgctcctccgggatgcaggcatcttacttcaaagccctcctgtgattgtgttggccaaagggatcgggagactgagagagagagcagtagaaaacctgagacagagaaaagaagaatgagaaaggccataacagatggtagcgtagaggatgggtgaaggatttgccaagagacagcaaaagtggaa

SEQ ID NO: 346645 - DNA, 512 bp, Homo sapiens
tgggttgatcccaattctctgggactagtggcgagaaaagtggatctgtgaacagggccaggaaccataaaggaatcaatacttcactgggcaatttttgctcttcacaagaaatatcctaggatccttacaactcacactggagcctgaaatctaaaaacagacagggccttccattcatgagagtctgcggtttcccacaaaagatgaagagaaaaaactaacccaacatcctacataccaggtgagacttttctctgaagtaccaccaatgtagctgtggccagctttttccaaagtcctcccattcactcaggaggcaccgtggtttccaaagggaaaccttctactgaagcactgaccctgatcctcccttactcattttgcttggggacctcctaaactactcagaacttccacagcctgcaatagtacccactccctgtacccatgacaccttcaccttctcctctttatgtatttccatattcagcctgaccatcgcatcactc

SEQ ID NO: 346646 - DNA, 282 bp, Homo sapiens
agagctcaaggaagacaacttcttaattcggtggaagccctggactggaaatcttgttctcagagttctctcacttctcatccgaagccctctttttttaaatcttactttcacattctcacctaggagaatcccagggttaaaatgccatgagaccctgtaatgttgagaaaggaaagaaggaaggaaaaggaacttgctgagatgctgcatcacagttttgtatggaagcttcaggtctgcgtcagtcaggcatcacttttcctgctctagctgcctccc

SEQ ID NO: 346647 - DNA, 378 bp, Homo sapiens
cagtggtgcatgcctataatcccagcactttgggaggccggggcaggcgggtcacttgaggtcaggagtttgagaccagcttgggtaacatggaaaatcctgtctctactaaaaatataaaaattagctgggcatagtggtgtgcacctgtattcccagctacttgggaggctgagacaggagaatcgcttgaacctgggaggcagaggtttcagtgagctgagattgcaccactgcactccagcctgggcaatagagcaagactccgtctcaaaaaaataaataaataaaaaagaactatgtcctcaaaactgtcctgtgtagattatatatagaattcctatggctgggcagggtggctcacacctataatcccag

SEQ ID NO: 346648 - DNA, 239 bp, Homo sapiens
caagagagagaagtgggcctgaagttcagaaatcaaagttgggaattggggcctggcacagtagctgatgcctgtaatcccagcactttgggaggctggggcaggtggatcacctgagcccaaaagtttgagaccagcctgggcaacatgacgaaacctgtccctacaaaaaacacaaaaattagctgggtgtggcggtgcacacctgtagtcccagctacaagggaggctgaggtggg

SEQ ID NO: 346649 - DNA, 408 bp, Homo sapiens
aacaaagttcttcaaaacattccatgaggttcaatacaggcaagcatgacaaaatagatttaaaggcaaaatcagccggccaaccaacctaacatagagaatacaataaacaaacaaacaaaaagtcctaagcagcccaattcagagtgggaaaggccaggccagtgtcagttttacagagagggaggagtagattcctgccacgcagaaaccataactggccaaccctgcagtgctgctacaaacacagccatgacacaagatcaagaaaccctccttccatgatattctgttttaatcacatgcaagtttgcctttgtgagtagcaaagatggggtctcctacctgttatgatttgaggccccctgggaaggacccaattccctagtcctcacctcctctggtctg

SEQ ID NO: 346650 - DNA, 520 bp, Homo sapiens
ttttttttttgtttcccagtatatatgaaaatagcattatgttttaaaaatatctttgaacatgtgttcatggaaaaaattaaagaaaatacaaaatatatagtttaaaacaacgtacgtatcttagtttaaaaacatattattgctaaaaaatgctaatgatcatctgagccttcagagagtcataatgtttttgctggtggagggtcttgcctacttggcaatagctattgactaatcagggtggtggttgctgaaggttggagtggctgtgacaatttcttaaaataagacaatgaagtttttggcatcaattgactttgcctttcatgtagcatgcaatgctgtttgatagcatttacccacagtagaacttcttttacaattggagtcaatccttcctctcaaaccctgccacttccttgtcaactaagtttatgtaacattctaaatcctttttttacatcatcttcactagaattaggttccatctcaaggaaccactttctttgctcatcca

SEQ ID NO: 346651 - DNA, 778 bp, Homo sapiens
ctactgacctcagatgatccgcctgcctcagactcccaaagtgctgggattacaggcatgagccactgtgtccggcctcttttcttttttttggcagtatcctttgaagcacaaaagtttttgatcttgacgaaattcagtttatctatattttcttttgttgcttgtgcttttggtttagagaccgtatttttaaccaatacattatttgaacttgattctgtgagttatggaaagtgactgaaggacttaaagttgtagaatgacctaaaacttctcatttttaaaaatcaaactaatgcttatacatgtgtggcaggctaatgatgattcccaaagagatgttcatgttctaatccctagaacctgtgaatattatcttatttggaaaaaggctctttgcagatttaattaagaatctcgaaattagattatcctggattattcaggtgagccctacgtggcactaataaatccttataaaagaaaggtagagggagatttaacactcacagagaaggcagtgggaagacagaggcagagactacaatgatgaagccacaagtcaaggagtgctggcagccacccgaagctggaagagacagagaaccctagaggctctggagggaacatggccctgctcacactttgatttcagacttttggactccagaactgtaaaaaagtaatttcctgttgttttaagccgctaagtttatggtaattttttacagcagccataagaaactaatacagtatggtttttaaaaaaatcaaa

SEQ ID NO: 346652 - DNA, 188 bp, Homo sapiens
gaatgccagaataaatttaaaaaaccaccacccaaatatctgctgccttcaagagactcatctaacacataaggactcacataaacataaagtataggggcagaaaaagatattacacagaaatttaaaccaaaagtcagcaggagtacctattcttatgtaagaaaaaaacagactttaaagcaaca

SEQ ID NO: 346653 - DNA, 420 bp, Homo sapiens
ctgtaattgcgccactctactccagcctgggcacaacagagcaagaccatgtctcaagggaaaaagatgttcaaagagaagaatgattgtgagtagccatagcaatcctctaaatctagaaataatagactgttccgaagtctttatagaggttttttttttgtgtgtgtgcttttaaactataaactcaggttgtcagtataatggaaacaatttgtgacatttacagagaaattgaattttctttccacagtggatctggccttcaattctattagctgtggagcagtttgcctattacagtcttacagtagccactttttgtttttcaaaggatctgaaaaataagaatatgcttgtatagttttataaatgtaatcatcttaaatttgggtaaaatttgtttatttcagattattg

SEQ ID NO: 346654 - DNA, 3099 bp, Homo sapiens
  misc_feature (2719)..(2720): n is a, c, g, or t
  misc_feature (2947)..(2947): n is a, c, g, or t
acattccacagcagcgcgctcacgcgtgttcgcactcaggacagccacgcagctgctggtgtcgcccgtgtgctcctgcggtgtgggatggtcgcggtgtgggacggtctgcggtggtgtcttcgcgttccccagggagtgtgccctgtgcatctccatggtacctgaagtccaggaagctgcctgcggatgttgcagttgggattacggggcagatgcagtggtcggtaggagcgagtgttcggggaagctgtaggtgttcgtggcgcgttggctttctggtaattcctccggctgcactagacatgccgcactgtgtgtccttccgtagcattgagagagaagagggaggatgcccaggtaaaagatgggaaatagcctagaatatcaactgtgatggtccctggtggggctaatggtggcaaacttttctgcttttttgtaaagaaataacacagggtcctaaaagcccgtgtatcctggaagcagagggtctgcgtcggaacagccgactctggaagggcgttggctatgtccctggacgtctcctgcagctcctcccatctcccctgagtctggcccagctggaaaggatgtgggggccacaggttaagtggccaccctggggcctgtgttcccagactgcctggctgtgctgggagttctgtcccgggagagacacagcttcgtctcggctgcggccgtgtccccaaggctctgttccctgtgtgcaaaggtggatatgtcttcctttagtctcctcatggccacaatttaatttttttgaaaagtttttggccaaataacctggctaccaacccggggccccagtgttgggaggagggtgatgtggggaaggacgtgactctgggacagtgcctgcctccaaaaagtgcttcctttcttcctcttcctccaggtaaattcgaaccaccattatttcacccgaatgtgtacccttcggggacagtgtgcctgtccatcttagaggaggacaaggactggaggccagccatcacaatcaaacaggtacggggcctccgcctccggcacgggcagggctgccttagtctcccctccggacacgtgggtctgtggtcattctctgtggctgaggccgagtctcacggtgtctccctttcaaactgctcacacccgtcttgtgtttttgtctctggcacagatcctattaggaatacaggaacttctaaatgaaccaaatatccaagacccagctcaagcagaggcctacacgatttactggttagtagcagccctggccccgctggtggcagctcctccccgtcccagccaaggccgcctggcaggacgggagtggagcacacaggctcaccctagggacagccagggtccgcgcctctgtggggaaggtcggggggcataaaccctgtgggcagcaggcaccgttgcacaccgtctgcggtgggcatggatggcgccggagccgtgtccaggggagggagcaggccaggtgacaggggctgtcttgggccactgccccagtgagttgtggccagctaggaggggaaggaccctgggcgtgggtgccagaggaggccatgctgagaggcctctccaccggctcagcctcccgtggaccccagcctcccgcgccgcccttgctgcttgtccccatcccctctacaacttggttccttctgtgggggggcccagcccagcagggctcagtgacgtgatgctgtcacacggaccctgggcttccaccctgtccctgtgaggtgctgctgtggctagaagggtccccgtgggcctggggtcctgtctgcaccgaggagggcctggtgtgagttaggatgcagacgacagccaaacagtgctggggaaagcagggaggaccctgccctgagcagaggccatgcgcccgcctgtcctgttccctctgcagctgttctgggcaggtccataagaaggtgggttggggcctccgacccccactgctccgcctgcagggttgagaaacccagccccatctcaccacgggtccccacacctctgaggaggtctcagggcccccaatggccagggacccagaaggctcacctgcagccaccccacacatccctgccactgtgggcatcagaggccctctccctccagggtgcatctcctggtcaggaggggggaggcccggttgccttaggcccggcctgcacaggtcgtgaggaaaagcacctggtttcggccgggcgcggtggctcacgcttgtaatcccagcactttgggaggccgaggtgggcgaatcatgcggtcaggagttcgagaccagcctggccaacatggcgaaaccctcgtccctactaaaaatacaaaaaattagttgggcgtagtggtgggtgcctctaatcccagctacctgggaggctgagacaggagaatcacttgaacccgggaggcggaggttgcagtgagccgagatcctgccactgctctccagcctggcgacggaggaatgctgtctcaaaaaaaaaaaaagcacgtggttttggagagatgtgtttctccctggatgcgggcccagcccaggtgtctgcaaggtgccctccctggtggccgagggtggcacagaggccccaggcagggagcaagtatcacagcagccaccccaggctcagcctcccaagtagctgggattacaggcacccaccaccacacctgactaatttttgtatttttagtnnagacagtgtttcaccacgttggccaggctggtctcgaacttctgacctcaggtgatccacccgcctcgcctcccaaagtgccgggattataggcatgagccaccgtgcctggaaaatgatttctaggccaagtgtggtggcccaacacctgtaatctcaacactttgggaggccaaggtgggctgattgcttgaactcaggagttcatgactagactgggcaacatngcgagaccctatctctacaaaaaattaaaaaatgtgccaggggtggtggctcatgcctgtaatcccagcactttgcaaggccactgtgggacgttacctgagcccaggagttggagaccagcctgggccacatggcaagacctgctctcttt

SEQ ID NO: 346655 - DNA, 540 bp, Homo sapiens
  misc_feature (3)..(4): n is a, c, g, or t
  misc_feature (33)..(33): n is a, c, g, or t
atnngagtccacccaacggccggcagggtttcnccggaaccggtatgcaatgattcgattccagctgggcccggcagcattcaagagtcataagcagcgaccttgtggcatcgtcagaaggaagggattggtttggcaagaacttgtttacaacatttttgcaaatctaaagttgctccatacaatgactagtcacctgggggggttgggcgggcgccatcttccattgccgccgcgggtgtgcggtctcgattcgctgaattgcccgtttccatacagggtctcttccttcggtcttttgtatttttgattgttatgtaaaactcgcttttattttaatattgatgtcagtatttcaactgctgtaaaattataaacttttatacttgggtaagtcccccaggggcgagttcctcgctctgggatgcaggcatgcttctcaccgtgcagagctgcacttggcctcagaccgctgctgaaaatgctcacgggtttcctctagagtccagtatcaccatgactacggtattcactggccgt

SEQ ID NO: 346656 - DNA, 1311 bp, Homo sapiens
gcgcgggcaacggggagcgctcggcggcgcgggaggcgctcggggccgggcggcaggagcggcgcgcgaggcaggcgtgcagagggcagccccgcgttaggccccgccccgcgcgccccgcccgcgccagggtcctcggagctgctctggctgcgcgcggagcgggctccggagggaagtcccgagacaaagggaagcgccgccgccgccgccccgctcggtcctccacctgtccgctacgctcgccggggctgcggccgcccgagggactttgaacatgtcggggatcgccctcagcagactcgcccaggagaggaaagcatggaggaaagaccacccatttggtttcgtggctgtcccaacaaaaaatcccgatggcacgatgaacctcatgaactgggagtgcgccattccaggaaagaaagggactccgtgggaaggaggcttgtttaaactacggatgcttttcaaagatgattatccatcttcgccaccaaaatgtaaattcgaaccaccattatttcacccgaatgtgtacccttcggggacagtgtgcctgtccatcttagaggaggacaaggactggaggccagccatcacaatcaaacagatcctattaggaatacaggaacttctaaatgaaccaaatatccaagacccagctcaagcagaggcctacacgatttactgccaaaacagagtggagtacgagaaaagggtccgagcacaagccaagaagtttgcgccctcataagcagcgaccttgtggcatcgtcagaaggaagggattggtttggcaagaacttgtttacaacatttttgcaaatctaaagttgctccatacaatgactagtcacctgggggggttgggcgggcgccatcttccattgccgccgcgggtgtgcggtctcgattcgctgaattgcccgtttccatacagggtctcttccttcggtcttttgtatttttgattgttatgtaaaactcgcttttattttaatattgatgtcagtatttcaactgctgtaaaattataaacttttatacttgggtaagtcccccaggggcgagttcctcgctctgggatgcaggcatgcttctcaccgtgcagagctgcacttggcctcagctggctgtatggaaatgcaccctccctcctgccgctcctctctagaaccttctagaacctgggctgtgctgcttttgagcctcagaccccagggcagcatctcggttctgcgccacttcctttgtgtttatatggcgttttgtctgtgttgctgtttagagtaaataaactgtttatataaa

SEQ ID NO: 346657 - DNA, 3004 bp, Homo sapiens
gcgcgggcaacggggagcgctcggcggcgcgggaggcgctcggggccgggcggcaggagcggcgcgcgaggcaggcgtgcagagggcagccccgcgttaggccccgccccgcgcgccccgcccgcgccagggtcctcggagctgctctggctgcgcgcggagcgggctccggagggaagtcccgagacaaagggaagcgccgccgccgccgccccgctcggtcctccacctgtccgctacgctcgccggggctgcggccgcccgagggactttgaacatgtcggggatcgccctcagcagactcgcccaggagaggaaagcatggaggaaagaccacccatttggtttcgtggctgtcccaacaaaaaatcccgatggcacgatgaacctcatgaactgggagtgcgccattccaggaaagaaagggactccgtgggaaggaggcttgtttaaactacggatgcttttcaaagatgattatccatcttcgccaccaaaatgtaaattcgaaccaccattatttcacccgaatgtgtacccttcggggacagtgtgcctgtccatcttagaggaggacaaggactggaggccagccatcacaatcaaacagatcctattaggaatacaggaacttctaaatgaaccaaatatccaagacccagctcaagcagaggcctacacgatttactgccaaaacagagtggagtacgagaaaagggtccgagcacaagccaagaagtttgcgccctcataagcagcgaccttgtggcatcgtcagaaggaagggattggtttggcaagaacttgtttacaacatttttgcaaatctaaagttgctccatacaatgactagtcacctgggggggttgggcgggcgccatcttccattgccgccgcgggtgtgcggtctcgattcgctgaattgcccgtttccatacagggtctcttccttcggtcttttgtatttttgattgttatgtaaaactcgcttttattttaatattgatgtcagtatttcaactgctgtaaaattataaacttttatacttgggtaagtcccccaggggcgagttcctcgctctgggatgcaggcatgcttctcaccgtgcagagctgcacttggcctcagctggctgtatggaaatgcaccctccctcctgccgctcctctctagaaccttctagaacctgggctgtgctgcttttgagcctcagaccccagggcagcatctcggttctgcgccacttcctttgtgtttatatggcgttttgtctgtgttgctgtttagagtaaataaactgtttatataaatatattaaaggttttggttgcattattatcattgaaagtgagaggaggcggcctcccagtgcccggccctccccacccacctgcagccccaccgcgggccaggaccaggctctccatctgcttcggatgcacgcaggctgtgaggctctgtcttgccctggatctttgtaaacagggctgtgtacaaagtgctgctgaggtttctgtgctccccgcatcttcgggctgtagagcgctgggcagctaagatctgcataggtcgggattggcatcgagaccctggcaactgcaccggtgccagctgtcttgggggccacaaggccaggtccagaccagggctgggggctgcctgaggactcctatccgggcagcctgctggcgggggttcccctcttcagtggccaggtcacagggatggagctgcgctgtgcatagggtgccacctcaggtgtctgtcccttgtgtcctcaggaggcagccttgctaccacccgtggcaaacgccaggtgctttttctgggagagcccacagccgtggccctccagggcttccccgacccttagcgccaggtggagggccctgggcagcctgtgtctggaattcttcgtcctgaggccgcctgagtgtggtctgtcctggggaggctgtgcgcctcagcagccgtcctgacgctgagccctctgcaaaggttgggccggccaggcctcttggggctgcctgagccactgcaggaagtggcctggctgggaagttgggtgccggtcacctcccagcaggaaggcacagtggacagagatgggaagccctgggggacacagcccggtgctcccagccctccaacctctggctcccaacccagtctccccatcctagcgagcttggccctcctcagtttcgtttcaagccttggggctggagctggccctgctgccctggcaccccccggtggctggagctgggtccccgtggcccaagtgcagggtcccaagagggcagggcggggctccccaaaggagcaaagaatgcagggagggcggtccaggcccctgggaaggggagctcggcaccctccaggtccgtgtgggactccagccgctgttggctgggaatcgaagttagaggtgacttccaaaggccccccgagccggcagtgccccccaccacccctccagcgactctgcggtgccagtgccttgttggcttttccggctacgcaccctgcagtcactgagctctcggtctgacgtctgatgtttgtggtttgtttataacacggggccttacctggggaattcagctggtttgaatatttgtagcccgctcccagaatgtcttattttgtaatgactgaactacatttagtaatagttacacatgtatatggttaatacatatggaaattcaatatattttgtagttaacgtattctgaagtaacggatgtttctcgccaatcgtagtgacttcagctaacgaaatgttcttttgtagtaccacggtcctcggcctaacgaaggacgtgaaccttgtaagaggagagctctgaaacgcggtcacctttgtttagtggaagggaaagtgtgttcccggcatgaggtgcctcggaattagtaaagaattgtgggcaatggattaaccactgtatctaagaatccaccaattaaagcatttgcacagaaaaaaacggcctgccg

SEQ ID NO: 346658 - DNA, 1594 bp, Homo sapiens
  misc_feature (1324)..(1324): n is a, c, g, or t
gcgcgggcaacggggagcgctcggcggcgcgggaggcgctcggggccgggcggcaggagcggcgcgcgaggcaggcgtgcagagggcagccccgcgttaggccccgccccgcgcgccccgcccgcgccagggtcctcggagctgctctggctgcgcgcggagcgggctccggagggaagtcccgagacaaagggaagcgccgccgccgccgccccgctcggtcctccacctgtccgctacgctcgccggggctgcggccgcccgagggactttgaacatgtcggggatcgccctcagcagactcgcccaggagaggaaagcatggaggaaagaccacccatttggtttcgtggctgtcccaacaaaaaatcccgatggcacgatgaacctcatgaactgggagtgcgccattccaggaaagaaagggactccgtgggaaggaggcttgtttaaactacggatgcttttcaaagatgattatccatcttcgccaccaaaatgtaaattcgaaccaccattatttcacccgaatgtgtacccttcggggacagtgtgcctgtccatcttagaggaggacaaggactggaggccagccatcacaatcaaacagatcctattaggaatacaggaacttctaaatgaaccaaatatccaagacccagctcaagcagaggcctacacgatttactgccaaaacagagtggagtacgagaaaagggtccgagcacaagccaagaagtttgcgccctcataagcagcgaccttgtggcatcgtcagaaggaagggattggtttggcaagaacttgtttacaacatttttgcaaatctaaagttgctccatacaatgactagtcacctgggggggttgggcgggcgccatcttccattgccgccgcgggtgtgcggtctcgattcgctgaattgcccgtttccatacagggtctcttccttcggtcttttgtatttttgattgttatgtaaaactcgcttttattttaatattgatgtcagtatttcaactgctgtaaaattataaacttttatacttgggtaagtcccccaggggcgagttcctcgctctgggatgcaggcatgcttctcaccgtgcagagctgcacttggcctcagctggctgtatggaaatgcaccctccctcctgccgctcctctctagaaccttctagaacctgggctgtgctgcttttgagcctcagaccccagggcagcatctcggttctgcgccacttcctttgtgtttatatggcgttttgtctgtgttgctgtttagagtaaataaactgtttatataaaaaaaaaaaaaaanaaaaagcgaatgtgatatcaacaaaaagaaggggggggggttataaattttccgccggggggcgatataggcttcacccgattttttgtacaaaggggccctaaaggggaggtttaataaagaaggaggggggggttaaaagagtagtgcggcaacggtctgggttttgggaggccctttctgcggggttttgggaccccacgagattagggtgggattaattaggttgtggtaacgctttgtgtggagtgtgcttattatattgagacc

SEQ ID NO: 346659 - DNA, 1379 bp, Homo sapiens
gcgcgggcaacggggagcgctcggcggcgcgggaggcgctcggggccgggcggcaggagcggcgcgcgaggcaggcgtgcagagggcagccccgcgttaggccccgccccgcgcgccccgcccgcgccagggtcctcggagctgctctggctgcgcgcggagcgggctccggagggaagtcccgagacaaagggaagcgccgccgccgccgccccgctcggtcctccacctgtccgctacgctcgccggggctgcggccgcccgagggactttgaacatgtcggggatcgccctcagcagactcgcccaggagaggaaagcatggaggaaagaccacccatttggtttcgtggctgtcccaacaaaaaatcccgatggcacgatgaacctcatgaactgggagtgcgccattccaggaaagaaagggactccgtgggaaggaggcttgtttaaactacggatgcttttcaaagatgattatccatcttcgccaccaaaatgtaaattcgaaccaccattatttcacccgaatgtgtacccttcggggacagtgtgcctgtccatcttagaggaggacaaggactggaggccagccatcacaatcaaacagatcctattaggaatacaggaacttctaaatgaaccaaatatccaagacccagctcaagcagaggcctacacgatttactgccaaaacagagtggagtacgagaaaagggtccgagcacaagccaagaagtttgcgccctcataagcagcgaccttgtggcatcgtcagaaggaagggattggtttggcaagaacttgtttacaacatttttgcaaatctaaagttgctccatacaatgactagtcacctgggggggttgggcgggcgccatcttccattgccgccgcgggtgtgcggtctcgattcgctgaattgcccgtttccatacagggtctcttccttcggtcttttgtatttttgattgttatgtaaaactcgcttttattttaatattgatgtcagtatttcaactgctgtaaaattataaacttttatacttgggtaagtcccccaggggcgagttcctcgctctgggatgcaggcatgcttctcaccgtgcagagctgcacttggcctcagctggctgtatggaaatgcaccctccctcctgccgctcctctctagaaccttctagaacctgggctgtgctgcttttgagcctcagaccccagggcagcatctcggttctgcgccacttcctttgtgatatgcgtggctgggtgtgttagagtaataacgttttcaaaaaaaaaacccgggttttgcgggggggaaaggtgaggctggcaatggcgacactttgaagggactgggccaaaggggaataacg

SEQ ID NO: 346660 - DNA, 1130 bp, Homo sapiens
gcgcgggcaacggggagcgctcggcggcgcgggaggcgctcggggccgggcggcaggagcggcgcgcgaggcaggcgtgcagagggcagccccgcgttaggccccgccccgcgcgccccgcccgcgccagggtcctcggagctgctctggctgcgcgcggagcgggctccggagggaagtcccgagacaaagggaagcgccgccgccgccgccccgctcggtcctccacctgtccgctacgctcgccggggctgcggccgcccgagggactttgaacatgtcggggatcgccctcagcagactcgcccaggagaggaaagcatggaggaaagaccacccatttggtttcgtggctgtcccaacaaaaaatcccgatggcacgatgaacctcatgaactgggagtgcgccattccaggaaagaaagggactccgtgggaaggaggcttgtttaaactacggatgcttttcaaagatgattatccatcttcgccaccaaaatgtaaattcgaaccaccattatttcacccgaatgtgtacccttcggggacagtgtgcctgtccatcttagaggaggacaaggactggaggccagccatcacaatcaaacagatcctattaggaatacaggaacttctaaatgaaccaaatatccaagacccagctcaagcagaggcctacacgatttactgccaaaacagagtggagtacgagaaaagggtccgagcacaagccaagaagtttgcgccctcataagcagcgaccttgtggcatcgtcagaaggaagggattggtttggcaagaacttgtttacaacatttttgcaaatctaaagttgctccatacaatgactagtcacctgggggggttgggcgggcgccatcttccattgccgccgcgggtgtgcggtctcgattcgctgaattgcccgtttccatacagggtctcttccttcggtcttttgtatttttgattgttatgtaaaactcgcttttattttaatattgatgtcagtatttcaactgctgtaaaattataaacttttatacttgggtaagtcccccaggggcgagttcctcgctctgggatgcaggcatgctctggagatcctaatcgagatacgcttacaaca

SEQ ID NO: 346661 - DNA, 1373 bp, Homo sapiens
atagctaggtacgagccggtgttaatcggacgaggcgagacaagggatggcgcgcgcgccgccccgctcggtcctccacctgtccgctacgctcgccggggctgcggccgcccgaggctgccctgaggatctgtgtttggtgaaaaggagccaaattcacctgcagggcaggcggctctagcagcttcagaagcctggtgccctggcgacactggacctgccttggcttctttgatcccaaccccacccccgatttctgctctgctgactggggaagtcatcgtgccacccagaacctgagtgcgggcctctcagagctccttcgtccggactttgaacatgtcggggatcgccctcagcagactcgcccaggagaggaaagcatggaggaaagaccacccatttggtttcgtggctgtcccaacaaaaaatcccgatggcacgatgaacctcatgaactgggagtgcgccattccaggaaagaaagggactccgtgggaaggaggcttgtttaaactacggatgcttttcaaagatgattatccatcttcgccaccaaaatgtaaattcgaaccaccattatttcacccgaatgtgtacccttcggggacagtgtgcctgtccatcttagaggaggacaaggactggaggccagccatcacaatcaaacagatcctattaggaatacaggaacttctaaatgaaccaaatatccaagacccagctcaagcagaggcctacacgatttactgccaaaacagagtggagtacgagaaaagggtccgagcacaagccaagaagtttgcgccctcataagcagcgaccttgtggcatcgtcagaaggaagggattggtttggcaagaacttgtttacaacatttttgcaaatctaaagttgctccatacaatgactagtcacctgggggggttgggcgggcgccatcttccattgccgccgcgggtgtgcggtctcgattcgctgaattgcccgtttccatacagggtctcttccttcggtcttttgtatttttgattgttatgtaaaactcgcttttattttaatattgatgtcagtatttcaactgctgtaaaattataaacttttatacttgggtaagtcccccaggggcgagttcctcgctctgggatgcaggcatgcttctcaccgtgcagagctgcacttggcctcagctggctgtatggaaatgcaccctccctcctgccgctcctctctagaaccttctagaacctgggctgtgctgcttttgagcctcagaccccagggcagcatctcggttctgcgccacttcctttgtgtttatatggcgttttgtctgtgttgctgtttagagtaaataaactgtttatataaa

SEQ ID NO: 346662 - DNA, 2910 bp, Homo sapiens
gcgcgggcaacggggagcgctcggcggcgcgggaggcgctcggggccgggcggcaggagcggcgcgcgaggcaggcgtgcagagggcagccccgcgttaggccccgccccgcgcgccccgcccgcgccagggtcctcggagctgctctggctgcgcgcggagcgggctccggagggaagtcccgagacaaagggaagcgccgccgccgccgccccgctcggtcctccacctgtccgctacgctcgccggggctgcggccgcccgagggactttgaacatgtcggggatcgccctcagcagactcgcccaggagaggaaagcatggaggaaagaccacccatttggtttcgtggctgtcccaacaaaaaatcccgatggcacgatgaacctcatgaactgggagtgcgccattccaggaaagaaagggactccgtgggaaggaggcttgtttaaactacggatgcttttcaaagatgattatccatcttcgccaccaaaatgtaaattcgaaccaccattatttcacccgaatgtgtacccttcggggacagtgtgcctgtccatcttagaggaggacaaggactggaggccagccatcacaatcaaacagatcctattaggaatacaggaacttctaaatgaaccaaatatccaagacccagctcaagcagaggcctacacgatttactgccaaaacagagtggagtacgagaaaagggtccgagcacaagccaagaagtttgcgccctcataagcagcgaccttgtggcatcgtcagaaggaagggattggtttggcaagaacttgtttacaacatttttgcaaatctaaagttgctccatacagggtctcttccttcggtcttttgtatttttgattgttatgtaaaactcgcttttattttaatattgatgtcagtatttcaactgctgtaaaattataaacttttatacttgggtaagtcccccaggggcgagttcctcgctctgggatgcaggcatgcttctcaccgtgcagagctgcacttggcctcagctggctgtatggaaatgcaccctccctcctgccgctcctctctagaaccttctagaacctgggctgtgctgcttttgagcctcagaccccagggcagcatctcggttctgcgccacttcctttgtgtttatatggcgttttgtctgtgttgctgtttagagtaaataaactgtttatataaatatattaaaggttttggttgcattattatcattgaaagtgagaggaggcggcctcccagtgcccggccctccccacccacctgcagccccaccgcgggccaggaccaggctctccatctgcttcggatgcacgcaggctgtgaggctctgtcttgccctggatctttgtaaacagggctgtgtacaaagtgctgctgaggtttctgtgctccccgcatcttcgggctgtagagcgctgggcagctaagatctgcataggtcgggattggcatcgagaccctggcaactgcaccggtgccagctgtcttgggggccacaaggccaggtccagaccagggctgggggctgcctgaggactcctatccgggcagcctgctggcgggggttcccctcttcagtggccaggtcacagggatggagctgcgctgtgcatagggtgccacctcaggtgtctgtcccttgtgtcctcaggaggcagccttgctaccacccgtggcaaacgccaggtgctttttctgggagagcccacagccgtggccctccagggcttccccgacccttagcgccaggtggagggccctgggcagcctgtgtctggaattcttcgtcctgaggccgcctgagtgtggtctgtcctggggaggctgtgcgcctcagcagccgtcctgacgctgagccctctgcaaaggttgggccggccaggcctcttggggctgcctgagccactgcaggaagtggcctggctgggaagttgggtgccggtcacctcccagcaggaaggcacagtggacagagatgggaagccctgggggacacagcccggtgctcccagccctccaacctctggctcccaacccagtctccccatcctagcgagcttggccctcctcagtttcgtttcaagccttggggctggagctggccctgctgccctggcaccccccggtggctggagctgggtccccgtggcccaagtgcagggtcccaagagggcagggcggggctccccaaaggagcaaagaatgcagggagggcggtccaggcccctgggaaggggagctcggcaccctccaggtccgtgtgggactccagccgctgttggctgggaatcgaagttagaggtgacttccaaaggccccccgagccggcagtgccccccaccacccctccagcgactctgcggtgccagtgccttgttggcttttccggctacgcaccctgcagtcactgagctctcggtctgacgtctgatgtttgtggtttgtttataacacggggccttacctggggaattcagctggtttgaatatttgtagcccgctcccagaatgtcttattttgtaatgactgaactacatttagtaatagttacacatgtatatggttaatacatatggaaattcaatatattttgtagttaacgtattctgaagtaacggatgtttctcgccaatcgtagtgacttcagctaacgaaatgttcttttgtagtaccacggtcctcggcctaacgaaggacgtgaaccttgtaagaggagagctctgaaacgcggtcacctttgtttagtggaagggaaagtgtgttcccggcatgaggtgcctcggaattagtaaagaattgtgggcaatggattaaccactgtatctaagaatccaccaattaaagcatttgcacagaaaaaaacggcctgccg

SEQ ID NO: 346663 - DNA, 1227 bp, Homo sapiens
gcgcgggcaacggggagcgctcggcggcgcgggaggcgctcggggccgggcggcaggagcggcgcgcgaggcaggcgtgcagagggcagccccgcgttaggccccgccccgcgcgccccgcccgcgccagggtcctcggagctgctctggctgcgcgcggagcgggctccggagggaagtcccgagacaaagggaagcgccgccgccgccgccccgctcggtcctccacctgtccgctacgctcgccggggctgcggccgcccgagggactttgaacatgtcggggatcgccctcagcagactcgcccaggagaggaaagcatggaggaaagaccacccatttactccgtgggaaggaggcttgtttaaactacggatgcttttcaaagatgattatccatcttcgccaccaaaatgtaaattcgaaccaccattatttcacccgaatgtgtacccttcggggacagtgtgcctgtccatcttagaggaggacaaggactggaggccagccatcacaatcaaacagatcctattaggaatacaggaacttctaaatgaaccaaatatccaagacccagctcaagcagaggcctacacgatttactgccaaaacagagtggagtacgagaaaagggtccgagcacaagccaagaagtttgcgccctcataagcagcgaccttgtggcatcgtcagaaggaagggattggtttggcaagaacttgtttacaacatttttgcaaatctaaagttgctccatacaatgactagtcacctgggggggttgggcgggcgccatcttccattgccgccgcgggtgtgcggtctcgattcgctgaattgcccgtttccatacagggtctcttccttcggtcttttgtatttttgattgttatgtaaaactcgcttttattttaatattgatgtcagtatttcaactgctgtaaaattataaacttttatacttgggtaagtcccccaggggcgagttcctcgctctgggatgcaggcatgcttctcaccgtgcagagctgcacttggcctcagctggctgtatggaaatgcaccctccctcctgccgctcctctctagaaccttctagaacctgggctgtgctgcttttgagcctcagaccccagggcagcatctcggttctgcgccacttcctttgtgtttatatggcgttttgtctgtgttgctgtttagagtaaataaactgtttatataaa

SEQ ID NO: 346664 - DNA, 2040 bp, Homo sapiens
gcgcgggcaacggggagcgctcggcggcgcgggaggcgctcggggccgggcggcaggagcggcgcgcgaggcaggcgtgcagagggcagccccgcgttaggccccgccccgcgcgccccgcccgcgccagggtcctcggagctgctctggctgcgcgcggagcgggctccggagggaagtcccgagacaaagggaagcgccgccgccgccgccccgctcggtcctccacctgtccgctacgctcgccggggctgcggccgcccgaggctgccctgaggatctgtgtttggtgaaaaggagccaaattcacctgcagggcaggcggctctagcagcttcagaagcctggtgccctggcgacactggacctgccttggcttctttgatcccaaccccacccccgatttctgctctgctgactggggaagtcatcgtgccacccagaacctgagtgcgggcctctcagagctccttcgtccgtgggtctgccggggactgggccttgtctccctaacgagtgccagggactttgaacatgtcggggatcgccctcagcagactcgcccaggagaggaaagcatggaggaaagaccacccatttggtttcgtggctgtcccaacaaaaaatcccgatggcacgatgaacctcatgaactgggagtgcgccattccaggaaagaaagggactccgtgggaaggaggcttgtttaaactacggatgcttttcaaagatgattatccatcttcgccaccaaaataaataacacagggtcctaaaagcccgtgtatcctggaagcagagggtctgcgtcggaacagccgactctggaagggcgttggctatgtccctggacgtctcctgcagctcctcccatctcccctgagtctggcccagctggaaaggatgtgggggccacaggttaagtggccaccctggggcctgtgttcccagactgcctggctgtgctgggagttctgtcccgggagagacacagcttcgtctcggctgcggccgtgtccccaaggctctgttccctgtgtgcaaaggtggatatgtcttcctttagtctcctcatggccacaatttaatttttttgaaaagtttttggccaaataacctggctaccaacccggggccccagtgttgggaggagggtgatgtggggaaggacgtgactctgggacagtgcctgcctccaaaaagtgcttcctttcttcctcttcctccaggtaaattcgaaccaccattatttcacccgaatgtgtacccttcggggacagtgtgcctgtccatcttagaggaggacaaggactggaggccagccatcacaatcaaacagatcctattaggaatacaggaacttctaaatgaaccaaatatccaagacccagctcaagcagaggcctacacgatttactgccaaaacagagtggagtacgagaaaagggtccgagcacaagccaagaagtttgcgccctcataagcagcgaccttgtggcatcgtcagaaggaagggattggtttggcaagaacttgtttacaacatttttgcaaatctaaagttgctccatacaatgactagtcacctgggggggttgggcgggcgccatcttccattgccgccgcgggtgtgcggtctcgattcgctgaattgcccgtttccatacagggtctcttccttcggtcttttgtatttttgattgttatgtaaaactcgcttttattttaatattgatgtcagtatttcaactgctgtaaaattataaacttttatacttgggtaagtcccccaggggcgagttcctcgctctgggatgcaggcatgcttctcaccgtgcagagctgcacttggcctcagctggctgtatggaaatgcaccctccctcctgccgctcctctctagaaccttctagaacctgggctgtgctgcttttgagcctcagaccccagggcagcatctcggttctgcgccacttcctttgtgtttatatggcgttttgtctgtgttgctgtttagagtaaataaactgtttatataaa

SEQ ID NO: 346665 - DNA, 1729 bp, Homo sapiens
gcgcgggcaacggggagcgctcggcggcgcgggaggcgctcggggccgggcggcaggagcggcgcgcgaggcaggcgtgcagagggcagccccgcgttaggccccgccccgcgcgccccgcccgcgccagggtcctcggagctgctctggctgcgcgcggagcgggctccggagggaagtcccgagacaaagggaagcgccgccgccgccgccccgctcggtcctccacctgtccgctacgctcgccggggctgcggccgcccgaggctgccctgaggatctgtgtttggtgaaaaggagccaaattcacctgcagggcaggcggctctagcagcttcagaagcctggtgccctggcgacactggacctgccttggcttctttgatcccaaccccacccccgatttctgctctgctgactggggaagtcatcgtgccacccagaacctgagtgcgggcctctcagagctccttcgtccgtgggtctgccggggactgggccttgtctccctaacgagtgccagggactttgaacatgtcggggatcgccctcagcagactcgcccaggagaggaaagcatggaggaaagaccacccatttggtttcgtggctgtcccaacaaaaaatcccgatggcacgatgaacctcatgaactgggagtgcgccattccaggaaagaaagggactccgtgggaaggaggcttgtttaaactacggatgcttttcaaagatgattatccatcttcgccaccaaaataaataacacagggtcctaaaagcccgtgtatcctggaagcagagggtctgcgtcggaacagccgactctggaagggcgttggctatgtccctggacgtctcctgcagctcctcccatctcccctgagtctggcccagctggaaaggatgtgggggccacaggtaaattcgaaccaccattatttcacccgaatgtgtacccttcggggacagtgtgcctgtccatcttagaggaggacaaggactggaggccagccatcacaatcaaacagatcctattaggaatacaggaacttctaaatgaaccaaatatccaagacccagctcaagcagaggcctacacgatttactgccaaaacagagtggagtacgagaaaagggtccgagcacaagccaagaagtttgcgccctcataagcagcgaccttgtggcatcgtcagaaggaagggattggtttggcaagaacttgtttacaacatttttgcaaatctaaagttgctccatacaatgactagtcacctgggggggttgggcgggcgccatcttccattgccgccgcgggtgtgcggtctcgattcgctgaattgcccgtttccatacagggtctcttccttcggtcttttgtatttttgattgttatgtaaaactcgcttttattttaatattgatgtcagtatttcaactgctgtaaaattataaacttttatacttgggtaagtcccccaggggcgagttcctcgctctgggatgcaggcatgcttctcaccgtgcagagctgcacttggcctcagctggctgtatggaaatgcaccctccctcctgccgctcctctctagaaccttctagaacctgggctgtgctgcttttgagcctcagaccccagggcagcatctcggttctgcgccacttcctttgtgtttatatggcgttttgtctgtgttgctgtttagagtaaataaactgtttatataaa

SEQ ID NO: 346666 - DNA, 1730 bp, Homo sapiens
acattccacagcagcgcgctcacgcgtgttcgcactcaggacagccacgcagctgctggtgtcgcccgtgtgctcctgcggtgtgggatggtcgcggtgtgggacggtctgcggtggtgtcttcgcgttccccagggagtgtgccctgtgcatctccatggtacctgaagtccaggaagctgcctgcggatgttgcagttgggattacggggcagatgcagtggtcggtaggagcgagtgttcggggaagctgtaggtgttcgtggcgcgttggctttctggtaattcctccggctgcactagacatgccgcactgtgtgtccttccgtagcattgagagagaagagggaggatgcccaggtaaaagatgggaaatagcctagaatatcaactgtgatggtccctggtggggctaatggtggcaaacttttctgcttttttgtaaagaaataacacagggtcctaaaagcccgtgtatcctggaagcagagggtctgcgtcggaacagccgactctggaagggcgttggctatgtccctggacgtctcctgcagctcctcccatctcccctgagtctggcccagctggaaaggatgtgggggccacaggttaagtggccaccctggggcctgtgttcccagactgcctggctgtgctgggagttctgtcccgggagagacacagcttcgtctcggctgcggccgtgtccccaaggctctgttccctgtgtgcaaaggtggatatgtcttcctttagtctcctcatggccacaatttaatttttttgaaaagtttttggccaaataacctggctaccaacccggggccccagtgttgggaggagggtgatgtggggaaggacgtgactctgggacagtgcctgcctccaaaaagtgcttcctttcttcctcttcctccaggtaaattcgaaccaccattatttcacccgaatgtgtacccttcggggacagtgtgcctgtccatcttagaggaggacaaggactggaggccagccatcacaatcaaacagatcctattaggaatacaggaacttctaaatgaaccaaatatccaagacccagctcaagcagaggcctacacgatttactgccaaaacagagtggagtacgagaaaagggtccgagcacaagccaagaagtttgcgccctcataagcagcgaccttgtggcatcgtcagaaggaagggattggtttggcaagaacttgtttacaacatttttgcaaatctaaagttgctccatacaatgactagtcacctgggggggttgggcgggcgccatcttccattgccgccgcgggtgtgcggtctcgattcgctgaattgcccgtttccatacagggtctcttccttcggtcttttgtatttttgattgttatgtaaaactcgcttttattttaatattgatgtcagtatttcaactgctgtaaaattataaacttttatacttgggtaagtcccccaggggcgagttcctcgctctgggatgcaggcatgcttctcaccgtgcagagctgcacttggcctcagctggctgtatggaaatgcaccctccctcctgccgctcctctctagaaccttctagaacctgggctgtgctgcttttgagcctcagaccccagggcagcatctcggttctgcgccacttcctttgtgtttatatggcgttttgtctgtgttgctgtttagagtaaataaactgtttatataaa

SEQ ID NO: 346667 - DNA, 1982 bp, Homo sapiens
gcgcgggcaacggggagcgctcggcggcgcgggaggcgctcggggccgggcggcaggagcggcgcgcgaggcaggcgtgcagagggcagccccgcgttaggccccgccccgcgcgccccgcccgcgccagggtcctcggagctgctctggctgcgcgcggagcgggctccggagggaagtcccgagacaaagggaagcgccgccgccgccgccccgctcggtcctccacctgtccgctacgctcgccggggctgcggccgcccgaggctgccctgaggatctgtgtttggtgaaaaggagccaaattcacctgcagggcaggcggctctagcagcttcagaagcctggtgccctggcgacactggacctgccttggcttctttgatcccaaccccacccccgatttctgctctgctgactggggaagtcatcgtgccacccagaacctgagtgcgggcctctcagagctccttcgtccgtgggtctgccggggactgggccttgtctccctaacgagtgccagggactttgaacatgtcggggatcgccctcagcagactcgcccaggagaggaaagcatggaggaaagaccacccatttggtttcgtggctgtcccaacaaaaaatcccgatggcacgatgaacctcatgaactgggagtgcgccattccaggaaagaaagggactccgtgggaaggaggcttgtttaaactacggatgcttttcaaagatgattatccatcttcgccaccaaaataaataacacagggtcctaaaagcccgtgtatcctggaagcagagggtctgcgtcggaacagccgactctggaagggcgttggctatgtccctggacgtctcctgcagctcctcccatctcccctgagtctggcccagctggaaaggatgtgggggccacaggttaagtggccaccctggggcctgtgttcccagactgcctggctgtgctgggagttctgtcccgggagagacacagcttcgtctcggctgcggccgtgtccccaaggctctgttccctgtgtgcaaaggtggatatgtcttcctttagtctcctcatggccacaatttaatttttttgaaaagtttttggccaaataacctggctaccaacccggggccccagtgttgggaggagggtgatgtggggaaggacgtgactctgggacagtgcctgcctccaaaaagtgcttcctttcttcctcttcctccaggtaaattcgaaccaccattatttcacccgaatgtgtacccttcggggacagtgtgcctgtccatcttagaggaggacaaggactggaggccagccatcacaatcaaacagatcctattaggaatacaggaacttctaaatgaaccaaatatccaagacccagctcaagcagaggcctacacgatttactgtcataagcagcgaccttgtggcatcgtcagaaggaagggattggtttggcaagaacttgtttacaacatttttgcaaatctaaagttgctccatacaatgactagtcacctgggggggttgggcgggcgccatcttccattgccgccgcgggtgtgcggtctcgattcgctgaattgcccgtttccatacagggtctcttccttcggtcttttgtatttttgattgttatgtaaaactcgcttttattttaatattgatgtcagtatttcaactgctgtaaaattataaacttttatacttgggtaagtcccccaggggcgagttcctcgctctgggatgcaggcatgcttctcaccgtgcagagctgcacttggcctcagctggctgtatggaaatgcaccctccctcctgccgctcctctctagaaccttctagaacctgggctgtgctgcttttgagcctcagaccccagggcagcatctcggttctgcgccacttcctttgtgtttatatggcgttttgtctgtgttgctgtttagagtaaataaactgtttatataaa

SEQ ID NO: 346668 - DNA, 910 bp, Homo sapiens
gcgcgggcaacggggagcgctcggcggcgcgggaggcgctcggggccgggcggcaggagcggcgcgcgaggcaggcgtgcagagggcagccccgcgttaggccccgccccgcgcgccccgcccgcgccagggtcctcggagctgctctggctgcgcgcggagcgggctccggagggaagtcccgagacaaagggaagcgccgccgccgccgccccgctcggtcctccacctgtccgctacgctcgccggggctgcggccgcccgagggactttgaacatgtcggggatcgccctcagcagactcgcccaggagaggaaagcatggaggaaagaccacccatttggtttcgtggctgtcccaacaaaaaatcccgatggcacgatgaacctcatgaactgggagtgcgccattccaggaaagaaagggactccgtgggaaggaggcttgtttaaactacggatgcttttcaaagatgattatccatcttcgccaccaaaatgtaaattcgaaccaccattatttcacccgaatgtgtacccttcggggacagtgtgcctgtccatcttagaggaggacaaggactggaggccagccatcacaatcaaacagatcctattaggaatacaggaacttctaaatgaaccaaatatccaagacccagctcaagcagaggcctacacgatttactgccaaaacagagtggagtacgagaaaagggtccgagcacaagccaagaagtttgcgccccctccctcctgccgctcctctctagaaccttctagaacctgggctgtgctgcttttgagcctcagaccccagggcagcatctcggttctgcgccacttcctttgtgtttatatggcgttttgtctgtgttgctgtttagagtaaataaactgtttatataaa

SEQ ID NO: 346669 - DNA, 2158 bp, Homo sapiens
gcgcgggcaacggggagcgctcggcggcgcgggaggcgctcggggccgggcggcaggagcggcgcgcgaggcaggcgtgcagagggcagccccgcgttaggccccgccccgcgcgccccgcccgcgccagggtcctcggagctgctctggctgcgcgcggagcgggctccggagggaagtcccgagacaaagggaagcgccgccgccgccgccccgctcggtcctccacctgtccgctacgctcgccggggctgcggccgcccgaggctgccctgaggatctgtgtttggtgaaaaggagccaaattcacctgcagggcaggcggctctagcagcttcagaagcctggtgccctggcgacactggacctgccttggcttctttgatcccaaccccacccccgatttctgctctgctgactggggaagtcatcgtgccacccagaacctgagtgcgggcctctcagagctccttcgtccgtgggtctgccggggactgggccttgtctccctaacgagtgccagggactttgaacatgtcggggatcgccctcagcagactcgcccaggagaggaaagcatggaggaaagaccacccatttggtttcgtggctgtcccaacaaaaaatcccgatggcacgatgaacctcatgaactgggagtgcgccattccaggaaagaaagggactccgtgggaaggaggcttgtttaaactacggatgcttttcaaagatgattatccatcttcgccaccaaaatgtaagtagctccctgttcagtgtcctggaagtcggcctgttcctgcggggattggagtcctctccaaagaggcccgtggctgtggccgtggcgccctggtccgggcgatccatggagctgggagggagtgagatcacagatttggaggtcggctttgatccctgatccccgcctcaggctgcagatgcgagtctgtttccagctccacgggtgggcggtgcacgtaatagacttagtctctcatcccagctaattggctgggaagctccagagtcctttgcagggagaggctgtgagatccaggctggagctcctgggctaggagtgcctggaccctcagtgattgttggcgatgaagacaggatttggtgcccacaagaccccagccctggatgggatggacgtgcagaagcgccaccactccgagtctcactggagggtttatcttgccccacctcactgctcttcctgtgggctctcgcagtctctcccacccggggctgcgtctgcagccgggcaggcatagagcaggggagcagcagagaaggcgcgagaagaaagggctgaggccaggttcgactttgagcctacagctaagttagtgatctcagtcagttcagcaaaactcaggagagggaggagagggccgccacgtccctgccgtcccatagctggaaatcggcaggccctttctgtggtgagttccactcatttaacacgtgcccagcacctagacagcgcctggccacggtgaggcgagagtgctgtgtaaaagcttccactgcaattgtcactcaagacacacaagtgttttccacagtggcagtgaccagaggagcttgaggactgctgacagcaccagctggtcgagacttgcttcatttttggattgtcctttgctgtttgattttttttttaaaccatgagcaggtattacttaagatgacttattttaattaagaaaaatataagaatgagacacagtagctgctttcattgattctgttcaaccgttgattggaattccaagcaaatgcagcaagacaagaaaaagaagtcacaacggaagaggtggggaggaaggccaggacaacagctcagtaaagctgaggtgcaaggctgggcacggtggctcacacctggaatcccagcacttttggaggccgaggtgggaggatcacctgaggtgaagaccagcctggacaacatggtgaaaccctgtctctactaaaaaaaacaaacaaacaaacaaaaattagtgggtgtggtggtgggtgcctttaatcccagctgctcgggaggctgaggcaggagaagtgcttgaatccaggaggcgggtccagtgagccgagatcgcgccactacactccagcctgggcagcagggcaagaccctgtctca

SEQ ID NO: 346670 - DNA, 1901 bp, Homo sapiens
gcgcgggcaacggggagcgctcggcggcgcgggaggcgctcggggccgggcggcaggagcggcgcgcgaggcaggcgtgcagagggcagccccgcgttaggccccgccccgcgcgccccgcccgcgccagggtcctcggagctgctctggctgcgcgcggagcgggctccggagggaagtcccgagacaaagggaagcgccgccgccgccgccccgctcggtcctccacctgtccgctacgctcgccggggctgcggccgcccgagggactttgaacatgtcggggatcgccctcagcagactcgcccaggagaggaaagcatggaggaaagaccacccatttggtttcgtggctgtcccaacaaaaaatcccgatggcacgatgaacctcatgaactgggagtgcgccattccaggaaagaaagggactccgtgggaaggaggcttgtttaaactacggatgcttttcaaagatgattatccatcttcgccaccaaaatgtaagtagctccctgttcagtgtcctggaagtcggcctgttcctgcggggattggagtcctctccaaagaggcccgtggctgtggccgtggcgccctggtccgggcgatccatggagctgggagggagtgagatcacagatttggaggtcggctttgatccctgatccccgcctcaggctgcagatgcgagtctgtttccagctccacgggtgggcggtgcacgtaatagacttagtctctcatcccagctaattggctgggaagctccagagtcctttgcagggagaggctgtgagatccaggctggagctcctgggctaggagtgcctggaccctcagtgattgttggcgatgaagacaggatttggtgcccacaagaccccagccctggatgggatggacgtgcagaagcgccaccactccgagtctcactggagggtttatcttgccccacctcactgctcttcctgtgggctctcgcagtctctcccacccggggctgcgtctgcagccgggcaggcatagagcaggggagcagcagagaaggcgcgagaagaaagggctgaggccaggttcgactttgagcctacagctaagttagtgatctcagtcagttcagcaaaactcaggagagggaggagagggccgccacgtccctgccgtcccatagctggaaatcggcaggccctttctgtggtgagttccactcatttaacacgtgcccagcacctagacagcgcctggccacggtgaggcgagagtgctgtgtaaaagcttccactgcaattgtcactcaagacacacaagtgttttccacagtggcagtgaccagaggagcttgaggactgctgacagcaccagctggtcgagacttgcttcatttttggattgtcctttgctgtttgattttttttttaaaccatgagcaggtattacttaagatgacttattttaattaagaaaaatataagaatgagacacagtagctgctttcattgattctgttcaaccgttgattggaattccaagcaaatgcagcaagacaagaaaaagaagtcacaacggaagaggtggggaggaaggccaggacaacagctcagtaaagctgaggtgcaaggctgggcacggtggctcacacctggaatcccagcacttttggaggccgaggtgggaggatcacctgaggtgaagaccagcctggacaacatggtgaaaccctgtctctactaaaaaaaacaaacaaacaaacaaaaattagtgggtgtggtggtgggtgcctttaatcccagctgctcgggaggctgaggcaggagaagtgcttgaatccaggaggcgggtccagtgagccgagatcgcgccactacactccagcctgggcagcagggcaagaccctgtctca

SEQ ID NO: 346671 - DNA, 383 bp, Homo sapiens
gttataaacaaaccacaaacatcagaatggtaacagactgaactacatttagtaatagttacacatgtatatggttaatacatatggaaattcaatatattttgtagttaacgtattctgaagtaacggatgtttctcgccaatcgtagtgacttcagctaacgaaatgttcttttgtagtaccacggtcctcggcctaacgaaggacgtgaaccttgtaagaggagagctctgaaacgcggtcacctttgtttagtggaagggaaagtgtgttcccggcatgaggtgcctcggaattagtaaagaattgtgggcaatggattaaccactgtatctaagaatccaccaattaaagcatttgcacagaaaaaaacggcctgccg

SEQ ID NO: 346672 - DNA, 1543 bp, Homo sapiens
  misc_feature (1391)..(1391): n is a, c, g, or t
gcgcgggcaacggggagcgctcggcggcgcgggaggcgctcggggccgggcggcaggagcggcgcgcgaggcaggcgtgcagagggcagccccgcgttaggccccgccccgcgcgccccgcccgcgccagggtcctcggagctgctctggctgcgcgcggagcgggctccggagggaagtcccgagacaaagggaagcgccgccgccgccgccccgctcggtcctccacctgtccgctacgctcgccggggctgcggccgcccgaggctgccctgaggatctgtgtttggtgaaaaggagccaaattcacctgcagggcaggcggctctagcagcttcagaagcctggtgccctggcgacactggacctgccttggcttctttgatcccaaccccacccccgatttctgctctgctgactggggaagtcatcgtgccacccagaacctgagtgcgggcctctcagagctccttcgtccgtgggtctgccggggactgggccttgtctccctaacgagtgccagggactttgaacatgtcggggatcgccctcagcagactcgcccaggagaggaaagcatggaggaaagaccacccatttggtttcgtggctgtcccaacaaaaaatcccgatggcacgatgaacctcatgaactgggagtgcgccattccaggaaagaaagggactccgtgggaaggaggcttgtttaaactacggatgcttttcaaagatgattatccatcttcgccaccaaaataaataacacagggtcctaaaagcccgtgtatcctggaagcagagggtctgcgtcggaacagccgactctggaagggcgttggctatgtccctggacgtctcctgcagctcctcccatctcccctgagtctggcccagctggaaaggatgtgggggccacaggtaaattcgaaccaccattatttcacccgaatgtgtacccttcggggacagtgtgcctgtccatcttagaggaggacaaggactggaggccagccatcacaatcaaacaggtacggggcctccgcctccggcacgggcagggctgccttagtctcccctccggacacgtgggtctgtggtcattctctgtggctgaggccgagtctcacggtgtctccctttcaaactgctcacacccgtcttgtgtttttgtctctggcacagatcctattaggaatacaggaattctgacctcaggtgatccacccgcctcgcctcccaaagtgccgggattataggcatgagccaccgtgcctggaaaatgatttctaggccaagtgtggtggcccaacacctgtaatctcaacactttgggaggccaaggtgggctgattgcttgaactcaggagttcatgactagactgggcaacatngcgagaccctatctctacaaaaaattaaaaaatgtgccaggggtggtggctcatgcctgtaatcccagcactttgcaaggccactgtgggacgttacctgagcccaggagttggagaccagcctgggccacatggcaagacctgctctcttt

SEQ ID NO: 346673 - DNA, 1244 bp, Homo sapiens
gcgcgggcaacggggagcgctcggcggcgcgggaggcgctcggggccgggcggcaggagcggcgcgcgaggcaggcgtgcagagggcagccccgcgttaggccccgccccgcgcgccccgcccgcgccagggtcctcggagctgctctggctgcgcgcggagcgggctccggagggaagtcccgagacaaagggaagcgccgccgccgccgccccgctcggtcctccacctgtccgctacgctcgccggggctgcggccgcccgaggctgccctgaggatctgtgtttggtgaaaaggagccaaattcacctgcagggcaggcggctctagcagcttcagaagcctggtgccctggcgacactggacctgccttggcttctttgatcccaaccccacccccgatttctgctctgctgactggggaagtcatcgtgccacccagaacctgagtgcgggcctctcagagctccttcgtccgtgggtctgccggggactgggccttgtctccctaacgagtgccagggactttgaacatgtcggggatcgccctcagcagactcgcccaggagaggaaagcatggaggaaagaccacccatttggtttcgtggctgtcccaacaaaaaatcccgatggcacgatgaacctcatgaactgggagtgcgccattccaggaaagaaagggggtaaggggcgctgcggcctcctgcctgtcggggctcagcagatgcgtgcggcagtgccatggggatactccgctcagatccctgccgtccgtgacggccacccttgtcacaggccgcggtcaacagctcagatccccagctgtggcctggcccccgccccgtgaggacttgagctcagaaggtggtgctggcaaggttggggtgacagctgtgtccctaccgagggcatttctggttgagaaggaagcaggctgggcctggccgggcacagggctgagctgtggcagaggggaaggggctctgatgtgtgttgggagcaggcctgaggggcgggcagcctttgcgtgctggaacccgggattctgctgtgtccttccaggtgtggctcaggtcgcgggagctgggtttgcaggagagccaccccggcctaaaaccgtctactggagaacctcctggggcacagggactggcggcagccacctaggatgcctgcttggggccccgtgtgtctgtggcaagcagggcggcccatgtgcctgtcctctttgcccggctcaca

SEQ ID NO: 346674 - DNA, 1700 bp, Homo sapiens
  misc_feature (1548)..(1548): n is a, c, g, or t
gcgcgggcaacggggagcgctcggcggcgcgggaggcgctcggggccgggcggcaggagcggcgcgcgaggcaggcgtgcagagggcagccccgcgttaggccccgccccgcgcgccccgcccgcgccagggtcctcggagctgctctggctgcgcgcggagcgggctccggagggaagtcccgagacaaagggaagcgccgccgccgccgccccgctcggtcctccacctgtccgctacgctcgccggggctgcggccgcccgaggctgccctgaggatctgtgtttggtgaaaaggagccaaattcacctgcagggcaggcggctctagcagcttcagaagcctggtgccctggcgacactggacctgccttggcttctttgatcccaaccccacccccgatttctgctctgctgactggggaagtcatcgtgccacccagaacctgagtgcgggcctctcagagctccttcgtccgtgggtctgccggggactgggccttgtctccctaacgagtgccagggactttgaacatgtcggggatcgccctcagcagactcgcccaggagaggaaagcatggaggaaagaccacccatttggtttcgtggctgtcccaacaaaaaatcccgatggcacgatgaacctcatgaactgggagtgcgccattccaggaaagaaagggactccgtgggaaggaggcttgtttaaactacggatgcttttcaaagatgattatccatcttcgccaccaaaataaataacacagggtcctaaaagcccgtgtatcctggaagcagagggtctgcgtcggaacagccgactctggaagggcgttggctatgtccctggacgtctcctgcagctcctcccatctcccctgagtctggcccagctggaaaggatgtgggggccacaggttaagtggccaccctggggcctgtgttcccagactgcctggctgtgctgggagttctgtcccgggagagacacagcttcgtctcggctgcggccgtgtccccaaggctctgttccctgtgtgcaaaggtggatatgtcttcctttagtctcctcatggccacaatttaatttttttgaaaagtttttggccaaataacctggctaccaacccggggccccagtgttgggaggagggtgatgtggggaaggacgtgactctgggacagtgcctgcctccaaaaagtgcttcctttcttcctcttcctccaggtaaattcgaaccaccattatttcacccgaatgtgtacccttcggggacagtgtgcctgtccatcttagaggaggacaaggactggaggccagccatcacaatcaaacagatcctattaggaatacaggaattctgacctcaggtgatccacccgcctcgcctcccaaagtgccgggattataggcatgagccaccgtgcctggaaaatgatttctaggccaagtgtggtggcccaacacctgtaatctcaacactttgggaggccaaggtgggctgattgcttgaactcaggagttcatgactagactgggcaacatngcgagaccctatctctacaaaaaattaaaaaatgtgccaggggtggtggctcatgcctgtaatcccagcactttgcaaggccactgtgggacgttacctgagcccaggagttggagaccagcctgggccacatggcaagacctgctctcttt

SEQ ID NO: 346675 - DNA, 1846 bp, Homo sapiens
ggatgggaagcgagcatggtgagtcctcaagtcgcagctgggcctgccacgtgggagtggagggtggaggaacgtgtggagtttcggagtccagcccagtgcgagacagccttgaaaccgtggttggcgggcgctccactccgctctgggctcgaaccctgcctgaccctagctgtgccccccactttctccctgtctggcccctggctccccgccccctcacttagaggagggcacggggaagggcaaacggtccagagggcgggcggcctgcgggctcctctgcatcatgtgaggagggcgtggggaaggacatcctggtggggcccgatctggggctgcctccagcccgggcctgcctgtcttggacttagtcgtggacctggaggccagtgcccggctggcccctgtcaccctctcgctgtgacgccagcgcctgctgactggaggacccaggttccttcgcctgctttttctcaggctgccctgaggatctgtgtttggtgaaaaggagccaaattcacctgcagggcaggcggctctagcagcttcagaagcctggtgccctggcgacactggacctgccttggcttctttgatcccaaccccacccccgatttctgctctgctgactggggaagtcatcgtgccacccagaacctgagtgcgggcctctcagagctccttcgtccgtgggtctgccggggactgggccttgtctccctaacgagtgccaggtgaggctgcggcggctccgacgcaggtggagctgctgacctggcccctttctgcggctgcgagggactttgaacatgtcggggatcgccctcagcagactcgcccaggagaggaaagcatggaggaaagaccacccatttggtttcgtggctgtcccaacaaaaaatcccgatggcacgatgaacctcatgaactgggagtgcgccattccaggaaagaaagggactccgtgggaaggaggcttgtttaaactacggatgcttttcaaagatgattatccatcttcgccaccaaaatgtaaattcgaaccaccattatttcacccgaatgtgtacccttcggggacagtgtgcctgtccatcttagaggaggacaaggactggaggccagccatcacaatcaaacagatcctattaggaatacaggaacttctaaatgaaccaaatatccaagacccagctcaagcagaggcctacacgatttactgccaaaacagagtggagtacgagaaaagggtccgagcacaagccaagaagtttgcgccctcataagcagcgaccttgtggcatcgtcagaaggaagggattggtttggcaagaacttgtttacaacatttttgcaaatctaaagttgctccatacaatgactagtcacctgggggggttgggcgggcgccatcttccattgccgccgcgggtgtgcggtctcgattcgctgaattgcccgtttccatacagggtctcttccttcggtcttttgtatttttgattgttatgtaaaactcgcttttattttaatattgatgtcagtatttcaactgctgtaaaattataaacttttatacttgggtaagtcccccaggggcgagttcctcgctctgggatgcaggcatgcttctcaccgtgcagagctgcacttggcctcagctggctgtatggaaatgcaccctccctcctgccgctcctctctagaaccttctagaacctgggctgtgctgcttttgagcctcagaccccagggcagcatctcggttctgcgccacttcctttgtgtttatatggcgttttgtctgtgttgctgtttagagtaaataaactgtttatataaa

SEQ ID NO: 346676 - DNA, 429 bp, Homo sapiens
ctggggtgagggcacgggtgtgctcttggcgctgccggccccagtgtgcggcactcgttgccccccagcccagcccccgacccccgtctcctcctctcctttccaggagggcctttccgactcactctctgggcatggcagaggtcctgaccgcccccttggtggggctggtccaggcttcaggctggtatgggagccgcctctgtcgggcctctggcccccggtgtcctcgcagtcctggaggttgtgtcctagaagcgatccccttcctcctgggccggcctgcggcaggcaagcagcccatctcaccacggtttatttccccacaggctgaggcaggagaagtgcttgaatccaggaggcgggtccagtgagccgagatcgcgccactacactccagcctgggcagcagggcaagaccctgtctca

SEQ ID NO: 346677 - DNA, 1161 bp, Homo sapiens
atagctaggtacgagccggtgttaatcggacgaggcgagacaagggatggcgcgcgcgccgccccgctcggtcctccacctgtccgctacgctcgccggggctgcggccgcccgagggactttgaacatgtcggggatcgccctcagcagactcgcccaggagaggaaagcatggaggaaagaccacccatttggtttcgtggctgtcccaacaaaaaatcccgatggcacgatgaacctcatgaactgggagtgcgccattccaggaaagaaagggactccgtgggaaggaggcttgtttaaactacggatgcttttcaaagatgattatccatcttcgccaccaaaatgtaaattcgaaccaccattatttcacccgaatgtgtacccttcggggacagtgtgcctgtccatcttagaggaggacaaggactggaggccagccatcacaatcaaacagatcctattaggaatacaggaacttctaaatgaaccaaatatccaagacccagctcaagcagaggcctacacgatttactgccaaaacagagtggagtacgagaaaagggtccgagcacaagccaagaagtttgcgccctcataagcagcgaccttgtggcatcgtcagaaggaagggattggtttggcaagaacttgtttacaacatttttgcaaatctaaagttgctccatacaatgactagtcacctgggggggttgggcgggcgccatcttccattgccgccgcgggtgtgcggtctcgattcgctgaattgcccgtttccatacagggtctcttccttcggtcttttgtatttttgattgttatgtaaaactcgcttttattttaatattgatgtcagtatttcaactgctgtaaaattataaacttttatacttgggtaagtcccccaggggcgagttcctcgctctgggatgcaggcatgcttctcaccgtgcagagctgcacttggcctcagctggctgtatggaaatgcaccctccctcctgccgctcctctctagaaccttctagaacctgggctgtgctgcttttgagcctcagaccccagggcagcatctcggttctgcgccacttcctttgtgtttatatggcgttttgtctgtgttgctgtttagagtaaataaactgtttatataaa

SEQ ID NO: 346678 - DNA, 2719 bp, Homo sapiens
gcgcgggcaacggggagcgctcggcggcgcgggaggcgctcggggccgggcggcaggagcggcgcgcgaggcaggcgtgcagagggcagccccgcgttaggccccgccccgcgcgccccgcccgcgccagggtcctcggagctgctctggctgcgcgcggagcgggctccggagggaagtcccgagacaaagggaagcgccgccgccgccgccccgctcggtcctccacctgtccgctacgctcgccggggctgcggccgcccgagggactttgaacatgtcggggatcgccctcagcagactcgcccaggagaggaaagcatggaggaaagaccacccatttggtttcgtggctgtcccaacaaaaaatcccgatggcacgatgaacctcatgaactgggagtgcgccattccaggaaagaaagggactccgtgggaaggaggcttgtttaaactacggatgcttttcaaagatgattatccatcttcgccaccaaaatgtaaattcgaaccaccattatttcacccgaatgtgtacccttcggggacagtgtgcctgtccatcttagaggaggacaaggactggaggccagccatcacaatcaaacagatcctattaggaatacaggaacttctaaatgaaccaaatatccaagacccagctcaagcagaggcctacacgatttactgccaaaacagagtggagtacgagaaaagggtccgagcacaagccaagaagtttgcgccctcataagcagcgaccttgtggcatcgtcagaaggaagggattggtttggcaagaacttgtttacaacatttttgcaaatctaaagttgctccatacaatgactagtcacctgggggggttgggcgggcgccatcttccattgccgccgcgggtgtgcggtctcgattcgctgaattgcccgtttccatacagggtctcttccttcggtcttttgtatttttgattgttatgtaaaactcgcttttattttaatattgatgtcagtatttcaactgctgtaaaattataaacttttatacttgggtaagtcccccaggggcgagttcctcgctctgggatgcaggcatgcttctcaccgtgcagagctgcacttggcctcagctggctgtatggaaatgcaccctccctcctgccgctcctctctagaaccttctagaacctgggctgtgctgcttttgagcctcagaccccagggcagcatctcggttctgcgccacttcctttgtgtttatatggcgttttgtctgtgttgctgtttagagtaaataaactgtttatataaatatattaaaggttttggttgcattattatcattgaaagtgagaggaggcggcctcccagtgcccggccctccccacccacctgcagccccaccgcgggccaggaccaggctctccatctgcttcggatgcacgcaggctgtgaggctctgtcttgccctggatctttgtaaacagggctgtgtacaaagtgctgctgaggtttctgtgctccccgcatcttcgggctgtagagcgctgggcagctaagatctgcataggtcgggattggcatcgagaccctggcaactgcaccggtgccagctgtcttgggggccacaaggccaggtccagaccagggctgggggctgcctgaggactcctatccgggcagcctgctggcgggggttcccctcttcagtggccaggtcacagggatggagctgcgctgtgcatagggtgccacctcaggtgtctgtcccttgtgtcctcaggaggcagccttgctaccacccgtggcaaacgccaggtgctttttctgggagagcccacagccgtggccctccagggcttccccgacccttagcgccaggtggagggccctgggcagcctgtgtctggaattcttcgtcctgaggccgcctgagtgtggtctgtcctggggaggctgtgcgcctcagcagccgtcctgacgctgagccctctgcaaaggttgggccggccaggcctcttggggctgcctgagccactgcaggaagtggcctggctgggaagttgggtgccggtcacctcccagcaggaaggcacagtggacagagatgggaagccctgggggacacagcccggtgctcccagccctccaacctctggctcccaacccagtctccccatcctagcgagcttggccctcctcagtttcgtttcaagccttggggctggagctggccctgctgccctggcaccccccggtggctggagctgggtccccgtggcccaagtgcagggtcccaagagggcagggcggggctccccaaaggagcaaagaatgcagggagggcggtccaggcccctgggaaggggagctcggcaccctccaggtccgtgtgggactccagccgctgttggctgggaatcgaagttagaggtgacttccaaaggccccccgagccggcagtgccccccaccacccctccagcgactctgcggtgccagtgccttgttggcttttccggctacgcaccctgcagtcactgagctctcggtctgacgtctgatgtttgtggtttgtttataacacggggccttacctggggaattcagctggtttgaatatttgtagcccgctcccagaatgtcttattttgtaatgactgaactacatttagtaatagttacacatgtatatggttaaaaaaaaaacatttgcggccg

SEQ ID NO: 346679 - DNA, 1568 bp, Homo sapiens
gcgcgggcaacggggagcgctcggcggcgcgggaggcgctcggggccgggcggcaggagcggcgcgcgaggcaggcgtgcagagggcagccccgcgttaggccccgccccgcgcgccccgcccgcgccagggtcctcggagctgctctggctgcgcgcggagcgggctccggagggaagtcccgagacaaagggaagcgccgccgccgccgccccgctcggtcctccacctgtccgctacgctcgccggggctgcggccgcccgaggctgccctgaggatctgtgtttggtgaaaaggagccaaattcacctgcagggcaggcggctctagcagcttcagaagcctggtgccctggcgacactggacctgccttggcttctttgatcccaaccccacccccgatttctgctctgctgactggggaagtcatcgtgccacccagaacctgagtgcgggcctctcagagctccttcgtccgtgggtctgccggggactgggccttgtctccctaacgagtgccagggactttgaacatgtcggggatcgccctcagcagactcgcccaggagaggaaagcatggaggaaagaccacccatttggtttcgtggctgtcccaacaaaaaatcccgatggcacgatgaacctcatgaactgggagtgcgccattccaggaaagaaagggactccgtgggaaggaggcttgtttaaactacggatgcttttcaaagatgattatccatcttcgccaccaaaatgtaaattcgaaccaccattatttcacccgaatgtgtacccttcggggacagtgtgcctgtccatcttagaggaggacaaggactggaggccagccatcacaatcaaacagatcctattaggaatacaggaacttctaaatgaaccaaatatccaagacccagctcaagcagaggcctacacgatttactgccaaaacagagtggagtacgagaaaagggtccgagcacaagccaagaagtttgcgccctcataagcagcgaccttgtggcatcgtcagaaggaagggattggtttggcaagaacttgtttacaacatttttgcaaatctaaagttgctccatacaatgactagtcacctgggggggttgggcgggcgccatcttccattgccgccgcgggtgtgcggtctcgattcgctgaattgcccgtttccatacagggtctcttccttcggtcttttgtatttttgattgttatgtaaaactcgcttttattttaatattgatgtcagtatttcaactgctgtaaaattataaacttttatacttgggtaagtcccccaggggcgagttcctcgctctgggatgcaggcatgcttctcaccgtgcagagctgcacttggcctcagctggctgtatggaaatgcaccctccctcctgccgctcctctctagaaccttctagaacctgggctgtgctgcttttgagcctcagaccccagggcagcatctcggttctgcgccacttcctttgtgtttatatggcgttttgtctgtgttgctgtttagagtaaataaactgtttatataaa

SEQ ID NO: 346680 - DNA, 1303 bp, Homo sapiens
gagcgtcaccgtcctgcgacgcttcagaggatccttaggcctcagtggtctttggcccccggccccaggacctgaccccaaggaaacctccgggacctgtggctggagaggtgaccgccaggcatccggggagcctttggagatctcggcttcctttttcccccgctgcttgccggcgtgtcctcgggtggacgcgggcagcccgaaggggagtttacagacgctccctcacatcggggacgcggctcctttaagggcggactttgaacatgtcggggatcgccctcagcagactcgcccaggagaggaaagcatggaggaaagaccacccatttggtttcgtggctgtcccaacaaaaaatcccgatggcacgatgaacctcatgaactgggagtgcgccattccaggaaagaaagggactccgtgggaaggaggcttgtttaaactacggatgcttttcaaagatgattatccatcttcgccaccaaaatgtaaattcgaaccaccattatttcacccgaatgtgtacccttcggggacagtgtgcctgtccatcttagaggaggacaaggactggaggccagccatcacaatcaaacagatcctattaggaatacaggaacttctaaatgaaccaaatatccaagacccagctcaagcagaggcctacacgatttactgccaaaacagagtggagtacgagaaaagggtccgagcacaagccaagaagtttgcgccctcataagcagcgaccttgtggcatcgtcagaaggaagggattggtttggcaagaacttgtttacaacatttttgcaaatctaaagttgctccatacaatgactagtcacctgggggggttgggcgggcgccatcttccattgccgccgcgggtgtgcggtctcgattcgctgaattgcccgtttccatacagggtctcttccttcggtcttttgtatttttgattgttatgtaaaactcgcttttattttaatattgatgtcagtatttcaactgctgtaaaattataaacttttatacttgggtaagtcccccaggggcgagttcctcgctctgggatgcaggcatgcttctcaccgtgcagagctgcacttggcctcagctggctgtatggaaatgcaccctccctcctgccgctcctctctagaaccttctagaacctgggctgtgctgcttttgagcctcagaccccagggcagcatctcggttctgcgccacttcctttgtgtttatatggcgttttgtctgtgttgctgtttagagtaaataaactgtttatataaa

SEQ ID NO: 346681 - DNA, 1155 bp, Homo sapiens
gagcgtcaccgtcctgcgacgcttcagaggatccttaggcctcagtggtctttggcccccggccccaggacctgaccccaaggaaacctccgggacctgtggctggagagggactttgaacatgtcggggatcgccctcagcagactcgcccaggagaggaaagcatggaggaaagaccacccatttggtttcgtggctgtcccaacaaaaaatcccgatggcacgatgaacctcatgaactgggagtgcgccattccaggaaagaaagggactccgtgggaaggaggcttgtttaaactacggatgcttttcaaagatgattatccatcttcgccaccaaaatgtaaattcgaaccaccattatttcacccgaatgtgtacccttcggggacagtgtgcctgtccatcttagaggaggacaaggactggaggccagccatcacaatcaaacagatcctattaggaatacaggaacttctaaatgaaccaaatatccaagacccagctcaagcagaggcctacacgatttactgccaaaacagagtggagtacgagaaaagggtccgagcacaagccaagaagtttgcgccctcataagcagcgaccttgtggcatcgtcagaaggaagggattggtttggcaagaacttgtttacaacatttttgcaaatctaaagttgctccatacaatgactagtcacctgggggggttgggcgggcgccatcttccattgccgccgcgggtgtgcggtctcgattcgctgaattgcccgtttccatacagggtctcttccttcggtcttttgtatttttgattgttatgtaaaactcgcttttattttaatattgatgtcagtatttcaactgctgtaaaattataaacttttatacttgggtaagtcccccaggggcgagttcctcgctctgggatgcaggcatgcttctcaccgtgcagagctgcacttggcctcagctggctgtatggaaatgcaccctccctcctgccgctcctctctagaaccttctagaacctgggctgtgctgcttttgagcctcagaccccagggcagcatctcggttctgcgccacttcctttgtgtttatatggcgttttgtctgtgttgctgtttagagtaaataaactgtttatataaa

SEQ ID NO: 346682 - DNA, 1253 bp, Homo sapiens
gcgcgggcaacggggagcgctcggcggcgcgggaggcgctcggggccgggcggcaggagcggcgcgcgaggcaggcgtgcagagggcagccccgcgttaggccccgccccgcgcgccccgcccgcgccagggtcctcggagctgctctggctgcgcgcggagcgggctccggagggaagtcccgagacaaagggaagcgccgccgccgggactttgaacatgtcggggatcgccctcagcagactcgcccaggagaggaaagcatggaggaaagaccacccatttggtttcgtggctgtcccaacaaaaaatcccgatggcacgatgaacctcatgaactgggagtgcgccattccaggaaagaaagggactccgtgggaaggaggcttgtttaaactacggatgcttttcaaagatgattatccatcttcgccaccaaaatgtaaattcgaaccaccattatttcacccgaatgtgtacccttcggggacagtgtgcctgtccatcttagaggaggacaaggactggaggccagccatcacaatcaaacagatcctattaggaatacaggaacttctaaatgaaccaaatatccaagacccagctcaagcagaggcctacacgatttactgccaaaacagagtggagtacgagaaaagggtccgagcacaagccaagaagtttgcgccctcataagcagcgaccttgtggcatcgtcagaaggaagggattggtttggcaagaacttgtttacaacatttttgcaaatctaaagttgctccatacaatgactagtcacctgggggggttgggcgggcgccatcttccattgccgccgcgggtgtgcggtctcgattcgctgaattgcccgtttccatacagggtctcttccttcggtcttttgtatttttgattgttatgtaaaactcgcttttattttaatattgatgtcagtatttcaactgctgtaaaattataaacttttatacttgggtaagtcccccaggggcgagttcctcgctctgggatgcaggcatgcttctcaccgtgcagagctgcacttggcctcagctggctgtatggaaatgcaccctccctcctgccgctcctctctagaaccttctagaacctgggctgtgctgcttttgagcctcagaccccagggcagcatctcggttctgcgccacttcctttgtgtttatatggcgttttgtctgtgttgctgtttagagtaaataaactgtttatataaa

SEQ ID NO: 346683 - DNA, 1641 bp, Homo sapiens
atagctaggtacgagccggtgttaatcggacgaggcgagacaagggatggcgcgcgcgccgccccgctcggtcctccacctgtccgctacgctcgccggggctgcggccgcccgaggtgagcgcgtgcgggggccgggccggggccgcggggcgggggtcgggccgaggcctctactcctgttgggcccgggcccccgactgccccgcgccccgccccgccgagccgggccccgcgccgcggccgagctttccggggagcccgagaggccccgcgctcggcgccggctcggtccgcgctgctggcgccgctgggctgcggcccgagcggccgggccgccgcaggccttcggggccggggctcccccacttcgcccccgaggtgcgcctggcgcggggccggggcagccacctgcagccggggccccgcgaggccgcgccttcctcctgcgcggggagcggcttccggggtcacggtcgccccgcggacggataggatgggccgcggggggagagtcttggattgcaacatcgctggctcgcgggggtgggggccggcgagcgggcttgttttcggtgccttaaaaccaaaacaagtggactttgaacatgtcggggatcgccctcagcagactcgcccaggagaggaaagcatggaggaaagaccacccatttggtttcgtggctgtcccaacaaaaaatcccgatggcacgatgaacctcatgaactgggagtgcgccattccaggaaagaaagggactccgtgggaaggaggcttgtttaaactacggatgcttttcaaagatgattatccatcttcgccaccaaaatgtaaattcgaaccaccattatttcacccgaatgtgtacccttcggggacagtgtgcctgtccatcttagaggaggacaaggactggaggccagccatcacaatcaaacagatcctattaggaatacaggaacttctaaatgaaccaaatatccaagacccagctcaagcagaggcctacacgatttactgccaaaacagagtggagtacgagaaaagggtccgagcacaagccaagaagtttgcgccctcataagcagcgaccttgtggcatcgtcagaaggaagggattggtttggcaagaacttgtttacaacatttttgcaaatctaaagttgctccatacaatgactagtcacctgggggggttgggcgggcgccatcttccattgccgccgcgggtgtgcggtctcgattcgctgaattgcccgtttccatacagggtctcttccttcggtcttttgtatttttgattgttatgtaaaactcgcttttattttaatattgatgtcagtatttcaactgctgtaaaattataaacttttatacttgggtaagtcccccaggggcgagttcctcgctctgggatgcaggcatgcttctcaccgtgcagagctgcacttggcctcagctggctgtatggaaatgcaccctccctcctgccgctcctctctagaaccttctagaacctgggctgtgctgcttttgagcctcagaccccagggcagcatctcggttctgcgccacttcctttgtgtttatatggcgttttgtctgtgttgctgtttagagtaaataaactgtttatataaa

SEQ ID NO: 346684 - DNA, 1078 bp, Homo sapiens
ggcacgaggccgtgctctgcctcctgtgttccaggactttgaacatgtcggggatcgccctcagcagactcgcccaggagaggaaagcatggaggaaagaccacccatttggtttcgtggctgtcccaacaaaaaatcccgatggcacgatgaacctcatgaactgggagtgcgccattccaggaaagaaagggactccgtgggaaggaggcttgtttaaactacggatgcttttcaaagatgattatccatcttcgccaccaaaatgtaaattcgaaccaccattatttcacccgaatgtgtacccttcggggacagtgtgcctgtccatcttagaggaggacaaggactggaggccagccatcacaatcaaacagatcctattaggaatacaggaacttctaaatgaaccaaatatccaagacccagctcaagcagaggcctacacgatttactgccaaaacagagtggagtacgagaaaagggtccgagcacaagccaagaagtttgcgccctcataagcagcgaccttgtggcatcgtcagaaggaagggattggtttggcaagaacttgtttacaacatttttgcaaatctaaagttgctccatacaatgactagtcacctgggggggttgggcgggcgccatcttccattgccgccgcgggtgtgcggtctcgattcgctgaattgcccgtttccatacagggtctcttccttcggtcttttgtatttttgattgttatgtaaaactcgcttttattttaatattgatgtcagtatttcaactgctgtaaaattataaacttttatacttgggtaagtcccccaggggcgagttcctcgctctgggatgcaggcatgcttctcaccgtgcagagctgcacttggcctcagctggctgtatggaaatgcaccctccctcctgccgctcctctctagaaccttctagaacctgggctgtgctgcttttgagcctcagaccccagggcagcatctcggttctgcgccacttcctttgtgtttatatggcgttttgtctgtgttgctgtttagagtaaataaactgtttatataaa

SEQ ID NO: 346685 - DNA, 1234 bp, Homo sapiens
gcgcgggcaacggggagcgctcggcggcgcgggaggcgctcggggccgggcggcaggagcggcgcgcgaggcaggcgtgcagagggcagccccgcgttaggccccgccccgcgcgccccgcccgcgccagggtcctcggagctgctctggctgcgcgcggagcgggctccggagggaagtcccgagacaaagggaagcgccgccgccgccgccccgctcggtcctccacctgtccgctacgctcgccggggctgcggccgcccgagggtttcgtggctgtcccaacaaaaaatcccgatggcacgatgaacctcatgaactgggagtgcgccattccaggaaagaaagggactccgtgggaaggaggcttgtttaaactacggatgcttttcaaagatgattatccatcttcgccaccaaaatgtaaattcgaaccaccattatttcacccgaatgtgtacccttcggggacagtgtgcctgtccatcttagaggaggacaaggactggaggccagccatcacaatcaaacagatcctattaggaatacaggaacttctaaatgaaccaaatatccaagacccagctcaagcagaggcctacacgatttactgccaaaacagagtggagtacgagaaaagggtccgagcacaagccaagaagtttgcgccctcataagcagcgaccttgtggcatcgtcagaaggaagggattggtttggcaagaacttgtttacaacatttttgcaaatctaaagttgctccatacaatgactagtcacctgggggggttgggcgggcgccatcttccattgccgccgcgggtgtgcggtctcgattcgctgaattgcccgtttccatacagggtctcttccttcggtcttttgtatttttgattgttatgtaaaactcgcttttattttaatattgatgtcagtatttcaactgctgtaaaattataaacttttatacttgggtaagtcccccaggggcgagttcctcgctctgggatgcaggcatgcttctcaccgtgcagagctgcacttggcctcagctggctgtatggaaatgcaccctccctcctgccgctcctctctagaaccttctagaacctgggctgtgctgcttttgagcctcagaccccagggcagcatctcggttctgcgccacttcctttgtgtttatatggcgttttgtctgtgttgctgtttagagtaaataaactgtttatataaa

SEQ ID NO: 346686 - DNA, 2293 bp, Homo sapiens
  misc_feature (1913)..(1914): n is a, c, g, or t
  misc_feature (2141)..(2141): n is a, c, g, or t
ggcacgaggccgtgctctgcctcctgtgttccaggactttgaacatgtcggggatcgccctcagcagactcgcccaggagaggaaagcatggaggaaagaccacccatttggtttcgtggctgtcccaacaaaaaatcccgatggcacgatgaacctcatgaactgggagtgcgccattccaggaaagaaagggactccgtgggaaggaggcttgtttaaactacggatgcttttcaaagatgattatccatcttcgccaccaaaatgtaaattcgaaccaccattatttcacccgaatgtgtacccttcggggacagtgtgcctgtccatcttagaggaggacaaggactggaggccagccatcacaatcaaacagatcctattaggaatacaggaacttctaaatgaaccaaatatccaagacccagctcaagcagaggcctacacgatttactggttagtagcagccctggccccgctggtggcagctcctccccgtcccagccaaggccgcctggcaggacgggagtggagcacacaggctcaccctagggacagccagggtccgcgcctctgtggggaaggtcggggggcataaaccctgtgggcagcaggcaccgttgcacaccgtctgcggtgggcatggatggcgccggagccgtgtccaggggagggagcaggccaggtgacaggggctgtcttgggccactgccccagtgagttgtggccagctaggaggggaaggaccctgggcgtgggtgccagaggaggccatgctgagaggcctctccaccggctcagcctcccgtggaccccagcctcccgcgccgcccttgctgcttgtccccatcccctctacaacttggttccttctgtgggggggcccagcccagcagggctcagtgacgtgatgctgtcacacggaccctgggcttccaccctgtccctgtgaggtgctgctgtggctagaagggtccccgtgggcctggggtcctgtctgcaccgaggagggcctggtgtgagttaggatgcagacgacagccaaacagtgctggggaaagcagggaggaccctgccctgagcagaggccatgcgcccgcctgtcctgttccctctgcagctgttctgggcaggtccataagaaggtgggttggggcctccgacccccactgctccgcctgcagggttgagaaacccagccccatctcaccacgggtccccacacctctgaggaggtctcagggcccccaatggccagggacccagaaggctcacctgcagccaccccacacatccctgccactgtgggcatcagaggccctctccctccagggtgcatctcctggtcaggaggggggaggcccggttgccttaggcccggcctgcacaggtcgtgaggaaaagcacctggtttcggccgggcgcggtggctcacgcttgtaatcccagcactttgggaggccgaggtgggcgaatcatgcggtcaggagttcgagaccagcctggccaacatggcgaaaccctcgtccctactaaaaatacaaaaaattagttgggcgtagtggtgggtgcctctaatcccagctacctgggaggctgagacaggagaatcacttgaacccgggaggcggaggttgcagtgagccgagatcctgccactgctctccagcctggcgacggaggaatgctgtctcaaaaaaaaaaaaagcacgtggttttggagagatgtgtttctccctggatgcgggcccagcccaggtgtctgcaaggtgccctccctggtggccgagggtggcacagaggccccaggcagggagcaagtatcacagcagccaccccaggctcagcctcccaagtagctgggattacaggcacccaccaccacacctgactaatttttgtatttttagtnnagacagtgtttcaccacgttggccaggctggtctcgaacttctgacctcaggtgatccacccgcctcgcctcccaaagtgccgggattataggcatgagccaccgtgcctggaaaatgatttctaggccaagtgtggtggcccaacacctgtaatctcaacactttgggaggccaaggtgggctgattgcttgaactcaggagttcatgactagactgggcaacatngcgagaccctatctctacaaaaaattaaaaaatgtgccaggggtggtggctcatgcctgtaatcccagcactttgcaaggccactgtgggacgttacctgagcccaggagttggagaccagcctgggccacatggcaagacctgctctcttt

SEQ ID NO: 346687 - DNA, 1635 bp, Homo sapiens
ggatgggaagcgagcatggtgagtcctcaagtcgcagctgggcctgccacgtgggagtggagggtggaggaacgtgtggagtttcggagtccagcccagtgcgagacagccttgaaaccgtggttggcgggcgctccactccgctctgggctcgaaccctgcctgaccctagctgtgccccccactttctccctgtctggcccctggctccccgccccctcacttagaggagggcacggggaagggcaaacggtccagagggcgggcggcctgcgggctcctctgcatcatgtgaggagggcgtggggaaggacatcctggtggggcccgatctggggctgcctccagcccgggcctgcctgtcttggacttagtcgtggacctggaggccagtgcccggctggcccctgtcaccctctcgctgtgacgccagcgcctgctgactggaggacccaggttccttcgcctgctttttctcaggctgccctgaggatctgtgtttggtgaaaaggagccaaattcacctgcagggcaggcggctctagcagcttcagaagcctggtgccctggcgacactggacctgccttggcttctttgatcccaaccccacccccgatttctgctctgctgactggggaagtcatcgtgccacccagaacctgagtgcgggcctctcagagctccttcgtccgtgggtctgccggggactgggccttgtctccctaacgagtgccaggtgaggctgcggcggctccgacgcaggtggagctgctgacctggcccctttctgcggctgcgaggtgtgtgaggttcgtgggcctccacaggtgtgggagccatccaggtccccagggcccttgtggctattctaggacagcccaagccgtagtagggacggccccccacagcttagaagacctggctcagtcccccagctttgtagaggtggcccttgtttggtgttgagatatcagacttgggggtagtagcttcagtgttcccatggactttgaaaaccagcacacacttaggtttgaattcttgggcaagttttgtatcttgagcgctgtttttcgtgggtaaaggtggccaccagtagggtgacagttgagggtggcattgaggctgctggccctgtctgcctggtgtccccagtgacagtgctggccgacaggctcccgccgagaacgcaaaggcgaaggtgccaagcccccgaggtcccgtgcagatgtgtggagctggaatctggcgtgtgtgccgctgcctctgatcagggacctggtcccctaccccatgctcctgccctgccctgcaggacccgtctgtcccctgaagccacagggacgtggtagtggctgcacggtctgggaagggtgtccccgtggagggctcctctctcagtgaggctgagcctctgccctgtggtacttgttctgctctgtcttcaacatggtgaaaccctatctctactaaaaatacaaaaattagctgggcgtggtggcacacgcctgtagtctcagctactcgggaggctgaggcaggagaattgcttgaactcaggaggcggaggttgcagtgagccgagatcgtgccactgcattccagcctgagcaatagaatgagactctgtctca

SEQ ID NO: 346688 - DNA, 480 bp, Homo sapiens
cttggaggtgaaactcttgaagggtttttatttagaaatcagattgtcagcatgtggtggcatcttcttaaacttagataacgggtccagagttgcctggctagttagtgtcaggttcattagactagatgcatctctcctggcttgccagagtctctaggtgtggttgtacattctgaatgcactgttttgagtattcagcacctgttgtgcatgtgtctctgcagcaagcgatccccctccaagaccatcccaggcctccccagacactgccacgtccactgcaagtccagctgtgactccagctgcagatgcctctgaccaagaccagcccacagtaactaataacccggagccacgtgggtgaactgtgcactccagttctctccagatgagagagaatcttttcaacagctggtattgggaagctggggccagggcatgatcctgataaacaccttaaatgtcttgtcaactgga

SEQ ID NO: 346689 - DNA, 426 bp, Homo sapiens
ctgtattgcgtcatgagctgatctagaggataccgaagatgcacgatggcgcgtcccccagggcctcggcggccgctctgcctgcgcgctgctcctgctctgctacctgaatgttgtaccatctttgggtaggcagacttccctgacgacatcagtgatacccaaagctgagcagagcgtggcttacaaagactttatttattttactgtctttgaaggaaacgttcgcaacgtttctgaagtctcggttgagtatttatgctctcagccttgtgttgtcaatttggaagcagttgtttcatctgagttcagaagtagcattcccgtgtacaaaaaaaggtggaagaatgagaaacatcttcacaccagcaggacacaaatagtacatgtgaagatgatcccaacacctccggaccggtacagccc

SEQ ID NO: 346690 - DNA, 486 bp, Homo sapiens
atgcaacagagactatatgtggcccacaaagcttaagatatttactatcctgctctttacagaaaaagtttgtcgacctctgttttaggccaccctcacactgataccctggctctccaaaagattgttcttcataacacatttgggttcaaattcaacctgacctgaccttggtgataaacttgacttagactgacttgaagttttttatcattgttatttagtatatttgacatgaatattcatgttttgtggattttctgttatcctcttgttaatgatttctagcttaatttcactgtgatcagagaatatattctgaatgattccaatcctttgaaatttgtcaaagtgtgctttatgattggtatatggtcaattttggtatatgttttatggctttttgaaaagagtgcactttctgaacttgctggatcaacatctacatatatatcagttacatcaagtttgttaattacattattc

SEQ ID NO: 346691 - DNA, 4362 bp, Homo sapiens
cagtggtggcggtggcggcggcaccacacaaaaccctcgggaaacatccagaacgtgccgcgaaccagccggcagggtggggcgcagcccggctgcaaacatgccagcaaggaggcagtcccaaccccgcagaatgttgtaccatctttgggtaggcagacttccctgacgacatcagtgatacccaaagctgagcagagcgtggcttacaaagactttatttattttactgtctttgaaggaaacgttcgcaacgtttctgaagtctcggttgagtatttatgctctcagccttgtgttgtcaatttggaagcagttgtttcatctgagttcagaagtagcattcccgtgtacaaaaaaaggtggaagaatgagaaacatcttcacaccagcaggacacaaatagtacatgtgaaatttccaagcattatggtttacagagatgattatttcatcagacattccatctctgtatctgcagtgatagtacgcgcctggattactcacaaatacagtggcagagactggaatgttaaatgggaggaaaacttgctccatgctgtagcaaagaattataccctcctgcagaccatcccgccttttgaacgccctttcaaagatcatcaagtgtgccttgagtggaacatgggttatatttggaaccttcgggcaaacaggattccacagtgtcctctggaaaatgatgtggttgccctgcttggctttccttatgcctccagtggagaaaacacaggcattgtcaagaagttcccgaggtttcggaaccgagagctggaggccactcgacgccagaggatggattacccagtgtttactgtttcattgtggctttatttactccattattgcaaggccaacctctgtgggattctgtactttgttgactctaatgagatgtacggcacaccttctgtatttcttacggaagagggctatttgcatattcagatgcatcttgtcaaaggggaagaccttgctgtaaaaactaaattcatcatacctttgaaggagtggtttcgactggatatctcttttaacggaggccagatagtagtaaccactagcattggacaggatttgaaaagctaccacaatcagaccattagcttccgggaggatttccattataatgacacagctgggtacttcattattggagggagcaggtatgtggctggcattgaagggttttttggacccctgaagtactatcgccttcgcagtctgcaccccgcccagatttttaatcccctccttgagaagcaacttgctgaacaaatcaagttatattatgaaaggtgtgctgaggttcaagaaatagtatctgtgtatgcatctgcagcaaagcacgggggcgagagacaagaagcatgccacctccacaactcctacctggacctccagcgcaggtatgggagaccctcgatgtgcagagccttcccctgggagaaggagctgaaagacaaacaccccagcttgttccaggcattgctggagatggatctgctgaccgtgccaaggaaccaaaatgaatctgtatcagaaatcggtgggaagatatttgagaaggctgtaaagagactctctagcattgatggtcttcaccaaattagctctatcgtcccctttctgacggattccagctgctgtggataccataaagcatcctactaccttgcagtcttttatgagactggattaaatgttcctcgggatcagctgcagggcatgttgtatagtttggttggaggccaggggagtgagaggctgtcttcaatgaatcttgggtataaacactaccagggtattgacaactaccccctggactgggaactgtcgtatgcctactacagcaacattgccaccaagacaccccttgaccagcacacactgcaaggagatcaggcatatgttgaaacaattagactaaaagatgatgaaatactcaaggtacaaaccaaagaagatggagatgtctttatgtggttgaagcatgaagctacccgaggcaatgcagcagctcagcaacgattggcccagatgctgttctgggggcagcaaggtgtggccaagaatcccgaagcagcaattgagtggtacgccaagggcgccctggagacggaggatcctgcgttaatctatgactatgccattgtgctattcaagggtcaaggagtaaaaaagaacagacggcttgccttagagctgatgaagaaagcagcttccaagggattgcatcaggcagtcaatggcctgggatggtattaccacaaattcaagaaaaattacgccaaagcagcaaagtactggttaaaagcagaagaaatggggaacccagatgcgtcatacaatcttggagtcctgcatttggatggcatcttccctggagttcctggaaggaatcaaactttagctggtgaatatttccataaggctgcgcaaggtggacacatggaagggaccttgtggtgttctctctactatatcacaggcaacctggagacattccctagagatcctgagaaagctgttgtatgggcaaaacatgtagctgagaaaaatggctacttgggccatgtcatccgcaaaggcctcaatgcctacctggaaggttcatggcatgaagctttgctgtattatgttttagcagcagaaactggaattgaagtgtcacagacaaatttagcacacatctgtgaggagaggccagacctggccaggagatacttgggtgttaactgtgtttggagatactataatttctctgtttttcaaatcgatgctccttcctttgcatatttgaagatgggagacctttactactatggccaccaaaaccagtcacaagacctggagttgtctgtgcagatgtacgcccaagccgccctggatggagactcccagggattttttaacctggccctgctaatcgaggaaggtacgataatcccacaccatatcttggatttcttggaaattgactcaactctccattctaataacatctccattctccaggaactgtacgaaaggtgctggagccacagtaacgaggagtccttcagcccctgctccttggcctggctttacctgcacttgcggcttctctggggtgctatcctgcactcagccctgatctactttctgggaacctttctgctatccatattgatcgcctggactgtgcagtatttccagtctgtctcagcaagcgatccccctccaagaccatcccaggcctccccagacactgccacgtccactgcaagtccagctgtgactccagctgcagatgcctctgaccaagaccagcccacagtaactaataacccggagccacgtgggtgaactgtgcactccagttctctccagatgagagagaatcttttcaacagctggtattgggaagctggggccagggcatgatcctgataaacaccttaaatgtcttgtcaactggatgcaaattttgcaattggtgtcattttttttaaagtcaaattacaaggaagtacccagatcaggcagtggtaataccaaaggtcatcaaacacatacaaggaacatcttgatcatagggcatgtggggaagtttactgggccatcacagacttttgttctagtgattgtatgtattaggagtcatagcatgccctacggcagatctggattcttatacactaagatgtgtcttaagaatcacagtgcgtgcttcatccctttattgaagaacagaaaattatgactactctacaaggtggataatattttggtacctgtgcttgccacagccctgttcctcaaagctgaattgatagatttctctttgacttccaagacctagcagttataaggcaccttgaaataaattgtttgtgcctggaaatgcagggagggcaatagctttgtaaattggtttacatttttctccttgaatttttctagggtcctagtgcttccgaatcatttaatggcattgtcggatatcttttacatttcaattgcaatccatgaaattacatttagaagattcttagtacttaactgtagtcttctccatgaattacacgttagaatagactggcagcaactgaatatgcagcaagtaagcctctagcttatagtttcatccctacccctcatgcctgcgtgagtctgtacagggatatgtgtgtgtgtgtgtgtgtgtgtgtgttagagaggaagaggaagagcagaatgtctgtatactacatgctgctaaggtagtgaataaatcagtaatgcaatattgtgggtccaaactactctttgcactactttatttacagtagtaaataaaattatttttatacaattgac

SEQ ID NO: 346692 - DNA, 2692 bp, Homo sapiens
cgagctgcaggtaactcaggggcgagctgcaggtaactcaggggcgagctgcaggtaactcaggggcgagctgcagggcatgttgtatagtttggttggaggccaggggagtgagaggctgtcttcaatgaatcttgggtataaacactaccagggtattgacaactaccccctggactgggaactgtcgtatgcctactacagcaacattgccaccaagacaccccttgaccagcacacactgcaaggagatcaggcatatgttgaaacaattagactaaaagatgatgaaatactcaaggtacaaaccaaagaagatggagatgtctttatgtggttgaagcatgaagctacccgaggcaatgcagcagctcagcaacgattggcccagatgctgttctgggggcagcaaggtgtggccaagaatcccgaagcagcaattgagtggtacgccaagggcgccctggagacggaggatcctgcgttaatctatgactatgccattgtgctattcaagggtcaaggagtaaaaaagaacagacggcttgccttagagctgatgaagaaagcagcttccaagggattgcatcaggcagtcaatggcctgggatggtattaccacaaattcaagaaaaattacgccaaagcagcaaagtactggttaaaagcagaagaaatggggaacccagatgcgtcatacaatcttggagtcctgcatttggatggcatcttccctggagttcctggaaggaatcaaactttagctggtgaatatttccataaggctgcgcaaggtggacacatggaagggaccttgtggtgttctctctactatatcacaggcaacctggagacattccctagagatcctgagaaagctgttgtatgggcaaaacatgtagctgagaaaaatggctacttgggccatgtcatccgcaaaggcctcaatgcctacctggaaggttcatggcatgaagctttgctgtattatgttttagcagcagaaactggaattgaagtgtcacagacaaatttagcacacatctgtgaggagaggccagacctggccaggagatacttgggtgttaactgtgtttggagatactataatttctctgtttttcaaatcgatgctccttcctttgcatatttgaagatgggagacctttactactatggccaccaaaaccagtcacaagacctggagttgtctgtgcagatgtacgcccaagccgccctggatggagactcccagggattttttaacctggccctgctaatcgaggaaggtacgataatcccacaccatatcttggatttcttggaaattgactcaactctccattctaataacatctccattctccaggaactgtacgaaaggtgctggagccacagtaacgaggagtccttcagcccctgctccttggcctggctttacctgcacttgcggcttctctggggtgctatcctgcactcagccctgatctactttctgggaacctttctgctatccatattgatcgcctggactgtgcagtatttccagtctgtctcagcaagcgatccccctccaagaccatcccaggcctccccagacactgccacgtccactgcaagtccagctgtgactccagctgcagatgcctctgaccaagaccagcccacagtaactaataacccggagccacgtgggtgaactgtgcactccagttctctccagatgagagagaatcttttcaacagctggtattgggaagctggggccagggcatgatcctgataaacaccttaaatgtcttgtcaactggatgcaaattttgcaattggtgtcattttttttaaagtcaaattacaaggaagtacccagatcaggcagtggtaataccaaaggtcatcaaacacatacaaggaacatcttgatcatagggcatgtggggaagtttactgggccatcacagacttttgttctagtgattgtatgtattaggagtcatagcatgccctacggcagatctggattcttatacactaagatgtgtcttaagaatcacagtgcgtgcttcatccctttattgaagaacagaaaattatgactactctacaaggtggataatattttggtacctgtgcttgccacagccctgttcctcaaagctgaattgatagatttctctttgacttccaagacctagcagttataaggcaccttgaaataaattgtttgtgcctggaaatgcagggagggcaatagctttgtaaattggtttacatttttctccttgaatttttctagggtcctagtgcttccgaatcatttaatggcattgtcggatatcttttacatttcaattgcaatccatgaaattacatttagaagattcttagtacttaactgtagtcttctccatgaattacacgttagaatagactggcagcaactgaatatgcagcaagtaagcctctagcttatagtttcatccctacccctcatgcctgcgtgagtctgtacagggatatgtgtgtgtgtgtgtgtgtgtgtgtgttagagaggaagaggaagagcagaatgtctgtatactacatgctgctaaggtagtgaataaatcagtaatgcaatattgtgggtccaaactactctttgcactactttatttacagtagtaaataaaattatttttatacaattgac

SEQ ID NO: 346693 - DNA, 2423 bp, Homo sapiens
atacggctagtacgagcctgggtgttgaatcggccgaggacaaagaagatggagatgtctttatgtggttgaagcatgaagctacccgaggcaatgcagcagctcagcaacgattggcccagatgctgttctgggggcagcaaggtgtggccaagaatcccgaagcagcaattgagtggtacgccaagggcgccctggagacggaggatcctgcgttaatctatgactatgccattgtgctattcaagggtcaaggagtaaaaaagaacagacggcttgccttagagctgatgaagaaagcagcttccaagggattgcatcaggcagtcaatggcctgggatggtattaccacaaattcaagaaaaattacgccaaagcagcaaagtactggttaaaagcagaagaaatggggaacccagatgcgtcatacaatcttggagtcctgcatttggatggcatcttccctggagttcctggaaggaatcaaactttagctggtgaatatttccataaggctgcgcaaggtggacacatggaagggaccttgtggtgttctctctactatatcacaggcaacctggagacattccctagagatcctgagaaagctgttgtatgggcaaaacatgtagctgagaaaaatggctacttgggccatgtcatccgcaaaggcctcaatgcctacctggaaggttcatggcatgaagctttgctgtattatgttttagcagcagaaactggaattgaagtgtcacagacaaatttagcacacatctgtgaggagaggccagacctggccaggagatacttgggtgttaactgtgtttggagatactataatttctctgtttttcaaatcgatgctccttcctttgcatatttgaagatgggagacctttactactatggccaccaaaaccagtcacaagacctggagttgtctgtgcagatgtacgcccaagccgccctggatggagactcccagggattttttaacctggccctgctaatcgaggaaggtacgataatcccacaccatatcttggatttcttggaaattgactcaactctccattctaataacatctccattctccaggaactgtacgaaaggtgctggagccacagtaacgaggagtccttcagcccctgctccttggcctggctttacctgcacttgcggcttctctggggtgctatcctgcactcagccctgatctactttctgggaacctttctgctatccatattgatcgcctggactgtgcagtatttccagtctgtctcagcaagcgatccccctccaagaccatcccaggcctccccagacactgccacgtccactgcaagtccagctgtgactccagctgcagatgcctctgaccaagaccagcccacagtaactaataacccggagccacgtgggtgaactgtgcactccagttctctccagatgagagagaatcttttcaacagctggtattgggaagctggggccagggcatgatcctgataaacaccttaaatgtcttgtcaactggatgcaaattttgcaattggtgtcattttttttaaagtcaaattacaaggaagtacccagatcaggcagtggtaataccaaaggtcatcaaacacatacaaggaacatcttgatcatagggcatgtggggaagtttactgggccatcacagacttttgttctagtgattgtatgtattaggagtcatagcatgccctacggcagatctggattcttatacactaagatgtgtcttaagaatcacagtgcgtgcttcatccctttattgaagaacagaaaattatgactactctacaaggtggataatattttggtacctgtgcttgccacagccctgttcctcaaagctgaattgatagatttctctttgacttccaagacctagcagttataaggcaccttgaaataaattgtttgtgcctggaaatgcagggagggcaatagctttgtaaattggtttacatttttctccttgaatttttctagggtcctagtgcttccgaatcatttaatggcattgtcggatatcttttacatttcaattgcaatccatgaaattacatttagaagattcttagtacttaactgtagtcttctccatgaattacacgttagaatagactggcagcaactgaatatgcagcaagtaagcctctagcttatagtttcatccctacccctcatgcctgcgtgagtctgtacagggatatgtgtgtgtgtgtgtgtgtgtgtgtgttagagaggaagaggaagagcagaatgtctgtatactacatgctgctaaggtagtgaataaatcagtaatgcaatattgtgggtccaaactactctttgcactactttatttacagtagtaaataaaattatttttatacaattgac

SEQ ID NO: 346694 - DNA, 4517 bp, Homo sapiens
ctgtattgcgtcatgagctgatctagaggataccgaagatgcacgatggcgcgtcccccagggcctcggcggccgctctgcctgcgcgctgctcctgctctgctacctgaatgttgtaccatctttgggtaggcagacttccctgacgacatcagtgatacccaaagctgagcagagcgtggcttacaaagactttatttattttactgtctttgaaggaaacgttcgcaacgtttctgaagtctcggttgagtatttatgctctcagccttgtgttgtcaatttggaagcagttgtttcatctgagttcagaagtagcattcccgtgtacaaaaaaaggtggaagaatgagaaacatcttcacaccagcaggacacaaatagtacatgtgaaatttccaagcattatggtttacagagatgattatttcatcagacattccatctctgtatctgcagtgatagtacgcgcctggattactcacaaatacagtggcagagactggaatgttaaatgggaggaaaacttgctccatgctgtagcaaagaattataccctcctgcagaccatcccgccttttgaacgccctttcaaagatcatcaagtgtgccttgagtggaacatgggttatatttggaaccttcgggcaaacaggattccacagtgtcctctggaaaatgatgtggttgccctgcttggctttccttatgcctccagtggagaaaacacaggcattgtcaagaagttcccgaggtttcggaaccgagagctggaggccactcgacgccagaggatggattacccagtgtttactgtttcattgtggctttatttactccattattgcaaggccaacctctgtgggattctgtactttgttgactctaatgagatgtacggcacaccttctgtatttcttacggaagagggctatttgcatattcagatgcatcttgtcaaaggggaagaccttgctgtaaaaactaaattcatcatacctttgaaggagtggtttcgactggatatctcttttaacggaggccagatagtagtaaccactagcattggacaggatttgaaaagctaccacaatcagaccattagcttccgggaggatttccattataatgacacagctgggtacttcattattggagggagcaggtatgtggctggcattgaagggttttttggacccctgaagtactatcgccttcgcagtctgcaccccgcccagatttttaatcccctccttgagaagcaacttgctgaacaaatcaagttatattatgaaaggtgtgctgaggttcaagaaatagtatctgtgtatgcatctgcagcaaagcacgggggcgagagacaagaagcatgccacctccacaactcctacctggacctccagcgcaggtatgggagaccctcgatgtgcagagccttcccctgggagaaggagctgaaagacaaacaccccagcttgttccaggcattgctggagatggatctgctgaccgtgccaaggaaccaaaatgaatctgtatcagaaatcggtgggaagatatttgagaaggctgtaaagagactctctagcattgatggtcttcaccaaattagctctatcgtcccctttctgacggattccagctgctgtggataccataaagcatcctactaccttgcagtcttttatgagactggattaaatgttcctcgggatcagctgcagggcatgttgtatagtttggttggaggccaggggagtgagaggctgtcttcaatgaatcttgggtataaacactaccagggtattgacaactaccccctggactgggaactgtcgtatgcctactacagcaacattgccaccaagacaccccttgaccagcacacactgcaaggagatcaggcatatgttgaaacaattagactaaaagatgatgaaatactcaaggtacaaaccaaagaagatggagatgtctttatgtggttgaagcatgaagctacccgaggcaatgcagcagctcagcaacgattggcccagatgctgttctgggggcagcaaggtgtggccaagaatcccgaagcagcaattgagtggtacgccaagggcgccctggagacggaggatcctgcgttaatctatgactatgccattgtgctattcaagggtcaaggagtaaaaaagaacagacggcttgccttagagctgatgaagaaagcagcttccaagggattgcatcaggcagtcaatggcctgggatggtattaccacaaattcaagaaaaattacgccaaagcagcaaagtactggttaaaagcagaagaaatggggaacccagatgcgtcatacaatcttggagtcctgcatttggatggcatcttccctggagttcctggaaggaatcaaactttagctggtgaatatttccataaggctgcgcaaggtggacacatggaagggaccttgtggtgttctctctactatatcacaggcaacctggagacattccctagagatcctgagaaagctgttgtatgggcaaaacatgtagctgagaaaaatggctacttgggccatgtcatccgcaaaggcctcaatgcctacctggaaggttcatggcatgaagctttgctgtattatgttttagcagcagaaactggaattgaagtgtcacagacaaatttagcacacatctgtgaggagaggccagacctggccaggagatacttgggtgttaactgtgtttggagatactataatttctctgtttttcaaatcgatgctccttcctttgcatatttgaagatgggagacctttactactatggccaccaaaaccagtcacaagacctggagttgtctgtgcagatgtacgcccaagccgccctggatggagactcccagggattttttaacctggccctgctaatcgaggaaggtacgataatcccacaccatatcttggatttcttggaaattgactcaactctccattctaataacatctccattctccaggaactgtacgaaaggtgctggagccacagtaacgaggagtccttcagcccctgctccttggcctggctttacctgcacttgcggcttctctggggtgctatcctgcactcagccctgatctactttctgggaacctttctgctatccatattgatcgcctggactgtgcagtatttccagtctgtctcagcaagcgatccccctccaagaccatcccaggcctccccagacactgccacgtccactgcaagtccagctgtgactccagctgcagatgcctctgaccaagaccagcccacagtaactaataacccggagccacgtgggtgaactgtgcactccagttctctccagatgagagagaatcttttcaacagctggtattgggaagctggggccagggcatgatcctgataaacaccttaaatgtcttgtcaactggatgcaaattttgcaattggtgtcattttttttaaagtcaaattacaaggaagtacccagatcaggcagtggtaataccaaaggtcatcaaacacatacaaggaacatcttgatcatagggcatgtggggaagtttactgggccatcacagacttttgttctagtgattgtatgtattaggagtcatagcatgccctacggcagatctggattcttatacactaagatgtgtcttaagaatcacagtgcgtgcttcatccctttattgaagaacagaaaattatgactactctacaaggtggataatattttggtacctgtgcttgccacagccctgttcctcaaagctgaattgatagatttctctttgacttccaagacctagcagttataaggcaccttgaaataaattgtttgtgcctggaaatgcagggagggcaatagctttgtaaattggtttacatttttctccttgaatttttctagggtcctagtgcttccgaatcatttaatggcattgtcggatatcttttacatttcaattgcaatccatgaaattacatttagaagattcttagtacttaactgtagtcttctccatgaattacacgttagaatagactggcagcaactgaatatgcagcaagtaagcctctagcttatagtttcatccctacccctcatgcctgcgtgagtctgtacagggatatgtgtgtgtgtgtgtgtgtgtgtgtgttagagaggaagaggaagagcagaatgtctgtatactacatgctgctaaggtagtgaataaatcagtaatgcaatattgtgggtccaaactactctttgcactactttatttacagtagtaaataaaattatttttatacaattgacaaaaaaaaaaggggggggatcttaaaatttcactgaggggcaaggttaagcgtaccagtttggtaaaagggcctataggagtgtttaaaaaggaggcggagtaaaggtgaggaaaagatggaatgggagaaccttgggggaaaggaacaagaataggaggaaaaaaggaggaaagtaa

SEQ ID NO: 346695 - DNA, 3109 bp, Homo sapiens
gctaagcgtttaaatagagtttgtagatgtgtttgttgcaaaaccctctcccatccaaatcacaggcgatcctgtcaactgttgtctgagtccaggaggaccccatgtggcacatggggattgggggtatcagtaattctgagtttggaagcagcagtggtttacagtcacctccacccccttgcctggcatctttgctttcagatctatgtcaagagatactcaaggacctccttccactctacccttgagcacaccatctccccagttgtcctccagacatttcagtgtgttccacagagtttctctcttatgacaagaaccccaaagcccatgtctctctgtagtggacaaaccacctcatctggaaaatcttgattttgctggaagaaccttgttagtttctgttagttacatctgaggcaaccaattctgctgccttctatcttctgtggagccagttcttgagctgattctgaagcaacaatgttccaccctggagatcccagccaaggctgatgaagcctgcaagcgacaacctggtaactcttgactgtccaacacagataaagtgctttttctggctggcaaattaggtaatcccaagaggaaagcatccaggatgaccaaactcatttaacctgattcatatcttcccccagtagtacctgtggattgacagggttgcaactgacacagcgattactgctaagctgcgaagttgaggtttgttgcttctgctccacaaatataagcaaaataataatgatgatgataatgaaatagcactacctatagaaatccctaagcttgggtttaaatgaagaaagttagggttttatttttaagtattttatatccaacactaaagtgtctgtatgtgtgcagtctggttgtattttctttgtaatcatcgctgtttatcaatgtttagggtcaaggagtaaaaaagaacagacggcttgccttagagctgatgaagaaagcagcttccaagggattgcatcaggcagtcaatggcctgggatggtattaccacaaattcaagaaaaattacgccaaagcagcaaagtactggttaaaagcagaagaaatggggaacccagatgcgtcatacaatcttggagtcctgcatttggatggcatcttccctggagttcctggaaggaatcaaactttagctggtgaatatttccataaggctgcgcaaggtggacacatggaagggaccttgtggtgttctctctactatatcacaggcaacctggagacattccctagagatcctgagaaagctgttgtatgggcaaaacatgtagctgagaaaaatggctacttgggccatgtcatccgcaaaggcctcaatgcctacctggaaggttcatggcatgaagctttgctgtattatgttttagcagcagaaactggaattgaagtgtcacagacaaatttagcacacatctgtgaggagaggccagacctggccaggagatacttgggtgttaactgtgtttggagatactataatttctctgtttttcaaatcgatgctccttcctttgcatatttgaagatgggagacctttactactatggccaccaaaaccagtcacaagacctggagttgtctgtgcagatgtacgcccaagccgccctggatggagactcccagggattttttaacctggccctgctaatcgaggaaggtacgataatcccacaccatatcttggatttcttggaaattgactcaactctccattctaataacatctccattctccaggaactgtacgaaaggtgctggagccacagtaacgaggagtccttcagcccctgctccttggcctggctttacctgcacttgcggcttctctggggtgctatcctgcactcagccctgatctactttctgggaacctttctgctatccatattgatcgcctggactgtgcagtatttccagtctgtctcagcaagcgatccccctccaagaccatcccaggcctccccagacactgccacgtccactgcaagtccagctgtgactccagctgcagatgcctctgaccaagaccagcccacagtaactaataacccggagccacgtgggtgaactgtgcactccagttctctccagatgagagagaatcttttcaacagctggtattgggaagctggggccagggcatgatcctgataaacaccttaaatgtcttgtcaactggatgcaaattttgcaattggtgtcattttttttaaagtcaaattacaaggaagtacccagatcaggcagtggtaataccaaaggtcatcaaacacatacaaggaacatcttgatcatagggcatgtggggaagtttactgggccatcacagacttttgttctagtgattgtatgtattaggagtcatagcatgccctacggcagatctggattcttatacactaagatgtgtcttaagaatcacagtgcgtgcttcatccctttattgaagaacagaaaattatgactactctacaaggtggataatattttggtacctgtgcttgccacagccctgttcctcaaagctgaattgatagatttctctttgacttccaagacctagcagttataaggcaccttgaaataaattgtttgtgcctggaaatgcagggagggcaatagctttgtaaattggtttacatttttctccttgaatttttctagggtcctagtgcttccgaatcatttaatggcattgtcggatatcttttacatttcaattgcaatccatgaaattacatttagaagattcttagtacttaactgtagtcttctccatgaattacacgttagaatagactggcagcaactgaatatgcagcaagtaagcctctagcttatagtttcatccctacccctcatgcctgcgtgagtctgtacagggatatgtgtgtgtgtgtgtgtgtgtgtgtgttagagaggaagaggaagagcagaatgtctgtatactacatgctgctaaggtagtgaataaatcagtaatgcaatattgtgggtccaaactactctttgcactactttatttacagtagtaaataaaattatttttatacaattgac

SEQ ID NO: 346696 - DNA, 3459 bp, Homo sapiens
ctgtattgcgtcatgagctgatctagaggataccgaagatgcacgatggcgcgtcccccagggcctcggcggccgctctgcctgcgcgctgctcctgctctgctacctgaatgttgtaccatctttgggtaggcagacttccctgacgacatcagtgatacccaaagctgagcagagcgtggcttacaaagactttatttattttactgtctttgaaggaaacgttcgcaacgtttctgaagtctcggttgagtatttatgctctcagccttgtgttgtcaatttggaagcagttgtttcatctgagttcagaagtagcattcccgtgtacaaaaaaaggtggaagaatgagaaacatcttcacaccagcaggacacaaatagtacatgtgaaatttccaagcattatggtttacagagatgattatttcatcagacattccatctctgtatctgcagtgatagtacgcgcctggattactcacaaatacagtggcagagactggaatgttaaatgggaggaaaacttgctccatgctgtagcaaagaattataccctcctgcagaccatcccgccttttgaacgccctttcaaagatcatcaagtgtgccttgagtggaacatgggttatatttggaaccttcgggcaaacaggattccacagtgtcctctggaaaatgatgtggttgccctgcttggctttccttatgcctccagtggagaaaacacaggcattgtcaagaagttcccgaggtttcggaaccgagagctggaggccactcgacgccagaggatggattacccagtgtttactgtttcattgtggctttatttactccattattgcaaggccaacctctgtgggattctgtactttgttgactctaatgagatgtacggcacaccttctgtatttcttacggaagagggctatttgcatattcagatgcatcttgtcaaaggggaagaccttgctgtaaaaactaaattcatcatacctttgaaggagtggtttcgactggatatctcttttaacggaggccagatagtagtaaccactagcattggacaggatttgaaaagctaccacaatcagaccattagcttccgggaggatttccattataatgacacagctgggtacttcattattggagggagcaggtatgtggctggcattgaagggttttttggacccctgaagtactatcgccttcgcagtctgcaccccgcccagatttttaatcccctccttgagaagcaacttgctgaacaaatcaagttatattatgaaaggtgtgctgaggttcaagaaatagtatctgtgtatgcatctgcagcaaagcacgggggcgagagacaagaagcatgccacctccacaactcctacctggacctccagcgcaggtatgggagaccctcgatgtgcagagccttcccctgggagaaggagctgaaagacaaacaccccagcttgttccaggcattgctggagatggatctgctgaccgtgccaaggaaccaaaatgaatctgtatcagaaatcggtgggaagatatttgagaaggctgtaaagagactctctagcattgatggtcttcaccaaattagctctatcgtcccctttctgacggattccagctgctgtggataccataaagcatcctactaccttgcagtcttttatgagactggattaaatgttcctcgggatcagctgcagggcatgttgtatagtttggttggaggccaggggagtgagaggctgtcttcaatgaatcttgggtataaacactaccagggtattgacaactaccccctggactgggaactgtcgtatgcctactacagcaacattgccaccaagacaccccttgaccagcacacactgcaaggagatcaggcatatgttgaaacaattagactaaaagatgatgaaatactcaaggtacaaaccaaagaagatggagatgtctttatgtggttgaagcatgaagctacccgaggcaatgcagcagctcagcaacgattggcccagatgctgttctgggggcagcaaggtgtggccaagaatcccgaagcagcaattgagtggtacgccaagggcgccctggagacggaggatcctgcgttaatctatgactatgccattgtgctattcaagggtcaaggagtaaaaaagaacagacggcttgccttagagctgatgaagaaagcagcttccaagggattgcatcaggcagtcaatggcctgggatggtattaccacaaattcaagaaaaattacgccaaagcagcaaagtactggttaaaagcagaagaaatggggaacccagatgcgtcatacaatcttggagtcctgcatttggatggcatcttccctggagttcctggaaggaatcaaactttagctggtgaatatttccataaggctgcgcaaggtggacacatggaagggaccttgtggtgttctctctactatatcacaggcaacctggagacattccctagagatcctgagaaagctgttgtatgggcaaaacatgtagctgagaaaaatggctacttgggccatgtcatccgcaaaggcctcaatgcctacctggaaggttcatggcatgaagctttgctgtattatgttttagcagcagaaactggaattgaagtgtcacagacaaatttagcacacatctgtgaggagaggccagacctggccaggagatacttgggtgttaactgtgtttggagatactataatttctctgtttttcaaatcgatgctccttcctttgcatatttgaagatgggagacctttactactatggccaccaaaaccagtcacaagacctggagttgtctgtgcagatgtacgcccaagccgccctggatggagactcccagggattttttaacctggccctgctaatcgaggaaggtacgataatcccacaccatatcttggatttcttggaaattgactcaactctccattctaataacatctccattctccaggaactgtacgaaaggtgctggagccacagtaacgaggagtccttcagcccctgctccttggcctggctttacctgcacttgcggcttctctggggtgctatcctgcactcagccctgatctactttctgggaacctttctgctatccatattgatcgcctggactgtgcagtatttccagtctgtctcagcaagcgatccccctccaagaccatcccaggcctccccagacactgccacgtccactgcaagtccagctgtgactccagctgcagatgcctctgaccaagaccagcccacagtaactaataacccggagccacgtgggtgaactgtgcactccagttctctccagatgagagagaatcttttcaacagctggtattgggaagctggggccagggcatgatcctgataaacaccttaaatgtcttgtcaactgga

SEQ ID NO: 346697 - DNA, 2424 bp, Homo sapiens
  misc_feature (20)..(20): n is a, c, g, or t
ctctgctggtaccggtccgnattcccgggatgaagaaagcagcttccaagggattgcatcaggcagtcaatggcctgggatggtattaccacaaattcaagaaaaattacgccaaagcagcaaagtactggttaaaagcagaagaaatggggaacccagatgcgtcatacaatcttggagtcctgcatttggatggcatcttccctggagttcctggaaggaatcaaactttagctggtgaatatttccataaggctgcgcaaggtggacacatggaagggaccttgtggtgttctctctactatatcacaggcaacctggagacattccctagagatcctgagaaagctgttgtatgggcaaaacatgtagctgagaaaaatggctacttgggccatgtcatccgcaaaggcctcaatgcctacctggaaggttcatggccacagaaagtccagaatttctaccttgttcctagcaagaagagagatcagtgtttaaggttcaggccacctcttccatagatgttttactgcatctgccatgactaggagcctgggattgttggaagtccactcctctaagcgaggatgcaagaaggattcaagaactgaaggctagtagacaactccccagccaacatccgacatgcccttcagccagtagaggtagctgttgcatcaactagctccccagccttgtctgcatgaagctttgctgtattatgttttagcagcagaaactggaattgaagtgtcacagacaaatttagcacacatctgtgaggagaggccagacctggccaggagatacttgggtgttaactgtgtttggagatactataatttctctgtttttcaaatcgatgctccttcctttgcatatttgaagatgggagacctttactactatggccaccaaaaccagtcacaagacctggagttgtctgtgcagatgtacgcccaagccgccctggatggagactcccagggattttttaacctggccctgctaatcgaggaaggtacgataatcccacaccatatcttggatttcttggaaattgactcaactctccattctaataacatctccattctccaggaactgtacgaaaggtgctggagccacagtaacgaggagtccttcagcccctgctccttggcctggctttacctgcacttgcggcttctctggggtgctatcctgcactcagccctgatctactttctgggaacctttctgctatccatattgatcgcctggactgtgcagtatttccagtctgtctcagcaagcgatccccctccaagaccatcccaggcctccccagacactgccacgtccactgcaagtccagctgtgactccagctgcagatgcctctgaccaagaccagcccacagtaactaataacccggagccacgtgggtgaactgtgcactccagttctctccagatgagagagaatcttttcaacagctggtattgggaagctggggccagggcatgatcctgataaacaccttaaatgtcttgtcaactggatgcaaattttgcaattggtgtcattttttttaaagtcaaattacaaggaagtacccagatcaggcagtggtaataccaaaggtcatcaaacacatacaaggaacatcttgatcatagggcatgtggggaagtttactgggccatcacagacttttgttctagtgattgtatgtattaggagtcatagcatgccctacggcagatctggattcttatacactaagatgtgtcttaagaatcacagtgcgtgcttcatccctttattgaagaacagaaaattatgactactctacaaggtggataatattttggtacctgtgcttgccacagccctgttcctcaaagctgaattgatagatttctctttgacttccaagacctagcagttataaggcaccttgaaataaattgtttgtgcctggaaatgcagggagggcaatagctttgtaaattggtttacatttttctccttgaatttttctagggtcctagtgcttccgaatcatttaatggcattgtcggatatcttttacatttcaattgcaatccatgaaattacatttagaagattcttagtacttaactgtagtcttctccatgaattacacgttagaatagactggcagcaactgaatatgcagcaagtaagcctctagcttatagtttcatccctacccctcatgcctgcgtgagtctgtacagggatatgtgtgtgtgtgtgtgtgtgtgtgtgttagagaggaagaggaagagcagaatgtctgtatactacatgctgctaaggtagtgaataaatcagtaatgcaatattgtgggtccaaactactctttgcactactttatttacagtagtaaataaaattatttttatacaattgac

SEQ ID NO: 346698 - DNA, 3249 bp, Homo sapiens
ctgtattgcgtcatgagctgatctagaggataccgaagatgcacgatggcgcgtcccccagggcctcggcggccgctctgcctgcgcgctgctcctgctctgctacctgaatgttgtaccatctttgggtaggcagacttccctgacgacatcagtgatacccaaagctgagcagagcgtggcttacaaagactttatttattttactgtctttgaaggaaacgttcgcaacgtttctgaagtctcggttgagtatttatgctctcagccttgtgttgtcaatttggaagcagttgtttcatctgagttcagaagtagcattcccgtgtacaaaaaaaggtggaagaatgagaaacatcttcacaccagcaggacacaaatagtacatgtgaaatttccaagcattatggtttacagagatgattatttcatcagacattccatctctgtatctgcagtgatagtacgcgcctggattactcacaaatacagtggcagagactggaatgttaaatgggaggaaaacttgctccatgctgtagcaaagaattataccctcctgcagaccatcccgccttttgaacgccctttcaaagatcatcaagtgtgccttgagtggaacatgggttatatttggaaccttcgggcaaacaggattccacagtgtcctctggaaaatgatgtggttgccctgcttggctttccttatgcctccagtggagaaaacacaggcattgtcaagaagttcccgaggtttcggaaccgagagctggaggccactcgacgccagaggatggattacccagtgtttactgtttcattgtggctttatttactccattattgcaaggccaacctctgtgggattctgtactttgttgactctaatgagatgtacggcacaccttctgtatttcttacggaagagggctatttgcatattcagatgcatcttgtcaaaggggaagaccttgctgtaaaaactaaattcatcatacctttgaaggagtggtttcgactggatatctcttttaacggaggccagatagtagtaaccactagcattggacaggatttgaaaagctaccacaatcagaccattagcttccgggaggatttccattataatgacacagctgggtacttcattattggagggagcaggtatgtggctggcattgaagggttttttggacccctgaagtactatcgccttcgcagtctgcaccccgcccagatttttaatcccctccttgagaagcaacttgctgaacaaatcaagttatattatgaaaggtgtgctgaggttcaagaaatagtatctgtgtatgcatctgcagcaaagcacgggggcgagagacaagaagcatgccacctccacaactcctacctggacctccagcgcaggtatgggagaccctcgatgtgcagagccttcccctgggagaaggagctgaaagacaaacaccccagcttgttccaggcattgctggagatggatctgctgaccgtgccaaggaaccaaaatgaatctgtatcagaaatcggtgggaagatatttgagaaggctgtaaagagactctctagcattgatggtcttcaccaaattagctctatcgtcccctttctgacggattccagctgctgtggataccataaagcatcctactaccttgcagtcttttatgagactggattaaatgttcctcgggatcagctgcagggcatgttgtatagtttggttggaggccaggggagtgagaggctgtcttcaatgaatcttgggtataaacactaccagggtattgacaactaccccctggactgggaactgtcgtatgcctactacagcaacattgccaccaagacaccccttgaccagcacacactgcaaggagatcaggcatatgttgaaacaattagactaaaagatgatgaaatactcaaggtacaaaccaaagaagatggagatgtctttatgtggttgaagcatgaagctacccgaggcaatgcagcagctcagcaacgattggcccagatgctgttctgggggcagcaaggtgtggccaagaatcccgaagcagcaattgagtggtacgccaagggcgccctggagacggaggatcctgcgttaatctatgactatgccattgtgctattcaagggtcaaggagtaaaaaagaacagacggcttgccttagagctgatgaagaaagcagcttccaagggattgcatcaggcagtcaatggcctgggatggtattaccacaaattcaagaaaaattacgccaaagcagcaaagtactggttaaaagcagaagaaatggggaacccagatgcgtcatacaatcttggagtcctgcatttggatggcatcttccctggagttcctggaaggaatcaaactttagctggtgaatatttccataaggctgcgcaaggtggacacatggaagggaccttgtggtgttctctctactatatcacaggcaacctggagacattccctagagatcctgagaaagctgttgtatgggcaaaacatgtagctgagaaaaatggctacttgggccatgtcatccgcaaaggcctcaatgcctacctggaaggttcatggcatgaagctttgctgtattatgttttagcagcagaaactggaattgaagtgtcacagacaaatttagcacacatctgtgaggagaggccagacctggccaggagatacttgggtgttaactgtgtttggagatactataatttctctgtttttcaaatcgatgctccttcctttgcatatttgaagatgggagacctttactactatggccaccaaaaccagtcacaagacctggagttgtctgtgcagatgtacgcccaagccgccctggatggagactcccagggattttttaacctggccctgctaatcgaggaaggtacgataatcccacaccatatcttggatttcttggaaattgactcaactctccattctaataacatctccattctccaggaactgtacgaaaggtgctggagccacagtaacgaggagtccttcagcccctgctccttggcctggctttacctgcacttgcggcttctctggggtgctatcctgcactcagccctgatctactttctgggaacctttctgctatccatattgatcgcctggactgtgcagtatttccagtctgtctcaggtaaagatttataaaaagcgaaagcaatatattaaaaaaaaaa

SEQ ID NO: 346699 - DNA, 1502 bp, Homo sapiens
tgaagagtgtgtgtctaggttttatttcaaggatttgatgagtttggtttgtggcttgtttttagggattttttaacctggccctgctaatcgaggaaggtacgataatcccacaccatatcttggatttcttggaaattgactcaactctccattctaataacatctccattctccaggaactgtacgaaaggtgctggagccacagtaacgaggagtccttcagcccctgctccttggcctggctttacctgcacttgcggcttctctggggtgctatcctgcactcagccctgatctactttctgggaacctttctgctatccatattgatcgcctggactgtgcagtatttccagtctgtctcagcaagcgatccccctccaagaccatcccaggcctccccagacactgccacgtccactgcaagtccagctgtgactccagctgcagatgcctctgaccaagaccagcccacagtaactaataacccggagccacgtgggtgaactgtgcactccagttctctccagatgagagagaatcttttcaacagctggtattgggaagctggggccagggcatgatcctgataaacaccttaaatgtcttgtcaactggatgcaaattttgcaattggtgtcattttttttaaagtcaaattacaaggaagtacccagatcaggcagtggtaataccaaaggtcatcaaacacatacaaggaacatcttgatcatagggcatgtggggaagtttactgggccatcacagacttttgttctagtgattgtatgtattaggagtcatagcatgccctacggcagatctggattcttatacactaagatgtgtcttaagaatcacagtgcgtgcttcatccctttattgaagaacagaaaattatgactactctacaaggtggataatattttggtacctgtgcttgccacagccctgttcctcaaagctgaattgatagatttctctttgacttccaagacctagcagttataaggcaccttgaaataaattgtttgtgcctggaaatgcagggagggcaatagctttgtaaattggtttacatttttctccttgaatttttctagggtcctagtgcttccgaatcatttaatggcattgtcggatatcttttacatttcaattgcaatccatgaaattacatttagaagattcttagtacttaactgtagtcttctccatgaattacacgttagaatagactggcagcaactgaatatgcagcaagtaagcctctagcttatagtttcatccctacccctcatgcctgcgtgagtctgtacagggatatgtgtgtgtgtgtgtgtgtgtgtgtgttagagaggaagaggaagagcagaatgtctgtatactacatgctgctaaggtagtgaataaatcagtaatgcaatattgtgggtccaaactactctttgcactactttatttacagtagtaaataaaattatttttatacaattgac

SEQ ID NO: 346700 - DNA, 3164 bp, Homo sapiens
ctgtattgcgtcatgagctgatctagaggataccgaagatgcacgatggcgcgtcccccagggcctcggcggccgctctgcctgcgcgctgctcctgctctgctacctgaatgttgtaccatctttgggtaggcagacttccctgacgacatcagtgatacccaaagctgagcagagcgtggcttacaaagactttatttattttactgtctttgaaggaaacgttcgcaacgtttctgaagtctcggttgagtatttatgctctcagccttgtgttgtcaatttggaagcagttgtttcatctgagttcagaagtagcattcccgtgtacaaaaaaaggtggaagaatgagaaacatcttcacaccagcaggacacaaatagtacatgtgaaatttccaagcattatggtttacagagatgattatttcatcagacattccatctctgtatctgcagtgatagtacgcgcctggattactcacaaatacagtggcagagactggaatgttaaatgggaggaaaacttgctccatgctgtagcaaagaattataccctcctgcagaccatcccgccttttgaacgccctttcaaagatcatcaagtgtgccttgagtggaacatgggttatatttggaaccttcgggcaaacaggattccacagtgtcctctggaaaatgatgtggttgccctgcttggctttccttatgcctccagtggagaaaacacaggcattgtcaagaagttcccgaggtttcggaaccgagagctggaggccactcgacgccagaggatggattacccagtgtttactgtttcattgtggctttatttactccattattgcaaggccaacctctgtgggattctgtactttgttgactctaatgagatgtacggcacaccttctgtatttcttacggaagagggctatttgcatattcagatgcatcttgtcaaaggggaagaccttgctgtaaaaactaaattcatcatacctttgaaggagtggtttcgactggatatctcttttaacggaggccagatagtagtaaccactagcattggacaggatttgaaaagctaccacaatcagaccattagcttccgggaggatttccattataatgacacagctgggtacttcattattggagggagcaggtatgtggctggcattgaagggttttttggacccctgaagtactatcgccttcgcagtctgcaccccgcccagatttttaatcccctccttgagaagcaacttgctgaacaaatcaagttatattatgaaaggtgtgctgaggttcaagaaatagtatctgtgtatgcatctgcagcaaagcacgggggcgagagacaagaagcatgccacctccacaactcctacctggacctccagcgcaggtatgggagaccctcgatgtgcagagccttcccctgggagaaggagctgaaagacaaacaccccagcttgttccaggcattgctggagatggatctgctgaccgtgccaaggaaccaaaatgaatctgtatcagaaatcggtgggaagatatttgagaaggctgtaaagagactctctagcattgatggtcttcaccaaattagctctatcgtcccctttctgacggattccagctgctgtggataccataaagcatcctactaccttgcagtcttttatgagactggattaaatgttcctcgggatcagctgcagggcatgttgtatagtttggttggaggccaggggagtgagaggctgtcttcaatgaatcttgggtataaacactaccagggtattgacaactaccccctggactgggaactgtcgtatgcctactacagcaacattgccaccaagacaccccttgaccagcacacactgcaaggagatcaggcatatgttgaaacaattagactaaaagatgatgaaatactcaaggtacaaaccaaagaagatggagatgtctttatgtggttgaagcatgaagctacccgaggcaatgcagcagctcagcaacgattggcccagatgctgttctgggggcagcaaggtgtggccaagaatcccgaagcagcaattgagtggtacgccaagggcgccctggagacggaggatcctgcgttaatctatgactatgccattgtgctattcaagggtcaaggagtaaaaaagaacagacggcttgccttagagctgatgaagaaagcagcttccaagggattgcatcaggcagtcaatggcctgggatggtattaccacaaattcaagaaaaattacgccaaagcagcaaagtactggttaaaagcagaagaaatggggaacccagatgcgtcatacaatcttggagtcctgcatttggatggcatcttccctggagttcctggaaggaatcaaactttagctggtgaatatttccataaggctgcgcaaggtggacacatggaagggaccttgtggtgttctctctactatatcacaggcaacctggagacattccctagagatcctgagaaagctgttgtatgggcaaaacatgtagctgagaaaaatggctacttgggccatgtcatccgcaaaggcctcaatgcctacctggaaggttcatggcatgaagctttgctgtattatgttttagcagcagaaactggaattgaagtgtcacagacaaatttagcacacatctgtgaggagaggccagacctggccaggagatacttgggtgttaactgtgtttggagatactataatttctctgtttttcaaatcgatgctccttcctttgcatatttgaagatgggagacctttactactatggccaccaaaaccagtcacaagacctggagttgtctgtgcagatgtacgcccaagccgccctggatggagactcccagggattttttaacctggccctgctaatcgaggaaggtacgataagtgctggagccacagtaacgaggagtccttcagcccctgctccttggcctggctttacctgcacttgcggcttctctggggtgctatcctgcactcagccctgatctactttctgggaacctttctgctatccatattgatcgcctggactgtgcagtatttccagtctgtctcaggtaaagatttataaaaagcgaaagcaatatattaaaaaaaaaa

SEQ ID NO: 346701 - DNA, 2956 bp, Homo sapiens
ctgtattgcgtcatgagctgatctagaggataccgaagatgcacgatggcgcgtcccccagggcctcggcggccgctctgcctgcgcgctgctcctgctctgctacctgaatgttgtaccatctttgggtaggcagacttccctgacgacatcagtgatacccaaagctgagcagagcgtggcttacaaagactttatttattttactgtctttgaaggaaacgttcgcaacgtttctgaagtctcggttgagtatttatgctctcagccttgtgttgtcaatttggaagcagttgtttcatctgagttcagaagtagcattcccgtgtacaaaaaaaggtggaagaatgagaaacatcttcacaccagcaggacacaaatagtacatgtgaaatttccaagcattatggtttacagagatgattatttcatcagacattccatctctgtatctgcagtgatagtacgcgcctggattactcacaaatacagtggcagagactggaatgttaaatgggaggaaaacttgctccatgctgtagcaaagaattataccctcctgcagaccatcccgccttttgaacgccctttcaaagatcatcaagtgtgccttgagtggaacatgggttatatttggaaccttcgggcaaacaggattccacagtgtcctctggaaaatgatgtggttgccctgcttggctttccttatgcctccagtggagaaaacacaggcattgtcaagaagttcccgaggtttcggaaccgagagctggaggccactcgacgccagaggatggattacccagtgtttactgtttcattgtggctttatttactccattattgcaaggccaacctctgtgggattctgtactttgttgactctaatgagatgtacggcacaccttctgtatttcttacggaagagggctatttgcatattcagatgcatcttgtcaaaggggaagaccttgctgtaaaaactaaattcatcatacctttgaaggagtggtttcgactggatatctcttttaacggaggccagatagtagtaaccactagcattggacaggatttgaaaagctaccacaatcagaccattagcttccgggaggatttccattataatgacacagctgggtacttcattattggagggagcaggtatgtggctggcattgaagggttttttggacccctgaagtactatcgccttcgcagtctgcaccccgcccagatttttaatcccctccttgagaagcaacttgctgaacaaatcaagttatattatgaaaggtgtgctgaggttcaagaaatagtatctgtgtatgcatctgcagcaaagcacgggggcgagagacaagaagcatgccacctccacaactcctacctggacctccagcgcaggtatgggagaccctcgatgtgcagagccttcccctgggagaaggagctgaaagacaaacaccccagcttgttccaggcattgctggagatggatctgctgaccgtgccaaggaaccaaaatgaatctgtatcagaaatcggtgggaagatatttgagaaggctgtaaagagactctctagcattgatggtcttcaccaaattagctctatcgtcccctttctgacggattccagctgctgtggataccataaagcatcctactaccttgcagtcttttatgagactggattaaatgttcctcgggatcagctgcagggcatgttgtatagtttggttggaggccaggggagtgagaggctgtcttcaatgaatcttgggtataaacactaccagggtattgacaactaccccctggactgggaactgtcgtatgcctactacagcaacattgccaccaagacaccccttgaccagcacacactgcaaggagatcaggcatatgttgaaacaattagactaaaagatgatgaaatactcaaggtacaaaccaaagaagatggagatgtctttatgtggttgaagcatgaagctacccgaggcaatgcagcagctcagcaacgattggcccagatgctgttctgggggcagcaaggtgtggccaagaatcccgaagcagcaattgagtggtacgccaagggcgccctggagacggaggatcctgcgttaatctatgactatgccattgtgctattcaagggtcaaggagtaaaaaagaacagacggcttgccttagagctgatgaagaaagcagcttccaagggattgcatcaggcagtcaatggcctgggatggtattaccacaaattcaagaaaaattacgccaaagcagcaaagtactggttaaaagcagaagaaatggggaacccagatgcgtcatacaatcttggagtcctgcatttggatggcatcttccctggagttcctggaaggaatcaaactttagctggtgaatatttccataaggctgcgcaaggtggacacatggaagggaccttgtggtgttctctctactatatcacaggcaacctggagacattccctagagatcctgagaaagctgttgtaaaaagtttgtcgacctctgttttaggccaccctcacactgataccctggctctccaaaagattgttcttcataacacatttgggttcaaattcaacctgacctgaccttggtgataaacttgacttagactgacttgaagttttttatcattgttatttagtatatttgacatgaatattcatgttttgtggattttctgttatcctcttgttaatgatttctagcttaatttcactgtgatcagagaatatattctgaatgattccaatcctttgaaatttgtcaaagtgtgctttatgattggtatatggtcaattttggtatatgttttatggctttttgaaaagagtgcactttctgaacttgctggatcaacatctacatatatatcagttacatcaagtttgttaattacattattc

SEQ ID NO: 346702 - DNA, 2700 bp, Homo sapiens
ctgtattgcgtcatgagctgatctagaggataccgaagatgcacgatggcgcgtcccccagggcctcggcggccgctctgcctgcgcgctgctcctgctctgctacctgaatgttgtaccatctttgggtaggcagacttccctgacgacatcagtgatacccaaagctgagcagagcgtggcttacaaagactttatttattttactgtctttgaaggaaacgttcgcaacgtttctgaagtctcggttgagtatttatgctctcagccttgtgttgtcaatttggaagcagttgtttcatctgagttcagaagtagcattcccgtgtacaaaaaaaggtggaagaatgagaaacatcttcacaccagcaggacacaaatagtacatgtgaaatttccaagcattatggtttacagagatgattatttcatcagacattccatctctgtatctgcagtgatagtacgcgcctggattactcacaaatacagtggcagagactggaatgttaaatgggaggaaaacttgctccatgctgtagcaaagaattataccctcctgcagaccatcccgccttttgaacgccctttcaaagatcatcaagtgtgccttgagtggaacatgggttatatttggaaccttcgggcaaacaggattccacagtgtcctctggaaaatgatgtggttgccctgcttggctttccttatgcctccagtggagaaaacacaggcattgtcaagaagttcccgaggtttcggaaccgagagctggaggccactcgacgccagaggatggattacccagtgtttactgtttcattgtggctttatttactccattattgcaaggccaacctctgtgggattctgtactttgttgactctaatgagatgtacggcacaccttctgtatttcttacggaagagggctatttgcatattcagatgcatcttgtcaaaggggaagaccttgctgtaaaaactaaattcatcatacctttgaaggagtggtttcgactggatatctcttttaacggaggccagatagtagtaaccactagcattggacaggatttgaaaagctaccacaatcagaccattagcttccgggaggatttccattataatgacacagctgggtacttcattattggagggagcaggtatgtggctggcattgaagggttttttggacccctgaagtactatcgccttcgcagtctgcaccccgcccagatttttaatcccctccttgagaagcaacttgctgaacaaatcaagttatattatgaaaggtgtgctgaggttcaagaaatagtatctgtgtatgcatctgcagcaaagcacgggggcgagagacaagaagcatgccacctccacaactcctacctggacctccagcgcaggtatgggagaccctcgatgtgcagagccttcccctgggagaaggagctgaaagacaaacaccccagcttgttccaggcattgctggagatggatctgctgaccgtgccaaggaaccaaaatgaatctgtatcagaaatcggtgggaagatatttgagaaggctgtaaagagactctctagcattgatggtcttcaccaaattagctctatcgtcccctttctgacggattccagctgctgtggataccataaagcatcctactaccttgcagtcttttatgagactggattaaatgttcctcgggatcagctgcagggcatgttgtatagtttggttggaggccaggggagtgagaggctgtcttcaatgaatcttgggtataaacactaccagggtattgacaactaccccctggactgggaactgtcgtatgcctactacagcaacattgccaccaagacaccccttgaccagcacacactgcaaggagatcaggcatatgttgaaacaattagactaaaagatgatgaaatactcaaggtacaaaccaaagaagatggagatgtctttatgtggttgaagcatgaagctacccgaggcaatgcagcagctcagcaacgattggcccagatgctgttctgggggcagcaaggtgtggccaagaatcccgaagcagcaattgagtggtacgccaagggcgccctggagacggaggatcctgcgttaatctatgactatgccattgtgctattcaagggtcaaggagtaaaaaagaacagacggcttgccttagagctgatgaagaaagcagcttccaagggattgcatcaggcagtcaatggcctgggatggtattaccacaaattcaagaaaaattacgccaaagcagcaaagtactggttaaaagcagaagaaatggggaacccagatgcgtcatacaatcttggagtcctgcatttggatggcatcttccctggagttcctggaaggaatcaaactttagctggtgaatatttccataaggctgcgcaaggtggacacatggaagggaccttgtggtgttctctctactatatcacaggcaacctggagacattccctagagatcctgagaaagctgttgtgtaagactctgtcaaacgttgcatttgaagggaaagccatatcctatattctctgtgcctgagcattttttaagttgagttctttatttttaccagttgtacatgcatgtagttttaaaagtcatgtaatttgacaagacaaaattaaaacttttaattaaaaattta

SEQ ID NO: 346703 - DNA, 1903 bp, Homo sapiens
ctgtattgcgtcatgagctgatctagaggataccgaagatgcacgatggcgcgtcccccagggcctcggcggccgctctgcctgcgcgctgctcctgctctgctacctgaatgttgtaccatctttgggtaggcagacttccctgacgacatcagtgatacccaaagctgagcagagcgtggcttacaaagactttatttattttactgtctttgaaggaaacgttcgcaacgtttctgaagtctcggttgagtatttatgctctcagccttgtgttgtcaatttggaagcagttgtttcatctgagttcagaagtagcattcccgtgtacaaaaaaaggtggaagaatgagaaacatcttcacaccagcaggacacaaatagtacatgtgaaatttccaagcattatggtttacagagatgattatttcatcagacattccatctctgtatctgcagtgatagtacgcgcctggattactcacaaatacagtggcagagactggaatgttaaatgggaggaaaacttgctccatgctgtagcaaagaattataccctcctgcagaccatcccgccttttgaacgccctttcaaagatcatcaagtgtgccttgagtggaacatgggttatatttggaaccttcgggcaaacaggattccacagtgtcctctggaaaatgatgtggttgccctgcttggctttccttatgcctccagtggagaaaacacaggcattgtcaagaagttcccgaggtttcggaaccgagagctggaggccactcgacgccagaggatggattacccagtgtttactgtttcattgtggctttatttactccattattgcaaggccaacctctgtgggattctgtactttgttgactctaatgagatgtacggcacaccttctgtatttcttacggaagagggctatttgcatattcagatgcatcttgtcaaaggggaagaccttgctgtaaaaactaaattcatcatacctttgaaggagtggtttcgactggatatctcttttaacggaggccagatagtagtaaccactagcattggacaggatttgaaaagctaccacaatcagaccattagcttccgggaggatttccattataatgacacagctgggtacttcattattggagggagcaggtatgtggctggcattgaagggttttttggacccctgaagtactatcgccttcgcagtctgcaccccgcccagatttttaatcccctccttgagaagcaacttgctgaacaaatcaagttatattatgaaaggtgtgctgaggttcaagaaatagtatctgtgtatgcatctgcagcaaagcacgggggcgagagacaagaagcatgccacctccacaactcctacctggacctccagcgcaggtatgggagaccctcgatgtgcagagccttcccctgggagaaggagctgaaagacaaacaccccagcttgttccaggcattgctggagatggatctgctgaccggtaattgagtctttgcctcggctttaggcgctggttagaaaggctccttgtttttctctgtttcactcaccctctttggtgatttatgccttaaagttatttttaaccctagtgttttagtttaatttcagatttaaattctgcctttgtatgtccacaactctcgatatatctgtgcacacttccaacactaaatgcaaaaacttaaatttaggaatcgctcaagcaattctttattgaaagccaaggcggcaaatggataggccgcagccagagccagccccagatgcagttgatttggaaaataccttgttgtatatgttttaaaaaaaatcagttatctaaaaagcttgtatgaaaatgcaaatttctagctttttaaaaaaaaaaaa

SEQ ID NO: 346704 - DNA, 1063 bp, Homo sapiens
ctgtattgcgtcatgagctgatctagaggataccgaagatgcacgatggcgcgtcccccagggcctcggcggccgctctgcctgcgcgctgctcctgctctgctacctgaatgttgtaccatctttgggtaggcagacttccctgacgacatcagtgatacccaaagctgagcagagcgtggcttacaaagactttatttattttactgtctttgaaggaaacgttcgcaacgtttctgaagtctcggttgagtatttatgctctcagccttgtgttgtcaatttggaagcagttgtttcatctgagttcagaagtagcattcccgtgtacaaaaaaaggtggaagaatgagaaacatcttcacaccagcaggacacaaatagtacatgtgaaatttccaagcattatggtttacagagatgattatttcatcagacattccatctctgtatctgcagtgatagtacgcgcctggattactcacaaatacagtggcagagactggaatgttaaatgggaggaaaacttgctccatgctgtagcaaagaattataccctcctgcagaccatcccgccttttgaacgccctttcaaagatcatcaagtgtgccttgagtggaacatgggttatatttggaaccttcgggcaaacaggattccacagtgtcctctggaaaatgatgtggttgccctgcttggctttccttatgcctccagtggagaaaacacaggcattgtcaagaagttcccgaggtttcggaaccgagagctggaggccactcgacgccagaggatggattacccagtgtttactgtttcattgtggctttatttactccattattgcaaggccaacctctgtgggattctgtactttgttgactctaatgagatgtacggcacaccttctgtatttcttacggaagagggctatttgcatattcagatgcatcttgtcaaaggggaagaccttgctgtaaaaactaaattcatcatacctttgaaggagtggtttcgactggatatctcttttaacggaggccaggtatctgtatgcacgctt

SEQ ID NO: 346705 - DNA, 315 bp, Homo sapiens
atgcctccagtggagaaaacacaggcattgtcaagaagttcccgaggtttcggaaccgagagctggaggccactcgacgccagaggatggattacccagtgtaaggatgggtagcagaagggagctgatcgggcggtgcttgttttatttgaggaccagagcaggctagtggaagaattccttaggaagacacaccttcttggtaaggtgttttgcaaaaatgttgagatttccatggcttagacagaattggtggacctgaaaacctcaaatgagtcttgaattattcttggcatttaacaatcctcaatttgc

SEQ ID NO: 346706 - DNA, 314 bp, Homo sapiens
gagtgtgccactgcactccagcctgggcgacaggccaaggctccgtctcaaaaaaaaaggcaagttaacatatttctggaatggctaggattgtatataggaattgggcctgacaacctttcagtgttaggattttatgaccctatctacaatctcatgaacgctttgtcaatttcttcctaacagggcatgttgtatagtttggttggaggccaggggagtgagaggctgtcttcaatgaatcttgggtataaacactaccagggtattgacaactaccccctggactgggaactgtcgtatgcctactacag

SEQ ID NO: 346707 - DNA, 481 bp, Homo sapiens
aaacacacctgggaagactctcaggcaggcttgtgttttctagcacttagcttttctttaatgccatctgctccaaaataagagaaagggaaggttttgttcagacttaggcagaatgcttccacaataattgcttccagagctctctagatttcatttttctaaagttaatttctttcttgttccaaaattcagggattgcatcaggcagtcaatggcctgggatggtattaccacaaattcaagaaaaattacgccaaagcagcaaagtactggttaaaagcagaagaaatggggaacccagatgcgtcatacaatcttggagtcctgcatttggatggcatcttccctggagttcctggaaggaatcaagtgagtaggacttgagacccactctgcaactagtcagtcacttgatcatgaagcatttgttgaaggtacactgtgtgcaccagacccaaccccagacacagtccctgtc

SEQ ID NO: 346708 - DNA, 514 bp, Homo sapiens
tggaagataaagtgtatctaatccttggttctcaatctaaaacatcgtaaagtaggtttgctctcccacctttcaaaatcttgtgttaagcattatacaggaaaagtcattgttctaaattgctattatctttaagcaacgattggcccagatgctgttctgggggcagcaaggtgtggccaagaatcccgaagcagcaattgagtggtacgccaagggcgccctggagacggaggatcctgcgttaatctatgactatgccattgtgctattcaaggtaagaatcacttaattcgtgctgaaattgtgcaattcttatcagactcctgagcagtttcctgtgggcgggctggcaaacagggagtcgataactgaagaaatttagtatatgcttctgtcactcttgatggaaaagaatgttggctaaaaaggcagagtcagaagcagttccctgttctcatttttaatcattagtcttatgtttggcacctggattctctgtgctttcgcaaga

SEQ ID NO: 346709 - DNA, 4339 bp, Homo sapiens
ctgtattgcgtcatgagctgatctagaggataccgaagatgcacgatggcgcgtcccccagggcctcggcggccgctctgcctgcgcgctgctcctgctctgctacctgaatgttgtaccatctttgggtaggcagacttccctgacgacatcagtgatacccaaagctgagcagagcgtggcttacaaagactttatttattttactgtctttgaaggaaacgttcgcaacgtttctgaagtctcggttgagtatttatgctctcagccttgtgttgtcaatttggaagcagttgtttcatctgagttcagaagtagcattcccgtgtacaaaaaaaggtggaagaatgagaaacatcttcacaccagcaggacacaaatagtacatgtgaaatttccaagcattatggtttacagagatgattatttcatcagacattccatctctgtatctgcagtgatagtacgcgcctggattactcacaaatacagtggcagagactggaatgttaaatgggaggaaaacttgctccatgctgtagcaaagaattataccctcctgcagaccatcccgccttttgaacgccctttcaaagatcatcaagtgtgccttgagtggaacatgggttatatttggaaccttcgggcaaacaggattccacagtgtcctctggaaaatgatgtggttgccctgcttggctttccttatgcctccagtggagaaaacacaggcattgtcaagaagttcccgaggtttcggaaccgagagctggaggccactcgacgccagaggatggattacccagtgtttactgtttcattgtggctttatttactccattattgcaaggccaacctctgtgggattctgtactttgttgactctaatgagatgtacggcacaccttctgtatttcttacggaagagggctatttgcatattcagatgcatcttgtcaaaggggaagaccttgctgtaaaaactaaattcatcatacctttgaaggagtggtttcgactggatatctcttttaacggaggccagatagtagtaaccactagcattggacaggatttgaaaagctaccacaatcagaccattagcttccgggaggatttccattataatgacacagctgggtacttcattattggagggagcaggtatgtggctggcattgaagggttttttggacccctgaagtactatcgccttcgcagtctgcaccccgcccagatttttaatcccctccttgagaagcaacttgctgaacaaatcaagttatattatgaaaggtgtgctgaggttcaagaaatagtatctgtgtatgcatctgcagcaaagcacgggggcgagagacaagaagcatgccacctccacaactcctacctggacctccagcgcaggtatgggagaccctcgatgtgcagagccttcccctgggagaaggagctgaaagacaaacaccccagcttgttccaggcattgctggagatggatctgctgaccgtgccaaggaaccaaaatgaatctgtatcagaaatcggtgggaagatatttgagaaggctgtaaagagactctctagcattgatggtcttcaccaaattagctctatcgtcccctttctgacggattccagctgctgtggataccataaagcatcctactaccttgcagtcttttatgagactggattaaatgttcctcgggatcagctgcagggcatgttgtatagtttggttggaggccaggggagtgagaggctgtcttcaatgaatcttgggtataaacactaccagggtattgacaactaccccctggactgggaactgtcgtatgcctactacagcaacattgccaccaagacaccccttgaccagcacacactgcaaggagatcaggcatatgttgaaacaattagactaaaagatgatgaaatactcaaggtacaaaccaaagaagatggagatgtctttatgtggttgaagcatgaagctacccgaggcaatgcagcagctcagcaacgattggcccagatgctgttctgggggcagcaaggtgtggccaagaatcccgaagcagcaattgagtggtacgccaagggcgccctggagacggaggatcctgcgttaatctatgactatgccattgtgctattcaagggtcaaggagtaaaaaagaacagacggcttgccttagagctgatgaagaaagcagcttccaagggattgcatcaggcagtcaatggcctgggatggtattaccacaaattcaagaaaaattacgccaaagcagcaaagtactggttaaaagcagaagaaatggggaacccagatgcgtcatacaatcttggagtcctgcatttggatggcatcttccctggagttcctggaaggaatcaaactttagctggtgaatatttccataaggctgcgcaaggtggacacatggaagggaccttgtggtgttctctctactatatcacaggcaacctggagacattccctagagatcctgagaaagctgttgtatgggcaaaacatgtagctgagaaaaatggctacttgggccatgtcatccgcaaaggcctcaatgcctacctggaaggttcatggcatgaagctttgctgtattatgttttagcagcagaaactggaattgaagtgtcacagacaaatttagcacacatctgtgaggagaggccagacctggccaggagatacttgggtgttaactgtgtttggagatactataatttctctgtttttcaaatcgatgctccttcctttgcatatttgaagatgggagacctttactactatggccaccaaaaccagtcacaagacctggagttgtctgtgcagatgtacgcccaagccgccctggatggagactcccagggattttttaacctggccctgctaatcgaggaaggtacgataatcccacaccatatcttggatttcttggaaattgactcaactctccattctaataacatctccattctccaggaactgtacgaaaggtgctggagccacagtaacgaggagtccttcagcccctgctccttggcctggctttacctgcacttgcggcttctctggggtgctatcctgcactcagccctgatctactttctgggaacctttctgctatccatattgatcgcctggactgtgcagtatttccagtctgtctcagcaagcgatccccctccaagaccatcccaggcctccccagacactgccacgtccactgcaagtccagctgtgactccagctgcagatgcctctgaccaagaccagcccacagtaactaataacccggagccacgtgggtgaactgtgcactccagttctctccagatgagagagaatcttttcaacagctggtattgggaagctggggccagggcatgatcctgataaacaccttaaatgtcttgtcaactggatgcaaattttgcaattggtgtcattttttttaaagtcaaattacaaggaagtacccagatcaggcagtggtaataccaaaggtcatcaaacacatacaaggaacatcttgatcatagggcatgtggggaagtttactgggccatcacagacttttgttctagtgattgtatgtattaggagtcatagcatgccctacggcagatctggattcttatacactaagatgtgtcttaagaatcacagtgcgtgcttcatccctttattgaagaacagaaaattatgactactctacaaggtggataatattttggtacctgtgcttgccacagccctgttcctcaaagctgaattgatagatttctctttgacttccaagacctagcagttataaggcaccttgaaataaattgtttgtgcctggaaatgcagggagggcaatagctttgtaaattggtttacatttttctccttgaatttttctagggtcctagtgcttccgaatcatttaatggcattgtcggatatcttttacatttcaattgcaatccatgaaattacatttagaagattcttagtacttaactgtagtcttctccatgaattacacgttagaatagactggcagcaactgaatatgcagcaagtaagcctctagcttatagtttcatccctacccctcatgcctgcgtgagtctgtacagggatatgtgtgtgtgtgtgtgtgtgtgtgtgttagagaggaagaggaagagcagaatgtctgtatactacatgctgctaaggtagtgaataaatcagtaatgcaatattgtgggtccaaactactctttgcactactttatttacagtagtaaataaaattatttttatacaattgac

SEQ ID NO: 346710 - DNA, 3768 bp, Homo sapiens
ctgtattgcgtcatgagctgatctagaggataccgaagatgcacgatggcgcgtcccccagggcctcggcggccgctctgcctgcgcgctgctcctgctctgctacctgatgtggttgccctgcttggctttccttatgcctccagtggagaaaacacaggcattgtcaagaagttcccgaggtttcggaaccgagagctggaggccactcgacgccagaggatggattacccagtgtttactgtttcattgtggctttatttactccattattgcaaggccaacctctgtgggattctgtactttgttgactctaatgagatgtacggcacaccttctgtatttcttacggaagagggctatttgcatattcagatgcatcttgtcaaaggggaagaccttgctgtaaaaactaaattcatcatacctttgaaggagtggtttcgactggatatctcttttaacggaggccagatagtagtaaccactagcattggacaggatttgaaaagctaccacaatcagaccattagcttccgggaggatttccattataatgacacagctgggtacttcattattggagggagcaggtatgtggctggcattgaagggttttttggacccctgaagtactatcgccttcgcagtctgcaccccgcccagatttttaatcccctccttgagaagcaacttgctgaacaaatcaagttatattatgaaaggtgtgctgaggttcaagaaatagtatctgtgtatgcatctgcagcaaagcacgggggcgagagacaagaagcatgccacctccacaactcctacctggacctccagcgcaggtatgggagaccctcgatgtgcagagccttcccctgggagaaggagctgaaagacaaacaccccagcttgttccaggcattgctggagatggatctgctgaccgtgccaaggaaccaaaatgaatctgtatcagaaatcggtgggaagatatttgagaaggctgtaaagagactctctagcattgatggtcttcaccaaattagctctatcgtcccctttctgacggattccagctgctgtggataccataaagcatcctactaccttgcagtcttttatgagactggattaaatgttcctcgggatcagctgcagggcatgttgtatagtttggttggaggccaggggagtgagaggctgtcttcaatgaatcttgggtataaacactaccagggtattgacaactaccccctggactgggaactgtcgtatgcctactacagcaacattgccaccaagacaccccttgaccagcacacactgcaaggagatcaggcatatgttgaaacaattagactaaaagatgatgaaatactcaaggtacaaaccaaagaagatggagatgtctttatgtggttgaagcatgaagctacccgaggcaatgcagcagctcagcaacgattggcccagatgctgttctgggggcagcaaggtgtggccaagaatcccgaagcagcaattgagtggtacgccaagggcgccctggagacggaggatcctgcgttaatctatgactatgccattgtgctattcaagggtcaaggagtaaaaaagaacagacggcttgccttagagctgatgaagaaagcagcttccaagggattgcatcaggcagtcaatggcctgggatggtattaccacaaattcaagaaaaattacgccaaagcagcaaagtactggttaaaagcagaagaaatggggaacccagatgcgtcatacaatcttggagtcctgcatttggatggcatcttccctggagttcctggaaggaatcaaactttagctggtgaatatttccataaggctgcgcaaggtggacacatggaagggaccttgtggtgttctctctactatatcacaggcaacctggagacattccctagagatcctgagaaagctgttgtatgggcaaaacatgtagctgagaaaaatggctacttgggccatgtcatccgcaaaggcctcaatgcctacctggaaggttcatggcatgaagctttgctgtattatgttttagcagcagaaactggaattgaagtgtcacagacaaatttagcacacatctgtgaggagaggccagacctggccaggagatacttgggtgttaactgtgtttggagatactataatttctctgtttttcaaatcgatgctccttcctttgcatatttgaagatgggagacctttactactatggccaccaaaaccagtcacaagacctggagttgtctgtgcagatgtacgcccaagccgccctggatggagactcccagggattttttaacctggccctgctaatcgaggaaggtacgataatcccacaccatatcttggatttcttggaaattgactcaactctccattctaataacatctccattctccaggaactgtacgaaaggtgctggagccacagtaacgaggagtccttcagcccctgctccttggcctggctttacctgcacttgcggcttctctggggtgctatcctgcactcagccctgatctactttctgggaacctttctgctatccatattgatcgcctggactgtgcagtatttccagtctgtctcagcaagcgatccccctccaagaccatcccaggcctccccagacactgccacgtccactgcaagtccagctgtgactccagctgcagatgcctctgaccaagaccagcccacagtaactaataacccggagccacgtgggtgaactgtgcactccagttctctccagatgagagagaatcttttcaacagctggtattgggaagctggggccagggcatgatcctgataaacaccttaaatgtcttgtcaactggatgcaaattttgcaattggtgtcattttttttaaagtcaaattacaaggaagtacccagatcaggcagtggtaataccaaaggtcatcaaacacatacaaggaacatcttgatcatagggcatgtggggaagtttactgggccatcacagacttttgttctagtgattgtatgtattaggagtcatagcatgccctacggcagatctggattcttatacactaagatgtgtcttaagaatcacagtgcgtgcttcatccctttattgaagaacagaaaattatgactactctacaaggtggataatattttggtacctgtgcttgccacagccctgttcctcaaagctgaattgatagatttctctttgacttccaagacctagcagttataaggcaccttgaaataaattgtttgtgcctggaaatgcagggagggcaatagctttgtaaattggtttacatttttctccttgaatttttctagggtcctagtgcttccgaatcatttaatggcattgtcggatatcttttacatttcaattgcaatccatgaaattacatttagaagattcttagtacttaactgtagtcttctccatgaattacacgttagaatagactggcagcaactgaatatgcagcaagtaagcctctagcttatagtttcatccctacccctcatgcctgcgtgagtctgtacagggatatgtgtgtgtgtgtgtgtgtgtgtgtgttagagaggaagaggaagagcagaatgtctgtatactacatgctgctaaggtagtgaataaatcagtaatgcaatattgtgggtccaaactactctttgcactactttatttacagtagtaaataaaattatttttatacaattgac

SEQ ID NO: 346711 - DNA, 4265 bp, Homo sapiens
ctgtattgcgtcatgagctgatctagaggataccgaagatgcacgatggcgcgtcccccagggcctcggcggccgctctgcctgcgcgctgctcctgctctgctacctgaatgttgtaccatctttgggtaggcagacttccctgacgacatcagtgatacccaaagctgagcagagcgtggcttacaaagactttatttattttactgtctttgaaggaaacgttcgcaacgtttctgaagtctcggttgagtatttatgctctcagccttgtgttgtcaatttggaagcagttgtttcatctgagttcagaagtagcattcccgtgtacaaaaaaaggtggaagaatgagaaacatcttcacaccagcaggacacaaatagtacatgtgaaatttccaagcattatggtttacagagatgattatttcatcagacattccatctctgtatctgcagtgatagtacgcgcctggattactcacaaatacagtggcagagactggaatgttaaatgggaggaaaacttgctccatgctgtagcaaagaattataccctcctgcagaccatcccgccttttgaacgccctttcaaagatcatcaagtgtgccttgagtggaacatgggttatatttggaaccttcgggcaaacaggattccacagtgtcctctggaaaatgatgtggttgccctgcttggctttccttatgcctccagtggagaaaacacaggcattgtcaagaagttcccgaggtttcggaaccgagagctggaggccactcgacgccagaggatggattacccagtgtttactgtttcattgtggctttatttactccattattgcaaggccaacctctgtgggattctgtactttgttgactctaatgagatgtacggcacaccttctgtatttcttacggaagagggctatttgcatattcagatgcatcttgtcaaaggggaagaccttgctgtaaaaactaaattcatcatacctttgaaggagtggtttcgactggatatctcttttaacggaggccagatagtagtaaccactagcattggacaggatttgaaaagctaccacaatcagaccattagcttccgggaggatttccattataatgacacagctgggtacttcattattggagggagcaggtatgtggctggcattgaagggttttttggacccctgaagtactatcgccttcgcagtctgcaccccgcccagatttttaatcccctccttgagaagcaacttgctgaacaaatcaagttatattatgaaaggtgtgctgaggttcaagaaatagtatctgtgtatgcatctgcagcaaagcacgggggcgagagacaagaagcatgccacctccacaactcctacctggacctccagcgcaggtatgggagaccctcgatgtgcagagccttcccctgggagaaggagctgaaagacaaacaccccagcttgttccaggcattgctggagatggatctgctgaccgtgccaaggaaccaaaatgaatctgtatcagaaatcggtgggaagatatttgagaaggctgtaaagagactctctagcattgatggtcttcaccaaattagctctatcgtcccctttctgacggattccagctgctgtggataccataaagcatcctactaccttgcagtcttttatgagactggattaaatgttcctcgggatcagctgcagggcatgttgtatagtttggttggaggccaggggagtgagaggctgtcttcaatgaatcttgggtataaacactaccagggtattgacaactaccccctggactgggaactgtcgtatgcctactacagcaacattgccaccaagacaccccttgaccagcacacactgcaaggagatcaggcatatgttgaaacaattagactaaaagatgatgaaatactcaaggtacaaaccaaagaagatggagatgtctttatgtggttgaagcatgaagctacccgaggcaatgcagcagctcagcaacgattggcccagatgctgttctgggggcagcaaggtgtggccaagaatcccgaagcagcaattgagtggtacgccaagggcgccctggagacggaggatcctgcgttaatctatgactatgccattgtgctattcaagggtcaaggagtaaaaaagaacagacggcttgccttagagctgatgaagaaagcagcttccaagggattgcatcaggcagtcaatggcctgggatggtattaccacaaattcaagaaaaattacgccaaagcagcaaagtactggttaaaagcagaagaaatggggaacccagatgcgtcatacaatcttggagtcctgcatttggatggcatcttccctggagttcctggaaggaatcaaactttagctggtgaatatttccataaggctgcgcaaggtggacacatggaagggaccttgtggtgttctctctactatatcacaggcaacctggagacattccctagagatcctgagaaagctgttgtatgggcaaaacatgtagctgagaaaaatggctacttgggccatgtcatccgcaaaggcctcaatgcctacctggaaggttcatggcatgaagctttgctgtattatgttttagcagcagaaactggaattgaagtgtcacagacaaatttagcacacatctgtgaggagaggccagacctggccaggagatacttgggtgttaactgtgtttggagatactataatttctctgtttttcaaatcgatgctccttcctttgcatatttgaagatgggagacctttactactatggccaccaaaaccagtcacaagacctggagttgtctgtgcagatgtacgcccaagccgccctggatggagactcccagggattttttaacctggccctgctaatcgaggaaggtacgataatcccacaccatatcttggatttcttggaaattgactcaactctccattctaataacatctccattctccaggaactgtacgaaaggtgctggagccacagtaacgaggagtccttcagcccctgctccttggcctggctttacctgcacttgcggcttctctggggtgctatcctgcactcagccctgatctactttctgggaacctttctgctatccatattgatcgcctggactgtgcagtatttccagtctgtctcagcaagcgatccccctccaagaccatcccaggcctccccagacactgccacgtccactgcaagtccagctgtgactccagctgcagatgcctctgaccaagaccagcccacagtaactaataacccggagccacgtgggtgaactgtgcactccagttctctccagatgagagagaatcttttcaacagctggtattgggaagctggggccagggcatgatcctgataaacaccttaaatgtcttgtcaactggatgcaaattttgcaattggtgtcattttttttaaagtcaaattacaaggaagtacccagatcaggcagtggtaataccaaaggtcatcaaacacatacaaggaacatcttgatcatagggcatgtggggaagtttactgggccatcacagacttttgttctagtgattgtatgtattaggagtcatagcatgccctacggcagatctggattcttatacactaagatgtgtcttaagaatcacagtgcgtgcttcatccctttattgaagaacagaaaattatgactactctacaaggtggataatattttggtacctgtgcttgccacagccctgttcctcaaagctgaattgatagatttctctttgacttccaagacctagcagttataaggcaccttgaaataaattgtttgtgcctggaaatgcagggagggcaatagctttgtaaattggtttacatttttctccttgaatttttctagggtcctagtgcttccgaatcatttaatggcattgtcggatatcttttacatttcaattgcaatccatgaaattacatttagaagattcttagtacttaactgtagtcttctccatgaattacacgttagaatagactggcagcaactgaatatgcagcaagtaagcctctagcttatagtttcatccctacccctcatgcctgcgtgagtctgtacagggatatgtgtgtgtgtgtgtgtgtgtgtgtgttagagaggaagaggaagagcagaatgtctgtatactacatgctgctaaggtagtgaataaatcagtaatgca

SEQ ID NO: 346712 - DNA, 4361 bp, Homo sapiens
ctgtattgcgtcatgagctgatctagaggataccgaagatgcacgatggcgcgtcccccagggcctcggcggccgctctgcctgcgcgctgctcctgctctgctacctgaatgttgtaccatctttgggtaggcagacttccctgacgacatcagtgatacccaaagctgagcagagcgtggcttacaaagactttatttattttactgtctttgaaggaaacgttcgcaacgtttctgaagtctcggttgagtatttatgctctcagccttgtgttgtcaatttggaagcagttgtttcatctgagttcagaagtagcattcccgtgtacaaaaaaaggtggaagaatgagaaacatcttcacaccagcaggacacaaatagtacatgtgaaatttccaagcattatggtttacagagatgattatttcatcagacattccatctctgtatctgcagtgatagtacgcgcctggattactcacaaatacagtggcagagactggaatgttaaatgggaggaaaacttgctccatgctgtagcaaagaattataccctcctgcagaccatcccgccttttgaacgccctttcaaagatcatcaagtgtgccttgagtggaacatgggttatatttggaaccttcgggcaaacaggattccacagtgtcctctggaaaatgatgtggttgccctgcttggctttccttatgcctccagtggagaaaacacaggcattgtcaagaagttcccgaggtttcggaaccgagagctggaggccactcgacgccagaggatggattacccagtgtttactgtttcattgtggctttatttactccattattgcaaggccaacctctgtgggattctgtactttgttgactctaatgagatgtacggcacaccttctgtatttcttacggaagagggctatttgcatattcagatgcatcttgtcaaaggggaagaccttgctgtaaaaactaaattcatcatacctttgaaggagtggtttcgactggatatctcttttaacggaggccagatagtagtaaccactagcattggacaggatttgaaaagctaccacaatcagaccattagcttccgggaggatttccattataatgacacagctgggtacttcattattggagggagcaggtatgtggctggcattgaagggttttttggacccctgaagtactatcgccttcgcagtctgcaccccgcccagatttttaatcccctccttgagaagcaacttgctgaacaaatcaagttatattatgaaaggtgtgctgaggttcaagaaatagtatctgtgtatgcatctgcagcaaagcacgggggcgagagacaagaagcatgccacctccacaactcctacctggacctccagcgcaggtatgggagaccctcgatgtgcagagccttcccctgggagaaggagctgaaagacaaacaccccagcttgttccaggcattgctggagatggatctgctgaccgtgccaaggaaccaaaatgaatctgtatcagaaatcggtgggaagatatttgagaaggctgtaaagagactctctagcattgatggtcttcaccaaattagctctatcgtcccctttctgacggattccagctgctgtggataccataaagcatcctactaccttgcagtcttttatgagactggattaaatgttcctcgggatcagctgcagggcatgttgtatagtttggttggaggccaggggagtgagaggctgtcttcaatgaatcttgggtataaacactaccagggtattgacaactaccccctggactgggaactgtcgtatgcctactacagcaacattgccaccaagacaccccttgaccagcacacactgcaaggagatcaggcatatgttgaaacaattagactaaaagatgatgaaatactcaaggtacaaaccaaagaagatggagatgtctttatgtggttgaagcatgaagctacccgaggcaatgcagcagctcagcaacgattggcccagatgctgttctgggggcagcaaggtgtggccaagaatcccgaagcagcaattgagtggtacgccaagggcgccctggagacggaggatcctgcgttaatctatgactatgccattgtgctattcaagggtcaaggagtaaaaaagaacagacggcttgccttagagctgatgaagaaagcagcttccaagggattgcatcaggcagtcaatggcctgggatggtattaccacaaattcaagaaaaattacgccaaagcagcaaagtactggttaaaagcagaagaaatggggaacccagatgcgtcatacaatcttggagtcctgcatttggatggcatcttccctggagttcctggaaggaatcaaactttagctggtgaatatttccataaggctgcgcaaggtggacacatggaagggaccttgtggtgttctctctactatatcacaggcaacctggagacattccctagagatcctgagaaagctgttgtatgggcaaaacatgtagctgagaaaaatggctacttgggccatgtcatccgcaaaggcctcaatgcctacctggaaggttcatggcatgaagctttgctgtattatgttttagcagcagaaactggaattgaagtgtcacagacaaatttagcacacatctgtgaggagaggccagacctggccaggagatacttgggtgttaactgtgtttggagatactataatttctctgtttttcaaatcgatgctccttcctttgcatatttgaagatgggagacctttactactatggccaccaaaaccagtcacaagacctggagttgtctgtgcagatgtacgcccaagccgccctggatggagactcccagggattttttaacctggccctgctaatcgaggaaggtacgataatcccacaccatatcttggatttcttggaaattgactcaactctccattctaataacatctccattctccaggaactgtacgaaaggtgctggagccacagtaacgaggagtccttcagcccctgctccttggcctggctttacctgcacttgcggcttctctggggtgctatcctgcactcagccctgatctactttctgggaacctttctgctatccatattgatcgcctggactgtgcagtatttccagtctgtctcagcaagcgatccccctccaagaccatcccaggcctccccagacactgccacgtccactgcaagtccagctgtgactccagctgcagatgcctctgaccaagaccagcccacagtaactaataacccggagccacgtgggtgaactgtgcactccagttctctccagatgagagagaatcttttcaacagctggtattgggaagctggggccagggcatgatcctgataaacaccttaaatgtcttgtcaactggatgcaaattttgcaattggtgtcattttttttaaagtcaaattacaaggaagtacccagatcaggcagtggtaataccaaaggtcatcaaacacatacaaggaacatcttgatcatagggcatgtggggaagtttactgggccatcacagacttttgttctagtgattgtatgtattaggagtcatagcatgccctacggcagatctggattcttatacactaagatgtgtcttaagaatcacagtgcgtgcttcatccctttattgaagaacagaaaattatgactactctacaaggtggataatattttggtacctgtgcttgccacagccctgttcctcaaagctgaattgatagatttctctttgacttccaagacctagcagttataaggcaccttgaaataaattgtttgtgcctggaaatgcagggagggcaatagctttgtaaattggtttacatttttctccttgaatttttctagggtcctagtgcttccgaatcatttaatggcattgtcggatatcttttacatttcaattgcaatccatgaaattacatttagaagattcttagtacttaactgtagtcttctccatgaattacacgttagaatagactggcagcaactgaatatgcagcaagtaagcctctagcttatagtttcatccctacccctcatgcctgcgtgagtctgtacagggatatgtgtgtgtgtgtgtgtgtgtgtgtgttagagaggaagaggaagagcagaatgtctgtatactacatgctgctaaggtagtgaataaatcagtaatgcaatattgtgggtccaaactactctttgcactactttatttacagtagtaaataaaattatttttatacaattgacaattgactaccagaaagtggtt

SEQ ID NO: 346713 - DNA, 4380 bp, Homo sapiens
ctgtattgcgtcatgagctgatctagaggataccgaagatgcacgatggcgcgtcccccagggcctcggcggccgctctgcctgcgcgctgctcctgctctgctacctgaatgttgtaccatctttgggtaggcagacttccctgacgacatcagtgatacccaaagctgagcagagcgtggcttacaaagactttatttattttactgtctttgaaggaaacgttcgcaacgtttctgaagtctcggttgagtatttatgctctcagccttgtgttgtcaatttggaagcagttgtttcatctgagttcagaagtagcattcccgtgtacaaaaaaaggtggaagaatgagaaacatcttcacaccagcaggacacaaatagtacatgtgaaatttccaagcattatggtttacagagatgattatttcatcagacattccatctctgtatctgcagtgatagtacgcgcctggattactcacaaatacagtggcagagactggaatgttaaatgggaggaaaacttgctccatgctgtagcaaagaattataccctcctgcagaccatcccgccttttgaacgccctttcaaagatcatcaagtgtgccttgagtggaacatgggttatatttggaaccttcgggcaaacaggattccacagtgtcctctggaaaatgatgtggttgccctgcttggctttccttatgcctccagtggagaaaacacaggcattgtcaagaagttcccgaggtttcggaaccgagagctggaggccactcgacgccagaggatggattacccagtgtttactgtttcattgtggctttatttactccattattgcaaggccaacctctgtgggattctgtactttgttgactctaatgagatgtacggcacaccttctgtatttcttacggaagagggctatttgcatattcagatgcatcttgtcaaaggggaagaccttgctgtaaaaactaaattcatcatacctttgaaggagtggtttcgactggatatctcttttaacggaggccagatagtagtaaccactagcattggacaggatttgaaaagctaccacaatcagaccattagcttccgggaggatttccattataatgacacagctgggtacttcattattggagggagcaggtatgtggctggcattgaagggttttttggacccctgaagtactatcgccttcgcagtctgcaccccgcccagatttttaatcccctccttgagaagcaacttgctgaacaaatcaagttatattatgaaaggtgtgctgaggttcaagaaatagtatctgtgtatgcatctgcagcaaagcacgggggcgagagacaagaagcatgccacctccacaactcctacctggacctccagcgcaggtatgggagaccctcgatgtgcagagccttcccctgggagaaggagctgaaagacaaacaccccagcttgttccaggcattgctggagatggatctgctgaccgtgccaaggaaccaaaatgaatctgtatcagaaatcggtgggaagatatttgagaaggctgtaaagagactctctagcattgatggtcttcaccaaattagctctatcgtcccctttctgacggattccagctgctgtggataccataaagcatcctactaccttgcagtcttttatgagactggattaaatgttcctcgggatcagctgcagggcatgttgtatagtttggttggaggccaggggagtgagaggctgtcttcaatgaatcttgggtataaacactaccagggtattgacaactaccccctggactgggaactgtcgtatgcctactacagcaacattgccaccaagacaccccttgaccagcacacactgcaaggagatcaggcatatgttgaaacaattagactaaaagatgatgaaatactcaaggtacaaaccaaagaagatggagatgtctttatgtggttgaagcatgaagctacccgaggcaatgcagcagctcagcaacgattggcccagatgctgttctgggggcagcaaggtgtggccaagaatcccgaagcagcaattgagtggtacgccaagggcgccctggagacggaggatcctgcgttaatctatgactatgccattgtgctattcaagggtcaaggagtaaaaaagaacagacggcttgccttagagctgatgaagaaagcagcttccaagggattgcatcaggcagtcaatggcctgggatggtattaccacaaattcaagaaaaattacgccaaagcagcaaagtactggttaaaagcagaagaaatggggaacccagatgcgtcatacaatcttggagtcctgcatttggatggcatcttccctggagttcctggaaggaatcaaactttagctggtgaatatttccataaggctgcgcaaggtggacacatggaagggaccttgtggtgttctctctactatatcacaggcaacctggagacattccctagagatcctgagaaagctgttgtatgggcaaaacatgtagctgagaaaaatggctacttgggccatgtcatccgcaaaggcctcaatgcctacctggaaggttcatggcatgaagctttgctgtattatgttttagcagcagaaactggaattgaagtgtcacagacaaatttagcacacatctgtgaggagaggccagacctggccaggagatacttgggtgttaactgtgtttggagatactataatttctctgtttttcaaatcgatgctccttcctttgcatatttgaagatgggagacctttactactatggccaccaaaaccagtcacaagacctggagttgtctgtgcagatgtacgcccaagccgccctggatggagactcccagggattttttaacctggccctgctaatcgaggaaggtacgataatcccacaccatatcttggatttcttggaaattgactcaactctccattctaataacatctccattctccaggaactgtacgaaaggtgctggagccacagtaacgaggagtccttcagcccctgctccttggcctggctttacctgcacttgcggcttctctggggtgctatcctgcactcagccctgatctactttctgggaacctttctgctatccatattgatcgcctggactgtgcagtatttccagtctgtctcagcaagcgatccccctccaagaccatcccaggcctccccagacactgccacgtccactgcaagtccagctgtgactccagctgcagatgcctctgaccaagaccagcccacagtaactaataacccggagccacgtgggtgaactgtgcactccagttctctccagatgagagagaatcttttcaacagctggtattgggaagctggggccagggcatgatcctgataaacaccttaaatgtcttgtcaactggatgcaaattttgcaattggtgtcattttttttaaagtcaaattacaaggaagtacccagatcaggcagtggtaataccaaaggtcatcaaacacatacaaggaacatcttgatcatagggcatgtggggaagtttactgggccatcacagacttttgttctagtgattgtatgtattaggagtcatagcatgccctacggcagatctggattcttatacactaagatgtgtcttaagaatcacagtgcgtgcttcatccctttattgaagaacagaaaattatgactactctacaaggtggataatattttggtacctgtgcttgccacagccctgttcctcaaagctgaattgatagatttctctttgacttccaagacctagcagttataaggcaccttgaaataaattgtttgtgcctggaaatgcagggagggcaatagctttgtaaattggtttacatttttctccttgaatttttctagggtcctagtgcttccgaatcatttaatggcattgtcggatatcttttacatttcaattgcaatccatgaaattacatttagaagattcttagtacttaactgtagtcttctccatgaattacacgttagaatagactggcagcaactgaatatgcagcaagtaagcctctagcttatagtttcatccctacccctcatgcctgcgtgagtctgtacagggatatgtgtgtgtgtgtgtgtgtgtgtgtgttagagaggaagaggaagagcagaatgtctgtatactacatgctgctaaggtagtgaataaatcagtaatgcaatattgtgggtccaaactactctttgcactactttatttacagtagtaaataaaattatttttatacaattgacccatgctattgaaacttctaaaactaggggggatcctctag

SEQ ID NO: 346714 - DNA, 3231 bp, Homo sapiens
ctgtattgcgtcatgagctgatctagaggataccgaagatgcacgatggcgcgtcccccagggcctcggcggccgctctgcctgcgcgctgctcctgctctgctacctgaatgttgtaccatctttgggtaggcagacttccctgacgacatcagtgatacccaaagctgagcagagcgtggcttacaaagactttatttattttactgtctttgaaggaaacgttcgcaacgtttctgaagtctcggttgagtatttatgctctcagccttgtgttgtcaatttggaagcagttgtttcatctgagttcagaagtagcattcccgtgtacaaaaaaaggtggaagaatgagaaacatcttcacaccagcaggacacaaatagtacatgtgaaatttccaagcattatggtttacagagatgattatttcatcagacattccatctctgtatctgcagtgatagtacgcgcctggattactcacaaatacagtggcagagactggaatgttaaatgggaggaaaacttgctccatgctgtagcaaagaattataccctcctgcagaccatcccgccttttgaacgccctttcaaagatcatcaagtgtgccttgagtggaacatgggttatatttggaaccttcgggcaaacaggattccacagtgtcctctggaaaatgatgtggttgccctgcttggctttccttatgcctccagtggagaaaacacaggcattgtcaagaagttcccgaggtttcggaaccgagagctggaggccactcgacgccagaggatggattacccagtgtttactgtttcattgtggctttatttactccattattgcaaggccaacctctgtgggattctgtactttgttgactctaatgagatgtacggcacaccttctgtatttcttacggaagagggctatttgcatattcagatgcatcttgtcaaaggggaagaccttgctgtaaaaactaaattcatcatacctttgaaggagtggtttcgactggatatctcttttaacggaggccagatagtagtaaccactagcattggacaggatttgaaaagctaccacaatcagaccattagcttccgggaggatttccattataatgacacagctgggtacttcattattggagggagcaggtatgtggctggcattgaagggttttttggacccctgaagtactatcgccttcgcagtctgcaccccgcccagatttttaatcccctccttgagaagcaacttgctgaacaaatcaagttatattatgaaaggtgtgctgaggttcaagaaatagtatctgtgtatgcatctgcagcaaagcacgggggcgagagacaagaagcatgccacctccacaactcctacctggacctccagcgcaggtatgggagaccctcgatgtgcagagccttcccctgggagaaggagctgaaagacaaacaccccagcttgttccaggcattgctggagatggatctgctgaccgtgccaaggaaccaaaatgaatctgtatcagaaatcggtgggaagatatttgagaaggctgtaaagagactctctagcattgatggtcttcaccaaattagctctatcgtcccctttctgacggattccagctgctgtggataccataaagcatcctactaccttgcagtcttttatgagactggattaaatgttcctcgggatcagctgcagggcatgttgtatagtttggttggaggccaggggagtgagaggctgtcttcaatgaatcttgggtataaacactaccagggtattgacaactaccccctggactgggaactgtcgtatgcctactacagcaacattgccaccaagacaccccttgaccagcacacactgcaaggagatcaggcatatgttgaaacaattagactaaaagatgatgaaatactcaaggtacaaaccaaagaagatggagatgtctttatgtggttgaagcatgaagctacccgaggcaatgcagcagctcagcaacgattggcccagatgctgttctgggggcagcaaggtgtggccaagaatcccgaagcagcaattgagtggtacgccaagggcgccctggagacggaggatcctgcgttaatctatgactatgccattgtgctattcaagggtcaaggagtaaaaaagaacagacggcttgccttagagctgatgaagaaagcagcttccaagggattgcatcaggcagtcaatggcctgggatggtattaccacaaattcaagaaaaattacgccaaagcagcaaagtactggttaaaagcagaagaaatggggaacccagatgcgtcatacaatcttggagtcctgcatttggatggcatcttccctggagttcctggaaggaatcaaactttagctggtgaatatttccataaggctgcgcaaggtggacacatggaagggaccttgtggtgttctctctactatatcacaggcaacctggagacattccctagagatcctgagaaagctgttgtatgggcaaaacatgtagctgagaaaaatggctacttgggccatgtcatccgcaaaggcctcaatgcctacctggaaggttcatggcatgaagctttgctgtattatgttttagcagcagaaactggaattgaagtgtcacagacaaatttagcacacatctgtgaggagaggccagacctggccaggagatacttgggtgttaactgtgtttggagatactataatttctctgtttttcaaatcgatgctccttcctttgcatatttgaagatgggagacctttactactatggccaccaaaaccagtcacaagacctggagttgtctgtgcagatgtacgcccaagccgccctggatggagactcccagggattttttaacctggccctgctaatcgaggaaggtacgataatcccacaccatatcttggatttcttggaaattgactcaactctccattctaataacatctccattctccaggaactgtacgaaagctggagccacagtaaacagatggagtccttcagcacccatgcatccatatggccaaggcatttacacatgcacattgcggcattcatcatggggtgcataatcacatgcaagcatcaagaacacatgaatcatacatattcatgggaaccatttcatgcataatcacaataattgaattatcctcggaggggagtcatgaa

SEQ ID NO: 346715 - DNA, 3418 bp, Homo sapiens
ctgtattgcgtcatgagctgatctagaggataccgaagatgcacgatggcgcgtcccccagggcctcggcggccgctctgcctgcgcgctgctcctgctctgctacctgaatgttgtaccatctttgggtaggcagacttccctgacgacatcagtgatacccaaagctgagcagagcgtggcttacaaagactttatttattttactgtctttgaaggaaacgttcgcaacgtttctgaagtctcggttgagtatttatgctctcagccttgtgttgtcaatttggaagcagttgtttcatctgagttcagaagtagcattcccgtgtacaaaaaaaggtggaagaatgagaaacatcttcacaccagcaggacacaaatagtacatgtgaaatttccaagcattatggtttacagagatgattatttcatcagacattccatctctgtatctgcagtgatagtacgcgcctggattactcacaaatacagtggcagagactggaatgttaaatgggaggaaaacttgctccatgctgtagcaaagaattataccctcctgcagaccatcccgccttttgaacgccctttcaaagatcatcaagtgtgccttgagtggaacatgggttatatttggaaccttcgggcaaacaggattccacagtgtcctctggaaaatgatgtggttgccctgcttggctttccttatgcctccagtggagaaaacacaggcattgtcaagaagttcccgaggtttcggaaccgagagctggaggccactcgacgccagaggatggattacccagtgtttactgtttcattgtggctttatttactccattattgcaaggccaacctctgtgggattctgtactttgttgactctaatgagatgtacggcacaccttctgtatttcttacggaagagggctatttgcatattcagatgcatcttgtcaaaggggaagaccttgctgtaaaaactaaattcatcatacctttgaaggagtggtttcgactggatatctcttttaacggaggccagatagtagtaaccactagcattggacaggatttgaaaagctaccacaatcagaccattagcttccgggaggatttccattataatgacacagctgggtacttcattattggagggagcaggtatgtggctggcattgaagggttttttggacccctgaagtactatcgccttcgcagtctgcaccccgcccagatttttaatcccctccttgagaagcaacttgctgaacaaatcaagttatattatgaaaggtgtgctgaggttcaagaaatagtatctgtgtatgcatctgcagcaaagcacgggggcgagagacaagaagcatgccacctccacaactcctacctggacctccagcgcaggtatgggagaccctcgatgtgcagagccttcccctgggagaaggagctgaaagacaaacaccccagcttgttccaggcattgctggagatggatctgctgaccgtgccaaggaaccaaaatgaatctgtatcagaaatcggtgggaagatatttgagaaggctgtaaagagactctctagcattgatggtcttcaccaaattagctctatcgtcccctttctgacggattccagctgctgtggataccataaagcatcctactaccttgcagtcttttatgagactggattaaatgttcctcgggatcagctgcagggcatgttgtatagtttggttggaggccaggggagtgagaggctgtcttcaatgaatcttgggtataaacactaccagggtattgacaactaccccctggactgggaactgtcgtatgcctactacagcaacattgccaccaagacaccccttgaccagcacacactgcaaggagatcaggcatatgttgaaacaattagactaaaagatgatgaaatactcaaggtacaaaccaaagaagatggagatgtctttatgtggttgaagcatgaagctacccgaggcaatgcagcagctcagcaacgattggcccagatgctgttctgggggcagcaaggtgtggccaagaatcccgaagcagcaattgagtggtacgccaagggcgccctggagacggaggatcctgcgttaatctatgactatgccattgtgctattcaagggtcaaggagtaaaaaagaacagacggcttgccttagagctgatgaagaaagcagcttccaagggattgcatcaggcagtcaatggcctgggatggtattaccacaaattcaagaaaaattacgccaaagcagcaaagtactggttaaaagcagaagaaatggggaacccagatgcgtcatacaatcttggagtcctgcatttggatggcatcttccctggagttcctggaaggaatcaaactttagctggtgaatatttccataaggctgcgcaaggtggacacatggaagggaccttgtggtgttctctctactatatcacaggcaacctggagacattccctagagatcctgagaaagctgttgtatgggcaaaacatgtagctgagaaaaatggctacttgggccatgtcatccgcaaaggcctcaatgcctacctggaaggttcatggcatgaagctttgctgtattatgttttagcagcagaaactggaattgaagtgtcacagacaaatttagcacacatctgtgaggagaggccagacctggccaggagatacttgggtgttaactgtgtttggagatactataatttctctgtttttcaaatcgatgctccttcctttgcatatttgaagatgggagacctttactactatggccaccaaaaccagtcacaagacctggagttgtctgtgcagatgtacgcccaagccgccctggatggagactcccagggattttttaacctggccctgctaatcgaggaaggtacgataatcccacaccatatcttggatttcttggaaattgactcaactctccattctaataacatctccattctccaggaactgtacgaaagatctactttctgggaacctttctgctatccatattgatcgcctggactgtgcagtatttccagtctgtctcagacccccaggaacaaaatataacagagtagtgtaaaagtttgtcctctccagcaatctcatggcaaaaaggctcgaaagcacaactgtgcaaacacatttgaagacgtccatcatgtcacttccactgagatcccactggcgaaagcaagtcacatggggcgcggtggctcacacctgtaatctcagcaccttgggaggctgaagcaggcagatcacttaaggccagaagttcaagaccagcctgggcaaaatggagaaaccccatctcgactaaaaaatacaaaaattagccgggcatggtggtgcatgcctgta

SEQ ID NO: 346716 - DNA, 2412 bp, Homo sapiens
ctgtattgcgtcatgagctgatctagaggataccgaagatgcacgatggcgcgtcccccagggcctcggcggccgctctgcctgcgcgctgctcctgctctgctacctgaatgttgtaccatctttgggtaggcagacttccctgacgacatcagtgatacccaaagctgagcagagcgtggcttacaaagactttatttattttactgtctttgaaggaaacgttcgcaacgtttctgaagtctcggttgagtatttatgctctcagccttgtgttgtcaatttggaagcagttgtttcatctgagttcagaagtagcattcccgtgtacaaaaaaaggtggaagaatgagaaacatcttcacaccagcaggacacaaatagtacatgtgaaatttccaagcattatggtttacagagatgattatttcatcagacattccatctctgtatctgcagtgatagtacgcgcctggattactcacaaatacagtggcagagactggaatgttaaatgggaggaaaacttgctccatgctgtagcaaagaattataccctcctgcagaccatcccgccttttgaacgccctttcaaagatcatcaagtgtgccttgagtggaacatgggttatatttggaaccttcgggcaaacaggattccacagtgtcctctggaaaatgatgtggttgccctgcttggctttccttatgcctccagtggagaaaacacaggcattgtcaagaagttcccgaggtttcggaaccgagagctggaggccactcgacgccagaggatggattacccagtgtttactgtttcattgtggctttatttactccattattgcaaggccaacctctgtgggattctgtactttgttgactctaatgagatgtacggcacaccttctgtatttcttacggaagagggctatttgcatattcagatgcatcttgtcaaaggggaagaccttgctgtaaaaactaaattcatcatacctttgaaggagtggtttcgactggatatctcttttaacggaggccagatagtagtaaccactagcattggacaggatttgaaaagctaccacaatcagaccattagcttccgggaggatttccattataatgacacagctgggtacttcattattggagggagcaggtatgtggctggcattgaagggttttttggacccctgaagtactatcgccttcgcagtctgcaccccgcccagatttttaatcccctccttgagaagcaacttgctgaacaaatcaagttatattatgaaaggtgtgctgaggttcaagaaatagtatctgtgtatgcatctgcagcaaagcacgggggcgagagacaagaagcatgccacctccacaactcctacctggacctccagcgcaggtatgggagaccctcgatgtgcagagccttcccctgggagaaggagctgaaagacaaacaccccagcttgttccaggcattgctggagatggatctgctgaccgtgccaaggaaccaaaatgaatctgtatcagaaatcggtgggaagatatttgagaaggctgtaaagagactctctagcattgatggtcttcaccaaattagctctatcgtcccctttctgacggattccagctgctgtggataccataaagcatcctactaccttgcagtcttttatgagactggattaaatgttcctcgggatcagctgcagggcatgttgtatagtttggttggaggccaggggagtgagaggctgtcttcaatgaatcttgggtataaacactaccagggtattgacaactaccccctggactgggaactgtcgtatgcctactacagcaacattgccaccaagacaccccttgaccagcacacactgcaaggagatcaggcatatgttgaaacaattagactaaaagatgatgaaatactcaaggtacaaaccaaagaagatggagatgtctttatgtggttgaagcatgaagctacccgaggcaatgcagcagctcagcaacgattggcccagatgctgttctgggggcagcaaggtgtggccaagaatcccgaagcagcaattgagtggtacgccaagggcgccctggagacggaggatcctgcgttaatctatgactatgccattgtgctattcaagggtcaaggagtaaaaaagaacagacggcttgccttagagctgatgaagaaagcagcttccaagggattgcatcaggcagtcaatggcctgggatggtattaccacaaattcaagaaaaattacgccaaagcagcaaagtactggttaaagcaaaaaacaaatcaacaccacacaaactttttggggcgccttgggcccgaaaaagttttataccacactctgtggggcccgggccccagggttgggac

SEQ ID NO: 346717 - DNA, 2049 bp, Homo sapiens
ctgtattgcgtcatgagctgatctagaggataccgaagatgcacgatggcgcgtcccccagggcctcggcggccgctctgcctgcgcgctgctcctgctctgctacctgaatgttgtaccatctttgggtaggcagacttccctgacgacatcagtgatacccaaagctgagcagagcgtggcttacaaagactttatttattttactgtctttgaaggaaacgttcgcaacgtttctgaagtctcggttgagtatttatgctctcagccttgtgttgtcaatttggaagcagttgtttcatctgagttcagaagtagcattcccgtgtacaaaaaaaggtggaagaatgagaaacatcttcacaccagcaggacacaaatagtacatgtgaaatttccaagcattatggtttacagagatgattatttcatcagacattccatctctgtatctgcagtgatagtacgcgcctggattactcacaaatacagtggcagagactggaatgttaaatgggaggaaaacttgctccatgctgtagcaaagaattataccctcctgcagaccatcccgccttttgaacgccctttcaaagatcatcaagtgtgccttgagtggaacatgggttatatttggaaccttcgggcaaacaggattccacagtgtcctctggaaaatgatgtggttgccctgcttggctttccttatgcctccagtggagaaaacacaggcattgtcaagaagttcccgaggtttcggaaccgagagctggaggccactcgacgccagaggatggattacccagtgtttactgtttcattgtggctttatttactccattattgcaaggccaacctctgtgggattctgtactttgttgactctaatgagatgtacggcacaccttctgtatttcttacggaagagggctatttgcatattcagatgcatcttgtcaaaggggaagaccttgctgtaaaaactaaattcatcatacctttgaaggagtggtttcgactggatatctcttttaacggaggccagatagtagtaaccactagcattggacaggatttgaaaagctaccacaatcagaccattagcttccgggaggatttccattataatgacacagctgggtacttcattattggagggagcaggtatgtggctggcattgaagggttttttggacccctgaagtactatcgccttcgcagtctgcaccccgcccagatttttaatcccctccttgagaagcaacttgctgaacaaatcaagttatattatgaaaggtgtgctgaggttcaagaaatagtatctgtgtatgcatctgcagcaaagcacgggggcgagagacaagaagcatgccacctccacaactcctacctggacctccagcgcaggtatgggagaccctcgatgtgcagagccttcccctgggagaaggagctgaaagacaaacaccccagcttgttccaggcattgctggagatggatctgctgaccgtgccaaggaaccaaaatgaatctgtatcagaaatcggtgggaagatatttgagaaggctgtaaagagactctctagcattgatggtcttcaccaaattagctctatcgtcccctttctgacggattccagctgctgtggataccataaagcatcctactaccttgcagtcttttatgagactggattaaatgttcctcgggatcagctgcagggcatgttgtatagtttggttggaggccaggggagtgagaggctgtcttcaatgaatcttgggtataaacactaccagggtattgacaactaccccctggactgggaactgtcgtatgcctactacagcaacattgccaccaagacaccccttgaccagcacacactgcaaggagatcaggcatatgttgaaacaattagactaaaagatgatgaaatactcaaggtacaaaccaaagaagatggagatgtctttatgtggttgaagcatgaagctacccgaggcaatgcagcagctcagcccctgagttacagctcgcccctgag

SEQ ID NO: 346718 - DNA, 503 bp, Homo sapiens
gaaaatgatgggtttaaatgaaatggatcctgttgacagtaaattttcttattctgttctttaggaaccggcgaatatttggcttgttgatgggtacccttcaaaaatttaaacaagaatccactgttgctactgaaagggtatttatccaagttttgttttgcatcatatatttaagttatcaaagtagtagattaatgtttttttaaaaaaatccttaaagctcttttaagacctaactgtaaacctgaaacaaagccaagtaaaacttggtttaacttcttatagaacagctttacttaaacattgtgttggaatataacagttgttgatatcatagctaatagccttgaaatttagatatgtgaaaaaaaaaagcctcaagtctccatttccttaaagacaaattacagtcagtaccaagtgctaagttctagttagttggtatcctgaattgaaaatgtgagccactgtgcccggcctgcagatacctttacatagtg

SEQ ID NO: 346719 - DNA, 823 bp, Homo sapiens
  misc_feature (819)..(819): n is a, c, g, or t
  misc_feature (822)..(822): n is a, c, g, or t
tgtcagtcctttcgcgcctcggcggcgcggcatagcccggctcggcctgtaaagcagtctcaagcctgccgcagggagaagatggcggtcgccgtgagaactttgcaggaacagctggaaaaggccaaagagagtcttaagaacgtggatgagaacattcgcaagctcaccgggcgggatccgaatgacgtgaggcccatccaagccagattgctggccctttctggtcctggtggaggtagaggacgtggtagtttattactgaggcgtggattctcagatagtggaggaggacccccagccaaacagagagaccttgaaggggcagtcagtaggctgggcggggagcgtcggaccagaagagaatcacgccaggaaagcgacccggaggatgatgatgttaaaaagccagcattgcagtcttcagttgtagctacctccaaagagcgcacacgtagagaccttatccaggatcaaaatatggatgaaaagggaaagcaaaggaaccggcgaatatttggcttgttgatgggtacccttcaaaaatttaaacaagaatccactgttgctactgaaaggcaaaagcggcgccaggaaattgaacaaaaacttgaagttcaggcagaagaagagagaaagcaggttgaaaatgaaaggagagaactgtttgaagagaggcgtgctaaacagacagaactgcggcttttggaacagaaagttgagcttgcgcagctgagaagaatggatgacatatgccaaatattaattttagactaacaagccattgttatatctgaaaaggcagttccaactatgagntcna

SEQ ID NO: 346720 - DNA, 457 bp, Homo sapiens
tatcttgttctaggctttattttcaaaccctagcttactgctgatacacaatggaagctctaaaagattgctggattaaagtggtagcttgagttaattaatacactgggcccactaattctttgtacaaggaagatagatgcctggctgagattatttaaagcattgtttctgtgggaaagtgttttgtttttttgtttgtttgggacggagtctcacttctgatgtgatcacgttaaaacggtgtaaggcacattacatcataggttaaaaggcctagaaaactccgcgctccccttgccagaactgcagactcgcgagcctaagtctccgagaactcagggattgtgaaacccgccccgactctgcgctagcagcgggatccaggcacccgcagctaactggggagggagatgactgcctggctgacttttcattggctcagagtcacaaaggc

SEQ ID NO: 346721 - DNA, 3799 bp, Homo sapiens
tgtcagtcctttcgcgcctcggcggcgcggcatagcccggctcggcctgtaaagcagtctcaagcctgccgcagggagaagatggcggtcgccgtgagaactttgcaggaacagctggaaaaggccaaagagagtcttaagaacgtggatgagaacattcgcaagctcaccgggcgggatccgaatgacgtgaggcccatccaagccagattgctggccctttctggtcctggtggaggtagaggacgtggtagtttattactgaggcgtggattctcagatagtggaggaggacccccagccaaacagagagaccttgaaggggcagtcagtaggctgggcggggagcgtcggaccagaagagaatcacgccaggaaagcgacccggaggatgatgatgttaaaaagccagcattgcagtcttcagttgtagctacctccaaagagcgcacacgtagagaccttatccaggatcaaaatatggatgaaaagggaaagcaaaggaaccggcgaatatttggcttgttgatgggtacccttcaaaaatttaaacaagaatccactgttgctactgaaaggcaaaagcggcgccaggaaattgaacaaaaacttgaagttcaggcagaagaagagagaaagcaggttgaaaatgaaaggagagaactgtttgaagagaggcgtgctaaacagacagaactgcggcttttggaacagaaagttgagcttgcgcagctgcaagaagaatggaatgaacataatgccaaaataattaaatatataagaactaagacaaagccccatttgttttatattcctggaagaatgtgtccagctacccaaaaactaatagaagagtcacagagaaaaatgaacgctttatttgaaggtagacgcatcgaatttgcagaacaaataaataaaatggaggctaggcctagaagacaatcaatgaaggaaaaagagcatcaggtggtgcgtaatgaagaacagaaggcggaacaagaagagggtaaggtggctcagcgagaggaagagttggaggagacaggtaatcagcacaatgatgtagaaatagaggaagcaggagaggaagaggaaaaggaaatagcgattgttcatagtgatgcagagaaagaacaggaggaggaagaacaaaaacaggaaatggaggttaagatggaggaggaaactgaggtaagggaaagtgagaagcagcaggatagtcagcctgaagaagttatggatgtgctagagatggttgagaatgtcaaacatgtaattgctgaccaggaggtaatggaaactaatcgagttgaaagtgtagaaccttcagaaaatgaagctagcaaagaattggaaccagaaatggaatttgaaattgagccagataaagaatgtaaatccctttctcctgggaaagagaatgtcagtgctttagacatggaaaaggagtctgaggaaaaagaagaaaaagaatctgagccccaacctgagcctgtggctcaacctcagcctcagtctcagccccagcttcagcttcaatcccagtcccaaccagtactccagtcccagcctccctctcagcctgaggatttgtcattagctgttttacagccaacaccccaagttactcaggagcaagggcatttactacctgagaggaaggattttcctgtagagtctgtaaaactcactgaggtaccagtagagccagtcttgacagtacatccagagagcaagagcaaaaccaaaactaggagcagaagtagaggtcgagctagaaataaaacaagcaagagtagaagtcgaagcagtagcagtagcagttctagtagcagttcaaccagtagcagcagtggaagtagttccagcagtggaagtagtagcagtcgcagtagttccagtagcagctccagtacaagtggcagcagcagcagagatagtagcagtagcactagtagtagtagtgagagtagaagtcggagtaggggccggggacataatagagatagaaagcacagaaggagcgtggatcggaagagaagggatacttcaggactagaaagaagtcacaaatcttcaaaaggtggtagtagtagagatacaaaaggatcaaaggataagaattcccggtccgacagaaagaggtctatatcagagagtagtcgatcaggcaaaagatcttcaagaagtgaaagagaccgaaaatcagacaggaaagacaaaaggcgttaatggaagaagccaggctttcttagccattctttgcagcagaagatttcttgataaaaaaggattacctttccttgtaaagaggatgctgccttaagaattgcatgttgtaaaaaatctttttggaaaatacagactgtttgtttaccagacattcttgtactttttgcataattttgtaagagttatttatcaaaattatgtgaggttccaaaatatgtaaaaatgataataataaaaaaagattaacatcccttgtcatcttttttaaatatcctatactcttcagtaagaatctgtatattttaataggcaaatctttaagtctgttcccttctaattctgtatcatacattgcttttgtagaaataaatgtgtgtttatttcattatttttgggatgtcctcgttgacacttgtataataaatatcctctttatcattttcagcttttaacactagatactgcacgtgattagaatgtttttgaaggtttcctcgtttttatttgccttggacagtttttagttgtcagagtcagagctttgcagctttgagggggaacagttctctttaaaatcatttgctattttctattctcccttgttattttaatctaagcattttcccccgtttctcatattttaaccatatgttcggtagataactaaacagtatgatctggttggcattttcttcctgatgatgggagcgtcattcttttgtcttcatggttacttgtgtgatataacatacatctgttaaagaaaatcacttctttctaggggagggaggtagaaaagtatctttcaaacttggtttttgagtttgtgtcttgtcttaactttgtgttggctctaacttaaacatgctgatatgtgttttcaagaattttgtttaaggaagtattgtatggaagtccacaaaatgaaggaagttcatctaggttttaatatgtaagcaagataacacacaagtgtaccaagtgattattaactttgttgttttacaaatttgtatgaacttggagtatctgttggccattactatacatgtgcaaataaatgtggcttagacttgtgtgactgcttaagactagtacttgtattaactttctgatgctttatacaagagagcacttaaattgcatccttctttgagtttaacactgtagctttagccttgactttgaatattcattttgccttcccttgacaagtaaatggttacagtgaaaatgtgaagaagtatttccagttagtttttgtgtgtatataactcacttgtgtaagtggatgtgttaaaagatctctttttaaaaatccttttattggagtaattattaaaacagtaaatgcatagagctttgcacagcaatctgtatccatgagccagttccaccactagtaccttcatctgtggcttatccagcaaaatgtttcatttcctgtgtgccctggcaggaaagaggttggtaaatagtgaattaaagggatgatcataaaatttaacctggttaaaaagcaccttatttgatgacagtttgtatgcactaaaatcctttatac

SEQ ID NO: 346722 - DNA, 3313 bp, Homo sapiens
tgtcagtcctttcgcgcctcggcggcgcggcatagcccggctcggcctgtaaagcagtctcaagcctgccgcagggagaagatggcggtcgccgtgagaactttgcaggaacagctggaaaaggccaaagagagtcttaagaacgtggatgagaacattcgcaagctcaccgggcgggatccgaatgacgtgaggcccatccaagccagattgctggccctttctggtcctggtggaggtagaggacgtggtagtttattactgaggcgtggattctcagatagtggaggaggacccccagccaaacagagagaccttgaaggggcagtcagtaggctgggcggggagcgtcggaccagaagagaatcacgccaggaaagcgacccggaggatgatgatgttaaaaagccagcattgcagtcttcagttgtagctacctccaaagagcgcacacgtagagaccttatccaggatcaaaatatggatgaaaagggaaagcaaaggaaccggcgaatatttggcttgttgatgggtacccttcaaaaatttaaacaagaatccactgttgctactgaaaggcaaaagcggcgccaggaaattgaacaaaaacttgaagttcaggcagaagaagagagaaagcaggttgaaaatgaaaggagagaactgtttgaagagaggcgtgctaaacagacagaactgcggcttttggaacagaaagttgagcttgcgcagctgcaagaagaatggaatgaacataatgccaaaataattaaatatataagaactaagacaaagccccatttgttttatattcctggaagaatgtgtccagctacccaaaaactaatagaagagtcacagagaaaaatgaacgctttatttgaaggtagacgcatcgaatttgcagaacaaataaataaaatggaggctaggcctagaagacaatcaatgaaggaaaaagagcatcaggtggtgcgtaatgaagaacagaaggcggaacaagaagagggtaaggtggctcagcgagaggaagagttggaggagacaggtaatcagcacaatgatgtagaaatagaggaagcaggagaggaagaggaaaaggaaatagcgattgttcatagtgatgcagagaaagaacaggaggaggaagaacaaaaacaggaaatggaggttaagatggaggaggaaactgaggtaagggaaagtgagaagcagcaggatagtcagcctgaagaagttatggatgtgctagagatggttgagaatgtcaaacatgtaattgctgaccaggaggtaatggaaactaatcgagttgaaagtgtagaaccttcagaaaatgaagctagcaaagaattggaaccagaaatggaatttgaaattgagccagataaagaatgtaaatccctttctcctgggaaagagaatgtcagtgctttagacatggaaaaggagtctgaggaaaaagaagaaaaagaatctgagccccaacctgagcctgtggctcaacctcagcctcagtctcagccccagcttcagcttcaatcccagtcccaaccagtactccagtcccagcctccctctcagcctgaggatttgtcattagctgttttacagccaacaccccaagttactcaggagcaagggcatttactacctgagaggaaggattttcctgtagagtctgtaaaactcactgaggtaccagtagagccagtcttgacagtacatccagagagcaagagcaaaaccaaaactaggagcagaagtagaggtcgagctagaaataaaacaagcaagagtagaagtcgaagcagtagcagtagcagttctagtagcagttcaaccagtagcagcagtggaagtagttccagcagtggaagtagtagcagtcgcagtagttccagtagcagctccagtacaagtggcagcagcagcagagatagtagcagtagcactagtagtagtagtgagagtagaagtcggagtaggggccggggacataatagagatagaaagcacagaaggagcgtggatcggaagagaagggatacttcaggactagaaagaagtcacaaatcttcaaaaggtggtagtagtagagatacaaaaggatcaaaggataagaattcccggtccgacagaaagaggtctatatcagagagtagtcgatcaggcaaaagatcttcaagaagtgaaagagaccgaaaatcagacaggaaagacaaaaggcgttaatggaagaagccaggctttcttagccattctttgcagcagaagatttcttgataaaaaaggattacctttccttgtaaagaggatgctgccttaagaattgcatgttgtaaaaaatctttttggaaaatacagactgtttgtttaccagacattcttgtactttttgcataattttgtaagagttatttatcaaaattatgtgaggttccaaaatatgtaaaaatgataataataaaaaaagattaacatcccttgtcatcttttttaaatatcctatactcttcagtaagaatctgtatattttaataggcaaatctttaagtctgttcccttctaattctgtatcatacattgcttttgtagaaataaatgtgtgtttatttcattatttttgggatgtcctcgttgacacttgtataataaatatcctctttatcattttcagcttttaacactagatactgcacgtgattagaatgtttttgaaggtttcctcgtttttatttgccttggacagtttttagttgtcagagtcagagctttgcagctttgagggggaacagttctctttaaaatcatttgctattttctattctcccttgttattttaatctaagcattttcccccgtttctcatattttaaccatatgttcggtagataactaaacagtatgatctggttggcattttcttcctgatgatgggagcgtcattcttttgtcttcatggttacttgtgtgatataacatacatctgttaaagaaaatcacttctttctaggggagggaggtagaaaagtatctttcaaacttggtttttgagtttgtgtcttgtcttaactttgtgttggctctaacttaaacatgctgatatgtgttttcaagaattttgtttaaggaagtattgtatggaagtccacaaaatgaaggaagttcatctaggttttaatatgtaagcaagataacacacaagtgtaccaagtgattattaactttgttgttttacaaatttgtatgaacttggagtatctgttggccattactatacatgtgcaaataaatgtggcttagacttgtg

SEQ ID NO: 346723 - DNA, 3830 bp, Homo sapiens
tgtcagtcctttcgcgcctcggcggcgcggcatagcccggctcggcctgtaaagcagtctcaagcctgccgcagggagaagatggcggtcgccgtgagaactttgcaggaacagctggaaaaggccaaagagagtcttaagaacgtggatgagaacattcgcaagctcaccgggcgggatccgaatgacgtgaggcccatccaagccagattgctggccctttctggtcctggtggaggtagaggacgtggtagtttattactgaggcgtggattctcagatagtggaggaggacccccagccaaacagagagaccttgaaggggcagtcagtaggctgggcggggagcgtcggaccagaagagaatcacgccaggaaagcgacccggaggatgatgatgttaaaaagccagcattgcagtcttcagttgtagctacctccaaagagcgcacacgtagagaccttatccaggatcaaaatatggatgaaaagggaaagcaaaggaaccggcgaatatttggcttgttgatgggtacccttcaaaaatttaaacaagaatccactgttgctactgaaaggcaaaagcggcgccaggaaattgaacaaaaacttgaagttcaggcagaagaagagagaaagcaggttgaaaatgaaaggagagaactgtttgaagagaggcgtgctaaacagacagaactgcggcttttggaacagaaagttgagcttgcgcagctgcaagaagaatggaatgaacataatgccaaaataattaaatatataagaactaagacaaagccccatttgttttatattcctggaagaatgtgtccagctacccaaaaactaatagaagagtcacagagaaaaatgaacgctttatttgaaggtagacgcatcgaatttgcagaacaaataaataaaatggaggctaggcctagaagacaatcaatgaaggaaaaagagcatcaggtggtgcgtaatgaagaacagaaggcggaacaagaagagggtaaggtggctcagcgagaggaagagttggaggagacaggtaatcagcacaatgatgtagaaatagaggaagcaggagaggaagaggaaaaggaaatagcgattgttcatagtgatgcagagaaagaacaggaggaggaagaacaaaaacaggaaatggaggttaagatggaggaggaaactgaggtaagggaaagtgagaagcagcaggatagtcagcctgaagaagttatggatgtgctagagatggttgagaatgtcaaacatgtaattgctgaccaggaggtaatggaaactaatcgagttgaaagtgtagaaccttcagaaaatgaagctagcaaagaattggaaccagaaatggaatttgaaattgagccagataaagaatgtaaatccctttctcctgggaaagagaatgtcagtgctttagacatggaaaaggagtctgaggaaaaagaagaaaaagaatctgagccccaacctgagcctgtggctcaacctcagcctcagtctcagccccagcttcagcttcaatcccagtcccaaccagtactccagtcccagcctccctctcagcctgaggatttgtcattagctgttttacagccaacaccccaagttactcaggagcaagggcatttactacctgagaggaaggattttcctgtagagtctgtaaaactcactgaggtaccagtagagccagtcttgacagtacatccagagagcaagagcaaaaccaaaactaggagcagaagtagaggtcgagctagaaataaaacaagcaagagtagaagtcgaagcagtagcagtagcagttctagtagcagttcaaccagtagcagcagtggaagtagttccagcagtggaagtagtagcagtcgcagtagttccagtagcagctccagtacaagtggcagcagcagcagagatagtagcagtagcactagtagtagtagtgagagtagaagtcggagtaggggccggggacataatagagatagaaagcacagaaggagcgtggatcggaagagaagggatacttcaggactagaaagaagtcacaaatcttcaaaaggtggtagtagtagagatacaaaaggatcaaaggataagaattcccggtccgacagaaagaggtctatatcagagagtagtcgatcaggcaaaagatcttcaagaagtgaaagagaccgaaaatcagacaggaaagacaaaaggcgttaatggaagaagccaggctttcttagccattctttgcagcagaagatttcttgataaaaaaggattacctttccttgtaaagaggatgctgccttaagaattgcatgttgtaaaaaatctttttggaaaatacagactgtttgtttaccagacattcttgtactttttgcataattttgtaagagttatttatcaaaattatgtgaggttccaaaatatgtaaaaatgataataataaaaaaagattaacatcccttgtcatcttttttaaatatcctatactcttcagtaagaatctgtatattttaataggcaaatctttaagtctgttcccttctaattctgtatcatacattgcttttgtagaaataaatgtgtgtttatttcattatttttgggatgtcctcgttgacacttgtataataaatatcctctttatcattttcagcttttaacactagatactgcacgtgattagaatgtttttgaaggtttcctcgtttttatttgccttggacagtttttagttgtcagagtcagagctttgcagctttgagggggaacagttctctttaaaatcatttgctattttctattctcccttgttattttaatctaagcattttcccccgtttctcatattttaaccatatgttcggtagataactaaacagtatgatctggttggcattttcttcctgatgatgggagcgtcattcttttgtcttcatggttacttgtgtgatataacatacatctgttaaagaaaatcacttctttctaggggagggaggtagaaaagtatctttcaaacttggtttttgagtttgtgtcttgtcttaactttgtgttggctctaacttaaacatgctgatatgtgttttcaagaattttgtttaaggaagtattgtatggaagtccacaaaatgaaggaagttcatctaggttttaatatgtaagcaagataacacacaagtgtaccaagtgattattaactttgttgttttacaaatttgtatgaacttggagtatctgttggccattactatacatgtgcaaataaatgtggcttagacttgtgaaaaaaaaaaacacaaaccccaacaaaaaaacaaaaaaaacaaacaacacaccaccacaccaaccacaaaaacaacaacaaacaaaccacacgcaaaacaacacaagacaaacacacaacaaacaacagagcgggggggggggggcgagagatatatgtgactactaggggggcggggacacgtagaacagaacaagccagacgagttgttgagagaaaagagaggagcacgccaaacagaaggcaaggagcgtataaaaaaagagcaagggcagagggcggcgacctgcggcagactcccacacaccaacaacggagatgggagaagacaaaagacaaacaggcggcgcgagaccacggtcggggaggggaagcgcaaccacaacacacgcaggacggcgcaaggaatgaggagcggagaacgacgcgacgaagaagagcaagagcgccgcggagcaaagaaagataattagacagcgaagggctgaggctgaggaccaacaagcgagaagcgtgg

SEQ ID NO: 346724 - DNA, 2487 bp, Homo sapiens
tgtcagtcctttcgcgcctcggcggcgcggcatagcccggctcggcctgtaaagcagtctcaagcctgccgcagggagaagatggcggtcgccgtgagaactttgcaggaacagctggaaaaggccaaagagagtcttaagaacgtggatgagaacattcgcaagctcaccgggcgggatccgaatgacgtgaggcccatccaagccagattgctggccctttctggtcctggtggaggtagaggacgtggtagtttattactgaggcgtggattctcagatagtggaggaggacccccagccaaacagagagaccttgaaggggcagtcagtaggctgggcggggagcgtcggaccagaagagaatcacgccaggaaagcgacccggaggatgatgatgttaaaaagccagcattgcagtcttcagttgtagctacctccaaagagcgcacacgtagagaccttatccaggatcaaaatatggatgaaaagggaaagcaaaggaaccggcgaatatttggcttgttgatgggtacccttcaaaaatttaaacaagaatccactgttgctactgaaaggcaaaagcggcgccaggaaattgaacaaaaacttgaagttcaggcagaagaagagagaaagcaggttgaaaatgaaaggagagaactgtttgaagagaggcgtgctaaacagacagaactgcggcttttggaacagaaagttgagcttgcgcagctgcaagaagaatggaatgaacataatgccaaaataattaaatatataagaactaagacaaagccccatttgttttatattcctggaagaatgtgtccagctacccaaaaactaatagaagagtcacagagaaaaatgaacgctttatttgaaggtagacgcatcgaatttgcagaacaaataaataaaatggaggctaggcctagaagacaatcaatgaaggaaaaagagcatcaggtggtgcgtaatgaagaacagaaggcggaacaagaagagggtaaggtggctcagcgagaggaagagttggaggagacaggtaatcagcacaatgatgtagaaatagaggaagcaggagaggaagaggaaaaggaaatagcgattgttcatagtgatgcagagaaagaacaggaggaggaagaacaaaaacaggaaatggaggttaagatggaggaggaaactgaggtaagggaaagtgagaagcagcaggatagtcagcctgaagaagttatggatgtgctagagatggttgagaatgtcaaacatgtaattgctgaccaggaggtaatggaaactaatcgagttgaaagtgtagaaccttcagaaaatgaagctagcaaagaattggaaccagaaatggaatttgaaattgagccagataaagaatgtaaatccctttctcctgggaaagagaatgtcagtgctttagacatggaaaaggagtctgaggaaaaagaagaaaaagaatctgagccccaacctgagcctgtggctcaacctcagcctcagtctcagccccagcttcagcttcaatcccagtcccaaccagtactccagtcccagcctccctctcagcctgaggatttgtcattagctgttttacagccaacaccccaagttactcaggagcaagggcatttactacctgagaggaaggattttcctgtagagtctgtaaaactcactgaggtaccagtagagccagtcttgacagtacatccagagagcaagagcaaaaccaaaactaggagcagaagtagaggtcgagctagaaataaaacaagcaagagtagaagtcgaagcagtagcagtagcagttctagtagcagttcaaccagtagcagcagtggaagtagttccagcagtggaagtagtagcagtcgcagtagttccagtagcagctccagtacaagtggcagcagcagcagagatagtagcagtagcactagtagtagtagtgagagtagaagtcggagtaggggccggggacataatagagatagaaagcacagaaggagcgtggatcggaagagaagggatacttcaggactagaaagaagtcacaaatcttcaaaaggtggtagtagtagagatacaaaaggatcaaaggataagaattcccggtccgacagaaagaggtctatatcagagagtagtcgatcaggcaaaagatcttcaagaagtgaaagagaccgaaaatcagacaggaaagacaaaaggcgttaatggaagaagccaggctttcttagccattctttgcagcagaagatttcttgataaaaaaggattacctttccttgtaaagaggatgctgccttaagaattgcatgttgtaaaaaatctttttggaaaatacagactgtttgtttaccagacattcttgtactttttgcataattttgtaagagttatttatcaaaattatgtgaggttccaaaatatgtaaaaatgataataataaaaaaagattaacatccc

SEQ ID NO: 346725 - DNA, 1636 bp, Homo sapiens
cctgtacaagtggcagcagcagcagagatagtagcagtagcactagtagtggtagtgagggtaggaaggttgtagggaaggttgtagggtagaggtcgagctagaaataaaacaagcaagagtagaagtcgaagcagtagcagtagcagttctagtagcagttcaaccagtagcagcagtggaagtagttccagcagtggaagtagtagcagtcgcagtagttccagtagcagctccagtacaagtggcagcagcagcagagatagtagcagtagcactagtagtagtagtgagagtagaagtcggagtaggggccggggacataatagagatagaaagcacagaaggagcgtggatcggaagagaagggatacttcaggactagaaagaagtcacaaatcttcaaaaggtggtagtagtagagatacaaaaggatcaaaggataagaattcccggtccgacagaaagaggtctatatcagagagtagtcgatcaggcaaaagatcttcaagaagtgaaagagaccgaaaatcagacaggaaagacaaaaggcgttaatggaagaagccaggctttcttagccattctttgcagcagaagatttcttgataaaaaaggattacctttccttgtaaagaggatgctgccttaagaattgcatgttgtaaaaaatctttttggaaaatacagactgtttgtttaccagacattcttgtactttttgcataattttgtaagagttatttatcaaaattatgtgaggttccaaaatatgtaaaaatgataataataaaaaaagattaacatcccttgtcatcttttttaaatatcctatactcttcagtaagaatctgtatattttaataggcaaatctttaagtctgttcccttctaattctgtatcatacattgcttttgtagaaataaatgtgtgtttatttcattatttttgggatgtcctcgttgacacttgtataataaatatcctctttatcattttcagcttttaacactagatactgcacgtgattagaatgtttttgaaggtttcctcgtttttatttgccttggacagtttttagttgtcagagtcagagctttgcagctttgagggggaacagttctctttaaaatcatttgctattttctattctcccttgttattttaatctaagcattttcccccgtttctcatattttaaccatatgttcggtagataactaaacagtatgatctggttggcattttcttcctgatgatgggagcgtcattcttttgtcttcatggttacttgtgtgatataacatacatctgttaaagaaaatcacttctttctaggggagggaggtagaaaagtatctttcaaacttggtttttgagtttgtgtcttgtcttaactttgtgttggctctaacttaaacatgctgatatgtgttttcaagaattttgtttaaggaagtattgtatggaagtccacaaaatgaaggaagttcatctaggttttaatatgtaagcaagataacacacaagtgtaccaagtgattattaactttgttgttttacaaatttgtatgaacttggagtatctgttggccattactatacatgtgcaaataaatgtggcttagacttgtg

SEQ ID NO: 346726 - DNA, 2803 bp, Homo sapiens
tgtcagtcctttcgcgcctcggcggcgcggcatagcccggctcggcctgtaaagcagtctcaagcctgccgcagggagaagatggcggtcgccgtgagaactttgcaggaacagctggaaaaggccaaagagagtcttaagaacgtggatgagaacattcgcaagctcaccgggcgggatccgaatgacgtgaggcccatccaagccagattgctggccctttctggtcctggtggaggtagaggacgtggtagtttattactgaggcgtggattctcagatagtggaggaggacccccagccaaacagagagaccttgaaggggcagtcagtaggctgggcggggagcgtcggaccagaagagaatcacgccaggaaagcgacccggaggatgatgatgttaaaaagccagcattgcagtcttcagttgtagctacctccaaagagcgcacacgtagagaccttatccaggatcaaaatatggatgaaaagggaaagcaaaggaaccggcgaatatttggcttgttgatgggtacccttcaaaaatttaaacaagaatccactgttgctactgaaaggcaaaagcggcgccaggaaattgaacaaaaacttgaagttcaggcagaagaagagagaaagcaggttgaaaatgaaaggagagaactgtttgaagagaggcgtgctaaacagacagaactgcggcttttggaacagaaagttgagcttgcgcagctgcaagaagaatggaatgaacataatgccaaaataattaaatatataagaactaagacaaagccccatttgttttatattcctggaagaatgtgtccagctacccaaaaactaatagaagagtcacagagaaaaatgaacgctttatttgaaggtagacgcatcgaatttgcagaacaaataaataaaatggaggctaggcctagaagacaatcaatgaaggaaaaagagcatcaggtggtgcgtaatgaagaacagaaggcggaacaagaagagggtaaggtggctcagcgagaggaagagttggaggagacaggtaatcagcacaatgatgtagaaatagaggaagcaggagaggaagaggaaaaggaaatagcgattgttcatagtgatgcagagaaagaacaggaggaggaagaacaaaaacaggaaatggaggttaagatggaggaggaaactgaggtaagggaaagtgagaagcagcaggatagtcagcctgaagaagttatggatgtgctagagatggttgagaatgtcaaacatgtaattgctgaccaggaggtaatggaaactaatcgagttgaaagtgtagaaccttcagaaaatgaagctagcaaagaattggaaccagaaatggaatttgaaattgagccagataaagaatgtaaatccctttctcctgggaaagagaatgtcagtgctttagacatggaaaaggagtctgaggaaaaagaagaaaaagaatctgagccccaacctgagcctgtggctcaacctcagcctcagtctcagccccagcttcagcttcaatcccagtcccaaccagtactccagtcccagcctccctctcagcctgaggatttgtcattagctgttttacagccaacaccccaagttactcaggagcaagggcatttactacctgagaggaaggattttcctgtagagtctgtaaaactcactgaggtaccagtagagccagtcttgacagtacatccagagagcaagagcaaaaccaaaactaggagcagaagtagaggtcgagctagaaataaaacaagcaagagtagaagtcgaagcagtagcagtagcagttctagtagcagttcaaccagtagcagcagtggaagtagttccagcagtggaagtagtagcagtcgcagtagttccagtagcagctccagtacaagtggcagcagcagcagagatagtagcagtagcactagtagtagtagtgagagtagaagtcggagtaggggccggggacataatagagatagaaagcacagaaggagcgtggatcggaagagaagggatacttcaggactagaaagaagtcacaaatcttcaaaaggtggtagtagtagagatacaaaaggatcaaaggataagaattcccggtccgacagaaagaggtctatatcagagagtagtcgatcaggcaaaagatcttcaagaagtgaaagagaccgaaaatcagacaggaaagacaaaaggcgttaatggaagaagccaggctttcttagccattctttgcagcagaagatttcttgataaaaaaggattacctttccttgtaaagaggatgctgccttaagaattgcatgttgtaaaaaatctttttggaaaatacagactgtttgtttaccagacattcttgtactttttgcataattttgtaagagttatttatcaaaattatgtgaggttccaaaatatgtaaaaatgataataataaaaaaagattaacatcccttgtcatcttttttaaatatcctatactcttcagtaagaatctgtatattttaataggcaaatctttaagtctgttcccttctaattctgtatcatacattgcttttgtactacctggtggggtgattcctgcatcccgggatggtctcgtgagcctggtatataactatccccttatcatggcagcttaacactagaatcggccgtaattgaggtctggagggtgcctgtagactggcttgacagttaagctgcccagctagctttgcgcttagggggaaatgccttaaacaagggaatttcctgtatcaggttt

SEQ ID NO: 346727 - DNA, 1443 bp, Homo sapiens
gaaaacatcaattgagaactaggaagtactccagcagcagccggagtcacatgggagcctacagcagagatagtagcagtagcactagtagtagtagtgagagtagaagtcggagtaggggccggggacataatagagatagaaagcacagaaggagcgtggatcggaagagaagggatacttcaggactagaaagaagtcacaaatcttcaaaaggtggtagtagtagagatacaaaaggatcaaaggataagaattcccggtccgacagaaagaggtctatatcagagagtagtcgatcaggcaaaagatcttcaagaagtgaaagagaccgaaaatcagacaggaaagacaaaaggcgttaatggaagaagccaggctttcttagccattctttgcagcagaagatttcttgataaaaaaggattacctttccttgtaaagaggatgctgccttaagaattgcatgttgtaaaaaatctttttggaaaatacagactgtttgtttaccagacattcttgtactttttgcataattttgtaagagttatttatcaaaattatgtgaggttccaaaatatgtaaaaatgataataataaaaaaagattaacatcccttgtcatcttttttaaatatcctatactcttcagtaagaatctgtatattttaataggcaaatctttaagtctgttcccttctaattctgtatcatacattgcttttgtagaaataaatgtgtgtttatttcattatttttgggatgtcctcgttgacacttgtataataaatatcctctttatcattttcagcttttaacactagatactgcacgtgattagaatgtttttgaaggtttcctcgtttttatttgccttggacagtttttagttgtcagagtcagagctttgcagctttgagggggaacagttctctttaaaatcatttgctattttctattctcccttgttattttaatctaagcattttcccccgtttctcatattttaaccatatgttcggtagataactaaacagtatgatctggttggcattttcttcctgatgatgggagcgtcattcttttgtcttcatggttacttgtgtgatataacatacatctgttaaagaaaatcacttctttctaggggagggaggtagaaaagtatctttcaaacttggtttttgagtttgtgtcttgtcttaactttgtgttggctctaacttaaacatgctgatatgtgttttcaagaattttgtttaaggaagtattgtatggaagtccacaaaatgaaggaagttcatctaggttttaatatgtaagcaagataacacacaagtgtaccaagtgattattaactttgttgttttacaaatttgtatgaacttggagtatctgttggccattactatacatgtgcaaataaatgtggcttagacttgtg

SEQ ID NO: 346728 - DNA, 1829 bp, Homo sapiens
tgtcagtcctttcgcgcctcggcggcgcggcatagcccggctcggcctgtaaagcagtctcaagcctgccgcagggagaagatggcggtcgccgtgagaactttgcaggaacagctggaaaaggccaaagagagtcttaagaacgtggatgagaacattcgcaagctcaccgggcgggatccgaatgacgtgaggcccatccaagccagattgctggccctttctggtcctggtggaggtagaggacgtggtagtttattactgaggcgtggattctcagatagtggaggaggacccccagccaaacagagagaccttgaaggggcagtcagtaggctgggcggggagcgtcggaccagaagagaatcacgccaggaaagcgacccggaggatgatgatgttaaaaagccagcattgcagtcttcagttgtagctacctccaaagagcgcacacgtagagaccttatccaggatcaaaatatggatgaaaagggaaagcaaaggaaccggcgaatatttggcttgttgatgggtacccttcaaaaatttaaacaagaatccactgttgctactgaaaggcaaaagcggcgccaggaaattgaacaaaaacttgaagttcaggcagaagaagagagaaagcaggttgaaaatgaaaggagagaactgtttgaagagaggcgtgctaaacagacagaactgcggcttttggaacagaaagttgagcttgcgcagctgcaagaagaatggaatgaacataatgccaaaataattaaatatataagaactaagacaaagccccatttgttttatattcctggaagaatgtgtccagctacccaaaaactaatagaagagtcacagagaaaaatgaacgctttatttgaaggtagacgcatcgaatttgcagaacaaataaataaaatggaggctaggcctagaagacaatcaatgaaggaaaaagagcatcaggtggtgcgtaatgaagaacagaaggcggaacaagaagagggtaaggtggctcagcgagaggaagagttggaggagacaggtaatcagcacaatgatgtagaaatagaggaagcaggagaggaagaggaaaaggaaatagcgattgttcatagtgatgcagagaaagaacaggaggaggaagaacaaaaacaggaaatggaggttaagatggaggaggaaactgaggtaagggaaagtgagaagcagcaggatagtcagcctgaagaagttatggatgtgctagagatggttgagaatgtcaaacatgtaattgctgaccaggaggtaatggaaactaatcgagttgaaagtgtagaaccttcagaaaatgaagctagcaaagaattggaaccagaaatggaatttgaaattgagccagataaagaatgtaaatccctttctcctgggaaagagaatgtcagtgctttagacatggaaaaggagtctgaggaaaaagaagaaaaagaatctgagccccaacctgagcctgtggctcaacctcagcctcagtctcagccccagcttcagcttcaatcccagtcccaaccagtactccagtcccagcctccctctcagcctgaggatttgtcattagctgttttacagccaacaccccaagttactcaggagcaagggcatttactacctgagaggaaggattttcctgtagagtctgtaaaactcactgaggtaccagtagagccagtcttgacagtacatccagagagcaagagcaaaaccaaaactaggagcagaagcgcctgggtgcagaagtgcgcctgggtgcagaagtgcgcctgggtgcagaagtgcgctgggtg

SEQ ID NO: 346729 - DNA, 1229 bp, Homo sapiens
caggaatgggatggcggtcttgtaagctcccctcttgccgcgtcctaggaacggcggaaagaggtctatatcagagagtagtcgatcaggcaaaagatcttcaagaagtgaaagagaccgaaaatcagacaggaaagacaaaaggcgttaatggaagaagccaggctttcttagccattctttgcagcagaagatttcttgataaaaaaggattacctttccttgtaaagaggatgctgccttaagaattgcatgttgtaaaaaatctttttggaaaatacagactgtttgtttaccagacattcttgtactttttgcataattttgtaagagttatttatcaaaattatgtgaggttccaaaatatgtaaaaatgataataataaaaaaagattaacatcccttgtcatcttttttaaatatcctatactcttcagtaagaatctgtatattttaataggcaaatctttaagtctgttcccttctaattctgtatcatacattgcttttgtagaaataaatgtgtgtttatttcattatttttgggatgtcctcgttgacacttgtataataaatatcctctttatcattttcagcttttaacactagatactgcacgtgattagaatgtttttgaaggtttcctcgtttttatttgccttggacagtttttagttgtcagagtcagagctttgcagctttgagggggaacagttctctttaaaatcatttgctattttctattctcccttgttattttaatctaagcattttcccccgtttctcatattttaaccatatgttcggtagataactaaacagtatgatctggttggcattttcttcctgatgatgggagcgtcattcttttgtcttcatggttacttgtgtgatataacatacatctgttaaagaaaatcacttctttctaggggagggaggtagaaaagtatctttcaaacttggtttttgagtttgtgtcttgtcttaactttgtgttggctctaacttaaacatgctgatatgtgttttcaagaattttgtttaaggaagtattgtatggaagtccacaaaatgaaggaagttcatctaggttttaatatgtaagcaagataacacacaagtgtaccaagtgattattaactttgttgttttacaaatttgtatgaacttggagtatctgttggccattactatacatgtgcaaataaatgtggcttagacttgtg

SEQ ID NO: 346730 - DNA, 908 bp, Homo sapiens
gcacttgtataataatgaaataaacacacatttatttctacaaaagcaatgtatgataataataaaaaaagattaacatcccttgtcatcttttttaaatatcctatactcttcagtaagaatctgtatattttaataggcaaatctttaagtctgttcccttctaattctgtatcatacattgcttttgtagaaataaatgtgtgtttatttcattatttttgggatgtcctcgttgacacttgtataataaatatcctctttatcattttcagcttttaacactagatactgcacgtgattagaatgtttttgaaggtttcctcgtttttatttgccttggacagtttttagttgtcagagtcagagctttgcagctttgagggggaacagttctctttaaaatcatttgctattttctattctcccttgttattttaatctaagcattttcccccgtttctcatattttaaccatatgttcggtagataactaaacagtatgatctggttggcattttcttcctgatgatgggagcgtcattcttttgtcttcatggttacttgtgtgatataacatacatctgttaaagaaaatcacttctttctaggggagggaggtagaaaagtatctttcaaacttggtttttgagtttgtgtcttgtcttaactttgtgttggctctaacttaaacatgctgatatgtgttttcaagaattttgtttaaggaagtattgtatggaagtccacaaaatgaaggaagttcatctaggttttaatatgtaagcaagataacacacaagtgtaccaagtgattattaactttgttgttttacaaatttgtatgaacttggagtatctgttggccattactatacatgtgcaaataaatgtggcttagacttgtg

SEQ ID NO: 346731 - DNA, 804 bp, Homo sapiens
tgtcagtcctttcgcgcctcggcggcgcggcatagcccggctcggcctgtaaagcagtctcaagcctgccgcagggagaagatggcggtcgccgtgagaactttgcaggaacagctggaaaaggccaaagagagtcttaagaacgtggatgagaacattcgcaagctcaccgggcgggatccgaatgacgtgaggcccatccaagccagattgctggccctttctggtcctggtggaggtagaggacgtggtagtttattactgaggcgtggattctcagatagtggaggaggacccccagccaaacagagagaccttgaaggggcagtcagtaggctgggcggggagcgtcggaccagaagagaatcacgccaggaaagcgacccggaggatgatgatgttaaaaagccagcattgcagtcttcagttgtagctacctccaaagagcgcacacgtagagaccttatccaggatcaaaatatggatgaaaagggaaagcaaaggaaccggcgaatatttggcttgttgatgggtacccttcaaaaatttaaacaagaatccactgttgctactgaaaggcaaaagcggcgccaggaaattgaacaaaaacttgaagttcaggcagaagaagagagaaagcaggttgaaaatgaaaggagagaactgtttgaagagaggcgtgctaaacagacagaactgcggcttttggaacagaaagttgagcttgcgcagctgcaagaagaatggaatgaacataatcgccggtcacgagatggtaccgagctcgattcactgccgtcttcc

SEQ ID NO: 346732 - DNA, 938 bp, Homo sapiens
  misc_feature (938)..(938): n is a, c, g, or t
tgtcagtcctttcgcgcctcggcggcgcggcatagcccggctcggcctgtaaagcagtctcaagcctgccgcagggagaagatggcggtcgccgtgagaactttgcaggaacagctggaaaaggccaaagagagtcttaagaacgtggatgagaacattcgcaagctcaccgggcgggatccgaatgacgtgaggcccatccaagccagattgctggccctttctggtcctggtggaggtagaggacgtggtagtttattactgaggcgtggattctcagatagtggaggaggacccccagccaaacagagagaccttgaaggggcagtcagtaggctgggcggggagcgtcggaccagaagagaatcacgccaggaaagcgacccggaggatgatgatgttaaaaagccagcattgcagtcttcagttgtagctacctccaaagagcgcacacgtagagaccttatccaggatcaaaatatggatgaaaagggaaagcaaaggaaccggcgaatatttggcttgttgatgggtacccttcaaaaatttaaacaagaatccactgttgctactgaaaggcaaaagcggcgccaggaaattgaacaaaaacttgaagttcaggcagaagaagagagaaagcaggttgaaaatgaaaggagagaactgtttgaagagaggcgtgctaaacagacagaactgcggcttttggaacagaaagttgagcttgcgcagctgcaagaagaatggaatgaacataaatgccataatagtctttgccgctggaagcaggggtgggctagccctactagtctcaatctcaaaaatatgggctaaataagttaattactaaactatcaatgttaaatatcggcccaacattattttttacccttggctgatttcaaaaacctaattggttaaaacccaagctattagan

SEQ ID NO: 346733 - DNA, 699 bp, Homo sapiens
  misc_feature (693)..(693): n is a, c, g, or t
tgtcagtcctttcgcgcctcggcggcgcggcatagcccggctcggcctgtaaagcagtctcaagcctgccgcagggagaagatggcggtcgccgtgagaactttgcaggaacagctggaaaaggccaaagagagtcttaagaacgtggatgagaacattcgcaagctcaccgggcgggatccgaatgacgtgaggcccatccaagccagattgctggccctttctggtcctggtggaggtagaggacgtggtagtttattactgaggcgtggattctcagatagtggaggaggacccccagccaaacagagagaccttgaaggggcagtcagtaggctgggcggggagcgtcggaccagaagagaatcacgccaggaaagcgacccggaggatgatgatgttaaaaagccagcattgcagtcttcagttgtagctacctccaaagagcgcacacgtagagaccttatccaggatcaaaatatggatgaaaagggaaagcaaaggaaccggcgaatatttggcttgttgatgggtacccttcaaaaatttaaacaagaatccactgttgctactgaaaggcaaaagcggcgccaggaaattgaacaaaaacttgaagttcaggcagaagaagagagaaagcaggttgcgctttggaacaggtgagcttgcgcagtgcaagaagatggaatgcantatgcc

SEQ ID NO: 346734 - DNA, 712 bp, Homo sapiens
tgtcagtcctttcgcgcctcggcggcgcggcatagcccggctcggcctgtaaagcagtctcaagcctgccgcagggagaagatggcggtcgccgtgagaactttgcaggaacagctggaaaaggccaaagagagtcttaagaacgtggatgagaacattcgcaagctcaccgggcgggatccgaatgacgtgaggcccatccaagccagattgctggccctttctggtcctggtggaggtagaggacgtggtagtttattactgaggcgtggattctcagatagtggaggaggacccccagccaaacagagagaccttgaaggggcagtcagtaggctgggcggggagcgtcggaccagaagagaatcacgccaggaaagcgacccggaggatgatgatgttaaaaagccagcattgcagtcttcagttgtagctacctccaaagagcgcacacgtagagaccttatccaggatcaaaatatggatgaaaagggaaagcaaaggaaccggcgaatatttggcttgttgatgggtacccttcaaaaatttaaaaaactaagccaataaggccaggcacggtggctcattgcttggaaatcccagccatttagggaggccaagggcgggccagattaacctggaggtccagaagttccgaaaaccaggctgggttaaccattggagaaattcccggtctcttaattaaaaatta

SEQ ID NO: 346735 - DNA, 515 bp, Homo sapiens
  misc_feature (463)..(464): n is a, c, g, or t
  misc_feature (498)..(498): n is a, c, g, or t
tgtcagtcctttcgcgcctcggcggcgcggcatagcccggctcggcctgtaaagcagtctcaagcctgccgcagggagaagatggcggtcgccgtgagaactttgcaggaacagctggaaaaggccaaagagagtcttaagaacgtggatgagaacattcgcaagctcaccgggcgggatccgaatgacgtgaggcccatccaagccagattgctggccctttctggtcctggtggaggtagaggacgtggtagtttattactgaggttaagatggaggaggaaactgaggtaagggaaagtgagaagcagcaggatagtcagcctgaagaagttatggatgtgctagagatggttgagaatgtcaaacatgtaattgctgaccaggaggtaatggaaactaatcgagttgaaagtgtagaaccttcagaaaatgaagctagcaaagaattggaaccagaaannaaaaaaaaaaaaaaaaaaaaattttgggggggtngggcctggaaaagtttt

SEQ ID NO: 346736 - DNA, 631 bp, Homo sapiens
ggggagggagatgactgcctggctgacttttcattggctcagagtcacaaaggctgcaggttcttcccccttccggtcgctgagtggttgaggccggaagacaacgctcatcgtcattggctgagcccggctgtcagtcctttcgcgcctcggcggcgcggcatagcccggctcggcctgtaaagcagtctcaagcctgccgcagggagaagatggcggtcgccgtgagaactttgcaggaacagctggaaaaggccaaagagagtcttaagaacgtggatgagaacattcgcaagctcaccgggcgggatccgaatgacgtgaggtaagggcctaacgggaactcggaactcggagctcggagaggcagccctcaggtcggggtgaattgggggcggggagggcggccagccttaagaagactggaacctcgaggcctgttcgcggggcggcgggtaaaaccctgttgtcgccgaggtggagaggccccaggtcccctccgtagagcgctggtctcaggtccctgaggaaggagagcgaggcctgggtgcgccggcatgctttcttggcctgtgagaagacccggactgctgattcccgctctcggccctgcaggcccggaactgcagca

SEQ ID NO: 346737 - DNA, 3104 bp, Homo sapiens
  misc_feature (2974)..(2974): n is a, c, g, or t
tgtcagtcctttcgcgcctcggcggcgcggcatagcccggctcggcctgtaaagcagtctcaagcctgccgcagggagaagatggcggtcgccgtgagaactttgcaggaacagctggaaaaggccaaagagagtcttaagaacgtggatgagaacattcgcaagctcaccgggcgggatccgaatgacgtgaggcccatccaagccagattgctggccctttctggtcctggtggaggtagaggacgtggtagtttattactgaggcgtggattctcagatagtggaggaggacccccagccaaacagagagaccttgaaggggcagtcagtaggctgggcggggagcgtcggaccagaagagaatcacgccaggaaagcgacccggaggatgatgatgttaaaaagccagcattgcagtcttcagttgtagctacctccaaagagcgcacacgtagagaccttatccaggatcaaaatatggatgaaaagggaaagcaaaggaaccggcgaatatttggcttgttgatgggtacccttcaaaaatttaaacaagaatccactgttgctactgaaaggcaaaagcggcgccaggaaattgaacaaaaacttgaagttcaggcagaagaagagagaaagcaggttgaaaatgaaaggagagaactgtttgaagagaggcgtgctaaacagacagaactgcggcttttggaacagaaagttgagcttgcgcagctgcaagaagaatggaatgaacataatgccaaaataattaaatatataagaactaagacaaagccccatttgttttatattcctggaagaatgtgtccagctacccaaaaactaatagaagagtcacagagaaaaatgaacgctttatttgaaggtagacgcatcgaatttgcagaacaaataaataaaatggaggctaggcctagaagacaatcaatgaaggaaaaagagcatcaggtggtgcgtaatgaagaacagaaggcggaacaagaagagggtaaggtggctcagcgagaggaagagttggaggagacaggtaatcagcacaatgatgtagaaatagaggaagcaggagaggaagaggaaaaggaaatagcgattgttcatagtgatgcagagaaagaacaggaggaggaagaacaaaaacaggaaatggaggttaagatggaggaggaaactgaggtaagggaaagtgagaagcagcaggatagtcagcctgaagaagttatggatgtgctagagatggttgagaatgtcaaacatgtaattgctgaccaggaggtaatggaaactaatcgagttgaaagtgtagaaccttcagaaaatgaagctagcaaagaattggaaccagaaatggaatttgaaattgagccagataaagaatgtaaatccctttctcctgggaaagagaatgtcagtgctttagacatggaaaaggagtctgaggaaaaagaagaaaaagaatctgagccccaacctgagcctgtggctcaacctcagcctcagtctcagccccagcttcagcttcaatcccagtcccaaccagtactccagtcccagcctccctctcagcctgaggatttgtcattagctgttttacagccaacaccccaagttactcaggagcaagggcatttactacctgagaggaaggattttcctgtagagtctgtaaaactcactgaggtaccagtagagccagtcttgacagtacatccagagagcaagagcaaaaccaaaactaggagcagaagtagaggtcgagctagaaataaaacaagcaagagtagaagtcgaagcagtagcagtagcagttctagtagcagttcaaccagtagcagcagtggaagtagttccagcagtggaagtagtagcagtcgcagtagttccagtagcagctccagtacaagtggcagcagcagcagagatagtagcagtagcactagtagtagtagtgagagtagaagtcggagtaggggccggggacataatagagatagaaagcacagaaggagcgtggatcggaagagaagggatacttcaggactagaaagaagtcacaaatcttcaaaaggtggtagtagtagagatacaaaaggatcaaaggataagaattcccggtccgacagaaagaggtctatatcagagagtagtcgatcaggcaaaagatcttcaagaagtgaaagagaccgaaaatcagacaggaaagacaaaaggcgttaatggaagaagccaggctttcttagccattctttgcagcagaagatttcttgataaaaaaggattacctttccttgtaaagaggatgctgccttaagaattgcatgttgtaaaaaatctttttggaaaatacagactgtttgtttaccagacattcttgtactttttgcataattttgtaagagttatttatcaaaattatgtgaggttccaaaatatgtaaaaatgataataataaaaaaagattaacatcccttgtcatcttttttaaatatcctatactcttcagtaagaatctgtatattttaataggcaaatctttaagtctgttcccttctaattctgtatcatacattgcttttgtagcggccgcgaattcgcggccgcgcggccgcgaattcgcggccgcgccgtcgccatgacccgcggtaaccagcgtgagctcgcccgccagaagaatatgaaaaagcagagcgactcggttaagggaaagcgccgagatgacgggctttctgctgccgcccgcaagcagagggactcggagatcatgcagcagaagcagaaaaaggcaaacgagaagaaggaggaacccaagtagctttgtggcttcgtgtccaaccctcttgcccttcgcctgtgtgcctggagccagtcccaccacgctcgcgtttcctcctgtagtgctcacaggtcccagcaccgatggcattccctttgccctgagtctgcagcgggtcccttntgtgcttccttcccctcaggtagcctctctccccctgggccactcccgggggtgagggggttaccccttcccagtgttttttattcctgtggggctcaccccaaagtattaaaagtagctttgtaattcc

SEQ ID NO: 346738 - DNA, 3070 bp, Homo sapiens
tggatctttctattttattagattaaaaaacacaacgaaacctgtaagaactaggggaaaaggaaaaagaaacagattaggcaaagatcagagctgggcggggagcgtcggaccagaagagaatcacgccaggaaagcgacccggaggatgatgatgttaaaaagccagcattgcagtcttcagttgtagctacctccaaagagcgcacacgtagagaccttatccaggatcaaaatatggatgaaaagggaaagcaaaggaaccggcgaatatttggcttgttgatgggtacccttcaaaaatttaaacaagaatccactgttgctactgaaaggcaaaagcggcgccaggaaattgaacaaaaacttgaagttcaggcagaagaagagagaaagcaggttgaaaatgaaaggagagaactgtttgaagagaggcgtgctaaacagacagaactgcggcttttggaacagaaagttgagcttgcgcagctgcaagaagaatggaatgaacataatgccaaaataattaaatatataagaactaagacaaagccccatttgttttatattcctggaagaatgtgtccagctacccaaaaactaatagaagagtcacagagaaaaatgaacgctttatttgaaggtagacgcatcgaatttgcagaacaaataaataaaatggaggctaggcctagaagacaatcaatgaaggaaaaagagcatcaggtggtgcgtaatgaagaacagaaggcggaacaagaagagggtaaggtggctcagcgagaggaagagttggaggagacaggtaatcagcacaatgatgtagaaatagaggaagcaggagaggaagaggaaaaggaaatagcgattgttcatagtgatgcagagaaagaacaggaggaggaagaacaaaaacaggaaatggaggttaagatggaggaggaaactgaggtaagggaaagtgagaagcagcaggatagtcagcctgaagaagttatggatgtgctagagatggttgagaatgtcaaacatgtaattgctgaccaggaggtaatggaaactaatcgagttgaaagtgtagaaccttcagaaaatgaagctagcaaagaattggaaccagaaatggaatttgaaattgagccagataaagaatgtaaatccctttctcctgggaaagagaatgtcagtgctttagacatggaaaaggagtctgaggaaaaagaagaaaaagaatctgagccccaacctgagcctgtggctcaacctcagcctcagtctcagccccagcttcagcttcaatcccagtcccaaccagtactccagtcccagcctccctctcagcctgaggatttgtcattagctgttttacagccaacaccccaagttactcaggagcaagggcatttactacctgagaggaaggattttcctgtagagtctgtaaaactcactgaggtaccagtagagccagtcttgacagtacatccagagagcaagagcaaaaccaaaactaggagcagaagtagaggtcgagctagaaataaaacaagcaagagtagaagtcgaagcagtagcagtagcagttctagtagcagttcaaccagtagcagcagtggaagtagttccagcagtggaagtagtagcagtcgcagtagttccagtagcagctccagtacaagtggcagcagcagcagagatagtagcagtagcactagtagtagtagtgagagtagaagtcggagtaggggccggggacataatagagatagaaagcacagaaggagcgtggatcggaagagaagggatacttcaggactagaaagaagtcacaaatcttcaaaaggtggtagtagtagagatacaaaaggatcaaaggataagaattcccggtccgacagaaagaggtctatatcagagagtagtcgatcaggcaaaagatcttcaagaagtgaaagagaccgaaaatcagacaggaaagacaaaaggcgttaatggaagaagccaggctttcttagccattctttgcagcagaagatttcttgataaaaaaggattacctttccttgtaaagaggatgctgccttaagaattgcatgttgtaaaaaatctttttggaaaatacagactgtttgtttaccagacattcttgtactttttgcataattttgtaagagttatttatcaaaattatgtgaggttccaaaatatgtaaaaatgataataataaaaaaagattaacatcccttgtcatcttttttaaatatcctatactcttcagtaagaatctgtatattttaataggcaaatctttaagtctgttcccttctaattctgtatcatacattgcttttgtagaaataaatgtgtgtttatttcattatttttgggatgtcctcgttgacacttgtataataaatatcctctttatcattttcagcttttaacactagatactgcacgtgattagaatgtttttgaaggtttcctcgtttttatttgccttggacagtttttagttgtcagagtcagagctttgcagctttgagggggaacagttctctttaaaatcatttgctattttctattctcccttgttattttaatctaagcattttcccccgtttctcatattttaaccatatgttcggtagataactaaacagtatgatctggttggcattttcttcctgatgatgggagcgtcattcttttgtcttcatggttacttgtgtgatataacatacatctgttaaagaaaatcacttctttctaggggagggaggtagaaaagtatctttcaaacttggtttttgagtttgtgtcttgtcttaactttgtgttggctctaacttaaacatgctgatatgtgttttcaagaattttgtttaaggaagtattgtatggaagtccacaaaatgaaggaagttcatctaggttttaatatgtaagcaagataacacacaagtgtaccaagtgattattaactttgttgttttacaaatttgtatgaacttggagtatctgttggccattactatacatgtgcaaataaatgtggcttagacttgtg

SEQ ID NO: 346739 - DNA, 3256 bp, Homo sapiens
tgtcagtcctttcgcgcctcggcggcgcggcatagcccggctcggcctgtaaagcagtctcaagcctgccgcagggagaagatggcggtcgccgtgagaactttgcaggaacagctggaaaaggccaaagagagtcttaagaacgtggatgagaacattcgcaagctcaccgggcgggatccgaatgacgtgaggcccatccaagccagattgctggccctttctggtcctggtggaggtagaggacgtggtagtttattactgaggcgtggattctcagatagtggaggaggacccccagccaaacagagagaccttgaaggggcagtcagtaggctgggcggggagcgtcggaccagaagagaatcacgccaggaaagcgacccggaggatgatgatgttaaaaagccagcattgcagtcttcagttgtagctacctccaaagagcgcacacgtagagaccttatccaggatcaaaatatggatgaaaagggaaagcaaaggaaccggcgaatatttggcttgttgatgggtacccttcaaaaatttaaacaagaatccactgttgctactgaaaggcaaaagcggcgccaggaaattgaacaaaaacttgaagttcaggcagaagaagagagaaagcaggttgaaaatgaaaggagagaactgtttgaagagaggcgtgctaaacagacagaactgcggcttttggaacagaaagttgagcttgcgcagctgcaagaagaatggaatgaacataatgccaaaataattaaatatataagaactaagacaaagccccatttgttttatattcctggaagaatgtgtccagctacccaaaaactaatagaagagtcacagagaaaaatgaacgctttatttgaaggtagacgcatcgaatttgcagaacaaataaataaaatggaggctaggcctagaagacaatcaatgaaggaaaaagagcatcaggtggtgcgtaatgaagaacagaaggcggaacaagaagagggtaaggtggctcagcgagaggaagagttggaggagacaggtaatcagcacaatgatgtagaaatagaggaagcaggagaggaagaggaaaaggaaatagcgattgttcatagtgatgcagagaaagaacaggaggaggaagaacaaaaacaggaaatggaggttaagatggaggaggaaactgaggtaagggaaagtgagaagcagcaggatagtcagcctgaagaagttatggatgtgctagagatggttgagaatgtcaaacatgtaattgctgaccaggaggtaatggaaactaatcgagttgaaagtgtagaaccttcagaaaatgaagctagcaaagaattggaaccagaaatggaatttgaaattgagccagataaagaatgtaaatccctttctcctgggaaagagaatgtcagtgctttagacatggaaaaggagtctgaggaaaaagagccccagcttcagcttcaatcccagtcccaaccagtactccagtcccagcctccctctcagcctgaggatttgtcattagctgttttacagccaacaccccaagttactcaggagcaagggcatttactacctgagaggaaggattttcctgtagagtctgtaaaactcactgaggtaccagtagagccagtcttgacagtacatccagagagcaagagcaaaaccaaaactaggagcagaagtagaggtcgagctagaaataaaacaagcaagagtagaagtcgaagcagtagcagtagcagttctagtagcagttcaaccagtagcagcagtggaagtagttccagcagtggaagtagtagcagtcgcagtagttccagtagcagctccagtacaagtggcagcagcagcagagatagtagcagtagcactagtagtagtagtgagagtagaagtcggagtaggggccggggacataatagagatagaaagcacagaaggagcgtggatcggaagagaagggatacttcaggactagaaagaagtcacaaatcttcaaaaggtggtagtagtagagatacaaaaggatcaaaggataagaattcccggtccgacagaaagaggtctatatcagagagtagtcgatcaggcaaaagatcttcaagaagtgaaagagaccgaaaatcagacaggaaagacaaaaggcgttaatggaagaagccaggctttcttagccattctttgcagcagaagatttcttgataaaaaaggattacctttccttgtaaagaggatgctgccttaagaattgcatgttgtaaaaaatctttttggaaaatacagactgtttgtttaccagacattcttgtactttttgcataattttgtaagagttatttatcaaaattatgtgaggttccaaaatatgtaaaaatgataataataaaaaaagattaacatcccttgtcatcttttttaaatatcctatactcttcagtaagaatctgtatattttaataggcaaatctttaagtctgttcccttctaattctgtatcatacattgcttttgtagaaataaatgtgtgtttatttcattatttttgggatgtcctcgttgacacttgtataataaatatcctctttatcattttcagcttttaacactagatactgcacgtgattagaatgtttttgaaggtttcctcgtttttatttgccttggacagtttttagttgtcagagtcagagctttgcagctttgagggggaacagttctctttaaaatcatttgctattttctattctcccttgttattttaatctaagcattttcccccgtttctcatattttaaccatatgttcggtagataactaaacagtatgatctggttggcattttcttcctgatgatgggagcgtcattcttttgtcttcatggttacttgtgtgatataacatacatctgttaaagaaaatcacttctttctaggggagggaggtagaaaagtatctttcaaacttggtttttgagtttgtgtcttgtcttaactttgtgttggctctaacttaaacatgctgatatgtgttttcaagaattttgtttaaggaagtattgtatggaagtccacaaaatgaaggaagttcatctaggttttaatatgtaagcaagataacacacaagtgtaccaagtgattattaactttgttgttttacaaatttgtatgaacttggagtatctgttggccattactatacatgtgcaaataaatgtggcttagacttgtg

SEQ ID NO: 346740 - DNA, 2673 bp, Homo sapiens
  misc_feature (2621)..(2622): n is a, c, g, or t
  misc_feature (2656)..(2656): n is a, c, g, or t
tgtcagtcctttcgcgcctcggcggcgcggcatagcccggctcggcctgtaaagcagtctcaagcctgccgcagggagaagatggcggtcgccgtgagaactttgcaggaacagctggaaaaggccaaagagagtcttaagaacgtggatgagaacattcgcaagctcaccgggcgggatccgaatgacgtgaggcccatccaagccagattgctggccctttctggtcctggtggaggtagaggacgtggtagtttattactgaggcgtggattctcagatagtggaggaggacccccagccaaacagagagaccttgaaggggcagtcagtaggctgggcggggagcgtcggaccagaagagaatcacgccaggaaagcgacccggaggatgatgatgttaaaaagccagcattgcagtcttcagttgtagctacctccaaagagcgcacacgtagagaccttatccaggatcaaaatatggatgaaaagggaaagcaaaggaaccggcgaatatttggcttgttgatgggtacccttcaaaaatttaaacaagaatccactgttgctactgaaaggcaaaagcggcgccaggaaattgaacaaaaacttgaagttcaggcagaagaagagagaaagcaggttgaaaatgaaaggagagaactgtttgaagagaggcgtgctaaacagacagaactgcggcttttggaacagaaagttgagcttgcgcagctgcaagaagaatggaatgaacataatgccaaaataattaaatatataagaactaagacaaagccccatttgttttatattcctggaagaatgtgtccagctacccaaaaactaatagaagagtcacagagaaaaatgaacgctttatttgaaggtagacgcatcgaatttgcagaacaaataaataaaatggaggctaggcctagaagacaatcaatgaaggaaaaagagcatcaggtggtgcgtaatgaagaacagaaggcggaacaagaagagggtaaggtggctcagcgagaggaagagttggaggagacaggtaatcagcacaatgatgtagaaatagaggaagcaggagaggaagaggaaaaggaaatagcgattgttcatagtgatgcagagaaagaacaggaggaggaagaacaaaaacaggaaatggaggttaagatggaggaggaaactgaggtaagggaaagtgagaagcagcaggatagtcagcctgaagaagttatggatgtgctagagatggttgagaatgtcaaacatgtaattgctgaccaggaggtaatggaaactaatcgagttgaaagtgtagaaccttcagaaaatgaagctagcaaagaattggaaccagaaatggaatttgaaattgagccagataaagaatgtaaatccctttctcctgggaaagagaatgtcagtgctttagacatggaaaaggagtctgaggaaaaagaagaaaaagaatctgagccccaacctgagcctgtggctcaacctcagcctcagtctcagccccagcttcagcttcaatcccagtcccaaccagtactccagtcccagcctccctctcagcctgaggatttgtcattagctgttttacagccaacaccccaagttactcaggagcaagggcatttactacctgagaggaaggattttcctgtagagtctgtaaaactcactgaggtaccagtagagccagtcttgacagtacatccagagagcaagagcaaaaccaaaactaggagcagaagtagaggtcgagctagaaataaaacaagcaagagtagaagtcgaagcagtagcagtagcagttctagtagcagttcaaccagtagcagcagtggaagtagttccagcagtggaagtagtagcagtcgcagtagttccagtagcagctccagtacaagtggcagcagcagcagagatagtagcagtagcactagtagtagtagtgagagtagaagtcggagtaggggccggggacataatagagatagaaagcacagaaggagcgtggatcggaagagaagggatacttcaggactagaaagaagtcacaaatcttcaaaaggtggtagtagtagagatacaaaaggatcaaaggataagaattcccggtccgacagaaagaggtctatatcagagagtagtcgatcaggcaaaagatcttcaagaagtgaaagagaccgaaaatcagacaggaaagacaaaaggcgttaatggaagaagccaggctttcttagccattctttgcagcagaagatttcttgataaaaaaggattacctttccttgtaaagaggatgctgccttaagaattgcatgttgtaaaaaatctttttggaaaatacagactgtttgtttaccagacattcttgtactttttgcataattttgtaagagttatttatcaaaattatgtgaggttccaaaatatgtaaaaatgataataataaaaaaagattaacatcccttgtcatcttttttaaatatcctatactcttcagtaagaatctgtatattttaataggcaaatctttaagtctgttcccttctaattctgtatcatacattgcttttgtagaaataaatgtgtgtttatttcannaaaaaaaaaaaaaaaaaaaaattttgggggggtngggcctggaaaagtttt

SEQ ID NO: 346741 - DNA, 2384 bp, Homo sapiens
tgtcagtcctttcgcgcctcggcggcgcggcatagcccggctcggcctgtaaagcagtctcaagcctgccgcagggagaagatggcggtcgccgtgagaactttgcaggaacagctggaaaaggccaaagagagtcttaagaacgtggatgagaacattcgcaagctcaccgggcgggatccgaatgacgtgaggcccatccaagccagattgctggccctttctggtcctggtggaggtagaggacgtggtagtttattactgaggcgtggattctcagatagtggaggaggacccccagccaaacagagagaccttgaaggggcagtcagtaggctgggcggggagcgtcggaccagaagagaatcacgccaggaaagcgacccggaggatgatgatgttaaaaagccagcattgcagtcttcagttgtagctacctccaaagagcgcacacgtagagaccttatccaggatcaaaatatggatgaaaagggaaagcaaaggaaccggcgaatatttggcttgttgatgggtacccttcaaaaatttaaacaagaatccactgttgctactgaaaggcaaaagcggcgccaggaaattgaacaaaaacttgaagttcaggcagaagaagagagaaagcaggttgaaaatgaaaggagagaactgtttgaagagaggcgtgctaaacagacagaactgcggcttttggaacagaaagttgagcttgcgcagctgcaagaagaatggaatgaacataatgccaaaataattaaatatataagaactaagacaaagccccatttgttttatattcctggaagaatgtgtccagctacccaaaaactaatagaagagtcacagagaaaaatgaacgctttatttgaaggtagacgcatcgaatttgcagaacaaataaataaaatggaggctaggcctagaagacaatcaatgaaggaaaaagagcatcaggtggtgcgtaatgaagaacagaaggcggaacaagaagagggtaaggtggctcagcgagaggaagagttggaggagacaggtaatcagcacaatgatgtagaaatagaggaagcaggagaggaagaggaaaaggaaatagcgattgttcatagtgatgcagagaaagaacaggaggaggaagaacaaaaacaggaaatggaggttaagatggaggaggaaactgaggtaagggaaagtgagaagcagcaggatagtcagcctgaagaagttatggatgtgctagagatggttgagaatgtcaaacatgtaattgctgaccaggaggtaatggaaactaatcgagttgaaagtgtagaaccttcagaaaatgaagctagcaaagaattggaaccagaaatggaatttgaaattgagccagataaagaatgtaaatccctttctcctgggaaagagaatgtcagtgctttagacatggaaaaggagtctgaggaaaaagaagaaaaagaatctgagccccaacctgagcctgtggctcaacctcagcctcagtctcagccccagcttcagcttcaatcccagtcccaaccagtactccagtcccagcctccctctcagcctgaggatttgtcattagctgttttacagccaacaccccaagttactcaggagcaagggcatttactacctgagaggaaggattttcctgtagagtctgtaaaactcactgaggtaccagtagagccagtcttgacagtacatccagagagcaagagcaaaaccaaaactaggagcagaagtagaggtcgagctagaaataaaacaagcaagagtagaagtcgaagcagtagcagtagcagttctagtagcagttcaaccagtagcagcagtggaagtagttccagcagtggaagtagtagcagtcgcagtagttccagtagcagctccagtacaagtggcagcagcagcagagatagtagcagtagcactagtagtagtagtgagagtagaagtcggagtaggggccggggacataatagagatagaaagcacagaaggagcgtggatcggaagagaagggatacttcaggactagaaagaagtcacaaatcttcaaaaggtggtagtagtagagatacaaaaggatcaaaggataagaattcccggtccgacagaaagaggtctatatcagagagtagtcgatcaggcaaaagatcttcaagaagtgaaagagaccgaaaatcagacaggaaagacaaaaggcgttaatggaagaagccaggctttcttagccattctttgcagcagaagatttcttgataaaaaaggattacctttccttgtaaagaggatgctgccttaagaattgcatgttgtaaaaaatctttttggaaaatacagactgtttgtttaccaga

SEQ ID NO: 346742 - DNA, 2347 bp, Homo sapiens
tgtcagtcctttcgcgcctcggcggcgcggcatagcccggctcggcctgtaaagcagtctcaagcctgccgcagggagaagatggcggtcgccgtgagaactttgcaggaacagctggaaaaggccaaagagagtcttaagaacgtggatgagaacattcgcaagctcaccgggcgggatccgaatgacgtgaggcccatccaagccagattgctggccctttctggtcctggtggaggtagaggacgtggtagtttattactgaggcgtggattctcagatagtggaggaggacccccagccaaacagagagaccttgaaggggcagtcagtaggctgggcggggagcgtcggaccagaagagaatcacgccaggaaagcgacccggaggatgatgatgttaaaaagccagcattgcagtcttcagttgtagctacctccaaagagcgcacacgtagagaccttatccaggatcaaaatatggatgaaaagggaaagcaaaggaaccggcgaatatttggcttgttgatgggtacccttcaaaaatttaaacaagaatccactgttgctactgaaaggcaaaagcggcgccaggaaattgaacaaaaacttgaagttcaggcagaagaagagagaaagcaggttgaaaatgaaaggagagaactgtttgaagagaggcgtgctaaacagacagaactgcggcttttggaacagaaagttgagcttgcgcagctgcaagaagaatggaatgaacataatgccaaaataattaaatatataagaactaagacaaagccccatttgttttatattcctggaagaatgtgtccagctacccaaaaactaatagaagagtcacagagaaaaatgaacgctttatttgaaggtagacgcatcgaatttgcagaacaaataaataaaatggaggctaggcctagaagacaatcaatgaaggaaaaagagcatcaggtggtgcgtaatgaagaacagaaggcggaacaagaagagggtaaggtggctcagcgagaggaagagttggaggagacaggtaatcagcacaatgatgtagaaatagaggaagcaggagaggaagaggaaaaggaaatagcgattgttcatagtgatgcagagaaagaacaggaggaggaagaacaaaaacaggaaatggaggttaagatggaggaggaaactgaggtaagggaaagtgagaagcagcaggatagtcagcctgaagaagttatggatgtgctagagatggttgagaatgtcaaacatgtaattgctgaccaggaggtaatggaaactaatcgagttgaaagtgtagaaccttcagaaaatgaagctagcaaagaattggaaccagaaatggaatttgaaattgagccagataaagaatgtaaatccctttctcctgggaaagagaatgtcagtgctttagacatggaaaaggagtctgaggaaaaagaagaaaaagaatctgagccccaacctgagcctgtggctcaacctcagcctcagtctcagccccagcttcagcttcaatcccagtcccaaccagtactccagtcccagcctccctctcagcctgaggatttgtcattagctgttttacagccaacaccccaagttactcaggagcaagggcatttactacctgagaggaaggattttcctgtagagtctgtaaaactcactgaggtaccagtagagccagtcttgacagtacatccagagagcaagagcaaaaccaaaactaggagcagaagtagaggtcgagctagaaataaaacaagcaagagtagaagtcgaagcagtagcagtagcagttctagtagcatggaagtagtagcagtcgcagtagttccagtagcagctccagtacaagtggcagcagcagcagagatagtagcagtagcactagtagtagtagtgagagtagaagtcggagtaggggccggggacataatagagatagaaagcacagaaggagcgtggatcggaagagaagggatacttcaggactagaaagaagtcacaaatcttcaaaaggtggtagtagtagagatacaaaaggatcaaaggataagaattcccggtccgacagaaagaggtctatatcagagagtagtcgatcaggcaaaagatcttcaagaagtgaaagagaccgaaaatcagacaggaaagacaaaaggcgttaatggaagaagccaggctttcttagccattctttgcagcagaagatttcttgataaaaaaggattacctttccttgtaaagaggatgctgccttaagaattgcatgttgtaaaaaatctttttggaaaatacagactgtttgtttaccaga

SEQ ID NO: 346743 - DNA, 1047 bp, Homo sapiens
  misc_feature (1041)..(1041): n is a, c, g, or t
tgtcagtcctttcgcgcctcggcggcgcggcatagcccggctcggcctgtaaagcagtctcaagcctgccgcagggagaagatggcggtcgccgtgagaactttgcaggaacagctggaaaaggccaaagagagtcttaagaacgtggatgagaacattcgcaagctcaccgggcgggatccgaatgacgtgaggcccatccaagccagattgctggccctttctggtcctggtggaggtagaggacgtggtagtttattactgaggcgtggattctcagatagtggaggaggacccccagccaaacagagagaccttgaaggggcagtcagtaggctgggcggggagcgtcggaccagaagagaatcacgccaggaaagcgacccggaggatgatgatgttaaaaagccagcattgcagtcttcagttgtagctacctccaaagagcgcacacgtagagaccttatccaggatcaaaatatggatgaaaagggaaagcaaaggaaccggcgaatatttggcttgttgatgggtacccttcaaaaatttaaacaagaatccactgttgctactgaaaggcaaaagcggcgccaggaaattgaacaaaaacttgaagttcaggcagaagaagagagaaagcaggttgaaaatgaaaggagagaactgtttgaagagaggcgtgctaaacagacagaactgcggcttttggaacagaaagttgagcttgcgcagctgcaagaagaatggaatgaacataatgccaaaataattaaatatataagaactaagacaaagccccatttgttttatattcctggaagaatgtgtccagctacccaaaaactaatagaagagtcacagagaaaaatgaacgcaaaagcggcgccaggaaattgaacaaaaacttgaagttcaggcagaagaagagagaaagcaggttgaaaatgaaaggagagaactgtttgaagagaggcgtgctaaacagacagaactgcgctttggaacaggtgagcttgcgcagtgcaagaagatggaatgcantatgcc

SEQ ID NO: 346744 - DNA, 996 bp, Homo sapiens
tgtcagtcctttcgcgcctcggcggcgcggcatagcccggctcggcctgtaaagcagtctcaagcctgccgcagggagaagatggcggtcgccgtgagaactttgcaggaacagctggaaaaggccaaagagagtcttaagaacgtggatgagaacattcgcaagctcaccgggcgggatccgaatgacgtgaggcccatccaagccagattgctggccctttctggtcctggtggaggtagaggacgtggtagtttattactgaggcgtggattctcagatagtggaggaggacccccagccaaacagagagaccttgaaggggcagtcagtaggctgggcggggagcgtcggaccagaagagaatcacgccaggaaagcgacccggaggatgatgatgttaaaaagccagcattgcagtcttcagttgtagctacctccaaagagcgcacacgtagagaccttatccaggatcaaaatatggatgaaaagggaaagcaaaggaaccggcgaatatttggcttgttgatgggtacccttcaaaaatttaaacaagaatccactgttgctactgaaaggcaaaagcggcgccaggaaattgaacaaaaacttgaagttcaggcagaagaagagagaaagcaggttgaaaatgaaaggagagaactgtttgaagagaggcgtgctaaacagacagaactgcggcttttggaacagaaagttgagcttgcgcagctgcaagaagaatggaatgaacataatcgccggtcacgagatatctcgtgaccggcgattatttcgggaactatttagttgatgcagcctccgatcataatgggtgtcactattatgaagatgattacatcatgcagtgggctgtgtacgattatgttgtagatttggactgaaacacatataatgtcgcctggctgggctgtgacgattcgattatagatgtgtacagctgcgacaaggattccaggttatgcccagaataat

SEQ ID NO: 346745 - DNA, 942 bp, Homo sapiens
tgtcagtcctttcgcgcctcggcggcgcggcatagcccggctcggcctgtaaagcagtctcaagcctgccgcagggagaagatggcggtcgccgtgagaactttgcaggaacagctggaaaaggccaaagagagtcttaagaacgtggatgagaacattcgcaagctcaccgggcgggatccgaatgacgtgaggcccatccaagccagattgctggccctttctggtcctggtggaggtagaggacgtggtagtttattactgaggcgtggattctcagatagtggaggaggacccccagccaaacagagagaccttgaaggggcagtcagtaggctgggcggggagcgtcggaccagaagagaatcacgccaggaaagcgacccggaggatgatgatgttaaaaagccagcattgcagtcttcagttgtagctacctccaaagagcgcacacgtagagaccttatccaggatcaaaatatggatgaaaagggaaagcaaaggaaccggcgaatatttggcttgttgatgggtacccttcaaaaatttaaacaagaatccactgttgctactgaaagggtatttatccaagttttgttttgcatcatatatttaagttatcaaagtagtagattaatgtttttttaaaaaaatccttaaagctcttttaagacctaactgtaaacctgaaacaaagccaagtaaaacttggtttaacttcttatagaacagctttacttaaacattgtgttggaatataacagttgttgatatcatagctaatagccttgaaatttagatatgtgaaaaaaaaaagcctcaagtctccatttccttaaagacaaattacagtcagtaccaagtgctaagttctagttagttggtatcctgaattgaaaatgtgagccactgtgcccggcctgcagatacctttacatagtg

SEQ ID NO: 346746 - DNA, 606 bp, Homo sapiens
  misc_feature (600)..(600): n is a, c, g, or t
gcggccgctccaacatcagaatggtaacaggatcaaaatatggatgaaaagggaaagcaaaggaaccggcgaatatttggcttgttgatgggtacccttcaaaaatttaaacaagaatccactgttgctactgaaaggcaaaagcggcgccaggaaattgaacaaaaacttgaagttcaggcagaagaagagagaaagcaggttgaaaatgaaaggagagaactgtttgaagagaggcgtgctaaacagacagaactgcggcttttggaacagaaagttgagcttgcgcagctgcaagaagaatggaatgaacataatgccaaaataattaaatatataagaactaagacaaagccccatttgttttatattcctggaagaatgtgtccagctacccaaaaactaatagaagagtcacagagaaaaatgaacgcaaaagcggcgccaggaaattgaacaaaaacttgaagttcaggcagaagaagagagaaagcaggttgaaaatgaaaggagagaactgtttgaagagaggcgtgctaaacagacagaactgcgctttggaacaggtgagcttgcgcagtgcaagaagatggaatgcantatgcc

SEQ ID NO: 346747 - DNA, 3672 bp, Homo sapiens
agctgccgctcgcgatctagaacagcaagatggccgccgctgaggaaggctgtagtgtcggggccgaagcggacagggaattggaggagcttctggaaagtgctcttgatgatttcgataaagccaaaccctccccagcacccccttctaccaccacggcccctgatgcttcggggccccagaagagatcgccaggagacactgccaaagatgccctcttcgcttcccaagagaagtttttccaggaactattcgacagtgaactggcttcccaagccactgcggagttcgagaaggcaatgaaggagttggctgaggaagaaccccacctggtggagcagttccaaaagctctcagaggctgcagggagagtgggcagtgatatgacctcccaacaagaattcacttcttgcctaaaggaaacactaagtggattagccaaaaatgccactgaccttcagaactccagcatgtcggaagaagagctgaccaaggccatggaggggctaggcatggacgaaggggatggggaagggaacatcctccccatcatgcagagtattatgcagaacctactctccaaggatgtgctgtacccatcactgaaggagatcacagaaaagtatccagaatggttgcagagtcatcgggaatctctacctccagagcagtttgaaaaatatcaggagcagcacagcgtcatgtgcaaaatatgtgagcagtttgaggcagagacccccacagacagtgaaaccactcaaaaggctcgttttgagatggtgctggatcttatgcagcagctacaagatttaggccatcctccaaaagagctggctggagagatgcctcctggcctcaactttgacctggatgccctcaatctttcgggcccaccaggtgccagtggtgaacagtgtctgatcatgtgaaacacaacacgttttcctctctgagtcccagctatggggaacatctggagtcagcagaaccattgggacctgaggcaggagtgtcacctgcgggagaagtctgcccgctgccctctgtcatcccattcaagattgtgccataccagctgaggtttttcctctgtctctctaggaatagggtctgtttcacaggccatttctgtgaaccctactccattgtggtttctgccactatcaaagttccagctacctgcaaggtgaaggaaggcatcccttttggggcatgcactttctttcctttctcaaaataatgttatatgtggccacactgatgttcacctttacgtccagggtctttgtgccttgtctctactccctctcttggatctggggaggaggggcagagacctgggactctgtatttctatagttctcctggcagagcctttgagaatggggagaaacagcctgggctggggctacaggtctgtcactatgctctcttgccttcagacagaccattctgaattctctaaagggaaagggcttttgcatctaatcacaatagagttgaaagagaggccttaggattctcctctctctaggtgctgagccctcacctccctgttccaggctgagaactcaaatggttaccctgcttcttcctacaatgctgtgtgatatgggtgaacccagcccctgaccttcctctatcccctgcccatcctcccttttacctcctctcttttttaaacacctgtttatcccaacctttttgagctcaagctgtgataaagaagggcccatcctatttcccctcatctagtccatttacgattctcactgactccccgtcttcctggcagacacaaataaacccagtgtcaggtctaggaaattaatggctattcttccccagatacattctggcttatttgagatacatgattctcttagaatcctgtcccttggttcaggaaagtagcttggaaaaggagtaggggtatagcttgggtcccttttcctgcaaggccccatggggcagaatataataaatattctgagtgaggagtgtggtctttttctgatcttcctcagcttccgtaagttgcagagtgaggtatattaggagactagttctacacaatattgtaatgctgggttccatcaacacccaccttccacaactcagtctgcacctcagttggcaaaggagactggatggccatctttcctcatgttcccttgagtatttcaatgtagaaagcccttcaagtggtattatattttaaccttttacattattgttattaatgttagtaatatattgttatgttttctaaattatttttctttaagctgacgtggctttttttctgtggctcccagtgggtctacggaccttggctgacatatgttggtaggtactctggtcagctcagctggctgtcctggttcactcagaagataagtctctccaaagcaaattcacatgcattatgagtcgctttgagcttctgacatgtcacttgccccgaggttaaaacttttcaccccttgaagaccttacatgttttatggtattggtgaggaaggaaatgttctcaaggtctcaggctatttgggaaattccaactcctataccttaccagagcatggaagagcccagatctgaatgtaaaacgtctctgttctgccagagatggaaaaaatacaggtatacttgtgatatagtcatggggcttcagtgtcactattttctccttaaagctccagccaaaaactggacaaggatagagaggaggagggaagaacaaaagagcccttctctatgaaccttgtgccttctgtcctaccagttttcttttacagattctcacttctgctagcctagccagggcttactccaggaatctaaatagatgccctagtccactttatctttgttcccaaggcactcatttttattttgattttgattgaatgtgagcaggttgacctcaggtcacactttgttccaaaaacttttggaattattccaggacttgtggtggagttatggtactctagggcagtctttctcaaactatgtatggtaaaggaccaggttttttgttttccagtccttcacttatcaatatgcattcctattgcccatgacaggtatggagttcacactgtgtgctgccgacccggcaagtttgacagcacccaaactggccagactgttctgtaggttaagtccattgatcatgtacttggatatcacagcaacattgaaatgctaaaaagtttttaaacactctcaatttctaattcaccatgtcacagactggtgaaaaaaaaaaaaaggtgttcactgaccagcacaagtctgcagatcatctttgagtagcactgttttggggccctcggtctctctgaagaccctagcagaactgatacctacctgtatctcttgttctctcctatttgagtttcacttccagagaacttgttcttcagcaagaatgtgtcactagtaaggacatctctagcatttctctagccttccttttctgctgctcaaaaataatcgttacaaagcttaggtttaagctgtatatgaaatatttatgcgactctcaaactttaaaggagttgctcctttgttccaaaattaaatgtgttagataaatttgtgattgtatgggtggcttcatgaattaagaattgaattaatacagactttttgataattggg

SEQ ID NO: 346748 - DNA, 4161 bp, Homo sapiens
agctgccgctcgcgatctagaacagcaagatggccgccgctgaggaaggctgtagtgtcggggccgaagcggacagggaattggaggagcttctggaaagtgctcttgatgatttcgataaagccaaaccctccccagcacccccttctaccaccacggcccctgatgcttcggggccccagaagagatcgccaggagacactgccaaagatgccctcttcgcttcccaagagaagtttttccaggaactattcgacagtgaactggcttcccaagccactgcggagttcgagaaggcaatgaaggagttggctgaggaagaaccccacctggtggagcagttccaaaagctctcagaggctgcagggagagtgggcagtgatatgacctcccaacaagaattcacttcttgcctaaaggaaacactaagtggattagccaaaaatgccactgaccttcagaactccagcatgtcggaagaagagctgaccaaggccatggaggggctaggcatggacgaaggggatggggaagggaacatcctccccatcatgcagagtattatgcagaacctactctccaaggatgtgctgtacccatcactgaaggagatcacagaaaagtatccagaatggttgcagagtcatcgggaatctctacctccagagcagtttgaaaaatatcaggagcagcacagcgtcatgtgcaaaatatgtgagcagtttgaggcagagacccccacagacagtgaaaccactcaaaaggctcgttttgagatggtgctggatcttatgcagcagctacaagatttaggccatcctccaaaagagctggctggagagatgcctcctggcctcaactttgacctggatgccctcaatctttcgggcccaccaggtgccagtggtgaacagtgtctgatcatgtgaaacacaacacgttttcctctctgagtcccagctatggggaacatctggagtcagcagaaccattgggacctgaggcaggagtgtcacctgcgggagaagtctgcccgctgccctctgtcatcccattcaagattgtgccataccagctgaggtttttcctctgtctctctaggaatagggtctgtttcacaggccatttctgtgaaccctactccattgtggtttctgccactatcaaagttccagctacctgcaaggtgaaggaaggcatcccttttggggcatgcactttctttcctttctcaaaataatgttatatgtggccacactgatgttcacctttacgtccagggtctttgtgccttgtctctactccctctcttggatctggggaggaggggcagagacctgggactctgtatttctatagttctcctggcagagcctttgagaatggggagaaacagcctgggctggggctacaggtctgtcactatgctctcttgccttcagacagaccattctgaattctctaaagggaaagggcttttgcatctaatcacaatagagttgaaagagaggccttaggattctcctctctctaggtgctgagccctcacctccctgttccaggctgagaactcaaatggttaccctgcttcttcctacaatgctgtgtgatatgggtgaacccagcccctgaccttcctctatcccctgcccatcctcccttttacctcctctcttttttaaacacctgtttatcccaacctttttgagctcaagctgtgataaagaagggcccatcctatttcccctcatctagtccatttacgattctcactgactccccgtcttcctggcagacacaaataaacccagtgtcaggtctaggaaattaatggctattcttccccagatacattctggcttatttgagatacatgattctcttagaatcctgtcccttggttcaggaaagtagcttggaaaaggagtaggggtatagcttgggtcccttttcctgcaaggccccatggggcagaatataataaatattctgagtgaggagtgtggtctttttctgatcttcctcagcttccgtaagttgcagagtgaggtatattaggagactagttctacacaatattgtaatgctgggttccatcaacacccaccttccacaactcagtctgcacctcagttggcaaaggagactggatggccatctttcctcatgttcccttgagtatttcaatgtagaaagcccttcaagtggtattatattttaaccttttacattattgttattaatgttagtaatatattgttatgttttctaaattatttttctttaagctgacgtggctttttttctgtggctcccagtgggtctacggaccttggctgacatatgttggtaggtactctggtcagctcagctggctgtcctggttcactcagaagataagtctctccaaagcaaattcacatgcattatgagtcgctttgagcttctgacatgtcacttgccccgaggttaaaacttttcaccccttgaagaccttacatgttttatggtattggtgaggaaggaaatgttctcaaggtctcaggctatttgggaaattccaactcctataccttaccagagcatggaagagcccagatctgaatgtaaaacgtctctgttctgccagagatggaaaaaatacaggtatacttgtgatatagtcatggggcttcagtgtcactattttctccttaaagctccagccaaaaactggacaaggatagagaggaggagggaagaacaaaagagcccttctctatgaaccttgtgccttctgtcctaccagttttcttttacagattctcacttctgctagcctagccagggcttactccaggaatctaaatagatgccctagtccactttatctttgttcccaaggcactcatttttattttgattttgattgaatgtgagcaggttgacctcaggtcacactttgttccaaaaacttttggaattattccaggacttgtggtggagttatggtactctagggcagtctttctcaaactatgtatggtaaaggaccaggttttttgttttccagtccttcacttatcaatatgcattcctattgcccatgacaggtatggagttcacactgtgtgctgccgacccggcaagtttgacagcacccaaactggccagactgttctgtaggttaagtccattgatcatgtacttggatatcacagcaacattgaaatgctaaaaagtttttaaacactctcaatttctaattcaccatgtcacagactggtgaaaaaaaaaaaaaggtgttcactgaccagcacaagtctgcagatcatctttgagtagcactgttttggggccctcggtctctctgaagaccctagcagaactgatacctacctgtatctcttgttctctcctatttgagtttcacttccagagaacttgttcttcagcaagaatgtgtcactagtaaggacatctctagcatttctctagccttccttttctgctgctcaaaaataatcgttacaaagcttaggtttaagctgtatatgaaatatttatgcgactctcaaactttaaaggagttgctcctttgttccaaaattaaatgtgttagataaaaaaaaaaaaaaaaaaaaaaaaaaaaaaaaaaaaaaaagcagaaaaaaaaaaaaaaaaaaaaaaaaaaaaagaaaaaaacagcagaaaaaacgaaaaaaacaatacaaaaaacacaaaacagaaacaacaccaaaaaaagaacacatcacgacgccacgcgggcgcggcgcccactacaaacgcaatctcccattgggaggaagacaacccaacgacgagacgaccacatttgggcacaaacggacggggaaccattagaacgagaaggcgggaacaaaaatctacgcaaagcacgaggccgcgccggtaaacaaacggataggcgaagcgaggccaaaaaccaaggaaaggcgacaattgaagcgagaaacacaccacccacggggccggagcgtacacccacaaaacaaccaactcgcagaacaacgaagccaaccgcggagcacactagaacccacaggacgaaggcgaaagagcacacacacacccacccgcccgcgcgagagagaaaacagacagcacgaaacgcccaaaaaaactacacgggagatgcaa

SEQ ID NO: 346749 - DNA, 2000 bp, Homo sapiens
agctgccgctcgcgatctagaacagcaagatggccgccgctgaggaaggctgtagtgtcggggccgaagcggacagggaattggaggagcttctggaaagtgctcttgatgatttcgataaagccaaaccctccccagcacccccttctaccaccacggcccctgatgcttcggggccccagaagagatcgccaggagacactgccaaagatgccctcttcgcttcccaagagaagtttttccaggaactattcgacagtgaactggcttcccaagccactgcggagttcgagaaggcaatgaaggagttggctgaggaagaaccccacctggtggagcagttccaaaagctctcagaggctgcagggagagtgggcagtgatatgacctcccaacaagaattcacttcttgcctaaaggaaacactaagtggattagccaaaaatgccactgaccttcagaactccagcatgtcggaagaagagctgaccaaggccatggaggggctaggcatggacgaaggggatggggaagggaacatcctccccatcatgcagagtattatgcagaacctactctccaaggatgtgctgtacccatcactgaaggagatcacagaaaagtatccagaatggttgcagagtcatcgggaatctctacctccagagcagtttgaaaaatatcaggagcagcacagcgtcatgtgcaaaatatgtgagcagtttgaggcagagacccccacagacagtgaaaccactcaaaaggctcgttttgagatggtgctggatcttatgcagcagctacaagatttaggccatcctccaaaagagctggctggagagatgcctcctggcctcaactttgacctggatgccctcaatctttcgggcccaccaggtgccagtggtgaacagtgtctgatcatgtgaaacacaacacgttttcctctctgagtcccagctatggggaacatctggagtcagcagaaccattgggacctgaggcaggagtgtcacctgcgggagaagtctgcccgctgccctctgtcatcccattcaagattgtgccataccagctgaggtttttcctctgtctctctaggaatagggtctgtttcacaggccatttctgtgaaccctactccattgtggtttctgccactatcaaagttccagctacctgcaaggtgaaggaaggcatcccttttggggcatgcactttctttcctttctcaaaataatgttatatgtggccacactgatgttcacctttacgtccagggtctttgtgccttgtctctactccctctcttggatctggggaggaggggcagagacctgggactctgtatttctatagttctcctggcagagcctttgagaatggggagaaacagcctgggctggggctacaggtctgtcactatgctctcttgccttcagacagaccattctgaattctctaaagggaaagggcttttgcatctaatcacaatagagttgaaagagaggccttaggattctcctctctctaggtgctgagccctcacctccctgttccaggctgagaactcaaatggttaccctgcttcttcctacaatgctgtgtgatatgggtgaacccagcccctgaccttcctctatcccctgcccatcctcccttttacctcctctcttttttaaacacctgtttatcccaacctttttgagctcaagctgtgataaagaagggcccatcctatttcccctcatctagtccatttacgattctcactgactccccgtcttcctggcagacacaaataaacccagtgtcaggtctaggaaattaatggctattcttccccagatacattctggcttatttgagatacatgattctcttagaatcctgtcccttggttcaggaaagtagcttggaaaaggagtaggggtatagcttgggtcccttttcctgcaaggccccatggggcagaatataataaatattctgagtgagga

SEQ ID NO: 346750 - DNA, 3839 bp, Homo sapiens
agctgccgctcgcgatctagaacagcaagatggccgccgctgaggaaggctgtagtgtcggggccgaagcggacagggaattggaggagcttctggaaagtgctcttgatgatttcgataaagccaaaccctccccagcacccccttctaccaccacggcccctgatgcttcggggccccagaagagatcgccaggagacactgccaaagatgccctcttcgcttcccaagagaagtttttccaggaactattcgacagtgaactggcttcccaagccactgcggagttcgagaaggcaatgaaggagttggctgaggaagaaccccacctggtggagcagttccaaaagctctcagaggctgcagggagagtgggcagtgatatgacctcccaacaagaattcacttcttgcctaaaggaaacactaagtggattagccaaaaatgccactgaccttcagaactccagcatgtcggaagaagagctgaccaaggccatggaggggctaggcatggacgaaggggatggggaagggaacatcctccccatcatgcagagtattatgcagaacctactctccaaggatgtgctgtacccatcactgaaggagatcacagaaaagtatccagaatggttgcagagtcatcgggaatctctacctccagagcagtttgaaaaatatcaggagcagcacagcgtcatgtgcaaaatatgtgagcagtttgaggcagagacccccacagacagtgaaaccactcaaaaggctcgttttgagatggtgctggatcttatgcagcagctacaagatttaggccatcctccaaaagagctggctggagagatggtgagtatgtcttatttttccagattttaatttgagtccccaatttccagaattctttaacctctcaggattccacctaaggtgaaaattgtggctactggggatggatcttcacgtctgtcctaaaaaatgagcaactatctgagtcccttcatctcttccccagccctcctggcctcaactttgacctggatgccctcaatctttcgggcccaccaggtgccagtggtgaacagtgtctgatcatgtgaaacacaacacgttttcctctctgagtcccagctatggggaacatctggagtcagcagaaccattgggacctgaggcaggagtgtcacctgcgggagaagtctgcccgctgccctctgtcatcccattcaagattgtgccataccagctgaggtttttcctctgtctctctaggaatagggtctgtttcacaggccatttctgtgaaccctactccattgtggtttctgccactatcaaagttccagctacctgcaaggtgaaggaaggcatcccttttggggcatgcactttctttcctttctcaaaataatgttatatgtggccacactgatgttcacctttacgtccagggtctttgtgccttgtctctactccctctcttggatctggggaggaggggcagagacctgggactctgtatttctatagttctcctggcagagcctttgagaatggggagaaacagcctgggctggggctacaggtctgtcactatgctctcttgccttcagacagaccattctgaattctctaaagggaaagggcttttgcatctaatcacaatagagttgaaagagaggccttaggattctcctctctctaggtgctgagccctcacctccctgttccaggctgagaactcaaatggttaccctgcttcttcctacaatgctgtgtgatatgggtgaacccagcccctgaccttcctctatcccctgcccatcctcccttttacctcctctcttttttaaacacctgtttatcccaacctttttgagctcaagctgtgataaagaagggcccatcctatttcccctcatctagtccatttacgattctcactgactccccgtcttcctggcagacacaaataaacccagtgtcaggtctaggaaattaatggctattcttccccagatacattctggcttatttgagatacatgattctcttagaatcctgtcccttggttcaggaaagtagcttggaaaaggagtaggggtatagcttgggtcccttttcctgcaaggccccatggggcagaatataataaatattctgagtgaggagtgtggtctttttctgatcttcctcagcttccgtaagttgcagagtgaggtatattaggagactagttctacacaatattgtaatgctgggttccatcaacacccaccttccacaactcagtctgcacctcagttggcaaaggagactggatggccatctttcctcatgttcccttgagtatttcaatgtagaaagcccttcaagtggtattatattttaaccttttacattattgttattaatgttagtaatatattgttatgttttctaaattatttttctttaagctgacgtggctttttttctgtggctcccagtgggtctacggaccttggctgacatatgttggtaggtactctggtcagctcagctggctgtcctggttcactcagaagataagtctctccaaagcaaattcacatgcattatgagtcgctttgagcttctgacatgtcacttgccccgaggttaaaacttttcaccccttgaagaccttacatgttttatggtattggtgaggaaggaaatgttctcaaggtctcaggctatttgggaaattccaactcctataccttaccagagcatggaagagcccagatctgaatgtaaaacgtctctgttctgccagagatggaaaaaatacaggtatacttgtgatatagtcatggggcttcagtgtcactattttctccttaaagctccagccaaaaactggacaaggatagagaggaggagggaagaacaaaagagcccttctctatgaaccttgtgccttctgtcctaccagttttcttttacagattctcacttctgctagcctagccagggcttactccaggaatctaaatagatgccctagtccactttatctttgttcccaaggcactcatttttattttgattttgattgaatgtgagcaggttgacctcaggtcacactttgttccaaaaacttttggaattattccaggacttgtggtggagttatggtactctagggcagtctttctcaaactatgtatggtaaaggaccaggttttttgttttccagtccttcacttatcaatatgcattcctattgcccatgacaggtatggagttcacactgtgtgctgccgacccggcaagtttgacagcacccaaactggccagactgttctgtaggttaagtccattgatcatgtacttggatatcacagcaacattgaaatgctaaaaagtttttaaacactctcaatttctaattcaccatgtcacagactggtgaaaaaaaaaaaaaggtgttcactgaccagcacaagtctgcagatcatctttgagtagcactgttttggggccctcggtctctctgaagaccctagcagaactgatacctacctgtatctcttgttctctcctatttgagtttcacttccagagaacttgttcttcagcaagaatgtgtcactagtaaggacatctctagcatttctctagccttccttttctgctgctcaaaaataatcgttacaaagcttaggtttaagctgtatatgaaatatttatgcgactctcaaactttaaaggagttgctcctttgttccaaaattaaatgtgttagataaatttgtgattgtatgggtggcttcatgaattaagaattgaattaatacagactttttgataattggg

SEQ ID NO: 346751 - DNA, 3627 bp, Homo sapiens
agctgccgctcgcgatctagaacagcaagatggccgccgctgaggaaggctgtagtgtcggggccgaagcggacagggaattggaggagcttctggaaagtgctcttgatgatttcgataaagccaaaccctccccagcacccccttctaccaccacggcccctgatgcttcggggccccagaagagatcgccaggagacactgccaaagatgccctcttcgcttcccaagagaagtttttccaggaactattcgacagtgaactggcttcccaagccactgcggagttcgagaaggcaatgaaggagttggctgaggaagaaccccacctggtggagcagttccaaaagctctcagaggctgcagggagagtgggcagtgatatgacctcccaacaagaattcacttcttgcctaaaggaaacactaagtggattagccaaaaatgccactgaccttcagaactccagcatgtcggaagaagagctgaccaaggccatggaggggctaggcatggacgaaggggatggggaagggaacatcctccccatcatgcagagtattatgcagaacctactctccaaggatgtgctgtacccatcactgaaggagatcacagaaaagtatccagaatggttgcagagtcatcgggaatctctacctccagagcagtttgaaaaatatcaggagcagcacagcgtcatgtgcaaaatatgtgagcagtttgaggcagagacccccacagacagtgaaaccactcaaaaggctcgttttgagatggtgctggatcttatgcagcagcctcctggcctcaactttgacctggatgccctcaatctttcgggcccaccaggtgccagtggtgaacagtgtctgatcatgtgaaacacaacacgttttcctctctgagtcccagctatggggaacatctggagtcagcagaaccattgggacctgaggcaggagtgtcacctgcgggagaagtctgcccgctgccctctgtcatcccattcaagattgtgccataccagctgaggtttttcctctgtctctctaggaatagggtctgtttcacaggccatttctgtgaaccctactccattgtggtttctgccactatcaaagttccagctacctgcaaggtgaaggaaggcatcccttttggggcatgcactttctttcctttctcaaaataatgttatatgtggccacactgatgttcacctttacgtccagggtctttgtgccttgtctctactccctctcttggatctggggaggaggggcagagacctgggactctgtatttctatagttctcctggcagagcctttgagaatggggagaaacagcctgggctggggctacaggtctgtcactatgctctcttgccttcagacagaccattctgaattctctaaagggaaagggcttttgcatctaatcacaatagagttgaaagagaggccttaggattctcctctctctaggtgctgagccctcacctccctgttccaggctgagaactcaaatggttaccctgcttcttcctacaatgctgtgtgatatgggtgaacccagcccctgaccttcctctatcccctgcccatcctcccttttacctcctctcttttttaaacacctgtttatcccaacctttttgagctcaagctgtgataaagaagggcccatcctatttcccctcatctagtccatttacgattctcactgactccccgtcttcctggcagacacaaataaacccagtgtcaggtctaggaaattaatggctattcttccccagatacattctggcttatttgagatacatgattctcttagaatcctgtcccttggttcaggaaagtagcttggaaaaggagtaggggtatagcttgggtcccttttcctgcaaggccccatggggcagaatataataaatattctgagtgaggagtgtggtctttttctgatcttcctcagcttccgtaagttgcagagtgaggtatattaggagactagttctacacaatattgtaatgctgggttccatcaacacccaccttccacaactcagtctgcacctcagttggcaaaggagactggatggccatctttcctcatgttcccttgagtatttcaatgtagaaagcccttcaagtggtattatattttaaccttttacattattgttattaatgttagtaatatattgttatgttttctaaattatttttctttaagctgacgtggctttttttctgtggctcccagtgggtctacggaccttggctgacatatgttggtaggtactctggtcagctcagctggctgtcctggttcactcagaagataagtctctccaaagcaaattcacatgcattatgagtcgctttgagcttctgacatgtcacttgccccgaggttaaaacttttcaccccttgaagaccttacatgttttatggtattggtgaggaaggaaatgttctcaaggtctcaggctatttgggaaattccaactcctataccttaccagagcatggaagagcccagatctgaatgtaaaacgtctctgttctgccagagatggaaaaaatacaggtatacttgtgatatagtcatggggcttcagtgtcactattttctccttaaagctccagccaaaaactggacaaggatagagaggaggagggaagaacaaaagagcccttctctatgaaccttgtgccttctgtcctaccagttttcttttacagattctcacttctgctagcctagccagggcttactccaggaatctaaatagatgccctagtccactttatctttgttcccaaggcactcatttttattttgattttgattgaatgtgagcaggttgacctcaggtcacactttgttccaaaaacttttggaattattccaggacttgtggtggagttatggtactctagggcagtctttctcaaactatgtatggtaaaggaccaggttttttgttttccagtccttcacttatcaatatgcattcctattgcccatgacaggtatggagttcacactgtgtgctgccgacccggcaagtttgacagcacccaaactggccagactgttctgtaggttaagtccattgatcatgtacttggatatcacagcaacattgaaatgctaaaaagtttttaaacactctcaatttctaattcaccatgtcacagactggtgaaaaaaaaaaaaaggtgttcactgaccagcacaagtctgcagatcatctttgagtagcactgttttggggccctcggtctctctgaagaccctagcagaactgatacctacctgtatctcttgttctctcctatttgagtttcacttccagagaacttgttcttcagcaagaatgtgtcactagtaaggacatctctagcatttctctagccttccttttctgctgctcaaaaataatcgttacaaagcttaggtttaagctgtatatgaaatatttatgcgactctcaaactttaaaggagttgctcctttgttccaaaattaaatgtgttagataaatttgtgattgtatgggtggcttcatgaattaagaattgaattaatacagactttttgataattggg

SEQ ID NO: 346752 - DNA, 3565 bp, Homo sapiens
cccgcctcctacggcaagtcggaggtagcaagatggccgccgctgaggaaggctgtagtgtcggggccgaagcggacagggaattggaggagcttctggaaagatgccctcttcgcttcccaagagaagtttttccaggaactattcgacagtgaactggcttcccaagccactgcggagttcgagaaggcaatgaaggagttggctgaggaagaaccccacctggtggagcagttccaaaagctctcagaggctgcagggagagtgggcagtgatatgacctcccaacaagaattcacttcttgcctaaaggaaacactaagtggattagccaaaaatgccactgaccttcagaactccagcatgtcggaagaagagctgaccaaggccatggaggggctaggcatggacgaaggggatggggaagggaacatcctccccatcatgcagagtattatgcagaacctactctccaaggatgtgctgtacccatcactgaaggagatcacagaaaagtatccagaatggttgcagagtcatcgggaatctctacctccagagcagtttgaaaaatatcaggagcagcacagcgtcatgtgcaaaatatgtgagcagtttgaggcagagacccccacagacagtgaaaccactcaaaaggctcgttttgagatggtgctggatcttatgcagcagctacaagatttaggccatcctccaaaagagctggctggagagatgcctcctggcctcaactttgacctggatgccctcaatctttcgggcccaccaggtgccagtggtgaacagtgtctgatcatgtgaaacacaacacgttttcctctctgagtcccagctatggggaacatctggagtcagcagaaccattgggacctgaggcaggagtgtcacctgcgggagaagtctgcccgctgccctctgtcatcccattcaagattgtgccataccagctgaggtttttcctctgtctctctaggaatagggtctgtttcacaggccatttctgtgaaccctactccattgtggtttctgccactatcaaagttccagctacctgcaaggtgaaggaaggcatcccttttggggcatgcactttctttcctttctcaaaataatgttatatgtggccacactgatgttcacctttacgtccagggtctttgtgccttgtctctactccctctcttggatctggggaggaggggcagagacctgggactctgtatttctatagttctcctggcagagcctttgagaatggggagaaacagcctgggctggggctacaggtctgtcactatgctctcttgccttcagacagaccattctgaattctctaaagggaaagggcttttgcatctaatcacaatagagttgaaagagaggccttaggattctcctctctctaggtgctgagccctcacctccctgttccaggctgagaactcaaatggttaccctgcttcttcctacaatgctgtgtgatatgggtgaacccagcccctgaccttcctctatcccctgcccatcctcccttttacctcctctcttttttaaacacctgtttatcccaacctttttgagctcaagctgtgataaagaagggcccatcctatttcccctcatctagtccatttacgattctcactgactccccgtcttcctggcagacacaaataaacccagtgtcaggtctaggaaattaatggctattcttccccagatacattctggcttatttgagatacatgattctcttagaatcctgtcccttggttcaggaaagtagcttggaaaaggagtaggggtatagcttgggtcccttttcctgcaaggccccatggggcagaatataataaatattctgagtgaggagtgtggtctttttctgatcttcctcagcttccgtaagttgcagagtgaggtatattaggagactagttctacacaatattgtaatgctgggttccatcaacacccaccttccacaactcagtctgcacctcagttggcaaaggagactggatggccatctttcctcatgttcccttgagtatttcaatgtagaaagcccttcaagtggtattatattttaaccttttacattattgttattaatgttagtaatatattgttatgttttctaaattatttttctttaagctgacgtggctttttttctgtggctcccagtgggtctacggaccttggctgacatatgttggtaggtactctggtcagctcagctggctgtcctggttcactcagaagataagtctctccaaagcaaattcacatgcattatgagtcgctttgagcttctgacatgtcacttgccccgaggttaaaacttttcaccccttgaagaccttacatgttttatggtattggtgaggaaggaaatgttctcaaggtctcaggctatttgggaaattccaactcctataccttaccagagcatggaagagcccagatctgaatgtaaaacgtctctgttctgccagagatggaaaaaatacaggtatacttgtgatatagtcatggggcttcagtgtcactattttctccttaaagctccagccaaaaactggacaaggatagagaggaggagggaagaacaaaagagcccttctctatgaaccttgtgccttctgtcctaccagttttcttttacagattctcacttctgctagcctagccagggcttactccaggaatctaaatagatgccctagtccactttatctttgttcccaaggcactcatttttattttgattttgattgaatgtgagcaggttgacctcaggtcacactttgttccaaaaacttttggaattattccaggacttgtggtggagttatggtactctagggcagtctttctcaaactatgtatggtaaaggaccaggttttttgttttccagtccttcacttatcaatatgcattcctattgcccatgacaggtatggagttcacactgtgtgctgccgacccggcaagtttgacagcacccaaactggccagactgttctgtaggttaagtccattgatcatgtacttggatatcacagcaacattgaaatgctaaaaagtttttaaacactctcaatttctaattcaccatgtcacagactggtgaaaaaaaaaaaaaggtgttcactgaccagcacaagtctgcagatcatctttgagtagcactgttttggggccctcggtctctctgaagaccctagcagaactgatacctacctgtatctcttgttctctcctatttgagtttcacttccagagaacttgttcttcagcaagaatgtgtcactagtaaggacatctctagcatttctctagccttccttttctgctgctcaaaaataatcgttacaaagcttaggtttaagctgtatatgaaatatttatgcgactctcaaactttaaaggagttgctcctttgttccaaaattaaatgtgttagataaatttgtgattgtatgggtggcttcatgaattaagaattgaattaatacagactttttgataattggg

SEQ ID NO: 346753 - DNA, 1852 bp, Homo sapiens
  misc_feature (1800)..(1800): n is a, c, g, or t
agctgccgctcgcgatctagaacagcaagatggccgccgctgaggaaggctgtagtgtcggggccgaagcggacagggaattggaggagcttctggaaagtgctcttgatgatttcgataaagccaaaccctccccagcacccccttctaccaccacggcccctgatgcttcggggccccagaagagatcgccaggagacactgccaaagatgccctcttcgcttcccaagagaagtttttccaggaactattcgacagtgaactggcttcccaagccactgcggagttcgagaaggcaatgaaggagttggctgaggaagaaccccacctggtggagcagttccaaaagctctcagaggctgcagggagagtgggcagtgatatgacctcccaacaagaattcacttcttgcctaaaggaaacactaagtggattagccaaaaatgccactgaccttcagaactccagcatgtcggaagaagagctgaccaaggccatggaggggctaggcatggacgaaggggatggggaagggaacatcctccccatcatgcagagtattatgcagaacctactctccaaggatgtgctgtacccatcactgaaggagatcacagaaaagtatccagaatggttgcagagtcatcgggaatctctacctccagagcagtttgaaaaatatcaggagcagcacagcgtcatgtgcaaaatatgtgagcagtttgaggcagagacccccacagacagtgaaaccactcaaaaggctcgttttgagatggtgctggatcttatgcagcagctacaagatttaggccatcctccaaaagagctggctggagagatgcctcctggcctcaactttgacctggatgccctcaatctttcgggcccaccaggtgccagtggtgaacagtgtctgatcatgtgaaacacaacacgttttcctctctgagtcccagctatggggaacatctggagtcagcagaaccattgggacctgaggcaggagtgtcacctgcgggagaagtctgcccgctgccctctgtcatcccattcaagattgtgccataccagctgaggtttttcctctgtctctctaggaatagggtctgtttcacaggccatttctgtgaaccctactccattgtggtttctgccactatcaaagttccagctacctgcaaggtgaaggaaggcatcccttttggggcatgcactttctttcctttctcaaaataatgttatatgtggccacactgatgttcacctttacgtccagggtctttgtgccttgtctctactccctctcttggatctggggaggaggggcagagacctgggactctgtatttctatagttctcctggcagagcctttgagaatggggagaaacagcctgggctggggctacaggtctgtcactatgctctcttgccttcagacagaccattctgaattctctaaagggaaagggcttttgcatctaatcacaatagagttgaaagagaggccttaggattctcctctctctaggtgctgagccctcacctccctgttccaggctgagaactcaaatggttaccctgcttcttcctacaatgctgtgtgatatgggtgaacccagcccctgaccttcctctatcccctgcccatcctcccttttacctcctctcttttttaaacacctgtttatcccaacctttttgagctcaagctgtgataaagaagggcccatcctatttcccctcatctagtccattttacctcctctcttttttaaacacctgtttatcccaacntttttgagctcaaatggttacctgcttcttcctacattgcggggatcctcta

SEQ ID NO: 346754 - DNA, 1228 bp, Homo sapiens
  misc_feature (1211)..(1211): n is a, c, g, or t
agctgccgctcgcgatctagaacagcaagatggccgccgctgaggaaggctgtagtgtcggggccgaagcggacagggaattggaggagcttctggaaagtgctcttgatgatttcgataaagccaaaccctccccagcacccccttctaccaccacggcccctgatgcttcggggccccagaagagatcgccaggagacactgccaaagatgccctcttcgcttcccaagagaagtttttccaggaactattcgacagtgaactggcttcccaagccactgcggagttcgagaaggcaatgaaggagttggctgaggaagaaccccacctggtggagcagttccaaaagctctcagaggctgcagggagagtgggcagtgatatgacctcccaacaagaattcacttcttgcctaaaggaaacactaagtggattagccaaaaatgccactgaccttcagaactccagcatgtcggaagaagagctgaccaaggccatggaggggctaggcatggacgaaggggatggggaagggaacatcctccccatcatgcagagtattatgcagaacctactctccaaggatgtgctgtacccatcactgaaggagatcacagaaaagtatccagaatggttgcagagtcatcgggaatctctacctccagagcagtttgaaaaatatcaggagcagcacagcgtcatgtgcaaaatatgtgagcagtttgaggcagagacccccacagacagtgaaaccactcaaaaggctcgttttgagatggtgctggatcttatgcagcagctacaagatttaggccatcctccaaaagagctggctggagagatgcctcctggcctcaactttgacctggatgccctcaatctttcgggcccaccaggtgccagtggtgaacagtgtctgatcatgtgaaacacaacacgttttcctctctgagtcccagctatggggaacatctggagtcagcagaaccattgggacctgaggcaggagtgtcacctgcgggagaagtctgcccgctgccctctgtcatcccattcaagattgtgccataccagctgaggtttttcctctgtctctctaggaatagggtctgtttcacaggccatttctgtgaaccctactccattgtggtttctgccactatcaaagttccagctacctgcaaggtgaaggaaggcatcctttgtgcanccggatcctctagacga

SEQ ID NO: 346755 - DNA, 2625 bp, Homo sapiens
  misc_feature (19)..(19): n is a, c, g, or t
  misc_feature (78)..(78): n is a, c, g, or t
  misc_feature (109)..(109): n is a, c, g, or t
  misc_feature (113)..(113): n is a, c, g, or t
  misc_feature (115)..(117): n is a, c, g, or t
  misc_feature (130)..(130): n is a, c, g, or t
  misc_feature (148)..(148): n is a, c, g, or t
  misc_feature (180)..(180): n is a, c, g, or t
  misc_feature (185)..(185): n is a, c, g, or t
  misc_feature (198)..(198): n is a, c, g, or t
  misc_feature (210)..(210): n is a, c, g, or t
  misc_feature (240)..(240): n is a, c, g, or t
  misc_feature (244)..(244): n is a, c, g, or t
  misc_feature (257)..(257): n is a, c, g, or t
  misc_feature (276)..(276): n is a, c, g, or t
  misc_feature (279)..(279): n is a, c, g, or t
  misc_feature (294)..(294): n is a, c, g, or t
  misc_feature (326)..(326): n is a, c, g, or t
  misc_feature (355)..(355): n is a, c, g, or t
  misc_feature (405)..(405): n is a, c, g, or t
  misc_feature (446)..(446): n is a, c, g, or t
  misc_feature (449)..(449): n is a, c, g, or t
  misc_feature (472)..(472): n is a, c, g, or t
  misc_feature (486)..(486): n is a, c, g, or t
  misc_feature (493)..(493): n is a, c, g, or t
  misc_feature (508)..(508): n is a, c, g, or t
  misc_feature (528)..(528): n is a, c, g, or t
  misc_feature (571)..(571): n is a, c, g, or t
  misc_feature (606)..(606): n is a, c, g, or t
  misc_feature (728)..(728): n is a, c, g, or t
  misc_feature (751)..(751): n is a, c, g, or t
  misc_feature (754)..(754): n is a, c, g, or t
  misc_feature (756)..(758): n is a, c, g, or t
  misc_feature (761)..(762): n is a, c, g, or t
  misc_feature (767)..(768): n is a, c, g, or t
acgtgggcttttttatttngttgagcgtcctgccacttagagctggtcggttagcccttttccttaattagctgggtntattttttgcatggcgttttgtttaggttangtgncnnntcccttttcctcntttttgggcgccgttccntttacggtttccgttgagctttttgttttttnggttnttgtgtcagtggngtgtgtttttcntgttttttctttctttttgctctccggttnttcngtgttatcttttngtctcttttgtgggtatgntcntggtttttcatcctnttattctcaccgcatggtttttgtttttagtncgactttgttttgcgtccttgtagtgttntggtatgcctcgctccggcattgttaccttgtgttccactttaccatttnatttttgctgctcctgacgcactctcattttcccatcacgnggnttcgttcataggggggttggtgncttttgtcatgggntgctggntgggtttaggccaantctccgctcccctttttcgngttattattggtcaccttgtttttaatcttttttccgggctgnggatcggttggtgtctggggttggagactggtggnttttcggtggtgtgttttttcccgcggtttttcagggccgagttttttctgtgccatgttttctccctcatttgggcatggtattaggggtactatctaggctttcagtcttgatgcgttcnaaggggttattggtaggatcgcnccncnnnggnnccgtnnaggtctaggaaattaatggctattcttccccagatacattctggcttatttgagatacatgattctcttagaatcctgtcccttggttcaggaaagtagcttggaaaaggagtaggggtatagcttgggtcccttttcctgcaaggccccatggggcagaatataataaatattctgagtgaggagtgtggtctttttctgatcttcctcagcttccgtaagttgcagagtgaggtatattaggagactagttctacacaatattgtaatgctgggttccatcaacacccaccttccacaactcagtctgcacctcagttggcaaaggagactggatggccatctttcctcatgttcccttgagtatttcaatgtagaaagcccttcaagtggtattatattttaaccttttacattattgttattaatgttagtaatatattgttatgttttctaaattatttttctttaagctgacgtggctttttttctgtggctcccagtgggtctacggaccttggctgacatatgttggtaggtactctggtcagctcagctggctgtcctggttcactcagaagataagtctctccaaagcaaattcacatgcattatgagtcgctttgagcttctgacatgtcacttgccccgaggttaaaacttttcaccccttgaagaccttacatgttttatggtattggtgaggaaggaaatgttctcaaggtctcaggctatttgggaaattccaactcctataccttaccagagcatggaagagcccagatctgaatgtaaaacgtctctgttctgccagagatggaaaaaatacaggtatacttgtgatatagtcatggggcttcagtgtcactattttctccttaaagctccagccaaaaactggacaaggatagagaggaggagggaagaacaaaagagcccttctctatgaaccttgtgccttctgtcctaccagttttcttttacagattctcacttctgctagcctagccagggcttactccaggaatctaaatagatgccctagtccactttatctttgttcccaaggcactcatttttattttgattttgattgaatgtgagcaggttgacctcaggtcacactttgttccaaaaacttttggaattattccaggacttgtggtggagttatggtactctagggcagtctttctcaaactatgtatggtaaaggaccaggttttttgttttccagtccttcacttatcaatatgcattcctattgcccatgacaggtatggagttcacactgtgtgctgccgacccggcaagtttgacagcacccaaactggccagactgttctgtaggttaagtccattgatcatgtacttggatatcacagcaacattgaaatgctaaaaagtttttaaacactctcaatttctaattcaccatgtcacagactggtgaaaaaaaaaaaaaggtgttcactgaccagcacaagtctgcagatcatctttgagtagcactgttttggggccctcggtctctctgaagaccctagcagaactgatacctacctgtatctcttgttctctcctatttgagtttcacttccagagaacttgttcttcagcaagaatgtgtcactagtaaggacatctctagcatttctctagccttccttttctgctgctcaaaaataatcgttacaaagcttaggtttaagctgtatatgaaatatttatgcgactctcaaactttaaaggagttgctcctttgttccaaaattaaatgtgttagataaatttgtgattgtatgggtggcttcatgaattaagaattgaattaatacagactttttgataattggg

SEQ ID NO: 346756 - DNA, 1846 bp, Homo sapiens
ggctggtactggtctggagtgtagggattctggcttatttgagatacatgattctcttagaatcctgtcccttggttcaggaaagtagcttggaaaaggagtaggggtatagcttgggtcccttttcctgcaaggccccatggggcagaatataataaatattctgagtgaggagtgtggtctttttctgatcttcctcagcttccgtaagttgcagagtgaggtatattaggagactagttctacacaatattgtaatgctgggttccatcaacacccaccttccacaactcagtctgcacctcagttggcaaaggagactggatggccatctttcctcatgttcccttgagtatttcaatgtagaaagcccttcaagtggtattatattttaaccttttacattattgttattaatgttagtaatatattgttatgttttctaaattatttttctttaagctgacgtggctttttttctgtggctcccagtgggtctacggaccttggctgacatatgttggtaggtactctggtcagctcagctggctgtcctggttcactcagaagataagtctctccaaagcaaattcacatgcattatgagtcgctttgagcttctgacatgtcacttgccccgaggttaaaacttttcaccccttgaagaccttacatgttttatggtattggtgaggaaggaaatgttctcaaggtctcaggctatttgggaaattccaactcctataccttaccagagcatggaagagcccagatctgaatgtaaaacgtctctgttctgccagagatggaaaaaatacaggtatacttgtgatatagtcatggggcttcagtgtcactattttctccttaaagctccagccaaaaactggacaaggatagagaggaggagggaagaacaaaagagcccttctctatgaaccttgtgccttctgtcctaccagttttcttttacagattctcacttctgctagcctagccagggcttactccaggaatctaaatagatgccctagtccactttatctttgttcccaaggcactcatttttattttgattttgattgaatgtgagcaggttgacctcaggtcacactttgttccaaaaacttttggaattattccaggacttgtggtggagttatggtactctagggcagtctttctcaaactatgtatggtaaaggaccaggttttttgttttccagtccttcacttatcaatatgcattcctattgcccatgacaggtatggagttcacactgtgtgctgccgacccggcaagtttgacagcacccaaactggccagactgttctgtaggttaagtccattgatcatgtacttggatatcacagcaacattgaaatgctaaaaagtttttaaacactctcaatttctaattcaccatgtcacagactggtgaaaaaaaaaaaaaggtgttcactgaccagcacaagtctgcagatcatctttgagtagcactgttttggggccctcggtctctctgaagaccctagcagaactgatacctacctgtatctcttgttctctcctatttgagtttcacttccagagaacttgttcttcagcaagaatgtgtcactagtaaggacatctctagcatttctctagccttccttttctgctgctcaaaaataatcgttacaaagcttaggtttaagctgtatatgaaatatttatgcgactctcaaactttaaaggagttgctcctttgttccaaaattaaatgtgttagataaatttgtgattgtatgggtggcttcatgaattaagaattgaattaatacagactttttgataattggg

SEQ ID NO: 346757 - DNA, 1287 bp, Homo sapiens
cggcaccgttactcctcatctttaagcctccagaaacactatttcaaatgggataaccagtgcatgaagggagatagtaaggcagaagagaggagaacaatatacagagtaggctataatgtcaaagtcagaggttgtctgccaatgttatccacaaaaacttctcaaagctcacaagtaatatgtccaatgctgtccatctgacccatcttgatctgaatgtaaaacgtctctgttctgccagagatggaaaaaatacaggtatacttgtgatatagtcatggggcttcagtgtcactattttctccttaaagctccagccaaaaactggacaaggatagagaggaggagggaagaacaaaagagcccttctctatgaaccttgtgccttctgtcctaccagttttcttttacagattctcacttctgctagcctagccagggcttactccaggaatctaaatagatgccctagtccactttatctttgttcccaaggcactcatttttattttgattttgattgaatgtgagcaggttgacctcaggtcacactttgttccaaaaacttttggaattattccaggacttgtggtggagttatggtactctagggcagtctttctcaaactatgtatggtaaaggaccaggttttttgttttccagtccttcacttatcaatatgcattcctattgcccatgacaggtatggagttcacactgtgtgctgccgacccggcaagtttgacagcacccaaactggccagactgttctgtaggttaagtccattgatcatgtacttggatatcacagcaacattgaaatgctaaaaagtttttaaacactctcaatttctaattcaccatgtcacagactggtgaaaaaaaaaaaaaggtgttcactgaccagcacaagtctgcagatcatctttgagtagcactgttttggggccctcggtctctctgaagaccctagcagaactgatacctacctgtatctcttgttctctcctatttgagtttcacttccagagaacttgttcttcagcaagaatgtgtcactagtaaggacatctctagcatttctctagccttccttttctgctgctcaaaaataatcgttacaaagcttaggtttaagctgtatatgaaatatttatgcgactctcaaactttaaaggagttgctcctttgttccaaaattaaatgtgttagataaatttgtgattgtatgggtggcttcatgaattaagaattgaattaatacagactttttgataattggg

SEQ ID NO: 346758 - DNA, 384 bp, Homo sapiens
  misc_feature (364)..(364): n is a, c, g, or t
agctgccgctcgcgatctagaacagcaagatggccgccgctgaggaaggctgtagtgtcggggccgaagcggacagggaattggaggagcttctggaaagtgctcttgatgatttcgataaagccaaaccctccccagcacccccttctaccaccacggcccctgatgcttcggggccccagaagagatcgccaggagacactgccaaagatgccctcttcgcttcccaagagaagtttttccaggaactattcgacagtgaactggcttcccaagccactgcggagttcgagaaggcaatgaaggagttggctgaggaagaaccccacctggtggagcagttccaattcacttcttgcctaanggcactccggattacgccct

SEQ ID NO: 346759 - DNA, 3882 bp, Homo sapiens
agctgccgctcgcgatctagaacagcaagatggccgccgctgaggaaggctgtagtgtcggggccgaagcggacagggaattggaggagcttctggaaagtgctcttgatgatttcgataaagccaaaccctccccagcacccccttctaccaccacggcccctgatgcttcggggccccagaagagatcgccaggagacactgccaaagatgccctcttcgcttcccaagagaagtttttccaggaactattcgacagtgaactggcttcccaagccactgcggagttcgagaaggcaatgaaggagttggctgaggaagaaccccacctggtggagcagttccaaaagctctcagaggctgcagggagagtgggcagtgatatgacctcccaacaagaattcacttcttgcctaaaggaaacactaagtggattagccaaaaatgccactgaccttcagaactccagcatgtcggaagaagagctgaccaaggccatggaggggctaggcatggacgaaggggatggggaagggaacatcctccccatcatgcagagtattatgcagaacctactctccaaggatgtgctgtacccatcactgaaggagatcacagaaaagtatccagaatggttgcagagtcatcgggaatctctacctccagagcagtttgaaaaatatcaggagcagcacagcgtcatgtgcaaaatatgtgagcagtttgaggcagagacccccacagacagtgaaaccactcaaaaggctcgttttgagatggtgctggatcttatgcagcagctacaagatttaggccatcctccaaaagagctggctggagagatgcctcctggcctcaactttgacctggatgccctcaatctttcgggcccaccaggtgccagtggtgaacagtgtctgatcatgtgaaacacaacacgttttcctctctgagtcccagctatggggaacatctggagtcagcagaaccattgggacctgaggcaggagtgtcacctgcgggagaagtctgcccgctgccctctgtcatcccattcaagattgtgccataccagctgaggtttttcctctgtctctctaggaatagggtctgtttcacaggccatttctgtgaaccctactccattgtggtttctgccactatcaaagttccagctacctgcaaggtgaaggaaggcatcccttttggggcatgcactttctttcctttctcaaaataatgttatatgtggccacactgatgttcacctttacgtccagggtctttgtgccttgtctctactccctctcttggatctggggaggaggggcagagacctgggactctgtatttctatagttctcctggcagagcctttgagaatggggagaaacagcctgggctggggctacaggtctgtcactatgctctcttgccttcagacagaccattctgaattctctaaagggaaagggcttttgcatctaatcacaatagagttgaaagagaggccttaggattctcctctctctaggtgctgagccctcacctccctgttccaggctgagaactcaaatggttaccctgcttcttcctacaatgctgtgtgatatgggtgaacccagcccctgaccttcctctatcccctgcccatcctcccttttacctcctctcttttttaaacacctgtttatcccaacctttttgagctcaagctgtgataaagaagggcccatcctatttcccctcatctagtccatttacgattctcactgactccccgtcttcctggcagacacaaataaacccagtgtcaggtctaggaaattaatggctattcttccccagatacattctggcttatttgagatacatgattctcttagaatcctgtcccttggttcaggaaagtagcttggaaaaggagtaggggtatagcttgggtcccttttcctgcaaggccccatggggcagaatataataaatattctgagtgaggagtgtggtctttttctgatcttcctcagcttccgtaagttgcagagtgaggtatattaggagactagttctacacaatattgtaatgctgggttccatcaacacccaccttccacaactcagtctgcacctcagttggcaaaggagactggatggccatctttcctcatgttcccttgagtatttcaatgtagaaagcccttcaagtggtattatattttaaccttttacattattgttattaatgttagtaatatattgttatgttttctaaattatttttctttaagctgacgtggctttttttctgtggctcccagtgggtctacggaccttggctgacatatgttggtaggtactctggtcagctcagctggctgtcctggttcactcagaagataagtctctccaaagcaaattcacatgcattatgagtcgctttgagcttctgacatgtcacttgccccgaggttaaaacttttcaccccttgaagaccttacatgttttatggtattggtgaggaaggaaatgttctcaaggtctcaggctatttgggaaattccaactcctataccttaccagagcatggaagagcccagatctgaatgtaaaacgtctctgttctgccagagatggaaaaaatacaggtatacttgtgatatagtcatggggcttcagtgtcactattttctccttaaagctccagccaaaaactggacaaggatagagaggaggagggaagaacaaaagagcccttctctatgaaccttgtgccttctgtcctaccagttttcttttacagattctcacttctgctagcctagccagggcttactccaggaatctaaatagatgccctagtccactttatctttgttcccaaggcactcatttttattttgattttgattgaatgtgagcaggttgacctcaggtcacactttgttccaaaaacttttggaattattccaggacttgtggtggagttatggtactctagggcagtctttctcaaactatgtatggtaaaggaccaggttttttgttttccagtccttcacttatcaatatgcattcctattgcccatgacaggtatggagttcacactgtgtgctgccgacccggcaagtttgacagcacccaaactggccagactgttctgtaggttaagtccattgatcatgtacttggatatcacagcaacattgaaatgctaaaaagtttttaaacactctcaatttctaattcaccatgtcacagactggtgaaaaaaaaaaaaaggtgttcactgaccagcacaagtctgcagatcatctttgagtagcactgttttggggccctcggtctctctgaagaccctagcagaactgatacctacctgtatctcttgttctctcctatttgagtttcacttccagagaacttgttcttcagcaagaatgtgtcactagtaaggacatctctagcatttctctagccttccttttctgctgctcaaaaataatcgttacaaagcttaggtttaagctgtatatgaaatatttatgcgactctcaaactttaaaggagttgctcctttgttccaaaattaaatgtgttagataaaaactcgtgccgaattcggcacgagccacctcaggctgtgagaccttttacctcctaaccctgttctccagaccgttgtagaaaataaaatagcatgtctaattcatatccacgtaggagcacaggtaagtggcttttacttggttgtaataaactactactgtgcagaaaattgtgtatagaaactacataatgaagttacataattactcatttgtatttagattatatcaaccactgtgaaaattatagcttaatttttactaaaagtctcaga

SEQ ID NO: 346760 - DNA, 3646 bp, Homo sapiens
acccacgcgtcgcccacgcgtcgctgtagtgtcggggccgaagcggacagggaattggaggagcttctggaaagtgctcttgatgatttcgataaagccaaaccctccccagcacccccttctaccaccacggcccctgatgcttcggggccccagaagagatcgccaggagacactgccaaagatgccctcttcgcttcccaagagaagtttttccaggaactattcgacagtgaactggcttcccaagccactgcggagttcgagaaggcaatgaaggagttggctgaggaagaaccccacctggtggagcagttccaaaagctctcagaggctgcagggagagtgggcagtgatatgacctcccaacaagaattcacttcttgcctaaaggaaacactaagtggattagccaaaaatgccactgaccttcagaactccagcatgtcggaagaagagctgaccaaggccatggaggggctaggcatggacgaaggggatggggaagggaacatcctccccatcatgcagagtattatgcagaacctactctccaaggatgtgctgtacccatcactgaaggagatcacagaaaagtatccagaatggttgcagagtcatcgggaatctctacctccagagcagtttgaaaaatatcaggagcagcacagcgtcatgtgcaaaatatgtgagcagtttgaggcagagacccccacagacagtgaaaccactcaaaaggctcgttttgagatggtgctggatcttatgcagcagctacaagatttaggccatcctccaaaagagctggctggagagatgcctcctggcctcaactttgacctggatgccctcaatctttcgggcccaccaggtgccagtggtgaacagtgtctgatcatgtgaaacacaacacgttttcctctctgagtcccagctatggggaacatctggagtcagcagaaccattgggacctgaggcaggagtgtcacctgcgggagaagtctgcccgctgccctctgtcatcccattcaagattgtgccataccagctgaggtttttcctctgtctctctaggaatagggtctgtttcacaggccatttctgtgaaccctactccattgtggtttctgccactatcaaagttccagctacctgcaaggtgaaggaaggcatcccttttggggcatgcactttctttcctttctcaaaataatgttatatgtggccacactgatgttcacctttacgtccagggtctttgtgccttgtctctactccctctcttggatctggggaggaggggcagagacctgggactctgtatttctatagttctcctggcagagcctttgagaatggggagaaacagcctgggctggggctacaggtctgtcactatgctctcttgccttcagacagaccattctgaattctctaaagggaaagggcttttgcatctaatcacaatagagttgaaagagaggccttaggattctcctctctctaggtgctgagccctcacctccctgttccaggctgagaactcaaatggttaccctgcttcttcctacaatgctgtgtgatatgggtgaacccagcccctgaccttcctctatcccctgcccatcctcccttttacctcctctcttttttaaacacctgtttatcccaacctttttgagctcaagctgtgataaagaagggcccatcctatttcccctcatctagtccatttacgattctcactgactccccgtcttcctggcagacacaaataaacccagtgtcaggtctaggaaattaatggctattcttccccagatacattctggcttatttgagatacatgattctcttagaatcctgtcccttggttcaggaaagtagcttggaaaaggagtaggggtatagcttgggtcccttttcctgcaaggccccatggggcagaatataataaatattctgagtgaggagtgtggtctttttctgatcttcctcagcttccgtaagttgcagagtgaggtatattaggagactagttctacacaatattgtaatgctgggttccatcaacacccaccttccacaactcagtctgcacctcagttggcaaaggagactggatggccatctttcctcatgttcccttgagtatttcaatgtagaaagcccttcaagtggtattatattttaaccttttacattattgttattaatgttagtaatatattgttatgttttctaaattatttttctttaagctgacgtggctttttttctgtggctcccagtgggtctacggaccttggctgacatatgttggtaggtactctggtcagctcagctggctgtcctggttcactcagaagataagtctctccaaagcaaattcacatgcattatgagtcgctttgagcttctgacatgtcacttgccccgaggttaaaacttttcaccccttgaagaccttacatgttttatggtattggtgaggaaggaaatgttctcaaggtctcaggctatttgggaaattccaactcctataccttaccagagcatggaagagcccagatctgaatgtaaaacgtctctgttctgccagagatggaaaaaatacaggtatacttgtgatatagtcatggggcttcagtgtcactattttctccttaaagctccagccaaaaactggacaaggatagagaggaggagggaagaacaaaagagcccttctctatgaaccttgtgccttctgtcctaccagttttcttttacagattctcacttctgctagcctagccagggcttactccaggaatctaaatagatgccctagtccactttatctttgttcccaaggcactcatttttattttgattttgattgaatgtgagcaggttgacctcaggtcacactttgttccaaaaacttttggaattattccaggacttgtggtggagttatggtactctagggcagtctttctcaaactatgtatggtaaaggaccaggttttttgttttccagtccttcacttatcaatatgcattcctattgcccatgacaggtatggagttcacactgtgtgctgccgacccggcaagtttgacagcacccaaactggccagactgttctgtaggttaagtccattgatcatgtacttggatatcacagcaacattgaaatgctaaaaagtttttaaacactctcaatttctaattcaccatgtcacagactggtgaaaaaaaaaaaaaggtgttcactgaccagcacaagtctgcagatcatctttgagtagcactgttttggggccctcggtctctctgaagaccctagcagaactgatacctacctgtatctcttgttctctcctatttgagtttcacttccagagaacttgttcttcagcaagaatgtgtcactagtaaggacatctctagcatttctctagccttccttttctgctgctcaaaaataatcgttacaaagcttaggtttaagctgtatatgaaatatttatgcgactctcaaactttaaaggagttgctcctttgttccaaaattaaatgtgttagataaatttgtgattgtatgggtggcttcatgaattaagaattgaattaatacagactttttgataattggg

SEQ ID NO: 346761 - DNA, 3674 bp, Homo sapiens
ttatctgcagagatcaggccaaagggagctctagaaggttgttggggagcactaaactggagaataagagaagatagtttaatgccgtaccatggagtctggtgctcttgatgatttcgataaagccaaaccctccccagcacccccttctaccaccacggcccctgatgcttcggggccccagaagagatcgccaggagacactgccaaagatgccctcttcgcttcccaagagaagtttttccaggaactattcgacagtgaactggcttcccaagccactgcggagttcgagaaggcaatgaaggagttggctgaggaagaaccccacctggtggagcagttccaaaagctctcagaggctgcagggagagtgggcagtgatatgacctcccaacaagaattcacttcttgcctaaaggaaacactaagtggattagccaaaaatgccactgaccttcagaactccagcatgtcggaagaagagctgaccaaggccatggaggggctaggcatggacgaaggggatggggaagggaacatcctccccatcatgcagagtattatgcagaacctactctccaaggatgtgctgtacccatcactgaaggagatcacagaaaagtatccagaatggttgcagagtcatcgggaatctctacctccagagcagtttgaaaaatatcaggagcagcacagcgtcatgtgcaaaatatgtgagcagtttgaggcagagacccccacagacagtgaaaccactcaaaaggctcgttttgagatggtgctggatcttatgcagcagctacaagatttaggccatcctccaaaagagctggctggagagatgcctcctggcctcaactttgacctggatgccctcaatctttcgggcccaccaggtgccagtggtgaacagtgtctgatcatgtgaaacacaacacgttttcctctctgagtcccagctatggggaacatctggagtcagcagaaccattgggacctgaggcaggagtgtcacctgcgggagaagtctgcccgctgccctctgtcatcccattcaagattgtgccataccagctgaggtttttcctctgtctctctaggaatagggtctgtttcacaggccatttctgtgaaccctactccattgtggtttctgccactatcaaagttccagctacctgcaaggtgaaggaaggcatcccttttggggcatgcactttctttcctttctcaaaataatgttatatgtggccacactgatgttcacctttacgtccagggtctttgtgccttgtctctactccctctcttggatctggggaggaggggcagagacctgggactctgtatttctatagttctcctggcagagcctttgagaatggggagaaacagcctgggctggggctacaggtctgtcactatgctctcttgccttcagacagaccattctgaattctctaaagggaaagggcttttgcatctaatcacaatagagttgaaagagaggccttaggattctcctctctctaggtgctgagccctcacctccctgttccaggctgagaactcaaatggttaccctgcttcttcctacaatgctgtgtgatatgggtgaacccagcccctgaccttcctctatcccctgcccatcctcccttttacctcctctcttttttaaacacctgtttatcccaacctttttgagctcaagctgtgataaagaagggcccatcctatttcccctcatctagtccatttacgattctcactgactccccgtcttcctggcagacacaaataaacccagtgtcaggtctaggaaattaatggctattcttccccagatacattctggcttatttgagatacatgattctcttagaatcctgtcccttggttcaggaaagtagcttggaaaaggagtaggggtatagcttgggtcccttttcctgcaaggccccatggggcagaatataataaatattctgagtgaggagtgtggtctttttctgatcttcctcagcttccgtaagttgcagagtgaggtatattaggagactagttctacacaatattgtaatgctgggttccatcaacacccaccttccacaactcagtctgcacctcagttggcaaaggagactggatggccatctttcctcatgttcccttgagtatttcaatgtagaaagcccttcaagtggtattatattttaaccttttacattattgttattaatgttagtaatatattgttatgttttctaaattatttttctttaagctgacgtggctttttttctgtggctcccagtgggtctacggaccttggctgacatatgttggtaggtactctggtcagctcagctggctgtcctggttcactcagaagataagtctctccaaagcaaattcacatgcattatgagtcgctttgagcttctgacatgtcacttgccccgaggttaaaacttttcaccccttgaagaccttacatgttttatggtattggtgaggaaggaaatgttctcaaggtctcaggctatttgggaaattccaactcctataccttaccagagcatggaagagcccagatctgaatgtaaaacgtctctgttctgccagagatggaaaaaatacaggtatacttgtgatatagtcatggggcttcagtgtcactattttctccttaaagctccagccaaaaactggacaaggatagagaggaggagggaagaacaaaagagcccttctctatgaaccttgtgccttctgtcctaccagttttcttttacagattctcacttctgctagcctagccagggcttactccaggaatctaaatagatgccctagtccactttatctttgttcccaaggcactcatttttattttgattttgattgaatgtgagcaggttgacctcaggtcacactttgttccaaaaacttttggaattattccaggacttgtggtggagttatggtactctagggcagtctttctcaaactatgtatggtaaaggaccaggttttttgttttccagtccttcacttatcaatatgcattcctattgcccatgacaggtatggagttcacactgtgtgctgccgacccggcaagtttgacagcacccaaactggccagactgttctgtaggttaagtccattgatcatgtacttggatatcacagcaacattgaaatgctaaaaagtttttaaacactctcaatttctaattcaccatgtcacagactggtgaaaaaaaaaaaaaggtgttcactgaccagcacaagtctgcagatcatctttgagtagcactgttttggggccctcggtctctctgaagaccctagcagaactgatacctacctgtatctcttgttctctcctatttgagtttcacttccagagaacttgttcttcagcaagaatgtgtcactagtaaggacatctctagcatttctctagccttccttttctgctgctcaaaaataatcgttacaaagcttaggtttaagctgtatatgaaatatttatgcgactctcaaactttaaaggagttgctcctttgttccaaaattaaatgtgttagataaatttgtgattgtatgggtggcttcatgaattaagaattgaattaatacagactttttgataattggg

SEQ ID NO: 346762 - DNA, 1439 bp, Homo sapiens
agctgccgctcgcgatctagaacagcaagatggccgccgctgaggaaggctgtagtgtcggggccgaagcggacagggaattggaggagcttctggaaagtgctcttgatgatttcgataaagccaaaccctccccagcacccccttctaccaccacggcccctgatgcttcggggccccagaagagatcgccaggagacactgccaaagatgccctcttcgcttcccaagagaagtttttccaggaactattcgacagtgaactggcttcccaagccactgcggagttcgagaaggcaatgaaggagttggctgaggaagaaccccacctggtggagcagttccaaaagctctcagaggctgcagggagagtgggcagtgatatgacctcccaacaagaattcacttcttgcctaaaggaaacactaagtggattagccaaaaatgccactgaccttcagaactccagcatgtcggaagaagagctgaccaaggccatggaggggctaggcatggacgaaggggatggggaagggaacatcctccccatcatgcagagtattatgcagaacctactctccaaggatgtgctgtacccatcactgaaggagatcacagaaaagtatccagaatggttgcagagtcatcgggaatctctacctccagagcagtttgaaaaatatcaggagcagcacagcgtcatgtgcaaaatatgtgagcagtttgaggcagagacccccacagacagtgaaaccactcaaaaggctcgttttgagatggtgctggatcttatgcagcagctacaagatttaggccatcctccaaaagagctggctggagagatgcctcctggcctcaactttgacctggatgccctcaatctttcgggcccaccaggtgccagtggtgaacagtgtctgatcatgtgaaacacaacacgttttcctctctgagtcccagctatggggaacatctggagtcagcagaaccattgggacctgaggcaggagtgtcacctgcgggagaagtctgcccgctgccctctgtcatcccattcaagattgtgccataccagctgaggtttttcctctgtctctctaggaatagggtctgtttcacaggccatttctgtgaaccctactccattgtggtttctgccactatcaaagttccagctacctgcaaggtgaaggaaggcatcccttttggggcatgcactttctttcctttctcaaaataatgttatatgtggccacactgatgttcacctttacgtccagggtctttgtgccttgtctctactccctctcttggatctggggaggaggggcagagacctgggactctgtatttctattgtgattagatgcaaaagccctttccctttagagaattcagaatggtctgtctgaaggcaagagagcatagtgacaggtcga

SEQ ID NO: 346763 - DNA, 1549 bp, Homo sapiens
agctgccgctcgcgatctagaacagcaagatggccgccgctgaggaaggctgtagtgtcggggccgaagcggacagggaattggaggagcttctggaaagtgctcttgatgatttcgataaagccaaaccctccccagcacccccttctaccaccacggcccctgatgcttcggggccccagaagagatcgccaggagacactgccaaagatgccctcttcgcttcccaagagaagtttttccaggaactattcgacagtgaactggcttcccaagccactgcggagttcgagaaggcaatgaaggagttggctgaggaagaaccccacctggtggagcagttccaaaagctctcagaggctgcagggagagtgggcagtgatatgacctcccaacaagaattcacttcttgcctaaaggaaacactaagtggattagccaaaaatgccactgaccttcagaactccagcatgtcggaagaagagctgaccaaggccatggaggggctaggcatggacgaaggggatggggaagggaacatcctccccatcatgcagagtattatgcagaacctactctccaaggatgtgctgtacccatcactgaaggagatcacagaaaagtatccagaatggttgcagagtcatcgggaatctctacctccagagcagtttgaaaaatatcaggagcagcacagcgtcatgtgcaaaatatgtgagcagtttgaggcagagacccccacagacagtgaaaccactcaaaaggctcgttttgagatggtgctggatcttatgcagcagctacaagatttaggccatcctccaaaagagctggctggagagatgcctcctggcctcaactttgacctggatgccctcaatctttcgggcccaccaggtgccagtggtgaacagtgtctgatcatgtgaaacacaacacgttttcctctctgagtcccagctatggggaacatctggagtcagcagaaccattgggacctgaggcaggagtgtcacctgcgggagaagtctgcccgctgccctctgtcatcccattcaagattgtgccataccagctgaggtttttcctctgtctctctaggaatagggtctgtttcacaggccatttctgtgaaccctactccattgtggtttctgccactatcaaagttccacccctgaccttcctctatcccctgcccatcctcccttttacctcctctcttttttaaacacctgtttatcccaacctttttgagctcaagctgtgataaagaagggcccatcctatttcccctcatctagtccatttacgattctcactgactccccgtcttcctggcagacacaaataaacccagtgtcaggtctaggaaattaatggctattcttccccagatacattctggcttatttgagatacatgattctcttagaatcctgtcccttggttcaggaaagtagcttggaaaaggagtaggggtatagcttgggtcccttttcctgcaaggccccatggggcagaatataataaatattctgagtgagga

SEQ ID NO: 346764 - DNA, 277 bp, Homo sapiens
aattgaagtagtaaccctttcttgggtgttcaatgatattgtgcttctcttcatgtaagtgccccttagattcctcctcctcactaccatcaggtcatagaatagggaggggcactcagtttcaacagcagtggcctccaaattttgttcaaatgcataactataaaaagttttttgtatacattctctatatatagctatacattttatacatacactactatcagtcttgatttagacattactaaagcttaatttttctctcattttttttcag

SEQ ID NO: 346765 - DNA, 1979 bp, Homo sapiens
cccccagcctgggcgcgtccatcgtcgagtaccttctcctctgcctccccctccctctgcttctatctctctccaattgccctccctggcctgcggccgcccggtcctccttcccagcccagtgcagccaggcacccgggttcggcttgctcaggtctctgtccgggactgggaagccacggagggccgggaaagtggcacactcctggagctcaagcttcctactctctcatcgctgaataactaccgggcaggactgggtggaacagacagcatatttaggtcattgatgggctgctgggtggatggagctggaaagtgatgggcactgctttctggggctgcccaggttccttccgagggctcgcttttcctgggcagagcgggaaagaggaggggcaggccggtcgcgaaacgcaaatagtcgagaatagcgatccggggagaagcaggtgtctgtggggcccaagagaagtaccatctcgttaaaaattcagattgaactatcttacaaatggctcccagaagatccactccctgtgggaacacagcagttgtggaagtgaagacaggactggacccagaataagggttcaaatatgtggggaaatctgacctctaaattcttataagtcagagagtgactgaacaacagcagtgagacatcgaagagttttaatatctgctgtaaaccttggcacagatcatttacttctctaagactgaatccaaaaagcacaatggaatactataataagctgagacagcatggtgaattccagacaagcctgagcattccctatagccagagaaggaggcccaacacctaacatagccttggatgcagaactgatagaacttggggaaagtgatgaagtagttgacctcacctgtgaatctctagcacctgtagtgattgacctaactcaccgtgactctgtagtgattattgaacaaaggaggaggccaagagcaaacacaaggccactccaagaccacactggcagttgtgtggtgaacaatgatgaggagggagtgaaaagggacagagatgtatgtataaccaacagtgcccaccataattccctgcaaaaaaattttttttgtcatatactacctggttatattcagtgtcaagtttgcatggatggatgctcagagattgaacttagtatacaacacatctactctatagaatgtggccacatctgtagtcagtgcttctgcacttcctttacacatactaacactgcccagtttgtttgaaaaaaatcagcctccatcagtatcactgcagttatatatgatgtatgccttattgctcaagacagatcctgtggctggatttttccatgtctttgtgcaggaactatgggttgttggcatccaatgctctgagcttaaaaatactgatttttaaaattgctatctgcagtatataagaaactctttgatttctcatatgctctgagactgctttttgtttcctttggttttatgcttcagctctggacttcagttgccagagtgtgccagatactggggtcgtccttaaagcaactttccctttcttatagtcatcaatttttagttggccacatgtagacattctggaccacataaataaagacaacaccctagagatggtgaagtaagttgtaaactaaaatcctaagccccctaattgactgaatggaacccctcttgaccaaagtgaccccagaaaaaccttaaaactgagttcctggccatgacgggatgggaggtcagacacgcttcattatatctccgtctcttttatggtttagacacagcaactgaccagcattaatgtcaaaataaagatcataaggctgacagaatagaccctttgtggcaataacaaattattcgtaagatctaaggtcatgccaggcaagtgttatgtcatgcactcctacacttaaagaataaactatgttctaactgccaaaaaaatt

SEQ ID NO: 346766 - DNA, 1963 bp, Homo sapiens
cccccagcctgggcgcgtccatcgtcgagtaccttctcctctgcctccccctccctctgcttctatctctctccaattgccctccctggcctgcggccgcccggtcctccttcccagcccagtgcagccaggcacccgggttcggcttgctcaggtctctgtccgggactgggaagccacggagggccgggaaagtggcacactcctggagctcaagcttcctactctctcatcgctgaataactaccgggcaggactgggtggaacagacagcatatttaggtcattgatgggctgctgggtggatggagctggaaagtgatgggcactgctttctggggctgcccaggttccttccgagggctcgcttttcctgggcagagcgggaaagaggaggggcaggccggtcgcgaaacgcaaatagtcgagaatagcgatccggggagaagcaggtgtctgtggggcccaagagaagtaccatctcgttaaaaattcagattgaactatcttacaaatggctcccagaagatccactccctgtgggaacacagcagttgtggaagtgaagacaggactggacccagaataagggttcaaatatgtggggaaatctgacctctaaattcttataagtcagagagtgactgaacaacagcagtgagacatcgaagagttttaatatctgctgtaaaccttggcacagatcatttacttctctaagactgaatccaaaaagcacaatggaatactataataagctgagacagcatggtgaattccagacaagcctgagcattccctatagccagagaaggaggcccaacacctaacatagccttggatgcagaactgatagaacttggggaaagtgatgaagtagttgacctcacctgtgaatctctagcacctgtagtgattgacctaactcaccgtgactctgtagtgattattgaacaaaggaggaggccaagagcaaacacaaggccactccaagaccacactggcagttgtgtggtgaacaatgatgaggagggagtgaaaagggacagagatgtatgtataaccaacagtgcccaccataattccctgcaaaaaaattttttttgtcatatactacctggttatattcagtgtcaagtttgcatggatggatgctcagagattgaacttagtatacaacacatctactctatagaatgtggccacatctgtagtcagtgcttctgcacttcctttacacatactaacactgcccagtttgtttgaaaaaaatcagcctccatcagtatcatgtatgccttattgctcaagacagatcctgtggctggatttttccatgtctttgtgcaggaactatgggttgttggcatccaatgctctgagcttaaaaatactgatttttaaaattgctatctgcagtatataagaaactctttgatttctcatatgctctgagactgctttttgtttcctttggttttatgcttcagctctggacttcagttgccagagtgtgccagatactggggtcgtccttaaagcaactttccctttcttatagtcatcaatttttagttggccacatgtagacattctggaccacataaataaagacaacaccctagagatggtgaagtaagttgtaaactaaaatcctaagccccctaattgactgaatggaacccctcttgaccaaagtgaccccagaaaaaccttaaaactgagttcctggccatgacgggatgggaggtcagacacgcttcattatatctccgtctcttttatggtttagacacagcaactgaccagcattaatgtcaaaataaagatcataaggctgacagaatagaccctttgtggcaataacaaattattcgtaagatctaaggtcatgccaggcaagtgttatgtcatgcactcctacacttaaagaataaactatgttctaactgccaaaaaaatt

SEQ ID NO: 346767 - DNA, 1926 bp, Homo sapiens
cccccagcctgggcgcgtccatcgtcgagtaccttctcctctgcctccccctccctctgcttctatctctctccaattgccctccctggcctgcggccgcccggtcctccttcccagcccagtgcagccaggcacccgggttcggcttgctcaggtctctgtccgggactgggaagccacggagggccgggaaagtggcacactcctggagctcaagcttcctactctctcatcgctgaataactaccgggcaggactgggtggaacagacagcatatttaggtcattgatgggctgctgggtggatggagctggaaagtgatgggcactgctttctggggctgcccaggttccttccgagggctcgcttttcctgggcagagcgggaaagaggaggggcaggccggtcgcgaaacgcaaatagtcgagaatagcgatccggggagaagcaggtgtctgtggggcccaagagaagtaccatctcgtgtgggaacacagcagttgtggaagtgaagacaggactggacccagaataagggttcaaatatgtggggaaatctgacctctaaattcttataagtcagagagtgactgaacaacagcagtgagacatcgaagagttttaatatctgctgtaaaccttggcacagatcatttacttctctaagactgaatccaaaaagcacaatggaatactataataagctgagacagcatggtgaattccagacaagcctgagcattccctatagccagagaaggaggcccaacacctaacatagccttggatgcagaactgatagaacttggggaaagtgatgaagtagttgacctcacctgtgaatctctagcacctgtagtgattgacctaactcaccgtgactctgtagtgattattgaacaaaggaggaggccaagagcaaacacaaggccactccaagaccacactggcagttgtgtggtgaacaatgatgaggagggagtgaaaagggacagagatgtatgtataaccaacagtgcccaccataattccctgcaaaaaaattttttttgtcatatactacctggttatattcagtgtcaagtttgcatggatggatgctcagagattgaacttagtatacaacacatctactctatagaatgtggccacatctgtagtcagtgcttctgcacttcctttacacatactaacactgcccagtttgtttgaaaaaaatcagcctccatcagtatcactgcagttatatatgatgtatgccttattgctcaagacagatcctgtggctggatttttccatgtctttgtgcaggaactatgggttgttggcatccaatgctctgagcttaaaaatactgatttttaaaattgctatctgcagtatataagaaactctttgatttctcatatgctctgagactgctttttgtttcctttggttttatgcttcagctctggacttcagttgccagagtgtgccagatactggggtcgtccttaaagcaactttccctttcttatagtcatcaatttttagttggccacatgtagacattctggaccacataaataaagacaacaccctagagatggtgaagtaagttgtaaactaaaatcctaagccccctaattgactgaatggaacccctcttgaccaaagtgaccccagaaaaaccttaaaactgagttcctggccatgacgggatgggaggtcagacacgcttcattatatctccgtctcttttatggtttagacacagcaactgaccagcattaatgtcaaaataaagatcataaggctgacagaatagaccctttgtggcaataacaaattattcgtaagatctaaggtcatgccaggcaagtgttatgtcatgcactcctacacttaaagaataaactatgttctaactgccaaaaaaatt

SEQ ID NO: 346768 - DNA, 98 bp, Homo sapiens
ggatttgcgttcccaaacagccactaacacaaagtcaaggcaaactgtctgtttctcactgataaaatgagcatcatctttaaggtccttccatcttg

SEQ ID NO: 346769 - DNA, 460 bp, Homo sapiens
ttcccaagagaaatcggtgagtttggtagatttccagttgtactggtgggaaattgagcagaaacactggcactcatgtaatttttgttcttgttctttctattgttgttttctccaagagaaattgttaactttgctatatatcccaccgtattcatgagaaatgtagtgggaaccccactgcattaatgtcccccctttacttgtatcattttgcatatttagtagagctaagatgcttgctgccttcattaggagcttgctgtatgcagtgggaattgcaagcctccaccatctcagtggctcatctcagtaattggttggaaaagtgatttccaacagctcatgctctctggagctatgactttgagcacttcatctcaccacaggcctccttgtcagcctgtgatatgttatggctctcttttgtctgaccgtatgtattctttcattgtctctg

SEQ ID NO: 346770 - DNA, 516 bp, Homo sapiens
atgggctttcctcaaagtgtgacagtggaaccgaatgcatggagtccgaacacggctggaaaatccagacctagacagtcacaatggcttagtgaggaaataccatttaaattgggtattcaaggaaatgatctgacaggcggtgatggagtggggaggtggggatttcagggagaaggaataacaggagcaaatccaaggaggattgaaggacggggcaaggctgttgtgctgattgcctcctggggcgtctgcagatggaaagagtgacagaggagctgctggggagccaggggaagtggcagggcaggaaagcagccctttttctgatatttatgccagcttcagaaagctactgtggggtgaggtcgattcggcacattgcatccctattttcaaagctaacttaagggcaggtgggacaccattcaggagtaaggatcttcaaagcctttctttcctttatgggacttgttagtgtgctctactgggcactgccagcttctcctcaatgtc

SEQ ID NO: 346771 - DNA, 1919 bp, Homo sapiens
ggggagtgcctgtgtggctgagggacacgtccaagctgcagtcggctctgtggttgtggacacctggcagaaccatgccttctctagtctgggtcatccaaacacacgtggggtgcaggggccaggtggagccctcttgtcgtttttgttatctaacggtaattacggagtccagaaagagaattggaaatgccggcagtttaattaaagctgaatggcaggagaggggcatttggaggctccctccctgccttcactccccgtcctgccgcccaggcaggatgtcagatgaggagacgttgagctcatcaaacacccaatgagaagtcttacaacatcagaagctgtctgccaatgcgcctgcgacagcttatagaaactgctgccgcctcgaatcaacctctctccccaggcattgcacgtcagtaggtaaccaggtcattgctgtggtcatggacctcttcactgatggtgatatctttcaagacattgtggatgctgcctgtaagcgccgggtcccagtgtacatcatcctggacgaggcaggagtgaagtatttcctggagatgtgtcaggacctgcagctcactgacttccggattcggaacatccgtgtccgctctgtgacaggcgtcggcttctacatgcccatggggaggatcaaggggaccctgtcatcaaggttcctgatggtggacggtgacaaagtggccactggatcttacaggttcacctggagttcctcccatgtggacagaaacctcctcctgctcctgacaggacagaacgtagagccctttgacacggagttccgggagctgtacgccatctccgaggaggtggacttgtaccggcagctgagcctggcgggcagggttggcctccattactcctccactgtggctcgaaagcttatcaaccccaagtacgccttggtgtcaggctgccgccacccgcctggggagatgatgcgctgggctgcccggcaacagcgggaggcgggcggcaacccggaggggcaggaggagggcgccagcggtggcgagtcggcctggcgcctggagagcttcctgaaagacctggttacggtggagcaggtgctgccccccgtggagcccatccccttgggagagctgagccagaaggatggcaggatggtctctcacatgcacagagacctgaagcccaaatcccgagaggcacccagccgaaacggcatgggagaagcggcccggggggaggccgcccccgccaggcgcttcagcagcaggctcttcagtcgccgagccaagaggcctgcggcgcccaatggcatggccagctctgtctccaccgagacctctgaagtggagtttctgacggggaagaggcccaacgagaattccagtgctgacatctcaggtaaaacaagtcccagttctgccaagcctagcaactgtgtgatttcctgagctgcgggatggtggtgggcaggacgtgtggatgcctgcctgccctgccctgtgctgtggagagcgcaggtcgcacactgcaccagtttgcacatcagacgccaactggccttctgccctgcagcctccgtcctggcctcagggacgctggatcccaaatgagagggtccgaagcatctcagtcacacgcctccaccggactgtcggtggctgggcaggggtcagtgccacggcctccttgtttacatgaagtggaagcttgaccagtgtctgctcgcctttgtgccccaccccctccgctgattgccagatggggtgagggcccattctttaaacctttatggggtggggtgtctggggcagctgcagtggcttctcctttcccaggcttcctggtgcttctgattccccacgccactccccacccaagagattggtggaataaaagggaagagggcagggccctga

SEQ ID NO: 346772 - DNA, 2089 bp, Homo sapiens
aggtgaggcgccccgcccctcggcggctccaggtgcggctgtgggacctcggaccgcggcggggccggggccaggccggggccggggccggggcgccatggccgagtcccagctgaactgcctggacgaggcgcacgtgaacgagaaggtgaccgaggcgcaggccgccttctactactgcgagcggcggcgggccgcgctggaggcgctgctgggcggcggcgagcaggcctaccgcgagcggctcaaggaggagcagctgcgggacttcctctccagcccggagcgccaggccctgcgggccgcctggagcccctacgaggacgccgtccccgccgccaacgcccggggcaagagcaaggccaaggccaaggcccccgcgccggcgccggctgagtccggcgagtccctggcctactggcccgaccgttccgacaccgaggtgcctcctctggacctgggctggacggacactggtttctaccgcggcgtgagccgggtcacgctcttcacccacccgcccaaggacgagaaggcgccgcacctcaagcaggtggtcaggcagatgatccaacaggcccagaaggtcattgctgtggtcatggacctcttcactgatggtgatatctttcaagacattgtggatgctgcctgtaagcgccgggtcccagtgtacatcatcctggacgaggcaggagtgaagtatttcctggagatgtgtcaggacctgcagctcactgacttccggattcggaacatccgtgtccgctctgtgacaggcgtcggcttctacatgcccatggggaggatcaaggggaccctgtcatcaaggttcctgatggtggacggtgacaaagtggccactggatcttacaggttcacctggagttcctcccatgtggacagaaacctcctcctgctcctgacaggacagaacgtagagccctttgacacggagttccgggagctgtacgccatctccgaggaggtggacttgtaccggcagctgagcctggcgggcagggttggcctccattactcctccactgtggctcgaaagcttatcaaccccaagtacgccttggtgtcaggctgccgccacccgcctggggagatgatgcgctgggctgcccggcaacagcgggaggcgggcggcaacccggaggggcaggaggagggcgccagcggtggcgagtcggcctggcgcctggagagcttcctgaaagacctggttacggtggagcaggtgctgccccccgtggagcccatccccttgggagagctgagccagaaggatggcaggatggtctctcacatgcacagagacctgaagcccaaatcccgagaggcacccagccgaaacggcatgggagaagcggcccggggggaggccgcccccgccaggcgcttcagcagcaggctcttcagtcgccgagccaagaggcctgcggcgcccaatggcatggccagctctgtctccaccgagacctctgaagtggagtttctgacggggaagaggcccaacgagaattccagtgctgacatctcaggtaaaacaagtcccagttctgccaagcctagcaactgtgtgatttcctgagctgcgggatggtggtgggcaggacgtgtggatgcctgcctgccctgccctgtgctgtggagagcgcaggtcgcacactgcaccagtttgcacatcagacgccaactggccttctgccctgcagcctccgtcctggcctcagggacgctggatcccaaatgagagggtccgaagcatctcagtcacacgcctccaccggactgtcggtggctgggcaggggtcagtgccacggcctccttgtttacatgaagtggaagcttgaccagtgtctgctcgcctttgtgccccaccccctccgctgattgccagatggggtgagggcccattctttaaacctttatggggtggggtgtctggggcagctgcagtggcttctcctttcccaggcttcctggtgcttctgattccccacgccactccccacccaagagattggtggaataaaagggaagagggcagggccctgagcctgggatcccaagttccag

SEQ ID NO: 346773 - DNA, 628 bp, Homo sapiens
ggaaagtggacaggagatgagacagagactacctctgccccgtcctgcagctcccccctgcctcttccctgaatgggggctcaggcgaacttcaagatctcaacacctttccttttgttgaaagtcaagcctttaaccttggctttactgttaactactgaatcatatgcccagtttcaattttatccctaggctgctgagactgaaggagggagctctgggctggtcctggggtgcttagcctgcagaatcactgatgtcaaagtgagggctgttgttctcttctggggccttttgagaagaggcaggaaccaccctgggcttgtccatgcctgaagcaagatttggggacttcttcctgctcgccaaagagggttccctatggaaggctgtaggaagcagagcgtctagtgaagacaggagcctgcaggcagggtccatacacaagggggctcttcctctgcagaagcaaggacctggcacggaggctggcccaacccaggtgacagggccttctgctcttcccaacagaacatccgtgtccgctctgtgacaggcgtcggcttctacatgcccatggggaggatcaaggggaccctgtcatcaaggttcctgatggtggacggtg

SEQ ID NO: 346774 - DNA, 2486 bp, Homo sapiens
aggtgaggcgccccgcccctcggcggctccaggtgcggctgtgggacctcggaccgcggcggggccggggccaggccggggccggggccggggcgccatggccgagtcccagctgaactgcctggacgaggcgcacgtgaacgagaaggtgaccgaggcgcaggccgccttctactactgcgagcggcggcgggccgcgctggaggcgctgctgggcggcggcgagcaggcctaccgcgagcggctcaaggaggagcagctgcgggacttcctctccagcccggagcgccaggccctgcgggccgcctggagcccctacgaggacgccgtccccgccgccaacgcccggggcaagagcaaggccaaggccaaggcccccgcgccggcgccggctgagtccggcgagtccctggcctactggcccgaccgttccgacaccgaggtgcctcctctggacctgggctggacggacactggtttctaccgcggcgtgagccgggtcacgctcttcacccacccgcccaaggacgagaaggcgccgcacctcaagcaggtggtcaggcagatgatccaacaggcccagaaggtcattgctgtggtcatggacctcttcactgatggtgatatctttcaagacattgtggatgctgcctgtaagcgccgggtcccagtgtacatcatcctggacgaggcaggagtgaagtatttcctggagatgtgtcaggacctgcagctcactgacttccggattcggaacatccgtgtccgctctgtgacaggcgtcggcttctacatgcccatggggaggatcaaggggaccctgtcatcaaggttcctgatggtggacggtgacaaagtggccactggatcttacaggttcacctggagttcctcccatgtggacagaaacctcctcctgctcctgacaggacagaacgtagagccctttgacacggagttccgggagctgtacgccatctccgaggaggtggacttgtaccggcagctgagcctggcgggcagggttggcctccattactcctccactgtggctcgaaagcttatcaaccccaagtacgccttggtgtcaggctgccgccacccgcctggggagatgatgcgctgggctgcccggcaacagcgggaggcgggcggcaacccggaggggcaggaggagggcgccagcggtggcgagtcggcctggcgcctggagagcttcctgaaagacctggttacggtggagcaggtgctgccccccgtggagcccatccccttgggagagctgagccagaaggatggcaggatggtctctcacatgcacagagacctgaagcccaaatcccgagaggcacccagccgaaacggcatgggagaagcggcccggggggaggccgcccccgccaggcgcttcagcagcaggctcttcagtcgccgagccaagaggcctgcggcgcccaatggcatggccagctctgtctccaccgagacctctgaagtggagtttctgacggggaagaggcccaacgagaattccagtgctgacatctcaggtaaaacaagtcccagttctgccaagcctagcaactgtgtgatttcctgagctgcgggatggtggtgggcaggacgtgtggatgcctgcctgccctgccctgtgctgtggagagcgcaggtcgcacactgcaccagtttgcacatcagacgccaactggccttctgccctgcagcctccgtcctggcctcagggacgctggatcccaaatgagagggtccgaagcatctcagtcacacgcctccaccggactgtcggtggctgggcaggggtcagtgccacggcctccttgtttacatgaagtggaagcttgaccagtgtctgctcgcctttgtgccccaccccctccgctgattgccagatggggtgagggcccattctttaaacctttatggggtggggtgtctggggcagctgcagtggcttctcctttcccaggcttcctggtgcttctgattccccacgccactccccacccaagagattggtggaataaaagggaagagggcagggccctgaaaaaaaaaaacaatacaccacaccaccacacagcaacacgacacaaaggaaacaagcacacaccgcatacaccaagacaaaagcaaacaggagcaacagaatccacaacgcgccagacagcagcagagacgcctaccaaacaagccacagacaacaccaaaagaagcgaaacagcagagcgcacaacgacagcagcaccaccacacgacccgcaaacacgcgggagaggcgaaagaggacaccaggcaaggcaagccagacgcacgagacacaacacgccggcgagaacgaagcccagcgacggggccgacacgagacgacacagcgcacaaacggacacaaacaaccacagaggcgcgacaaccacaccagacgaccggagacagagagagacggcagacaaaccaccgcaccgcgg

SEQ ID NO: 346775 - DNA, 514 bp, Homo sapiens
ttatccttttttgtgcctcaaaatagatcctgttcagacatgttacaaattagtacaagtttattttgatataagaaaaaattgaaatccatgtatagtttttccataatatgtattttccatgaactttttgaaattcttcatatttgctgagatgatattgctaaggagttatataatataaaaagttacatgtttgtgtgtttatatatgttgcatatgttatatatattcaaattatcattgtatctgatacaagtaaacatattaatttgaacctaactctattcaagtttgtaactctctaaatactggtaaggatgatttatctttatgttatgtttatatattggttgctaagcaaacgccataaagactttaaaagaacagattacttttaaatgtaaacatccatttatatttgaaaaaagacataagctttaattgacaagctttgtaagcctaattgtgtcattaaaaactcagtagaaataaaggtatcatatgtacttta

SEQ ID NO: 346776 - DNA, 354 bp, Homo sapiens
aaaaaaaaaaaaaaaccggcattattagcactatataaaaagccttacatttatttttattttttcttggagaagagagtatttataaaacagcttgcatattgtcttgataaagtgtttattccttagccttctttcttactttctttgtatagctttgttactttcatatcaaagagtaaattcctcaatgtttggagctaaagaaatagaactcttaataacctgacttagaaatcattacagtgggctgggcacggtggcttacacctgtaatcccagcactttgggaggctgaggcaggtggatcatttgaggtcaggagttggagaccagcttgaccaacatggtgaa

SEQ ID NO: 346777 - DNA, 491 bp, Homo sapiens
cggcattaagaagaaggcagaaagggcaggcttgatagcttatcttaaaaaagctactaatgagtaataattggccactgccttatttattacaaaacaaatgtctcatgactgttttatgtgtaccatactttaatagatctcatacaccagaaatcagatcataaatgacagaatattttgttgggcagttgtgatttaaaactaagactagcttgtggttaaatgttcagtttttgaattttaatagtaattccaattcagaacatggtatcactgtttaccccttctaaaaatatgattagactttgttagtaatgttcaacttctcacaaagatggtgagtgccatcttaaaacttaatagaggccgggcgcagtagctcatgcctgtaatcctagcactttgggaggccgaggcgggtggttcacttgagttcaggagttcgagaccagcctggccaacatggtgaaaccccgtctctactaaaa

SEQ ID NO: 346778 - DNA, 351 bp, Homo sapiens
cctgtcatctacattaggtatttttcctaatgctgtccctcttctagccaccacctccggacaggccccgatgtgtgatgttcccctccccgtgtccatttattctcatggttccactcccacttatgagcgagaacatgtggtgtttggttttctgttattgtgttagtttgcttagaatgatgttttccagcttcatccatgtccctgcaaaggacatgaactatgatgagtaatttttgatagaaacatggtcattggaaggaatttcaagatggccatctttattcagctgcaaagggtcactcccacatacagagactaggatttcagctaaactagcataatttg

SEQ ID NO: 346779 - DNA, 435 bp, Homo sapiens
cttccagtgaatataaagcgggcagaaaaacgtgaaaaaggagacgggcctagcctcccagcttacgtctttctcctgtgctggatgcttcctgctctcgaacatcgcactccaagttcttcagttttgggactcggactggctctccttgctcctcagcttgcagatggcccattgtgggaccttgtgatcatgtaagttaatacttaataaactcttatatatatcttattaattctgtccctctaagagaactctaatacaggcacaatacgattttgaagcatttatttgagtaagaagcaatttggggattgggaaacgccaaattgaaagagatcacatgttgccacgaccagtcttgaaaggcaaatatgtgtaagatatatgcagaagcaaaataaataaattatttgatgggttgcgatgatatta

SEQ ID NO: 346780 - DNA, 1880 bp, Homo sapiens
gatgtgtaaaaaattggagacaatctatttgataggtattttagttttcgattgcagaatatcaaattaccaaaaacttagtgaatcgaaatgacacacatgtattatctcacagtttacctgcatcaggagtccaggctaggttgctgggtgctctgcctagggtctcacaaggcagaaactgaggcgtcatttggggctgaggcttgttggcagaatttgtttttttgcagtggtacgatggaggtttctgggtttttttttctggctattaactgggggctgctttcatccctggaggtcttctactgctccctggcatgggggtcccctctacaacaagcacttgtctttttaaggcaggagaatccctctcccttcaactctccaacgttaagtgcttgcctcattatatcagacctgcccaggaaaatctctcttttcatgaacccaaagtcatctgattagggactttaattgcagctgtaaaatgagtcatgggataatatcccatcatagtcacaagagccactcatgatcaaggagagggattatgcagggtgcatataccaggggtgggaatcttggaggccactcagaattctttctaccaccagggcatgaggcagatacataattatattataatatgagacatcctgacaagcatattttttgagatgaagtctcactctatcgcccaggctggagtgcagtggtgcgatcccggctcactgcagcctccgcctcctgggttcaggcggttctcgtgcctcagcctcctgagtggctgggattacaggcttgcatcaccatgcctggctaatttttgtattttagtggagatgggggtttcaccatgttggccaggctggtctcgagctcctgacctcaggtgatccacccaccttgtgctcccaaagtgctgggattacaggtgtgagccaccacacctggccctgacaagcatcttcaaacaagggaaaactgccttgtgaagccagaaaacagaagtcatttcctgctgtaggggttgggaggcatggcagaggcaatgagtatgatttgagtaggcagaaatagaggcgaggggcagtgaggtagaaacggagtggaagaagcacatcccaagggaggcaaagaaggtatttcgggaaaatggtgaatgcttttggttggctagaacttgctactctgtggtttttaagagacttgtgttttgaacctattgaaatctatagaaaaggtgatggggacactcttgggtatacctgattccatgagcgtcctctgcttttttcatatactggctaatgaagaagaggagaatttggccacatgtctgttgaatgtggtgcgttgaatcctatcaccatagtcacccttcaggaccttgaaaaagtctttcttctccaccatttctgacagagaattccaaacttaggggcttctgtgtcttgtaaaatgcctttctcccttgtagaaaaggtagacaagtctgaaaaaagtgggttcaattctgtaagctacacattaaaccagctggagttggttgtaggtaaaataactcaaaaccatgttgtataagaaatgtgttggctgggcgcggtggctaaggcctgtaatcccagcactttgggaggccaaggtgggcggatcacaaggtcaggagttcaagaccatcctggccaacatggtgaagccccgtctctaataaaaacacaaaaattaattgggtgtggtggcacatggctgtagtcccagctacttgggagactgaggcaggagaatcgcttgaacccgaaaggcggagattgcagtgagccgagattgtgccactgaactccagcctggcaacagagtgagacactctcaaaaaa

SEQ ID NO: 346781 - DNA, 424 bp, Homo sapiens
ggtctcttgttttgtttctctaacgtcaccagtttcattggaacattttggtcatttttcaatggggtgggggagattgatattcaagtaaaggagataaagggggcctaaaatgtaaacttattgagttggccataaaaagagagaagcaaactaataagcttttggaagtgatgctgttctacgtagccaagagtgtgagacatgtttcaggatgtaagaagccagaggaaatgagataagaggattagattggacacttctgtgagtctggaatccctcctaggttggggagtggtggcagttttagcggatagagagaattcacatctctgaaagcagagctgtcttctctaggctctgaatattagaatcaccagggaagctttaaaaaataactagtgaactctggcactcccccaga

SEQ ID NO: 346782 - DNA, 404 bp, Homo sapiens
taggggtgggtcctaagaatctgccctttaaaatctccctaggtggctctattgtgcattcaggattgaggaccactggatagaggctatacaacgtgatccaattcacgtgtcccaggtaacagacctgggtgaagccacgagaccacatccactgtgtctagagcagcattgtccagtagagctgtctgagagggtggaagctgtgtctgtgttgtctaatgtggcagcactcaccacacactgctgttgggcacttaaaatgtggggagtgagactgaggaactgaatttttaatttgatctttattttaagtaatttaaatttaaatagctgcatgtggctagtgactactgtaggcagctctagatccatgtaatttttgtcttattttaccaaaaaaa

SEQ ID NO: 346783 - DNA, 1414 bp, Homo sapiens
tccagccattatttaataagtgcgtcctatgtgtcacttgttattctaaatggtaatatagtaatgaagataaagcccttactttcatgaagagtgcatgtacattctacccttagaactgtaggaacacaggaatgacatttactccagacagtgagttttagagatgtttcatagaggtgctgatatcttaatttagacttaaaggctgaataagaattagccacatttaaaaaaataattttatatcaggaacctcagttattcatagccaacaagcaaataccttgacccagctctgttattaacctttgctcataatttcagcttagctgtacacttctataaggcccaaatcatcagtgaggtcagtagtagtagatcttagtagacttcatatttttttcctgaagcttgtattttcctgatcccatccttccctctacacatatatagagaaatataaatgttagggatatgtatacctaagaggagaaacagaacacttttacaaatctagataatttaatgtctataattaatatatatttataagcagatacatacttaatagtagaaacagtcaatgcatattaaccatatgtaggtctggccttatgtctccatattaaaaattcataaattgttgtactttggcattctgtacttgcttcaatagagtattcatttcttcatttttcaaaactgggttactctttgtcatattttatcttcttgtggcctgggaaaattttgttaaacttgtgtgctaagtgtcagtaaaatacagatatcattaaagtaaatatgcagaatataaatgtaaaagatattttaatgactcaaggaattggcagatttattttttggctgaggttaccagaaatgtgactagctactagggtacttataaataaaactcgatttatttatgtcatggaaagattcttaagtttgtgaaaagaattaccttccatttccttcaaataagaatgtcatattcctgtctatattttagaggtaatcctagaatattagagttggcactaggtctctttaaagcagtgttttaaaactggttgtcacccattattatatcataaaatcaatatagccagtcacgtgcaacattttccttttgttaatgaaatgcaatgtcatagaaaacagcttgtatggttcctagtaagggtaagtatgatttcatggaattcttgtcttaattatattttatatgtttgtgttgtatatgtgtatatatatatatatatatactagattgcaatatcaaatgttatttcttacaagggttacagtcagaagtttgaaaaaaaaaaactgttgccctagacattatcttatccaatccacacatttttataagtgaggaaactctcctacagaaaggtctact

SEQ ID NO: 346784 - DNA, 273 bp, Homo sapiens
gggcaactaagcaagaccctgtctcaaaaaaaaaaaagtgaaatattaatacatacaacagcatgatgaacctcaaaataattatgctggagtggaagaacaaagacaaaaaaagagtatatgccacatgattgcatttatataaatttctagaaaatacaaagtaatcacagtgacagaaagcagttccagtggttacaacttttgaggatgatggatgcattcattatcttgactggtgcgatttacaggtatatacacatgtgaaaactt

SEQ ID NO: 346785 - DNA, 438 bp, Homo sapiens
tgctattaaatgtaaagtcaagtaaatttatgttaaagtaaaatgtagtgttctcattccactaaccataaacatagaagtttagagctgggaaggaccttgcaggccaggccccttattttgtagacgaagtaactaaagcctagaagggttgctgaggtacccagcatcagacagcagcacaagtcagcagcactgaagtggagacaccacaggctttggagacagatccatctgcatttgaccctgatattccaccctttagctgtgtggcattgggaaccctcactctttcaaatttcagtttcctcatgtatgaatgagggatcatatcactatggtttattgagcaggcctgtaaagattaaaagtcttaaacctgaagtgcctagcacagaacttttgggctaaaatgacataataggctgcgcaccatcg

SEQ ID NO: 346786 - DNA, 421 bp, Homo sapiens
tctcgatgttttaagaaagtttatgaatctgtgtttattcaaagctgtcatggcccacatgtggcctgtgggctgcagggtggacaatcttggtttacatgcttttggcattttcctgaaatagttggtaacttgtaattacatggctttgctaattctgtgctcttgtcatatgtcaagaaatttttttcatctaatgaagacattgtttaaatatgttcttggtaataataatctggacattttattttacatatcaaagtactacacatgctcaattataaccagtctgcctcctattttgttctcagttcattttgttatacttcaattgaactatccaatttcctataaacaatatatttaatttccttactactgatggtcactgcctattcagttttcagctgagaaaaaaatc

SEQ ID NO: 346787 - DNA, 679 bp, Homo sapiens
gagtttgaagaagaaaatgagctttgtcaattattctatcacccagtgataactggtcataaccttttaattagtctttagttatatatctttcaagttcttactatgtatgtatatattgttttataaatagctatttttttactggtcaacgtatcataaaagttgtatctattgcaatagactttactaccattttttaaactgcataataatgcactgtatgtactacaatgcaaaccccaccccgtcctagccacagtgatgtatatttaaggcatgtctattaaacagggctgtgacaaacatccttacaaatacatctctgcaaggttgtatgatgatcccctcaggataagtggaatttcagagtcaaatggtatgcacattgacggttttgaagcacgttaccagattgctattcagaaaaatgtattattttatgttcccattaactggggtttgagggtgtgcccatccctgcttgcttaccagctctggatattgccagtcactttaatgctttccagtcctattgggtgaaaagtaatctcatgggatatgcatatctttacttctccttccccttccctttcgcctgccttatgaattgttcatgaacttggtcattttcctgttgaggtattcgtcccttcctgattgattttcaagctctctt

SEQ ID NO: 346788 - DNA, 1084 bp, Homo sapiens
acagctctgttttagcgttgttttctgatttgagactggtggaatttggatatgcagctctctacaaaatctgcagtgaatgttgctgggctggtgaagatgctttattatttttttaatcactcccctgccctcctgtctgctcctctatgtagggatacttagtttattatgggtctttgttcatgttgactattttacaagagtggttcttagttctggctgagaatagaatctgttgcagcacttaaatagaaaggccgaggcactgctggacctgctgaagaagactccctggggaggacacaagaagtcatagttttagaagaaccacaagtgatcacgtgggaaccccacgcttgagaactggatttcaggcttattccacttggagaggaatattagatttgtgttcttaataaatatgatggcagaattgggaaaggaatgatcgggtaccattaagtttggcccctggataataccataacaaaatgactttaccttggaagcatgagtgtctaaaagtacctcaggtgtactcaagggtatgcactaatggtactccatgttttctgttttttttggttgttgttgttgttttttttgttttgttttgttttgtttgctttttgagctcaagtattaatctcattctgaaagaattcgcaaattcaaaacagtgttcaataaatgtagcccacttctctttgccttttatgggatacaaataatgtttatgttgcgtgtgaaaggtataataattctgtttaattctgaagtgattctattaaataggcttgaggaaacataactgggattatgagtggtgttgggataagtgatctgtaatgtccctctaatgctaagattttgtggtttaagaatggtaatattcaatatttagatacctacaaatgaggagattcgtttgtgtggggccagggtaccattatagacacattaatagattgtatacttgcatttgtgggctgtgtgggtgtgtgggtagagagagagtgtactttatatgcttattaatgggtggcaatctaattgtaaaaatagcttttttttttttttc

SEQ ID NO: 346789 - DNA, 1471 bp, Homo sapiens
aaattaatgaacgtattttaccatgttaacagactaaaaaggaaaaaaatatgaacatctcaataaatgcagaaaaagcatttgataaaaattcagcaaattagaaatagagataagaattctcagcaaattagaaaaaagagggcttccttaacctgataaatggagcatatttatgaaaaacctacggtttaacattatacttaatgacgaaagactaaatgcattccctccataaacacagacaagggaagtatatctcttcttaccacttttcttccacattatactggaggttctaatctgtatgatgaagtaaaaaaaaaagaaataaaaggcatccagattggcaaggaagaagtaactttttatttgcagatgacattgattatctacggatagattctacaaaaaagctactagaagtaatatgtgagttgaacaaggtaggatagaagatcaatatgtagacatgaattgtatttttgtatattggcaatgaacatttggaacttgaaataaaaattaatgccatgtataaaaacatcgagcactatgaagtacttagagataaatctaaaaaaagatgtttaagacttgtacactgaaaattataaagtgttcccgagagaaattaagataacctaagcaaatggagagagatactgtgtttatgcagcagaagactaaatactaagatgttaccttcccccaagtgttctgtgtgtactatgcaatcccagtcaaaatcctagcaggaattttttggtactagttgacaagctgattctaaaattcatatagaaatacagaggacctagaacagccaaaacaactttgaaaaagaagaaaaaagttgtaagacttacactacttatcttcaagtcttattataaaactatagtaatcacaatagggtggtatgggtttcaagacagacaagtagattgatggaacagaatagaaagtctggaatagattcattcacatatgtgataaacaaaatgtatatgtatacaatgaaatattataattcaatcataaaaaggaatgaaatactgatacgtgctacaacatggatgaacctttaaaacattaggctaattgaaaaaagccagtcacaaaagatcactatagagtggtctctatagaaatagaagataggttagttggttgcttagggctaggctggaaggactgggggacagggttttttttgggatgatgaatatgttctaaaattgactatggtgatggttacatgtatctttgaatataccaaaaatcattgaattgtacaattttttgtatggtatatgacttatctcactgtaactattaaaaagaaaacacggttgggcatggtagctcacatctgtaatcccagcactttgggatgctgaggctggaggatcgtttgaggccaagagtttgagaacagcctgggcagcaaaggccctttctctacaaa

SEQ ID NO: 346790 - DNA, 3305 bp, Homo sapiens
tatacctaatgataatatttctgatgagccaagtctctgtgactgtgatgtacataaacataatcaaaatgaaaatttagtacctaacaatcgtgttcaaatacacagaagccctgcacagaatttagttggagagaacaatcatgatgttgataacagtgacctcccagtattgtccactgatcaagatgaaagtttgctgttatttgaagatgttaatacagagttcgacgatgtgagtctttcacccttgaacagtaaaagcgaatctttacctgtgtcagacaaaactgctattagtgaaacgcctctggtctctcagttcttaatttctgatgaacttttgttggacaataattctgaactccaagatcaaatcacccgtgatgctaatagttttaaatctcgtgatcagagaggtgtacaggaagaaaaagtgaagaatcatgaggatatttttgattgctctagggatttattttctgttacctttgatttaggattctgtagtccagattctgatgatgaaatattggaacatacatcagatagcaatagacctctagatgatctatatggaaggtatttggaaattaaggagataagtgatgcaaattatgtttcgaatcaagcactaataccaagagatcatagtaaaaattttactagtggaactgttattatcccatcaaatgaagatatgcagaatccaaattatgtacatttgccactgagtgcagcaaaaaatgaagaattgttatctcctggttattctcagttttctttaccagtgcaaaaaaaagttatgagtacaccactctctaaatcaaacacattgaactcattttctaagataagaaaggaaatacttaagacaccagattctggtaaggaaaaagtaaacctacaaagattcaaagaagcattgaattcaacttttgattattcagaattttctctagaaaagtctaaaagcagtggtccaatgtatctgcataaatcctgtcattctgttgaagatggacaattattaacaagtaacgaaagtgaagatgacgagattttccgaagaaaagttaaaagagcaaaaggaaatgttttaaactctcctgaggatcagaaaaatagtgaagttgattctccacttcatgctgtcaaaaagcgcagatttcctataaacagatcagaattatcatctagtgatgagagtgagaattttcccaaaccatgttcacaattagaagacttcaaggtttgtaacgggaatgccagaagaggcatcaaagtcccaaagagacagagtcacttaaagcatgtagctaggaagtttttagatgatgaagcagaactttctgaagaagatgcagaatatgtttcatcagatgaaaatgatgagtcagaaaatgaacaagattcctcattacttgactttttaaatgatgaaactcaactttcacaggctataaatgattctgaaatgagagctatttacatgaaatctttgcgtagtccaatgatgaacaataagtacaaaatgattcataagacacataaaaacataaacattttctcgcagattcctgaacaagatgaaacctatttagaggatagtttttgtgttgatgaagaggagtcttgcaaaggccaatcaagtgaagaagaagtttgtgttgattttaacttaataactgatgattgctttgcaaatagtaaaaagtataaaactcgacgtgcagtaatgctaaaagaaatgatggaacaaaattgtgcacattcaaaaaagaaattatccagaattattttaccagatgattcaagtgaggaggagaacaatgtaaatgataaaagagaatctaatattgcggttaacccaagcactgttaagaagaacaaacaacaggaccattgtttaaattcagtgccttctggatcttctgcgcagtccaaggtgcgttctactccaagagttaatccattagcaaagcagagcaaacagacatcgctgaatttaaaggatacaatttccgaagtctcagacttcaaacctcagaatcataatgaagtccagtctaccacaccacccttcactactgttgattcacagaaagactgtagaaaatttccagttccacagaaggatggtagtgctttggaggattctagcacttcaggggcatcctgttccaagtcaagaccacatttagctgggacacatacttctcttagacttccgcaggaaggaaaaggaacctgtattcttgtaggtggtcatgaaatcacttctggattagaagtaatttcttccctaagagcaattcatgggttgcaagtagaagtttgtcctcttaatggctgtgattacatcgtgagtaatcgcatggtggtggaaaggaggtctcaatctgagatgttaaatagtgtcaataagaacaagttcattgagcagatccagcacctgcagagtatgtttgaaagaatatgtgtgattgtggaaaaggacagagaaaaaacaggagacacatcaaggatgtttaggagaacaaagagctatgacagcctgctgactaccttaattggcgctggaatccgaattcttttcagttcctgccaagaagaaaccgcagatttgctaaaggaactgtctttagtggaacaaagaaagaatgttggtattcatgttccaacagtggtgaatagtaataaaagtgaggcactccagttttatttaagtattcccaatataagttatataactgcattaaatatgtgtcaccagttttcatctgtgaaaaggatggctaacagctcacttcaagaaatctccatgtatgcacaagtaactcatcagaaggctgaggagatctatagatatattcactatgtatttgacatacaaatgttaccaaatgatcttaaccaagatagactgaaatctgatatataatcaagctgctcaagatggggttttcaaagacctctcacaatattaaatgcacttcaataatcattgctgttttatgtttatttgtaaataagagaatattttatttaaatattttatattgtatacatttttatttatagattatagaaattattaaaaaagaaaaatctgatgttcagtgatcattttgactagattataaaactaatttttcttattaaataaaacaaggtttattaaaagtgttactaaggatagtttaagaaagtaaaagctaagctagagatatactttggaatgtttcccaaaattaaagttgtactgttgtgataaatagtaaagttgacatgtctatgactac

SEQ ID NO: 346791 - DNA, 2995 bp, Homo sapiens
tatacctaatgataatatttctgatgagccaagtctctgtgactgtgatgtacataaacataatcaaaatgaaaatttagtacctaacaatcgtgttcaaatacacagaagccctgcacagaatttagttggagagaacaatcatgatgttgataacagtgacctcccagtattgtccactgatcaagatgaaagtttgctgttatttgaagatgttaatacagagttcgacgatgtgagtctttcacccttgaacagtaaaagcgaatctttacctgtgtcagacaaaactgctattagtgaaacgcctctggtctctcagttcttaatttctgatgaacttttgttggacaataattctgaactccaagatcaaatcacccgtgatgctaatagttttaaatctcgtgatcagagaggtgtacaggaagaaaaagtgaagaatcatgaggatatttttgattgctctagggatttattttctgttacctttgatttaggattctgtagtccagattctgatgatgaaatattggaacatacatcagatagcaatagacctctagatgatctatatggaaggtatttggaaattaaggagataagtgatgcaaattatgtttcgaatcaagcactaataccaagagatcatagtaaaaattttactagtggaactgttattatcccatcaaatgaagatatgcagaatccaaattatgtacatttgccactgagtgcagcaaaaaatgaagaattgttatctcctggttattctcagttttctttaccagtgcaaaaaaaagttatgagtacaccactctctaaatcaaacacattgaactcattttctaagataagaaaggaaatacttaagacaccagattctggtaaggaaaaagtaaacctacaaagattcaaagaagcattgaattcaacttttgattattcagaattttctctagaaaagtctaaaagcagtggtccaatgtatctgcataaatcctgtcattctgttgaagatggacaattattaacaagtaacgaaagtgaagatgacgagattttccgaagaaaagttaaaagagcaaaaggaaatgttttaaactctcctgaggatcagaaaaatagtgaagttgattctccacttcatgctgtcaaaaagcgcagatttcctataaacagatcagaattatcatctagtgatgagagtgagaattttcccaaaccatgttcacaattagaagacttcaaggtttgtaacgggaatgccagaagaggcatcaaagtcccaaagagacagagtcacttaaagcatgtagctaggaagtttttagatgatgaagcagaactttctgaagaagatgcagaatatgtttcatcagatgaaaatgatgagtcagaaaatgaacaagattcctcattacttgactttttaaatgatgaaactcaactttcacaggctataaatgattctgaaatgagagctatttacatgaaatctttgcgtagtccaatgatgaacaataagtacaaaatgattcataagacacataaaaacataaacattttctcgcagattcctgaacaagatgaaacctatttagaggatagtttttgtgttgatgaagaggagtcttgcaaaggccaatcaagtgaagaagaagtttgtgttgattttaacttaataactgatgattgctttgcaaatagtaaaaagtataaaactcgacgtgcagtaatgctaaaagaaatgatggaacaaaattgtgcacattcaaaaaagaaattatccagaattattttaccagatgattcaagtgaggaggagaacaatgtaaatgataaaagagaatctaatattgcggttaacccaagcactgttaagaagaacaaacaacaggaccattgtttaaattcagtgccttctggatcttctgcgcagtccaaggtgcgttctactccaagagttaatccattagcaaagcagagcaaacagacatcgctgaatttaaaggatacaatttccgaagtctcagacttcaaacctcagaatcataatgaagtccagtctaccacaccacccttcactactgttgattcacagaaagactgtagaaaatttccagttccacagaaggatggtagtgctttggaggattctagcacttcaggggcatcctgttccaagtcaagaccacatttagctgggacacatacttctcttagacttccgcaggaaggaaaaggaacctgtattcttgtaggtggtcatgaaatcacttctggattagaagtaatttcttccctaagagcaattcatgggttgcaagtagaagtttgtcctcttaatggctgtgattacatcgtgagtaatcgcatggtggtggaaaggaggtctcaatctgagatgttaaatagtgtcaataagaacaagttcattgagcagatccagcacctgcagagtatgtttgaaagaatatgtgtgattgtggaaaaggacagagaaaaaacaggagacacatcaaggatgtttaggagaacaaagagctatgacagcctgctgactaccttaattggcgctggaatccgaattcttttcagttcctgccaagaagaaaccgcagatttgctaaaggaactgtctttagtggaacaaagaaagaatgttggtattcatgttccaacagtggtgaatagtaataaaagtgaggcactccagttttatttaagtattcccaatataagttatataactgcattaaatatgtgtcaccagttttcatctgtgaaaaggatggctaacaggtatgtctgttgtaatatttttaaatgattacttttaaaagattcgtaaaagcattccatagaagtttaatgttaaaaaaatttaagcggcatcatgcctgttagattattttattcagtaaacattttttgcctgccaacatatattagttactgtatgaagctaagggacattattcgaaaaaaagaa

SEQ ID NO: 346792 - DNA, 2406 bp, Homo sapiens
tatacctaatgataatatttctgatgagccaagtctctgtgactgtgatgtacataaacataatcaaaatgaaaatttagtacctaacaatcgtgttcaaatacacagaagccctgcacagaatttagttggagagaacaatcatgatgttgataacagtgacctcccagtattgtccactgatcaagatgaaagtttgctgttatttgaagatgttaatacagagttcgacgatgtgagtctttcacccttgaacagtaaaagcgaatctttacctgtgtcagacaaaactgctattagtgaaacgcctctggtctctcagttcttaatttctgatgaacttttgttggacaataattctgaactccaagatcaaatcacccgtgatgctaatagttttaaatctcgtgatcagagaggtgtacaggaagaaaaagtgaagaatcatgaggatatttttgattgctctagggatttattttctgttacctttgatttaggattctgtagtccagattctgatgatgaaatattggaacatacatcagatagcaatagacctctagatgatctatatggaaggtatttggaaattaaggagataagtgatgcaaattatgtttcgaatcaagcactaataccaagagatcatagtaaaaattttactagtggaactgttattatcccatcaaatgaagatatgcagaatccaaattatgtacatttgccactgagtgcagcaaaaaatgaagaattgttatctcctggttattctcagttttctttaccagtgcaaaaaaaagttatgagtacaccactctctaaatcaaacacattgaactcattttctaagataagaaaggaaatacttaagacaccagattctggtaaggaaaaagtaaacctacaaagattcaaagaagcattgaattcaacttttgattattcagaattttctctagaaaagtctaaaagcagtggtccaatgtatctgcataaatcctgtcattctgttgaagatggacaattattaacaagtaacgaaagtgaagatgacgagattttccgaagaaaagttaaaagagcaaaaggaaatgttttaaactctcctgaggatcagaaaaatagtgaagttgattctccacttcatgctgtcaaaaagcgcagatttcctataaacagatcagaattatcatctagtgatgagagtgagaattttcccaaaccatgttcacaattagaagacttcaaggtttgtaacgggaatgccagaagaggcatcaaagtcccaaagagacagagtcacttaaagcatgtagctaggaagtttttagatgatgaagcagaactttctgaagaagatgcagaatatgtttcatcagatgaaaatgatgagtcagaaaatgaacaagattcctcattacttgactttttaaatgatgaaactcaactttcacaggctataaatgattctgaaatgagagctatttacatgaaatctttgcgtagtccaatgatgaacaataagtacaaaatgattcataagacacataaaaacataaacattttctcgcagattcctgaacaagatgaaacctatttagaggatagtttttgtgttgatgaagaggagtcttgcaaaggccaatcaagtgaagaagaagtttgtgttgattttaacttaataactgatgattgctttgcaaatagtaaaaagtataaaactcgacgtgcagtaatgctaaaagaaatgatggaacaaaattgtgcacattcaaaaaagaaattatccagaattattttaccagatgattcaagtgaggaggagaacaatgtaaatgataaaagagaatctaatattgcggttaacccaagcactgttaagaagaacaaacaacaggaccattgtttaaattcagtgccttctggatcttctgcgcagtccaaggtgcgttctactccaagagttaatccattagcaaagcagagcaaacagacatcgctgaatttaaaggatacaatttccgaagtctcagacttcaaacctcagaatcataatgaagtccagtctaccacaccacccttcactactgttgattcacagaaagactgtagaaaatttccagttccacagaaggtatggatcaaagaaaggaaaaatatctttagatggttaccagaagtttttctttttctttcttgtgtgtgtgttttgtattaaataactaggtcaaagaaaaattaacaaaaaaattttgcagaaaatgtcttcaaacaagaaaacaatacacaaaattatatgggcaattcacagggtgcttaggttttaattttttaaatatgttaatgttttgttaacactatgtaaggaaacttgataattttattaaaaggttgtgggaaaat

SEQ ID NO: 346793 - DNA, 542 bp, Homo sapiens
ataaagtatattaataattctacttaatattagttactgaagtttgcctttccctaaatatgaatatttaggagacacatcaaggatgtttaggagaacaaagagctatgacagcctgctgactaccttaattggcgctggaatccgaattcttttcagttcctgccaagaagaaaccgcagatttgctaaaggaactgtctttagtggaacaaagaaagaatgttggtattcatgttccaacagtggtgaatagtaataaaagtgaggcactccagttttatttaagtattcccaatataagttatataactgcattaaatatgtgtcaccagttttcatctgtgaaaaggatggctaacaggtatgtctgttgtaatatttttaaatgattacttttaaaagattcgtaaaagcattccatagaagtttaatgttaaaaaaatttaagcggcatcatgcctgttagattattttattcagtaaacattttttgcctgccaacatatattagttactgtatgaagctaagggacattattc

SEQ ID NO: 346794 - DNA, 3410 bp, Homo sapiens
tatacctaatgataatatttctgatgagccaagtctctgtgactgtgatgtacataaacataatcaaaatgaaaatttagtacctaacaatcgtgttcaaatacacagaagccctgcacagaatttagttggagagaacaatcatgatgttgataacagtgacctcccagtattgtccactgatcaagatgaaagtttgctgttatttgaagatgttaatacagagttcgacgatgtgagtctttcacccttgaacagtaaaagcgaatctttacctgtgtcagacaaaactgctattagtgaaacgcctctggtctctcagttcttaatttctgatgaacttttgttggacaataattctgaactccaagatcaaatcacccgtgatgctaatagttttaaatctcgtgatcagagaggtgtacaggaagaaaaagtgaagaatcatgaggatatttttgattgctctagggatttattttctgttacctttgatttaggattctgtagtccagattctgatgatgaaatattggaacatacatcagatagcaatagacctctagatgatctatatggaaggtatttggaaattaaggagataagtgatgcaaattatgtttcgaatcaagcactaataccaagagatcatagtaaaaattttactagtggaactgttattatcccatcaaatgaagatatgcagaatccaaattatgtacatttgccactgagtgcagcaaaaaatgaagaattgttatctcctggttattctcagttttctttaccagtgcaaaaaaaagttatgagtacaccactctctaaatcaaacacattgaactcattttctaagataagaaaggaaatacttaagacaccagattctggtaaggaaaaagtaaacctacaaagattcaaagaagcattgaattcaacttttgattattcagaattttctctagaaaagtctaaaagcagtggtccaatgtatctgcataaatcctgtcattctgttgaagatggacaattattaacaagtaacgaaagtgaagatgacgagattttccgaagaaaagttaaaagagcaaaaggaaatgttttaaactctcctgaggatcagaaaaatagtgaagttgattctccacttcatgctgtcaaaaagcgcagatttcctataaacagatcagaattatcatctagtgatgagagtgagaattttcccaaaccatgttcacaattagaagacttcaaggtttgtaacgggaatgccagaagaggcatcaaagtcccaaagagacagagtcacttaaagcatgtagctaggaagtttttagatgatgaagcagaactttctgaagaagatgcagaatatgtttcatcagatgaaaatgatgagtcagaaaatgaacaagattcctcattacttgactttttaaatgatgaaactcaactttcacaggctataaatgattctgaaatgagagctatttacatgaaatctttgcgtagtccaatgatgaacaataagtacaaaatgattcataagacacataaaaacataaacattttctcgcagattcctgaacaagatgaaacctatttagaggatagtttttgtgttgatgaagaggagtcttgcaaaggccaatcaagtgaagaagaagtttgtgttgattttaacttaataactgatgattgctttgcaaatagtaaaaagtataaaactcgacgtgcagtaatgctaaaagaaatgatggaacaaaattgtgcacattcaaaaaagaaattatccagaattattttaccagatgattcaagtgaggaggagaacaatgtaaatgataaaagagaatctaatattgcggttaacccaagcactgttaagaagaacaaacaacaggaccattgtttaaattcagtgccttctggatcttctgcgcagtccaaggtgcgttctactccaagagttaatccattagcaaagcagagcaaacagacatcgctgaatttaaaggatacaatttccgaagtctcagacttcaaacctcagaatcataatgaagtccagtctaccacaccacccttcactactgttgattcacagaaagactgtagaaaatttccagttccacagaagaggttcggacatctagcactaatgtttcccatgccctctgcctctgcaaaaagaggagctcatggtccacaggatttggcagattactttggaaaggaaagctgggatggtagtgctttggaggattctagcacttcaggggcatcctgttccaagtcaagaccacatttagctgggacacatacttctcttagacttccgcaggaaggaaaaggaacctgtattcttgtaggtggtcatgaaatcacttctggattagaagtaatttcttccctaagagcaattcatgggttgcaagtagaagtttgtcctcttaatggctgtgattacatcgtgagtaatcgcatggtggtggaaaggaggtctcaatctgagatgttaaatagtgtcaataagaacaagttcattgagcagatccagcacctgcagagtatgtttgaaagaatatgtgtgattgtggaaaaggacagagaaaaaacaggagacacatcaaggatgtttaggagaacaaagagctatgacagcctgctgactaccttaattggcgctggaatccgaattcttttcagttcctgccaagaagaaaccgcagatttgctaaaggaactgtctttagtggaacaaagaaagaatgttggtattcatgttccaacagtggtgaatagtaataaaagtgaggcactccagttttatttaagtattcccaatataagttatataactgcattaaatatgtgtcaccagttttcatctgtgaaaaggatggctaacagctcacttcaagaaatctccatgtatgcacaagtaactcatcagaaggctgaggagatctatagatatattcactatgtatttgacatacaaatgttaccaaatgatcttaaccaagatagactgaaatctgatatataatcaagctgctcaagatggggttttcaaagacctctcacaatattaaatgcacttcaataatcattgctgttttatgtttatttgtaaataagagaatattttatttaaatattttatattgtatacatttttatttatagattatagaaattattaaaaaagaaaaatctgatgttcagtgatcattttgactagattataaaactaatttttcttattaaataaaacaaggtttattaaaagtgttactaaggatagtttaagaaagtaaaagctaagctagagatatactttggaatgtttcccaaaattaaagttgtactgttgtgataaatagtaaagttgacatgtctatgactac

SEQ ID NO: 346795 - DNA, 3205 bp, Homo sapiens
tatacctaatgataatatttctgatgagccaagtctctgtgactgtgatgtacataaacataatcaaaatgaaaatttagtacctaacaatcgtgttcaaatacacagaagccctgcacagaatttagttggagagaacaatcatgatgttgataacagtgacctcccagtattgtccactgatcaagatgaaagtttgctgttatttgaagatgttaatacagagttcgacgatgtgagtctttcacccttgaacagtaaaagcgaatctttacctgtgtcagacaaaactgctattagtgaaacgcctctggtctctcagttcttaatttctgatgaacttttgttggacaataattctgaactccaagatcaaatcacccgtgatgctaatagttttaaatctcgtgatcagagaggtgtacaggaagaaaaagtgaagaatcatgaggatatttttgattgctctagggatttattttctgttacctttgatttaggattctgtagtccagattctgatgatgaaatattggaacatacatcagatagcaatagacctctagatgatctatatggaaggtatttggaaattaaggagataagtgatgcaaattatgtttcgaatcaagcactaataccaagagatcatagtaaaaattttactagtggaactgttattatcccatcaaatgaagatatgcagaatccaaattatgtacatttgccactgagtgcagcaaaaaatgaagaattgttatctcctggttattctcagttttctttaccagtgcaaaaaaaagttatgagtacaccactctctaaatcaaacacattgaactcattttctaagataagaaaggaaatacttaagacaccagattctggtaaggaaaaagtaaacctacaaagattcaaagaagcattgaattcaacttttgattattcagaattttctctagaaaagtctaaaagcagtggtccaatgtatctgcataaatcctgtcattctgttgaagatggacaattattaacaagtaacgaaagtgaagatgacgagattttccgaagaaaagttaaaagagcaaaaggaaatgttttaaactctcctgaggatcagaaaaatagtgaagttgattctccacttcatgctgtcaaaaagcgcagatttcctataaacagatcagaattatcatctagtgatgagagtgagaattttcccaaaccatgttcacaattagaagacttcaaggtttgtaacgggaatgccagaagaggcatcaaagtcccaaagagacagagtcacttaaagcatgtagctaggaagtttttagatgatgaagcagaactttctgaagaagatgcagaatatgtttcatcagatgaaaatgatgagtcagaaaatgaacaagattcctcattacttgactttttaaatgatgaaactcaactttcacaggctataaatgattctgaaatgagagctatttacatgaaatctttgcgtagtccaatgatgaacaataagtacaaaatgattcataagacacataaaaacataaacattttctcgcagattcctgaacaagatgaaacctatttagaggatagtttttgtgttgatgaagaggagtcttgcaaaggccaatcaagtgaagaagaagtttgtgttgattttaacttaataactgatgattgctttgcaaatagtaaaaagtataaaactcgacgtgcagtaatgctaaaagaaatgatggaacaaaattgtgcacattcaaaaaagaaattatccagaattattttaccagatgattcaagtgaggaggagaacaatgtaaatgataaaagagaatctaatattgcggttaacccaagcactgttaagaagaacaaacaacaggaccattgtttaaattcagtgccttctggatcttctgcgcagtccaaggtgcgttctactccaagagttaatccattagcaaagcagagcaaacagacatcgctgaatttaaaggatacaatttccgaagtctcagacttcaaacctcagaatcataatgaagtccagtctaccacaccacccttcactactgttgattcacagaaagactgtagaaaatttccagttccacagaaggatggtagtgctttggaggattctagcacttcaggggcatcctgttccaagtcaagaccacatttagctgggacacatacttctcttagacttccgcaggaaggaaaaggaacctgtattcttgtaggtggtcatgaaatcacttctggattagaagtaatttcttccctaagagcaattcatgggttgcaagtagaagtttgtcctcttaatggctgtgattacatcgtgagtaatcgcatggtggtggaaaggaggtctcaatctgagatgttaaatagtgtcaataagaacaagttcattgagcagatccagcacctgcagagtatgtttgaaagaatatgtgtgattgtggaaaaggacagagaaaaaacaggagacacatcaaggatgtttaggagaacaaagagctatgacagcctgctgactaccttaattggcgctggaatccgaattcttttcagttcctgccaagaagaaaccgcagatttgctaaaggaactgtctttagtggaacaaagaaagaatgttggtattcatgttccaacagtggtgaatagtaataaaactcacttcaagaaatctccatgtatgcacaagtaactcatcagaaggctgaggagatctatagatatattcactatgtatttgacatacaaatgttaccaaatgatcttaaccaagatagactgaaatctgatatataatcaagctgctcaagatggggttttcaaagacctctcacaatattaaatgcacttcaataatcattgctgttttatgtttatttgtaaataagagaatattttatttaaatattttatattgtatacatttttatttatagattatagaaattattaaaaaagaaaaatctgatgttcagtgatcattttgactagattataaaactaatttttcttattaaataaaacaaggtttattaaaagtgttactaaggatagtttaagaaagtaaaagctaagctagagatatactttggaatgtttcccaaaattaaagttgtactgttgtgataaatagtaaagttgacatgtctatgactac

SEQ ID NO: 346796 - DNA, 3766 bp, Homo sapiens
ttccgcgcagttccgctgggccgtgccggcctgtaccgggccgtgccgagccagaactggcaggagtgggggcctgagttggaggtgccggggacaggcgctcggggcagcccgcgccttgccgaggtccctgccccgtcccggccggcctggcttgtcttgtcagtcactggggcggaggcagcggctgtagcggggctgtagccgggcgttgagcacagcgcgggccaggccgaacggaagggacctgccacagcccctcaactccacggactcttcgccctagactagcggagctgcatctccgcgcttcgttggacgcctccgtaaccacgaagggctctctctctcccgtgaccctccagccccatgacctgttcatagcagccgagagctcacccaggcgggggtgttgtgggtacaggccatcgaccctgtgacccctcaagagccagggactcggtttcccccgcaggcctccctcccctgtgactccctccacacagattctggggacagagctgttacctgccactaggatccccgcctgagagctcctcactgacggctccctcctcggagtccccttcattgggtctcctaagagcaccaattttggtctctggcaagcctcccacccccaaacgaggtggggaggcctcggcagccatgcccgccctgggccccccctcaccccaccactccctgggcacccaagccggggtctagcagggggccagcagccaaggggctggggcaggagacagatcagggcccacctccctgccagggagggagcaaagatggagcggcgggaggagcagccgggggctgcaggggctggagcagcaccagccttggacttcactgtggagaacgtggagaaggcgctgcaccagctctactatgatcccaacattgagaataagaacctggctcagaagtggctgatgcaggcccaggtctccccacaggcctggcacttcagctggcagctactgcagcccgacaaggtaccagagatccagtactttggggccagtgctcttcacatcaagatctctcgctactggagtgacatccccactgaccagtatgaaagcctaaaggcacagctcttcacccagatcacccgctttgccagtggctccaagattgtactgactcggctgtgcgtggcactggcctcactggctctcagcatgatgcctgatgcttggccatgtgctgtggcagatatggtacgactcttccaggctgaggactcaccagtggatgggcagggccgctgcctagccctgttagagctgctgacagtgctgcctgaggagttccagaccagtcgcctaccccagtaccgcaaaggcctggtgcggaccagcctggcggtggaatgtggggctgtcttcccgctgctggagcagctgctacagcagcccagctcacccagctgtgtgcgtcagaaggtgctcaagtgtttctccagctgggtgcagctggaggtgccgctgcaggactgtgaggcgctcattcaggctgcctttgctgctctgcaggactcggagctcttcgacagcagtgtggaggccattgtgaatgccatctcacagcctgatgcccagaggtacgtgaacacactcctgaaactcatcccgctggtgctgggtctgcaggaacaactgcggcaggcagtgcagaatggggacatggagacctcccatggcatctgtcgcatcgctgtggccctgggcgagaaccactcccgggccttgctggaccaagtagagcactggcagagtttcctggcactcgtcaacatgattatgttctgcacaggcatccctggccactatcctgtcaatgagaccaccagctccctaaccctcaccttctggtacacactgcaggatgatattctatcctttgaggcagagaagcaggctgtataccagcaggtgtaccggccagtctacttccagctggtggatgtgcttctgcacaaggcccagttcccttctgatgaggaatatggattctggtcctcagacgagaaggagcagttccgaatttacagggtggacatctcagacacgctcatgtatgtctatgagatgttgggggccgagctgctcagcaacctctatgacaagctgggtcgtttgctcaccagctcagaggagccctactcctggcagcacacagaggccctcctctacggcttccaatccatcgcagagaccattgacgtcaactattctgatgtggtgcctgggctcattggcctcatcccacggatcagcatcagcaacgtgcagctggcagacactgtcatgttcaccattggagctctgtctgaatggctggctgaccaccccgtcatgatcaacagtgttctgcccttggtactgcatgccctaggcaatcctgagctgtctgtctcttctgtgtccaccctcaagaagatctgccgagagtgcaagtatgacctgcctccctatgctgccaacattgtggctgtgtcccaggatgtgctgatgaaacagatccacaagacaagccagtgcatgtggctgatgcaggcgctgggcttcctgctgtcagctcttcaagtggaggagatccttaagaacctgcactcgcttatctcaccctatatccagcaactggagaagctggcagaggagatacccaatccctccaacaagctggccattgttcacatcttggggcttctctccaacctcttcaccacactggacatcagtcatcatgaggatgatcatgaaggccctgagcttcggaagctgccagtgccacagggacccaaccccgtggtggtggtgctgcagcaggtcttccagcttatccagaaggtgctgagcaaatggttgaatgatgcccaggttgtggaggcggtgtgcgctatctttgagaagtctgttaagacgctgctggatgactttgcccccatggtgccacagctgtgtgagatgctgggtcggatgtacagcaccatcccccaggcctctgctcttgacctcactcgacagctggtccacatctttgctcatgagcctgcccactttcccccaattgaggccctcttcctgctcgtcacctccgtcacactcactctcttccagcaagggcccagggatcatcctgatattgttgattcatttatgcaactcctggcacaggctctgaagcggaagccagatttgttcctgtgtgaacgattggatgtcaaagctgtgttccagtgtgctgtgctggccctcaagttccctgaggcacctactgtcaaggcctcctgtggcttctttacagagctgctgcctcggtgtggggaagtagagtctgtgggaaaggtggtacaggaagacggtcgtatgctgctcatagcagtgctggaggccattgggggccaggcctcccgcagcctcatggactgctttgccgatatcctgttcgccctgaacaagcactgcttcagcctcctgagcatgtggatcaaggaggccctgcagccacctggtttcccctctgcccgcctcagccctgaacagaaggataccttcagccagcagatccttcgcgagcgagtgaacaagaggcgggtgaaggagatggtgaaggagttcacactgctgtgccggggtctccatggcacagattacacagctgactactgaggggtgcccccatcccatccaccccttctcttcatccttccctattcccaaagagtaaacctggaccctca

SEQ ID NO: 346797 - DNA, 3957 bp, Homo sapiens
ttccgcgcagttccgctgggccgtgccggcctgtaccgggccgtgccgagccagaactggcaggagtgggggcctgagttggaggtgccggggacaggcgctcggggcagcccgcgccttgccgaggtccctgccccgtcccggccggcctggcttgtcttgtcagtcactggggcggaggcagcggctgtagcggggctgtagccgggcgttgagcacagcgcgggccaggccgaacggaagggacctgccacagcccctcaactccacggactcttcgccctagactagcggagctgcatctccgcgcttcgttggacgcctccgtaaccacgaagggctctctctctcccgtgaccctccagccccatgacctgttcatagcagccgagagctcacccaggcgggggtgttgtgggtacaggccatcgaccctgtgacccctcaagagccagggactcggtttcccccgcaggcctccctcccctgtgactccctccacacagattctggggacagagctgttacctgccactaggatccccgcctgagagctcctcactgacggctccctcctcggagtccccttcattgggtctcctaagagcaccaattttggtctctggcaagcctcccacccccaaacgaggtggggaggcctcggcagccatgcccgccctgggccccccctcaccccaccactccctgggcacccaagccggggtctagcagggggccagcagccaaggggctggggcaggagacagatcagggcccacctccctgccagggagggagcaaagatggagcggcgggaggagcagccgggggctgcaggggctggagcagcaccagccttggacttcactgtggagaacgtggagaaggcgctgcaccagctctactatgatcccaacattgagaataagaacctggctcagaagtggctgatgcaggcccaggtctccccacaggcctggcacttcagctggcagctactgcagcccgacaaggtaccagagatccagtactttggggccagtgctcttcacatcaagatctctcgctactggagtgacatccccactgaccagtatgaaagcctaaaggcacagctcttcacccagatcacccgctttgccagtggctccaagattgtactgactcggctgtgcgtggcactggcctcactggctctcagcatgatgcctgatgcttggccatgtgctgtggcagatatggtacgactcttccaggctgaggactcaccagtggatgggcagggccgctgcctagccctgttagagctgctgacagtgctgcctgaggagttccagaccagtcgcctaccccagtaccgcaaaggcctggtgcggaccagcctggcggtggaatgtggggctgtcttcccgctgctggagcagctgctacagcagcccagctcacccagctgtgtgcgtcagaaggtgctcaagtgtttctccagctgggtgcagctggaggtgccgctgcaggactgtgaggcgctcattcaggctgcctttgctgctctgcaggactcggagctcttcgacagcagtgtggaggccattgtgaatgccatctcacagcctgatgcccagaggtacgtgaacacactcctgaaactcatcccgctggtgctgggtctgcaggaacaactgcggcaggcagtgcagaatggggacatggagacctcccatggcatctgtcgcatcgctgtggccctgggcgagaaccactcccgggccttgctggaccaagtagagcactggcagagtttcctggcactcgtcaacatgattatgttctgcacaggcatccctggccactatcctgtcaatgagaccaccagctccctaaccctcaccttctggtacacactgcaggatgatattctatcctttgaggcagagaagcaggctgtataccagcaggtgtaccggccagtctacttccagctggtggatgtgcttctgcacaaggcccagttcccttctgatgaggaatatggattctggtcctcagacgagaaggagcagttccgaatttacagggtggacatctcagacacgctcatgtatgtctatgagatgttgggggccgagctgctcagcaacctctatgacaagctgggtcgtttgctcaccagctcagaggagccctactcctggcagcacacagaggccctcctctacggcttccaatccatcgcagagaccattgacgtcaactattctgatgtggtgcctgggctcattggcctcatcccacggatcagcatcagcaacgtgcagctggcagacactgtcatgttcaccattggagctctgtctgaatggctggctgaccaccccgtcatgatcaacagtgttctgcccttggtactgcatgccctaggcaatcctgagctgtctgtctcttctgtgtccaccctcaagaagatctgccgagagtgcaagtatgacctgcctccctatgctgccaacattgtggctgtgtcccaggatgtgctgatgaaacagatccacaagacaagccagtgcatgtggctgatgcaggcgctgggcttcctgctgtcagctcttcaagtggaggagatccttaagaacctgcactcgcttatctcaccctatatccagcaactggagaagctggcagaggagatacccaatccctccaacaagctggccattgttcacatcttggggcttctctccaacctcttcaccacactggacatcagtcatcatgaggatgatcatgaaggccctgagcttcggaagctgccagtgccacagggacccaaccccgtggtggtggtgctgcagcaggtcttccagcttatccagaaggtgctgagcaaatggttgaatgatgcccaggttgtggaggcggtgtgcgctatctttgagaagtctgttaagacgctgctggatgactttgcccccatggtgccacagctgtgtgagatgctgggtcggatgtacagcaccatcccccaggcctctgctcttgacctcactcgacagctggtccacatctttgctcatgagcctgcccactttcccccaattgaggccctcttcctgctcgtcacctccgtcacactcactctcttccagcaagggcccagggatcatcctgatattgttgattcatttatgcaactcctggcacaggctctgaagcggaagccagatttgttcctgtgtgaacgattggatgtcaaagctgtgttccagtgtgctgtgctggccctcaagttccctgaggcacctactgtcaaggcctcctgtggcttctttacagagctgctgcctcggtgtggggaagtagagtctgtgggaaaggtggtacaggaagacggtcgtatgctgctcatagcagtgctggaggccattgggggccaggcctcccgcagcctcatggactgctttgccgatatcctgttcgccctgaacaagcactgcttcagcctcctgagcatgtggatcaaggaggccctgcagccacctggtttcccctctgcccgcctcagccctgaacagaaggataccttcagccagcagatccttcgcgagcgagtgaacaagaggcgggtgaaggagatggtgaaggagttcacactgctgtgccggggtctccatggcacagattacacagctgactactgaggggtgcccccatcccatccaccccttctcttcatccttccctattcccaaagagtaaacctggaccctcactgctgtctctgcctcctttctgctgtcaccacccaggccttgggagggaatggtgggaacatcctctagctcccaggttggaagagatactactgtagccaagccacctaggctggagcccttcagaatactgtcgaagggtgttctactcaggagacagctatcacccataacgggagcactgcctcgt

SEQ ID NO: 346798 - DNA, 3811 bp, Homo sapiens
ttccgcgcagttccgctgggccgtgccggcctgtaccgggccgtgccgagccagaactggcaggagtgggggcctgagttggaggtgccggggacaggcgctcggggcagcccgcgccttgccgaggtccctgccccgtcccggccggcctggcttgtcttgtcagtcactggggcggaggcagcggctgtagcggggctgtagccgggcgttgagcacagcgcgggccaggccgaacggaagggacctgccacagcccctcaactccacggactcttcgccctagactagcggagctgcatctccgcgcttcgttggacgcctccgtaaccacgaagggctctctctctcccgtgaccctccagccccatgacctgttcatagcagccgagagctcacccaggcgggggtgttgtgggtacaggccatcgaccctgtgacccctcaagagccagggactcggtttcccccgcaggcctccctcccctgtgactccctccacacagattctggggacagagctgttacctgccactaggatccccgcctgagagctcctcactgacggctccctcctcggagtccccttcattgggtctcctaagagcaccaattttggtctctggcaagcctcccacccccaaacgaggtggggaggcctcggcagccatgcccgccctgggccccccctcaccccaccactccctgggcacccaagccggggtctagcagggggccagcagccaaggggctggggcaggagacagatcagggcccacctccctgccagggagggagcaaagatggagcggcgggaggagcagccgggggctgcaggggctggagcagcaccagccttggacttcactgtggagaacgtggagaaggatccagagtggccagcacctgctcagtcctgtgctgtcctgcaggcgctgcaccagctctactatgatcccaacattgagaataagaacctggctcagaagtggctgatgcaggcccaggtctccccacaggcctggcacttcagctggcagctactgcagcccgacaaggtaccagagatccagtactttggggccagtgctcttcacatcaagatctctcgctactggagtgacatccccactgaccagtatgaaagcctaaaggcacagctcttcacccagatcacccgctttgccagtggctccaagattgtactgactcggctgtgcgtggcactggcctcactggctctcagcatgatgcctgatgcttggccatgtgctgtggcagatatggtacgactcttccaggctgaggactcaccagtggatgggcagggccgctgcctagccctgttagagctgctgacagtgctgcctgaggagttccagaccagtcgcctaccccagtaccgcaaaggcctggtgcggaccagcctggcggtggaatgtggggctgtcttcccgctgctggagcagctgctacagcagcccagctcacccagctgtgtgcgtcagaaggtgctcaagtgtttctccagctgggtgcagctggaggtgccgctgcaggactgtgaggcgctcattcaggctgcctttgctgctctgcaggactcggagctcttcgacagcagtgtggaggccattgtgaatgccatctcacagcctgatgcccagaggtacgtgaacacactcctgaaactcatcccgctggtgctgggtctgcaggaacaactgcggcaggcagtgcagaatggggacatggagacctcccatggcatctgtcgcatcgctgtggccctgggcgagaaccactcccgggccttgctggaccaagtagagcactggcagagtttcctggcactcgtcaacatgattatgttctgcacaggcatccctggccactatcctgtcaatgagaccaccagctccctaaccctcaccttctggtacacactgcaggatgatattctatcctttgaggcagagaagcaggctgtataccagcaggtgtaccggccagtctacttccagctggtggatgtgcttctgcacaaggcccagttcccttctgatgaggaatatggattctggtcctcagacgagaaggagcagttccgaatttacagggtggacatctcagacacgctcatgtatgtctatgagatgttgggggccgagctgctcagcaacctctatgacaagctgggtcgtttgctcaccagctcagaggagccctactcctggcagcacacagaggccctcctctacggcttccaatccatcgcagagaccattgacgtcaactattctgatgtggtgcctgggctcattggcctcatcccacggatcagcatcagcaacgtgcagctggcagacactgtcatgttcaccattggagctctgtctgaatggctggctgaccaccccgtcatgatcaacagtgttctgcccttggtactgcatgccctaggcaatcctgagctgtctgtctcttctgtgtccaccctcaagaagatctgccgagagtgcaagtatgacctgcctccctatgctgccaacattgtggctgtgtcccaggatgtgctgatgaaacagatccacaagacaagccagtgcatgtggctgatgcaggcgctgggcttcctgctgtcagctcttcaagtggaggagatccttaagaacctgcactcgcttatctcaccctatatccagcaactggagaagctggcagaggagatacccaatccctccaacaagctggccattgttcacatcttggggcttctctccaacctcttcaccacactggacatcagtcatcatgaggatgatcatgaaggccctgagcttcggaagctgccagtgccacagggacccaaccccgtggtggtggtgctgcagcaggtcttccagcttatccagaaggtgctgagcaaatggttgaatgatgcccaggttgtggaggcggtgtgcgctatctttgagaagtctgttaagacgctgctggatgactttgcccccatggtgccacagctgtgtgagatgctgggtcggatgtacagcaccatcccccaggcctctgctcttgacctcactcgacagctggtccacatctttgctcatgagcctgcccactttcccccaattgaggccctcttcctgctcgtcacctccgtcacactcactctcttccagcaagggcccagggatcatcctgatattgttgattcatttatgcaactcctggcacaggctctgaagcggaagccagatttgttcctgtgtgaacgattggatgtcaaagctgtgttccagtgtgctgtgctggccctcaagttccctgaggcacctactgtcaaggcctcctgtggcttctttacagagctgctgcctcggtgtggggaagtagagtctgtgggaaaggtggtacaggaagacggtcgtatgctgctcatagcagtgctggaggccattgggggccaggcctcccgcagcctcatggactgctttgccgatatcctgttcgccctgaacaagcactgcttcagcctcctgagcatgtggatcaaggaggccctgcagccacctggtttcccctctgcccgcctcagccctgaacagaaggataccttcagccagcagatccttcgcgagcgagtgaacaagaggcgggtgaaggagatggtgaaggagttcacactgctgtgccggggtctccatggcacagattacacagctgactactgaggggtgcccccatcccatccaccccttctcttcatccttccctattcccaaagagtaaacctggaccctca

SEQ ID NO: 346799 - DNA, 2481 bp, Homo sapiens
cacttttaagaccgctccactcatctcagcactctagaatcccctgacagctgatcccagaggtacgtgaacacactcctgaaactcatcccgctggtgctgggtctgcaggaacaactgcggcaggcagtgcagaatggggacatggagacctcccatggcatctgtcgcatcgctgtggccctgggcgagaaccactcccgggccttgctggaccaagtagagcactggcagagtttcctggcactcgtcaacatgattatgttctgcacaggcatccctggccactatcctgtcaatgagaccaccagctccctaaccctcaccttctggtacacactgcaggatgatattctatcctttgaggcagagaagcaggctgtataccagcaggtgtaccggccagtctacttccagctggtggatgtgcttctgcacaaggcccagttcccttctgatgaggaatatggattctggtcctcagacgagaaggagcagttccgaatttacagggtggacatctcagacacgctcatgtatgtctatgagatgttgggggccgagctgctcagcaacctctatgacaagctgggtcgtttgctcaccagctcagaggagccctactcctggcagcacacagaggccctcctctacggcttccaatccatcgcagagaccattgacgtcaactattctgatgtggtgcctgggctcattggcctcatcccacggatcagcatcagcaacgtgcagctggcagacactgtcatgttcaccattggagctctgtctgaatggctggctgaccaccccgtcatgatcaacagtgttctgcccttggtactgcatgccctaggcaatcctgagctgtctgtctcttctgtgtccaccctcaagaagatctgccgagagtgcaagtatgacctgcctccctatgctgccaacattgtggctgtgtcccaggatgtgctgatgaaacagatccacaagacaagccagtgcatgtggctgatgcaggcgctgggcttcctgctgtcagctcttcaagtggaggagatccttaagaacctgcactcgcttatctcaccctatatccagcaactggagaagctggcagaggagatacccaatccctccaacaagctggccattgttcacatcttggggcttctctccaacctcttcaccacactggacatcagtcatcatgaggatgatcatgaaggccctgagcttcggaagctgccagtgccacagggacccaaccccgtggtggtggtgctgcagcaggtcttccagcttatccagaaggtgctgagcaaatggttgaatgatgcccaggttgtggaggcggtgtgcgctatctttgagaagtctgttaagacgctgctggatgactttgcccccatggtgccacagctgtgtgagatgctgggtcggatgtacagcaccatcccccaggcctctgctcttgacctcactcgacagctggtccacatctttgctcatgagcctgcccactttcccccaattgaggccctcttcctgctcgtcacctccgtcacactcactctcttccagcaagggcccagggatcatcctgatattgttgattcatttatgcaactcctggcacaggctctgaagcggaagccagatttgttcctgtgtgaacgattggatgtcaaagctgtgttccagtgtgctgtgctggccctcaagttccctgaggcacctactgtcaaggcctcctgtggcttctttacagagctgctgcctcggtgtggggaagtagagtctgtgggaaaggtggtacaggaagacggtcgtatgctgctcatagcagtgctggaggccattgggggccaggcctcccgcagcctcatggactgctttgccgatatcctgttcgccctgaacaagcactgcttcagcctcctgagcatgtggatcaaggaggccctgcagccacctggtttcccctctgcccgcctcagccctgaacagaaggataccttcagccagcagatccttcgcgagcgagtgaacaagaggcgggtgaaggagatggtgaaggagttcacactgctgtgccggggtctccatggcacagattacacagctgactactgaggggtgcccccatcccatccaccccttctcttcatccttccctattcccaaagagtaaacctggaccctcactgctgtctctgcctcctttctgctgtcaccaccacctaactgaaagcctgggtccagaaggcctgggggaaggatgggaggatgcttggacccaggccttgggagggaatggtgggaacatcctctagctcccaggttggaagagatactactgtagccaagccacctaggctggagcccttcagaatactgtcattgtccttggggcggggtggttgcagtagtgtcatcaacccccccatccccattaaattaatcccaacatgcaaaaaaaaa

SEQ ID NO: 346800 - DNA, 2055 bp, Homo sapiens
ggggtactggggtaggctcctgggcttgggggcaggatccagggtcaggatccaggcagtataaaaggccttcatctgcttctcagggtggacatctcagacacgctcatgtatgtctatgagatgttgggggccgagctgctcagcaacctctatgacaagctgggtcgtttgctcaccagctcagaggagccctactcctggcagcacacagaggccctcctctacggcttccaatccatcgcagagaccattgacgtcaactattctgatgtggtgcctgggctcattggcctcatcccacggatcagcatcagcaacgtgcagctggcagacactgtcatgttcaccattggagctctgtctgaatggctggctgaccaccccgtcatgatcaacagtgttctgcccttggtactgcatgccctaggcaatcctgagctgtctgtctcttctgtgtccaccctcaagaagatctgccgagagtgcaagtatgacctgcctccctatgctgccaacattgtggctgtgtcccaggatgtgctgatgaaacagatccacaagacaagccagtgcatgtggctgatgcaggcgctgggcttcctgctgtcagctcttcaagtggaggagatccttaagaacctgcactcgcttatctcaccctatatccagcaactggagaagctggcagaggagatacccaatccctccaacaagctggccattgttcacatcttggggcttctctccaacctcttcaccacactggacatcagtcatcatgaggatgatcatgaaggccctgagcttcggaagctgccagtgccacagggacccaaccccgtggtggtggtgctgcagcaggtcttccagcttatccagaaggtgctgagcaaatggttgaatgatgcccaggttgtggaggcggtgtgcgctatctttgagaagtctgttaagacgctgctggatgactttgcccccatggtgccacagctgtgtgagatgctgggtcggatgtacagcaccatcccccaggcctctgctcttgacctcactcgacagctggtccacatctttgctcatgagcctgcccactttcccccaattgaggccctcttcctgctcgtcacctccgtcacactcactctcttccagcaagggcccagggatcatcctgatattgttgattcatttatgcaactcctggcacaggctctgaagcggaagccagatttgttcctgtgtgaacgattggatgtcaaagctgtgttccagtgtgctgtgctggccctcaagttccctgaggcacctactgtcaaggcctcctgtggcttctttacagagctgctgcctcggtgtggggaagtagagtctgtgggaaaggtggtacaggaagacggtcgtatgctgctcatagcagtgctggaggccattgggggccaggcctcccgcagcctcatggactgctttgccgatatcctgttcgccctgaacaagcactgcttcagcctcctgagcatgtggatcaaggaggccctgcagccacctggtttcccctctgcccgcctcagccctgaacagaaggataccttcagccagcagatccttcgcgagcgagtgaacaagaggcgggtgaaggagatggtgaaggagttcacactgctgtgccggggtctccatggcacagattacacagctgactactgaggggtgcccccatcccatccaccccttctcttcatccttccctattcccaaagagtaaacctggaccctcactgctgtctctgcctcctttctgctgtcaccaccacctaactgaaagcctgggtccagaaggcctgggggaaggatgggaggatgcttggacccaggccttgggagggaatggtgggaacatcctctagctcccaggttggaagagatactactgtagccaagccacctaggctggagcccttcagaatactgtcattgtccttggggcggggtggttgcagtagtgtcatcaacccccccatccccattaaattaatcccaacatgcaaaaaaaaa

SEQ ID NO: 346801 - DNA, 1547 bp, Homo sapiens
ccacgcgtcggggaagtggacctcccaggatgtgcgtgatgaaacagatccacaagacaagccagtgcatgtggctgatgcaggcgctgggcttcctgctgtcagctcttcaagtggaggagatccttaagaacctgcactcgcttatctcaccctatatccagcaactggagaagctggcagaggagatacccaatccctccaacaagctggccattgttcacatcttggggcttctctccaacctcttcaccacactggacatcagtcatcatgaggatgatcatgaaggccctgagcttcggaagctgccagtgccacagggacccaaccccgtggtggtggtgctgcagcaggtcttccagcttatccagaaggtgctgagcaaatggttgaatgatgcccaggttgtggaggcggtgtgcgctatctttgagaagtctgttaagacgctgctggatgactttgcccccatggtgccacagctgtgtgagatgctgggtcggatgtacagcaccatcccccaggcctctgctcttgacctcactcgacagctggtccacatctttgctcatgagcctgcccactttcccccaattgaggccctcttcctgctcgtcacctccgtcacactcactctcttccagcaagggcccagggatcatcctgatattgttgattcatttatgcaactcctggcacaggctctgaagcggaagccagatttgttcctgtgtgaacgattggatgtcaaagctgtgttccagtgtgctgtgctggccctcaagttccctgaggcacctactgtcaaggcctcctgtggcttctttacagagctgctgcctcggtgtggggaagtagagtctgtgggaaaggtggtacaggaagacggtcgtatgctgctcatagcagtgctggaggccattgggggccaggcctcccgcagcctcatggactgctttgccgatatcctgttcgccctgaacaagcactgcttcagcctcctgagcatgtggatcaaggaggccctgcagccacctggtttcccctctgcccgcctcagccctgaacagaaggataccttcagccagcagatccttcgcgagcgagtgaacaagaggcgggtgaaggagatggtgaaggagttcacactgctgtgccggggtctccatggcacagattacacagctgactactgaggggtgcccccatcccatccaccccttctcttcatccttccctattcccaaagagtaaacctggaccctcactgctgtctctgcctcctttctgctgtcaccaccacctaactgaaagcctgggtccagaaggcctgggggaaggatgggaggatgcttggacccaggccttgggagggaatggtgggaacatcctctagctcccaggttggaagagatactactgtagccaagccacctaggctggagcccttcagaatactgtcattgtccttggggcggggtggttgcagtagtgtcatcaacccccccatccccattaaattaatcccaacatgcaaaaaaaaa

SEQ ID NO: 346802 - DNA, 1611 bp, Homo sapiens
  misc_feature (13)..(13): n is a, c, g, or t
  misc_feature (81)..(81): n is a, c, g, or t
  misc_feature (106)..(107): n is a, c, g, or t
  misc_feature (112)..(112): n is a, c, g, or t
cccaaagaaaganccttcccgagagttcccaaagtatttgaccctcccctcccctattccttccccaacatttttggcctnttgtccccaggatgttcttgttganncaganccaccaagacaagccagtgcatgtggctgatgcaggcgctgggcttcctgctgtcagctcttcaagtggaggagatccttaagaacctgcactcgcttatctcaccctatatccagcaactggagaagctggcagaggagatacccaatccctccaacaagctggccattgttcacatcttggggcttctctccaacctcttcaccacactggacatcagtcatcatgaggatgatcatgaaggccctgagcttcggaagctgccagtgccacagggacccaaccccgtggtggtggtgctgcagcaggtcttccagcttatccagaaggtgctgagcaaatggttgaatgatgcccaggttgtggaggcggtgtgcgctatctttgagaagtctgttaagacgctgctggatgactttgcccccatggtgccacagctgtgtgagatgctgggtcggatgtacagcaccatcccccaggcctctgctcttgacctcactcgacagctggtccacatctttgctcatgagcctgcccactttcccccaattgaggccctcttcctgctcgtcacctccgtcacactcactctcttccagcaagggcccagggatcatcctgatattgttgattcatttatgcaactcctggcacaggctctgaagcggaagccagatttgttcctgtgtgaacgattggatgtcaaagctgtgttccagtgtgctgtgctggccctcaagttccctgaggcacctactgtcaaggcctcctgtggcttctttacagagctgctgcctcggtgtggggaagtagagtctgtgggaaaggtggtacaggaagacggtcgtatgctgctcatagcagtgctggaggccattgggggccaggcctcccgcagcctcatggactgctttgccgatatcctgttcgccctgaacaagcactgcttcagcctcctgagcatgtggatcaaggaggccctgcagccacctggtttcccctctgcccgcctcagccctgaacagaaggataccttcagccagcagatccttcgcgagcgagtgaacaagaggcgggtgaaggagatggtgaaggagttcacactgctgtgccggggtctccatggcacagattacacagctgactactgaggggtgcccccatcccatccaccccttctcttcatccttccctattcccaaagagtaaacctggaccctcactgctgtctctgcctcctttctgctgtcaccaccacctaactgaaagcctgggtccagaaggcctgggggaaggatgggaggatgcttggacccaggccttgggagggaatggtgggaacatcctctagctcccaggttggaagagatactactgtagccaagccacctaggctggagcccttcagaatactgtcattgtccttggggcggggtggttgcagtagtgtcatcaacccccccatccccattaaattaatcccaacatgcaaaaaaaaa

SEQ ID NO: 346803 - DNA, 632 bp, Homo sapiens
tgtgcttctgcacaaggcccagttcccttctgatgaggaatatggattctggtcctcagacgagaaggagcagttccgaatttacaggtgatggtagcaggccaactcctctaaaatggagtccagaaataatgaaggcaatgagggaaggggcccaagtccaggctttctgaattttggtgctcctttctgttttctaggtattgttgcagagttgtgggggtactggggtaggctcctgggcttgggggcaggatccagggtcaggatccaggcagtataaaaggccttcatctgcttctcagggtggacatctcagacacgctcatgtatgtctatgagatgttgggggccgagctgctcagcaacctctatgacaagctgggtcgtttgctcaccagctcagaggagccctactcctggcaggtacctcccaagcctgattccctcagccttcccagacctgtcacaccctcctcctcatccaagccagtggcaccctctttccccagcacacagaggccctcctctacggcttccaatccatcgcagagaccattgacgtcaactattctgatgtggtgcctgggctcattggcctcatcccacggatcagcatcagcaacgtgcag

SEQ ID NO: 346804 - DNA, 4043 bp, Homo sapiens
ttccgcgcagttccgctgggccgtgccggcctgtaccgggccgtgccgagccagaactggcaggagtgggggcctgagttggaggtgccggggacaggcgctcggggcagcccgcgccttgccgaggtccctgccccgtcccggccggcctggcttgtcttgtcagtcactggggcggaggcagcggctgtagcggggctgtagccgggcgttgagcacagcgcgggccaggccgaacggaagggacctgccacagcccctcaactccacggactcttcgccctagactagcggagctgcatctccgcgcttcgttggacgcctccgtaaccacgaagggctctctctctcccgtgaccctccagccccatgacctgttcatagcagccgagagctcacccaggcgggggtgttgtgggtacaggccatcgaccctgtgacccctcaagagccagggactcggtttcccccgcaggcctccctcccctgtgactccctccacacagattctggggacagagctgttacctgccactaggatccccgcctgagagctcctcactgacggctccctcctcggagtccccttcattgggtctcctaagagcaccaattttggtctctggcaagcctcccacccccaaacgaggtggggaggcctcggcagccatgcccgccctgggccccccctcaccccaccactccctgggcacccaagccggggtctagcagggggccagcagccaaggggctggggcaggagacagatcagggcccacctccctgccagggagggagcaaagatggagcggcgggaggagcagccgggggctgcaggggctggagcagcaccagccttggacttcactgtggagaacgtggagaaggcgctgcaccagctctactatgatcccaacattgagaataagaacctggctcagaagtggctgatgcaggcccaggtctccccacaggcctggcacttcagctggcagctactgcagcccgacaaggtaccagagatccagtactttggggccagtgctcttcacatcaagatctctcgctactggagtgacatccccactgaccagtatgaaagcctaaaggcacagctcttcacccagatcacccgctttgccagtggctccaagattgtactgactcggctgtgcgtggcactggcctcactggctctcagcatgatgcctgatgcttggccatgtgctgtggcagatatggtacgactcttccaggctgaggactcaccagtggatgggcagggccgctgcctagccctgttagagctgctgacagtgctgcctgaggagttccagaccagtcgcctaccccagtaccgcaaaggcctggtgcggaccagcctggcggtggaatgtggggctgtcttcccgctgctggagcagctgctacagcagcccagctcacccagctgtgtgcgtcagaaggtgctcaagtgtttctccagctgggtgcagctggaggtgccgctgcaggactgtgaggcgctcattcaggctgcctttgctgctctgcaggactcggagctcttcgacagcagtgtggaggccattgtgaatgccatctcacagcctgatgcccagaggtacgtgaacacactcctgaaactcatcccgctggtgctgggtctgcaggaacaactgcggcaggcagtgcagaatggggacatggagacctcccatggcatctgtcgcatcgctgtggccctgggcgagaaccactcccgggccttgctggaccaagtagagcactggcagagtttcctggcactcgtcaacatgattatgttctgcacaggcatccctggccactatcctgtcaatgagaccaccagctccctaaccctcaccttctggtacacactgcaggatgatattctatcctttgaggcagagaagcaggctgtataccagcaggtgtaccggccagtctacttccagctggtggatgtgcttctgcacaaggcccagttcccttctgatgaggaatatggattctggtcctcagacgagaaggagcagttccgaatttacagggtggacatctcagacacgctcatgtatgtctatgagatgttgggggccgagctgctcagcaacctctatgacaagctgggtcgtttgctcaccagctcagaggagccctactcctggcagcacacagaggccctcctctacggcttccaatccatcgcagagaccattgacgtcaactattctgatgtggtgcctgggctcattggcctcatcccacggatcagcatcagcaacgtgcagctggcagacactgtcatgttcaccattggagctctgtctgaatggctggctgaccaccccgtcatgatcaacagtgttctgcccttggtactgcatgccctaggcaatcctgagctgtctgtctcttctgtgtccaccctcaagaagatctgccgagagtgcaagtatgacctgcctccctatgctgccaacattgtggctgtgtcccaggatgtgctgatgaaacagatccacaagacaagccagtgcatgtggctgatgcaggcgctgggcttcctgctgtcagctcttcaagtggaggagatccttaagaacctgcactcgcttatctcaccctatatccagcaactggagaagctggcagaggagatacccaatccctccaacaagctggccattgttcacatcttggggcttctctccaacctcttcaccacactggacatcagtcatcatgaggatgatcatgaaggccctgagcttcggaagctgccagtgccacagggacccaaccccgtggtggtggtgctgcagcaggtcttccagcttatccagaaggtgctgagcaaatggttgaatgatgcccaggttgtggaggcggtgtgcgctatctttgagaagtctgttaagacgctgctggatgactttgcccccatggtgccacagctgtgtgagatgctgggtcggatgtacagcaccatcccccaggcctctgctcttgacctcactcgacagctggtccacatctttgctcatgagcctgcccactttcccccaattgaggccctcttcctgctcgtcacctccgtcacactcactctcttccagcaagggcccagggatcatcctgatattgttgattcatttatgcaactcctggcacaggctctgaagcggaagccagatttgttcctgtgtgaacgattggatgtcaaagctgtgttccagtgtgctgtgctggccctcaagttccctgaggcacctactgtcaaggcctcctgtggcttctttacagagctgctgcctcggtgtggggaagtagagtctgtgggaaaggtggtacaggaagacggtcgtatgctgctcatagcagtgctggaggccattgggggccaggcctcccgcagcctcatggactgctttgccgatatcctgttcgccctgaacaagcactgcttcagcctcctgagcatgtggatcaaggaggccctgcagccacctggtttcccctctgcccgcctcagccctgaacagaaggataccttcagccagcagatccttcgcgagcgagtgaacaagaggcgggtgaaggagatggtgaaggagttcacactgctgtgccggggtctccatggcacagattacacagctgactactgaggggtgcccccatcccatccaccccttctcttcatccttccctattcccaaagagtaaacctggaccctcactgctgtctctgcctcctttctgctgtcaccaccacctaactgaaagcctgggtccagaaggcctgggggaaggatgggaggatgcttggacccaggccttgggagggaatggtgggaacatcctctagctcccaggttggaagagatactactgtagccaagccacctaggctggagcccttcagaatactgtcattgtccttggggcggggtggttgcagtagtgtcatcaacccccccatccccattaaattaatcccaacatgcaaaaaaaaa

SEQ ID NO: 346805 - DNA, 569 bp, Homo sapiens
ttccgcgcagttccgctgggccgtgccggcctgtaccgggccgtgccgagccagaactggcaggagtgggggcctgagttggaggtgccggggacaggcgctcggggcagcccgcgccttgccgaggtccctgccccgtcccggccggcctggcttgtcttgtcagtcactggggcggaggcagcggctgtagcggggctgtagccgggcgttgagcacagcgcgggccaggccgaacggaagggacctgccacagcccctcaactccacggactcttcgccctagactagcggagctgcatctccgcgcttcgttggacgcctccgtaaccacgaagggctctctctctcccgtgaccctccagccccatgacctgttcatagcagccgagaagctcctcactgacggctccctcctcggagtccccttcattgggtctcctaagagcaccaattttggtctctggcaagcctcccacccccaaacgaggtggggaggcctcggcagccatgcccgccctgggcccccccccatccccattaaattaatcccaacatgcaaaaaaaaa

SEQ ID NO: 346806 - DNA, 4050 bp, Homo sapiens
ttccgcgcagttccgctgggccgtgccggcctgtaccgggccgtgccgagccagaactggcaggagtgggggcctgagttggaggtgccggggacaggcgctcggggcagcccgcgccttgccgaggtccctgccccgtcccggccggcctggcttgtcttgtcagtcactggggcggaggcagcggctgtagcggggctgtagccgggcgttgagcacagcgcgggccaggccgaacggaagggacctgccacagcccctcaactccacggactcttcgccctagactagcggagctgcatctccgcgcttcgttggacgcctccgtaaccacgaagggctctctctctcccgtgaccctccagccccatgacctgttcatagcagccgagagctcacccaggcgggggtgttgtgggtacaggccatcgaccctgtgacccctcaagagccagggactcggtttcccccgcaggcctccctcccctgtgactccctccacacagattctggggacagagctgttacctgccactaggatccccgcctgagagctcctcactgacggctccctcctcggagtccccttcattgggtctcctaagagcaccaattttggtctctggcaagcctcccacccccaaacgaggtggggaggcctcggcagccatgcccgccctgggccccccctcaccccaccactccctgggcacccaagccggggtctagcagggggccagcagccaaggggctggggcaggagacagatcagggcccacctccctgccagggagggagcaaagatggagcggcgggaggagcagccgggggctgcaggggctggagcagcaccagccttggacttcactgtggagaacgtggagaaggcgctgcaccagctctactatgatcccaacattgagaataagaacctggctcagaagtggctgatgcaggcccaggtctccccacaggcctggcacttcagctggcagctactgcagcccgacaaggtaccagagatccagtactttggggccagtgctcttcacatcaagatctctcgctactggagtgacatccccactgaccagtatgaaagcctaaaggcacagctcttcacccagatcacccgctttgccagtggctccaagattgtactgactcggctgtgcgtggcactggcctcactggctctcagcatgatgcctgatgcttggccatgtgctgtggcagatatggtacgactcttccaggctgaggactcaccagtggatgggcagggccgctgcctagccctgttagagctgctgacagtgctgcctgaggagttccagaccagtcgcctaccccagtaccgcaaaggcctggtgcggaccagcctggcggtggaatgtggggctgtcttcccgctgctggagcagctgctacagcagcccagctcacccagctgtgtgcgtcagaaggtgctcaagtgtttctccagctgggtgcagctggaggtgccgctgcaggactgtgaggcgctcattcaggctgcctttgctgctctgcaggactcggagctcttcgacagcagtgtggaggccattgtgaatgccatctcacagcctgatgcccagaggtacgtgaacacactcctgaaactcatcccgctggtgctgggtctgcaggaacaactgcggcaggcagtgcagaatggggacatggagacctcccatggcatctgtcgcatcgctgtggccctgggcgagaaccactcccgggccttgctggaccaagtagagcactggcagagtttcctggcactcgtcaacatgattatgttctgcacaggcatccctggccactatcctgtcaatgagaccaccagctccctaaccctcaccttctggtacacactgcaggatgatattctatcctttgaggcagagaagcaggctgtataccagcaggtgtaccggccagtctacttccagctggtggatgtgcttctgcacaaggcccagttcccttctgatgaggaatatggattctggtcctcagacgagaaggagcagttccgaatttacagggtggacatctcagacacgctcatgtatgtctatgagatgttgggggccgagctgctcagcaacctctatgacaagctgggtcgtttgctcaccagctcagaggagccctactcctggcagcacacagaggccctcctctacggcttccaatccatcgcagagaccattgacgtcaactattctgatgtggtgcctgggctcattggcctcatcccacggatcagcatcagcaacgtgcagctggcagacactgtcatgttcaccattggagctctgtctgaatggctggctgaccaccccgtcatgatcaacagtgttctgcccttggtactgcatgccctaggcaatcctgagctgtctgtctcttctgtgtccaccctcaagaagatctgccgagagtgcaagtatgacctgcctccctatgctgccaacattgtggctgtgtcccaggatgtgctgatgaaacagatccacaagacaagccagtgcatgtggctgatgcaggcgctgggcttcctgctgtcagctcttcaagtggaggagatccttaagaacctgcactcgcttatctcaccctatatccagcaactggagaagctggcagaggagataccaatccctccaacaagcgggggtgggaggagaatcctggggtgagtggaaggggggatggtgggggggtgggggggttgggggggtgggagggtggtggagtgtgtggatgggggttggggggggggggttatgtggcgagatggtgtggggggtggggttgtggggagggggcattcagcttatccagaaggtgctgagcaaatggttgaatgatgcccaggttgtggaggcggtgtgcgctatctttgagaagtctgttaagacgctgctggatgactttgcccccatggtgccacagctgtgtgagatgctgggtcggatgtacagcaccatcccccaggcctctgctcttgacctcactcgacagctggtccacatctttgctcatgagcctgcccactttcccccaattgaggccctcttcctgctcgtcacctccgtcacactcactctcttccagcaagggcccagggatcatcctgatattgttgattcatttatgcaactcctggcacaggctctgaagcggaagccagatttgttcctgtgtgaacgattggatgtcaaagctgtgttccagtgtgctgtgctggccctcaagttccctgaggcacctactgtcaaggcctcctgtggcttctttacagagctgctgcctcggtgtggggaagtagagtctgtgggaaaggtggtacaggaagacggtcgtatgctgctcatagcagtgctggaggccattgggggccaggcctcccgcagcctcatggactgctttgccgatatcctgttcgccctgaacaagcactgcttcagcctcctgagcatgtggatcaaggaggccctgcagccacctggtttcccctctgcccgcctcagccctgaacagaaggataccttcagccagcagatccttcgcgagcgagtgaacaagaggcgggtgaaggagatggtgaaggagttcacactgctgtgccggggtctccatggcacagattacacagctgactactgaggggtgcccccatcccatccaccccttctcttcatccttccctattcccaaagagtaaacctggaccctcactgctgtctctgcctcctttctgctgtcaccaccacctaactgaaagcctgggtccagaaggcctgggggaaggatgggaggatgcttggacccaggccttgggagggaatggtgggaacatcctctagctcccaggttggaagagatactactgtagccaagccacctaggctggagcccttcagaatactgtcattgtccttggggcggggtggttgcagtagtgtcatcaacccccccatccccattaaattaatcccaacatgcaaaaaaaaa

SEQ ID NO: 346807 - DNA, 3404 bp, Homo sapiens
ttccgcgcagttccgctgggccgtgccggcctgtaccgggccgtgccgagccagaactggcaggagtgggggcctgagttggaggtgccggggacaggcgctcggggcagcccgcgccttgccgaggtccctgccccgtcccggccggcctggcttgtcttgtcagtcactggggcggaggcagcggctgtagcggggctgtagccgggcgttgagcacagcgcgggccaggccgaacggaagggacctgccacagcccctcaactccacggactcttcgccctagactagcggagctgcatctccgcgcttcgttggacgcctccgtaaccacgaagggctctctctctcccgtgaccctccagccccatgacctgttcatagcagccgagagctcacccaggcgggggtgttgtgggtacaggccatcgaccctgtgacccctcaagagccagggactcggtttcccccgcaggcctccctcccctgtgactccctccacacagattctggggacagagctgttacctgccactaggatccccgcctgagagctcctcactgacggctccctcctcggagtccccttcattgggtctcctaagagcaccaattttggtctctggcaagcctcccacccccaaacgaggtggggaggcctcggcagccatgcccgccctgggccccccctcaccccaccactccctgggcacccaagccggggtctagcagggggccagcagccaaggggctggggcaggagacagatcagggcccacctccctgccagggagggagcaaagatggagcggcgggaggagcagccgggggctgcaggggctggagcagcaccagccttggacttcactgtggagaacgtggagaaggcgctgcaccagctctactatgatcccaacattgagaataagaacctggctcagaagtggctgatgcaggcccaggtctccccacaggcctggcacttcagctggcagctactgcagcccgacaaggtaccagagatccagtactttggggccagtgctcttcacatcaagatctctcgctactggagtgacatccccactgaccagtatgaaagcctaaaggcacagctcttcacccagatcacccgctttgccagtggctccaagattgtactgactcggctgtgcgtggcactggcctcactggctctcagcatgatgcctgatgcttggccatgtgctgtggcagatatggtacgactcttccaggctgaggactcaccagtggatgggcagggccgctgcctagccctgttagagctgctgacagtgctgcctgaggagttccagaccagtcgcctaccccagtaccgcaaaggcctggtgcggaccagcctggcggtggaatgtggggctgtcttcccgctgctggagcagctgctacagcagcccagctcacccagctgtgtgcgtcagaaggtgctcaagtgtttctccagctgggtgcagctggaggtgccgctgcaggactgtgaggcgctcattcaggctgcctttgctgctctgcaggactcggagctcttcgacagcagtgtggaggccattgtgaatgccatctcacagcctgatgcccagaggtacgtgaacacactcctgaaactcatcccgctggtgctgggtctgcaggaacaactgcggcaggcagtgcagaatggggacatggagacctcccatggcatctgtcgcatcgctgtggccctgggcgagaaccactcccgggccttgctggaccaagtagagcactggcagagtttcctggcactcgtcaacatgattatgttctgcacaggcatccctggccactatcctgtcaatgagaccaccagctccctaaccctcaccttctggtacacactgcaggatgatattctatcctttgaggcagagaagcaggctgtataccagcaggtgtaccggccagtctacttccagctggtggatgtgcttctgcacaaggcccagttcccttctgatgaggaatatggattctggtcctcagacgagaaggagcagttccgaatttacagggtggacatctcagacacgctcatgtatgtctatgagatgttgggggccgagctgctcagcaacctctatgacaagctgggtcgtttgctcaccagctcagaggagccctactcctggcagcacacagaggccctcctctacggcttccaatccatcgcagagaccattgacgtcaactattctgatgtggtgcctgggctcattggcctcatcccacggatcagcatcagcaacgtgcagctggcagacactgtcatgttcaccattggagctctgtctgaatggctggctgaccaccccgtcatgatcaacagtgttctgcccttggtactgcatgccctaggcaatcctgagctgtctgtctcttctgtgtccaccctcaagaagatctgccgagagtgcaagtatgacctgcctccctatgctgccaacattgtggctgtgtcccaggatgtgctgatgaaacagatccacaagacaagccagtgcatgtggctgatgcaggcgctgggcttcctgctgtcagctcttcaagtggaggagatccttaagaacctgcactcgcttatctcaccctatatccagcaactggagaagctggcagaggagatacccaatccctccaacaagctggccattgttcacatcttggggcttctctccaacctcttcaccacactggacatcagtcatcatgaggatgatcatgaaggccctgagcttcggaagctgccagtgccacagggacccaaccccgtggtggtggtgctgcagcaggtcttccagcttatccagaaggtgctgagcaaatggttgaatgatgcccaggttgtggaggcggtgtgcgctatctttgagaagtctgttaagacgctgctggatgactttgcccccatggtgccacagctgtgtgagatgctgggtcggatgtacagcaccatcccccaggcctctgctcttgacctcactcgacagctggtccacatctttgctcatgagcctgcccactttcccccaattgaggccctcttcctgctcgtcacctccgtcacactcactctcttccagcaaggccaggatcatcctgatatgtagattccttatgcaattctggcaaagctctgaagcggagccaaatgtcccgtgtgaagatggttgtaagtgggtctccggttggaggggcctccagtcccgggcacaacgctaggccctggagtttgcatggggaccgcccgaccaggaaggctgcatctgcccgcaaaggtagctagtgaaaaagaaaacactccagcgacaaaaagtaaattagactagtagaggagccgacaa

SEQ ID NO: 346808 - DNA, 1692 bp, Homo sapiens
agggtaaaacgactaccgatggagcccaagttttgcacagggctgcccctggagctaaaaaccctaggcaatcctgagctgtctgtctcttctgtgtccaccctcaagaagatctgccgagagtgcaagtatgacctgcctccctatgctgccaacattgtggctgtgtcccaggatgtgctgatgaaacagatccacaagacaagccagtgcatgtggctgatgcaggcgctgggcttcctgctgtcagctcttcaagtggaggagatccttaagaacctgcactcgcttatctcaccctatatccagcaactggagaagctggcagaggagatacccaatccctccaacaagctggccattgttcacatcttggggcttctctccaacctcttcaccacactggacatcagtcatcatgaggatgatcatgaaggccctgagcttcggaagctgccagtgccacagggacccaaccccgtggtggtggtgctgcagcaggtcttccagcttatccagaaggtgctgagcaaatggttgaatgatgcccaggttgtggaggcggtgtgcgctatctttgagaagtctgttaagacgctgctggatgactttgcccccatggtgccacagctgtgtgagatgctgggtcggatgtacagcaccatcccccaggcctctgctcttgacctcactcgacagctggtccacatctttgctcatgagcctgcccactttcccccaattgaggccctcttcctgctcgtcacctccgtcacactcactctcttccagcaagggcccagggatcatcctgatattgttgattcatttatgcaactcctggcacaggctctgaagcggaagccagatttgttcctgtgtgaacgattggatgtcaaagctgtgttccagtgtgctgtgctggccctcaagttccctgaggcacctactgtcaaggcctcctgtggcttctttacagagctgctgcctcggtgtggggaagtagagtctgtgggaaaggtggtacaggaagacggtcgtatgctgctcatagcagtgctggaggccattgggggccaggcctcccgcagcctcatggactgctttgccgatatcctgttcgccctgaacaagcactgcttcagcctcctgagcatgtggatcaaggaggccctgcagccacctggtttcccctctgcccgcctcagccctgaacagaaggataccttcagccagcagatccttcgcgagcgagtgaacaagaggcgggtgaaggagatggtgaaggagttcacactgctgtgccggggtctccatggcacagattacacagctgactactgaggggtgcccccatcccatccaccccttctcttcatccttccctattcccaaagagtaaacctggaccctcactgctgtctctgcctcctttctgctgtcaccaccacctaactgaaagcctgggtccagaaggcctgggggaaggatgggaggatgcttggacccaggccttgggagggaatggtgggaacatcctctagctcccaggttggaagagatactactgtagccaagccacctaggctggagcccttcagaatactgtcattgtccttggggcggggtggttgcagtagtgtcatcaacccccccatccccattaaattaatcccaacatgcaaaaaaaaa

SEQ ID NO: 346809 - DNA, 798 bp, Homo sapiens
gggctgcaggggctggagcagcaccagccttggacttcactgtggagaacgtggagaaggtatgagggctctggggtgggcactccagtgacagagcagaagttctggggactgtcactgatggcagagctcaggcctgggctgggtgcccgctggtatggtgcccccagagcacctggcatttgctctctttctgggcaggcagtattgcagtgccctaatgggctatttttgtctttccttacaggcaggtcccctgtggatagatactctagggtcttgggatggtcccttcagggtgctgtgacttagccttccgtccagactggctatgttccagctccatgggaactgcatgagcagtgcagtaggaaactgggaacccaggagacctgcagctcagtctcctggaattatactgatgccaaaccatcctggacctggttttgttgagccaagggctcagaaaataatctggaactaaaacaatctgggttgttttgactctttggagaagggtccttcctttattggatggaagccagaccagtcctgagcaggcaggcctggggctgtctccctttgttttgtgctgagtccaagggtcctggccctgctgggagccttacagggctcctccctactcgcctgcccacatagctccctgccatggccctcccaggctccccgactgcccagcccatctttctgaactgcctctttggttcttttctgtatctgctccctacaacttgaaatgcaggaatgcatgcaccctgggatgaatggggagatggg

SEQ ID NO: 346810 - DNA, 292 bp, Homo sapiens
tgacctgtagatctgtcagtttagcctgcagacaagaactactcctgtcctcttcactagagaaatcagaagtaatcctgaatttgttgttttgcaggtggtgttcaagaatatctctgtatgtatcttacatcaagccatctatccacaataatattagcctctttttcaaaagggggctcttcaaaagttttcattttatttagataaaattgtagatttttgcagacctggtttatcttgtctacaacttctaaatgctcattaaattcttctttgacaatttcaatct

SEQ ID NO: 346811 - DNA, 923 bp, Homo sapiens
gccttaggaaggagaggagtcagtatgggatggataagagtgaggcagaaggcagagagcctaggtctgtggttagaacaacaggtaaggctggaaagatttagctgagcaggagcatgatggagggtgggaagtcagaatcaaagaaaagggacaactgagtcagcttaggatgttcaagaagttttggtccagaatcagtcttcacctaaaaacgtttcctaagttgaagcatgagaagtagtagcccaggctgttttccattgttaaaaatggctatactgttatgcacaaaggaagtttcctttcctttcctttttcttgtaaagggttccttttaccattggcagttgcactctttggacttcctctttgttgaagttagtgatcagagaacaagatagaccctgctaaccacatttgtccgtgtgttctgcgggggttgggggggtgggggaacaattttgaagttttcatgtccatctcacacattactttggatttgaagcagtataatatttgcaatcagcttgtatgcactaagaccattgtcctctacagtgggggaaggttaagtgcagagctaaacaacacaggtggtggcttgagtaatggtagatgggtgtctggttgaagaggggtgtgagagaggaagaagataaagaatgtagtaatactgctttgtgaggaaattaaacgtttaaaaatgtgatcctcatgtctttaaattaatagatattctttttgtgtcttcacattctgaaacatttgtaaatacatagaccattgttcaagattaaatttagtctgatttaattaaatcatacttaaatgaaaatatgcccatctatttgacttcatattttggaaagaaacagcatggaatgttgacaaatatttatattgcacctataataaattat

SEQ ID NO: 346812 - DNA, 325 bp, Homo sapiens
tactgcaactccctgccaggcctcctcccttccagggccgtcggggactcactcacaggcttgcactgcagcagcctggtccctccctgagggcaaggccacagcccacaagtcccctgggtcctgtctggcacaaaactcagtaaccagaggtggcgcggcttgaacagacacctcactaccaaagtcatcaggacacttgttctttttgactcctacaaagaaattacccaaaagagatgctcccacagaaacaaaacactgcagaccatgaggcttgctggggctggtgcgatagctgccagagcgactcccagggagtcac

SEQ ID NO: 346813 - DNA, 632 bp, Homo sapiens
gatactgaggcgggtggattacctgaggccaggagttcgagatcagcctggccaacatgatgaaaacccatctctgctaaaaatacaaaaaattggctgggcttggtagcatgtgcccagctacttgggaggctgagacaggagaatcgcttgaacctgggaggcagaggttgcggttagccaagattgtgccactgcactccatgggtgacacagagagactctgtctcaaaaaaaaaaaaaaaaaagtaaatgctatgttatgtgaatttcacctcaactgaaaaaaacagggtcccagagctggtcaggggaacttggacaaaccacacaacttctgagcttccatttcctcacaatctctgcagtcacttccaactctcatttggcttattctgtgaaggataaaacagagctgacatttgttcatttgtattgattttatttacatttttcgcccaatcctgtggccccaagaagtattaactgtgcacccactacatgccaggaactgtacttggagccttctcaagagcttcttaacaatattttcattttttatattttttaatgacagggtctaactccgtcgtccaggctggagtgcagtggtgcgatcatagctcactgca

SEQ ID NO: 346814 - DNA, 686 bp, Homo sapiens
gatactgaggcgggtggattacctgaggccaggagttcgagatcagcctggccaacatgatgaaaacccatctctgctaaaaatacaaaaaattggctgggcttggtagcatgtgcccagctacttgggaggctgagacaggagaatcgcttgaacctgggaggcagaggttgcggttagccaagattgtgccactgcactccatgggtgacacagagagactctgtctcaaaaaaaaaaaaaaaaaagtaaatgctatgttatgtgaatttcacctcaactgaaaaaaacagggtcccagagctggtcaggggaacttggacaaaccacacaacttctgagcttccatttcctcacaatctctgcagtcacttccaactctcatttggcttattctgtgaaggataaaacagagctgacatttgttcatttgtattgattttatttacatttttcaaaaggaaatagatgcagatggtatagaaagtttcagtgaaatgtaaatctgatgcccaatcctgtggccccaagaagtattaactgtgcacccactacatgccaggaactgtacttggagccttctcaagagcttcttaacaatattttcattttttatattttttaatgacagggtctaactccgtcgtccaggctggagtgcagtggtgcgatcatagctcactgca

SEQ ID NO: 346815 - DNA, 322 bp, Homo sapiens
tacaaagtattatgaaagagtattttaaaatagcttaatttagattgggagggactagaggattattagggatgaaatctctaaagattatacaaagaaatttatattaggacctgaaggatgaaaacaaattagccaggaacagtggcaggaaagaggacactcaagtttagaaggtgaggaagactgtttcaggtgataaaacagcatgtaaataaatggctctgaggcgattcagaaatgaaccctcacattaacatcaactgaccacaagggtgccaagacaattcaacaggtaaagggcagtcttcaaaaaacagtg

SEQ ID NO: 346816 - DNA, 262 bp, Homo sapiens
tataggctctgtgatagatcaatagtatatgaacgaagtggcactgtgctaatttctaagctcaagtcttaagaagttagcagcttctatctctcttggggtacttcatcttggaatgcaaataccaggccatggagaagcccaaactctcccttggaaaggcagtgatggccaccaccaatttgccagccatatgattgagccatgttggaactgggtagtcagtctcttcaaagctgccccagtttatatcacattctgc

SEQ ID NO: 346817 - DNA, 887 bp, Homo sapiens
  misc_feature (479)..(479): n is a, c, g, or t
  misc_feature (489)..(489): n is a, c, g, or t
  misc_feature (508)..(508): n is a, c, g, or t
acggaagaaactttccaaccaacccacagaatcatgaactaaattaggaggtggttgtttgaagccactaaattctggggtagtatgttatgcagcagaagctaactgatacagaagtgatcactgggcatacccattctaactctgctctaaaagcaaaggaaggctttcctttgagttgtgaccataacacgctgtgggccctacattggaccaaacgttcatcctgtttgctcagagatagcctggtatatgcataaactactccttttccaagtttctgggaattgggttgaggttgctgcatctttggaagttggtctccaccactggcaggctgcctgcatcacaagatctcattactcaggagctgtccaagtgtctaatgtacttagttaagaaaaagaggctgggatgacaggcatgagccaccacacccggcccagagatgtttttagttgccattgatacatattgtntttgtcatangaaaagaacttctccttgnccattgaggctataaactatagagaaagtgataccccgggatgaaaatgggaaatgctgtatcatcatctaaactgaagtacattcgtcttccttaaatgtgaaatatatgctgaccttgaatgaagtatagtcatcagactcgcgtcatcgccattgaggcttatagacactgaggaatggaaaagtcgacggcgtcataaaactatcaggaaccggctgttgttgccaccataagttgcctgccctcaggaattagggaggccacaagtaactaacttaatgaaacgccatgattccaaattgatgggagggaggcaccggccttaacttccacctctgttaagacatccgtaggctttattgcgaactgtccctgc

SEQ ID NO: 346818 - DNA, 1872 bp, Homo sapiens
ctcccaaagtgttgggatcacaggggtgagccactgtgttcagccagaaaataatttagagaagccagaactggcttcctttggtgaaaattctttgagcagattccagactggaccttctgactgttataaataaatggtggattcccattatttgtttgtgggacagaaatattgaaggcctgtagaaccataatgccttccccttccttctgtcactcacccacttcatttctcctattaggccccttagaaagagatccctgatgccaggcacagtggcttacgcctgtaatcctagcagtttgggaggctgaggcgggtggatcacctgaggtcaggagttaaagaccagcctggccaatgcagtgaaaccccatctttactaaaaatacaaaaaaattagccaggcatggtggcgagtgcctgtaatctcagctactcaggaggctgaggcaggagaatggcgtgaacccgggaggcggagcttgcagtgagcggagatcaggccgctgcactccagcctgggcgacagagcgagactccgtctcaaaaaaaaagataaagaaagagatccctgactgcctgtatagtttgagaaccactgatcctggggcaaggactcaaagtctctggctctagaagtggctggtgtggacctcaaatggaccctgttctaagagtccaaaggacacatttcaggaagctgtgctctaagcctaaatgaccaaccttgccttcactttggacatataccatctgatcatcttcctcgatttctgttctttgctcaggccttccaatttcttcgtgggtgacccctccttaccagtgctttgctctgagtcagctcaccagacccagcaggctgccactaaaggtttattgtaaaaccttgattaattcagataaccttgaaatacttacataacatcactgacaaataggaaagggagtgcatttccattgatagagactatggctagagttactaaggtctggaaaaaaggcaggagagtgaagtatctggagacgtagggagagaaagagactggtgttaagagaaaaatcacgcctttttcctgcttgtatcttacagtggttctgccaccagtaatgcaggatcccactgatctctctgaacacattttaggacaggtccatattcgggagctgactttgtaacttcttactgtatatagtttaggttcgaatgggatcaccataggtgtgcttatgaccttaactgtaacagcgatgaaataaaaaaaatggtttagtttaataataatgttgtaagagtgtaagtaccagtagcttcatgtacattctacaaccctataataattatgctgaccgtgtaaacagctccctcgtgtagactgagactccattgccaaacatcaagcattaacagcaagtgctagaaaaatcaataagcctttacccagggaaccaaagatatgtgggttactaaaacccctaacagttgcccataaagagtaatatctcattattttaatgccaaaggaggtttttgtttcatttcctaaataataacaagatcgcatattaaaggacgagttgatggagtgataaacattcctggcagcacagacaaatcaacaagagactaaaataaaaagaaatgaaacttgcctcttggcaatctgtttagttgaatttcatagactgagtctggttcaccctggattttcttttcacacacccacacgtcccatttcatgatgacacttgtgcatctattcttcctttgatggtaattaactcttattaacattcatgaagactaagtgtgagcctctagcacagatgacatattcagacaaccacaaaaagatagggtttata

SEQ ID NO: 346819 - DNA, 1240 bp, Homo sapiens
ggagaatcacttgaacccaggtggcagagtccagtgagctgagatcacactactgcactccagcctggcgacagagtgagactctgtcaaaaaaataaagccaaattcatacagtccctgaggagtgggaactgatgcacatctcttgcatacaataagctatgcttgtgctctgaacagtgtaagattgagaattgtattcctttaaagaaagttcggcagaactgtaactgaattactaacaaggcactgagaaggcataccgtactttgtatggtatttggcgaatggcataacacatcaaaaaattggttgtatcatatgattaaattgcaacgtgatgatttcaacttggtggaagacttctgcttcgtcttggtatgtgaaaatcccctttgcttcaaacttaatacacaccaaggaaaacctgatacaagtttgcaagtgtctttgagctaatggcttttcgtgggtattaaaaagcattgggttatttatgtataattacgtagaaagaaaatgtttgttccattcaagatacggttacacaaaaagtcatctagttgtgaccttcaaattattacttatatacctacagaaaattcctataaataggctgggcacttagggaggccagggtgggcagatcacctgaggtcaggagtccaagaccagcctggccaatatggtgaaaacttgtctctacgaaaaatacaaaaattagccaggcatgttggcccatgcctgtagtcccagctactcagcaggctgaggtaggagaatcgcttgaactcgggaggggaggctgcagtgagccaagatcacacaccactgcactccagcctgggcaacaaagtgagacccccatctcaaataaggaaagaaaattcctatgaagaaacactatacctctgagtttcaataatagagatgattaacccagtttccctgcaaggatgtgctcactgtgaacagatgtagtggttaccactccagatgtctgcctagcatttgagacaacagtctctgtcacccctgcctctctctgggaacttctgccccaccaccatacagaggggcagtaggcccagccataatcaactgaaacagacacagagttatgacctgagcctaggcaattaggttttctcaggaatatggatctgggactaaagaactcagcatcttcctgtgactggagttgtagcatgtaagtacagaagctttggagtgcccagaa

SEQ ID NO: 346820 - DNA, 337 bp, Homo sapiens
ataagaggacacagtgagaagatgggggtctgctcgccaggaaggagccctcaccagcagccgcatcgctcagcaccttgatcctggacttccagcctccagagctgtgagaaacaaacctctatcatctaccagccgcccacggcgtgggatttgtgttacagcagcctgagctgacccagacgccaaggagcaacacacgcaccagggtaggctggagaaaccagaacccgggaatcccgcctccctcaacttgaaacttgggaatagtgtattctcttttcaacacttgcactagtagaaggttaattacatgaaagattaggcaaaatgtatg

SEQ ID NO: 346821 - DNA, 287 bp, Homo sapiens
attcgaagttcgagctcggtaccggcatgtgctgtaggccagcgtgaaaaggagatgcagagatgttacagagacatacaatgctcaaagatggcaatttccaaagaaagagaggtgaaggcagctcaggcagtggaatcatcaacctctaaaaagcacaatgtactgaatgtcctgaagctattggggaaaaaaaaaagatgaaaagggcaatgcagttaagtgggaaacacctgggctgggagatgcctgtgcttcttcctagctccgctggcctacagcacatg

SEQ ID NO: 346822 - DNA, 590 bp, Homo sapiens
aacatttaaggaagtttctgttttaaaccagccttggagggttttcatgacaaggaattgcacattggatgatcatttctaccttttgcaataactacttcttatttgcaagttgtgtttaagtgaacaaaggcaaggaccagatttgcctgtcttctttcaagcagatgactgagtcaatcccacattacatatgaggaaactgagacctattcaagttttgccaagtcaggatccagttcagaatcaccactgcacttatttctcacgtctctttcatcttcagtctggaacagttcttcagtctttccttaactttcatgactttacacttctattacaggccaattattttgtagaattttccttaatttgaatttgttgctttaggattagattccaattatgtattattggcaggagcatcatagaagtgatgctgtgttcttcttgctagactatcaggaggcacacgattgcaatttgtcctattactgatgatgttcattttggttacttgattaaggtggcgcctgccagatttttccactgtgaagtgacttccttttgtaactaatgaataatttgtg

SEQ ID NO: 346823 - DNA, 972 bp, Homo sapiens
atgttgaagatgacatgaagatgcagtttacagtcactgggtgcaaacaggagttaaaactgcaaagtataataaaaagcagaataaaaatgctacaataggatgcaatgacagtagactttctaaaagaaataaccatcttgtggtggcatgttagagggtaatttgagtgaggaagcctagcattaaaagagactgactaagaaactattggaataggccatgtgagatcagttcaagggcctgaaacctgcggaagagccacggaaatgaaggggaagagtgagtgagagagatgggagaggaaaatgactgtgcttggtgaccaactaggggcaacagcaaagaagtcagaggtcacacgaagctttctagtctctgcagctgtgttactatatatcaatgatcgtgacaaggaagaccaagatggaatatatgaggcaactgaaaatttgaatctagcactcagcaaatgaccattttaagaatacagcaggaccgggtgtggtggctcacacctgtaatcccagcactttgggaggccaaggcaggaggatcacctgaggttaggagttcgagaccagcctggccaacatggtgaaaccctgtctatactaaaaaatacaaaaaattagctgggtgtggtggcacgtgcctgtagtcccagctacttgcaaagctgaggcaggagaatctcttgaactgggaggtggaggttgcagtgatccaaaatcatgccattgcactccatcctgggtgacagagcaagactccataaaaaaaataaaaaaagaatacagcaggaccttttagaatgagtatttgcatgtttccaagaataactacagataagctctgtaaggaacaatgttgcaagctccggcttggacaaagtttgggtgggcttcagtgggagaggacagaaaaatggtattttttgtcactcctccatccacactctacttttctctc

SEQ ID NO: 346824 - DNA, 351 bp, Homo sapiens
tgtctgtttaaatcttttgaccacattttaatagggcaacttttctttttattattgaattatagtcctttatctattctgaatacaattccttcatcagatatgcgttctgtgaatattttttcccaggctgcagcctgcctattcatttttctactggtgtattttgtgaagttttaaaactcaatgcagtacaatttatcattttaatgggtatgtatttctgtttcctatgtaagaaatctttgcctgcccctcaaatagtgaagatagcttattttcttctagaagattgatagttttatgttttacttttaaatttataattcattttgtgtgtgtgtgtatgta

SEQ ID NO: 346825 - DNA, 403 bp, Homo sapiens
atgtatcccggaacttaaattataattaaaaaaaagagaatcaattttgtatagctacacctagcaacagtattacctagaaatagtaacattttgatgtatatccttccaaaatcatttaaatccacacacacataaacacatatgactacatacaacttatatttatcttattgatataattgactgttttcatttgtttttaaataaatgcccttgggctaggactgacttttactttttgaaacattaattcagtgttgcaagtatttactttgacatttttgcctatgaaatgtcatgtcaaatgattatgctatgacataggaacagagaatgaagaatcatagaataatagaatttaagatctaaaagagacctttgagaatattaaaatctcctt

SEQ ID NO: 346826 - DNA, 2327 bp, Homo sapiens
ggcacgaggcggcggaggcggcggcggcggcggcgatggcagcggaccctgagcgagcttgagggctcggacccagctccctcccgcgaaaccttgggcggatccggcgctgcggccccagctcgctccgctcctgctccctccccggccgctgcctgggcggaggcagaggcagaggcccgggctggccgccctgctcgtgccccagctcggccccggacggcccggctgctgtgcagagaggaggccgagtcgtgaaaagagaatactgaagaataggatctcaagatgagtaaaaagcccccaaatcgccctggaatcacttttgagattggtgctcgtttggaggcactggactacttacaaaaatggtatccatcacgaattgaaaaaattgactatgaggagggcaagatgttggtccattttgagcgctggagtcatcgttatgatgagtggatttactgggatagcaatagattgcgaccccttgagagaccagcactaagaaaagaagggctaaaagatgaggaagatttctttgattttaaagctggagaagaagttctggctcgttggacagactgtcgctattaccctgccaagattgaagcaattaacaaagaaggaacatttacagttcagttttatgatggagtaattcgttgtttaaaaagaatgcacattaaagccatgcccgaggatgctaaggggcaggattggatagctttagtcaaagcagctgctgcagctgcagccaagaacaaaacagggagtaaacctcgaaccagcgctaacagcaataaagataaggataaagatgagagaaagtggtttaaagtaccttcaaagaaggaggaaacttcaacttgtatagccacaccagacgtagagaagaaggaagatctgcctacatctagtgaaacatttggacttcatgtagagaacgttccaaagatggtctttccacagccagagagcacattatcaaacaagaggaaaaataatcaaggcaactcgtttcaggcaaagagagctcgacttaacaagattactggtttgttggcatccaaagctgttggggttgatggtgctgaaaaaaaggaagactacaatgaaacagctccaatgctggagcaggtatgaaatggtagcatttgatttttttcaaggttcccactggaatgatcacggagctctagtatctacgtaattgaaattccccttttgatcagatatgggaataggaagctaattaattgatgatatatttttaactctgccttctccaaggtatacagataactacagacttcattagtgtttgatttcatagactggcattaaagcctttgtctccaaaatttgaaggcctggagacaggcatcccagggtataagcttccagctggatcacctttaactagcttacaaaaagacccttacacaaatactttccatttgtgagttaaaacagggttttttgacatcgaataaagcttcttttgtaagaagtttcttttatattgtaacaattggtgttgttagactgactatgtgttttatgaattgatcaatgagccatacatttttgctaggatgtatattttaataactacaaaaaaagagagtttaaaaaactattaagggtctgtctttaaaccacctaatagaggaatttaaaagtgaaggttgcagttgctagattttgccttggctaccttcagattcccacaatacttgtacataatgaactgtgcatgcttttacattctctaagggcttaacttcttaggcactgtaagactataagaacgcagtaatagccataactggatttccttggttctcctgttttaaaatctgagccttaatgtagttttaatatatcctttttgtattacttttctttattagtagcctaataaagaagactttgagtatcttttgctctcctctagatgcgttttaaaaactattccaaatttaattgatattgtattgagtttttcagggttattttaggcctgatttgataacaatgcgttgttttggtgcctccattaatgttgtattaaatcaatgggtcttttaaattgattaatatgtcattgaatcataccttctgattttctgtgatcatccaacggttaagtctttgccgttattgtcaatatatcaaccaaattttaaataactttttttactgtgtattactatattcaacgtcccagatataacaatattttgtattttcaccactgtttatggtattctcagaatgcgataaatcagggacttgggtaataaaatgtttctggaaaattc

SEQ ID NO: 346827 - DNA, 5017 bp, Homo sapiens
ggcacgaggcggcggaggcggcggcggcggcggcgatggcagcggaccctgagcgagcttgagggctcggacccagctccctcccgcgaaaccttgggcggatccggcgctgcggccccagctcgctccgctcctgctccctccccggccgctgcctgggcggaggcagaggcagaggcccgggctggccgccctgctcgtgccccagctcggccccggacggcccggctgctgtgcagagaggaggccgagtcgtgaaaagagaatactgaagaataggatctcaagatgagtaaaaagcccccaaatcgccctggaatcacttttgagattggtgctcgtttggaggcactggactacttacaaaaatggtatccatcacgaattgaaaaaattgactatgaggagggcaagatgttggtccattttgagcgctggagtcatcgttatgatgagtggatttactgggatagcaatagattgcgaccccttgagagaccagcactaagaaaagaagggctaaaagatgaggaagatttctttgattttaaagctggagaagaagttctggctcgttggacagactgtcgctattaccctgccaagattgaagcaattaacaaagaaggaacatttacagttcagttttatgatggagtaattcgttgtttaaaaagaatgcacattaaagccatgcccgaggatgctaaggggcaggtgaaatcccagcatccactaagctggtgttgtcctatcgacccagctggatcgtgtaaccagtctatgggaagtgaggattggatagctttagtcaaagcagctgctgcagctgcagccaagaacaaaacagggagtaaacctcgaaccagcgctaacagcaataaagataaggataaagatgagagaaagtggtttaaagtaccttcaaagaaggaggaaacttcaacttgtatagccacaccagacgtagagaagaaggaagatctgcctacatctagtgaaacatttggacttcatgtagagaacgttccaaagatggtctttccacagccagagagcacattatcaaacaagaggaaaaataatcaaggcaactcgtttcaggcaaagagagctcgacttaacaagattactggtttgttggcatccaaagctgttggggttgatggtgctgaaaaaaaggaagactacaatgaaacagctccaatgctggagcaggcgatttcacctaaacctcaaagtcagaaaaaaaatgaagctgacattagcagttctgccaacactcagaaacctgcactgttatcctcaactttgtcttcagggaaggctcgcagcaagaaatgcaaacatgaatctggagattcttctgggtgtataaaaccccctaaatcaccactttccccagaattaatacaagtcgaggatttgacgcttgtatctcagctttcttcttcagtgataaataaaactagtcctccacagcctgtgaatccccctagacctttcaagcatagtgagcggagaagaagatctcagcgtttagccaccttacccatgcctgatgattctgtagaaaaggtttcttctccctctccagccactgatgggaaagtattctccatcagttctcaaaatcagcaagaatcttcagtaccagaggtgcctgatgttgcacatttgccacttgagaagctgggaccctgtctccctcttgacttaagtcgtggttcagaagttacagcaccggtagcctcagattcctcttaccgtaatgaatgtcccagggcagaaaaagaggatacacagatgcttccaaatccttcttccaaagcaatagctgatggaagaggagctccagcagcagcaggaatatcgaaaacagaaaaaaaagtgaaattggaagacaaaagctcaacagcatttggtaagagaaaagaaaaagataaggaaagaagagagaagagagacaaagatcactacagaccaaaacagaagaagaagaaaaaaaagaaaaagaaatctaagcaacatgactattcagactatgaagacagttccctcgaatttttggaaaggtgctcttctccactaactcgatcttctgggagttctctggcttcacgaagcatgtttacggagaaaactacaacctatcagtacccaagggcaattctatccgttgatcttagtggtgaaattctgagtggggatgaatacaatcaggactttgattcaaccaattttgaggaatctcaggatgaggatgatgctcttaatgaaattgtgcgatgtatttgtgagatggatgaggagaatggcttcatgatccagtgtgaagagtgcttgtgttggcaacacagcgtgtgcatggggctgctggaggagagcattccagagcagtacatctgctatatctgccgggacccaccaggtcagaggtggagtgcaaaatatcgttatgataaggagtggttgaataatgggagaatgtgcgggttatcatttttcaaagaaaattattctcatctcaatgccaaaaagatagtttctacacatcacctgcttgctgatgtctatggtgttacagaagtgctacacgggctacagctgaagattggaatactaaagaataaacatcatcctgaccttcatctctgggcttgttccgggaagcgaaaagaccaagatcaaataatagctggggtggagaaaaaaatagctcaagacacagttaatcgagaagaaaagaaatatgtacagaaccataaagaaccacctcgtttgcccctaaaaatggaaggaacttatataacaagtgagcatagctatcaaaagccacaaagttttggtcaggactgtaaatctctcgcagaccctgggagctcagatgatgatgatgttagtagtttggaagaagaacaagaattccacatgagaagtaaaaacagtttacagtactcagcaaaagaacatggaatgcctgaaaagaatccagctgaagggaatacagtatttgtttataatgataaaaagggcaccgaagacccaggagactcacatcttcagtggcagctcaatctccttacacacatagaaaatgtgcagaacgaagttaccagcaggatggacctaatagaaaaagaagtcgatgttctggaaagctggcttgatttcacaggggagttggagccaccagatcctcttgcaagattgccccaacttaaacgccacataaaacagctcctaattgacatgggcaaagtacagcagatagcaactctttgctctgtatgacaacagtgaacacttaatgaaagaatgtggctttcttcagtcaaagcatttttattatccacgtgatggctaagtggataatttaaaagcttagtaatgtctggtcattcactgatttgtgatgtcaataggatggcaccttggaaagaaaaatgaagaacaactttatcaaggaagctagtatttaaaaacaaattcatgagcaagctgcaaatgagaatgtgttatatgccaaggaacaatgaagtagaatataatgtatactaagggatttcaagttctcagaatttttgagtagttgcttacgtgaagctcaagatacctgtagaaagaaatatggtatatttgtatagtttttaatagaaagatctatgtttataaaccagcacttggccaaaaacaaaattgtaaaggaaatttaaattctggagaattctacagggttgctctaagaactgtcttctcagcagttgatccagctgtacggaaatttagggtatttaaacttttaaaggatcatgagctgtttcttgggcgatgaatgttctcaatcagaaaactgacagtagaaatctcacttctggggaaaacagttgtggaattcttacttcattatgaatgtatttaaaaaacaaacaccaaataattggaatatattgcaggcattaagctcattaaaaacaaactggcttgcagaagggtccgatgtgccaagtgatcatgattctgctggaaagaggattttaaatattgtgggagttctcccaccctaagtcttacataatgccaccagtccatccaaaacctatatatcacctatactatatatatcatatatatagttgaatggcagtattcaggctcaacgtacagtttgatcctgagtatgcttggtgtttgccttcagaaaaaaaaaatacattgtaaataacctcagctgggatgaggagtgacagaatatcaaaataatttgtggctgtggatttttttaactgctagtagtggaatactggaaaagcttcatttctgaagatgaattttatttttaaaaaatacatgcacactcaaaacttttagctttgatcacaagtggacaaatttctgaaaccaaaggcaactaagttgctgtgttagctcttgctggattttgagcctaggtcctactgtctgccagtactcatgtgagttgtatgtgcccccagtgctacatacgcaggtatgcgtaagtgtgtatgcttgttttaaacaaacactcaacgtacatatgtacataatctacacatatttatatcacatatctagttttattactatagactatacgaattggtggttaacatgaaatgttaccttttaacagactgtttttaaaaattaaaaatgtatgtataggttttgaaatttttttaaaaggggagaaagactgttaagaggaggctatttgatgacataacacttgaatattttatgcctcattctgtttatcagttctcgcaatctgtataaatgcattttagaactgatagacagtaaacttgaatttatctttgataagaatacatgccactgtacattcagatattatttaaatttgcaaacacattgttctatatgtaagggtactgtatgtaaaactctgtattaaaactattccacatatcctaaaatttcagcttgcctttttgcggccttatattttgatgtaaagattaaaagaatgtgc

SEQ ID NO: 346828 - DNA, 5188 bp, Homo sapiens
ggcacgaggcggcggaggcggcggcggcggcggcgatggcagcggaccctgagcgagcttgagggctcggacccagctccctcccgcgaaaccttgggcggatccggcgctgcggccccagctcgctccgctcctgctccctccccggccgctgcctgggcggaggcagaggcagaggcccgggctggccgccctgctcgtgccccagctcggccccggacggcccggctgctgtgcagagaggaggccgagtcgtgaaaagagaatactgaagaataggatctcaagatgagtaaaaagcccccaaatcgccctggaatcacttttgagattggtgctcgtttggaggcactggactacttacaaaaatggtatccatcacgaattgaaaaaattgactatgaggagggcaagatgttggtccattttgagcgctggagtcatcgttatgatgagtggatttactgggatagcaatagattgcgaccccttgagagaccagcactaagaaaagaagggctaaaagatgaggaagatttctttgattttaaagctggagaagaagttctggctcgttggacagactgtcgctattaccctgccaagattgaagcaattaacaaagaaggaacatttacagttcagttttatgatggagtaattcgttgtttaaaaagaatgcacattaaagccatgcccgaggatgctaaggggcaggtgaaatcccagcatccactaagctggtgttgtcctatcgacccagctggatcgtgtaaccagtctatgggaagtgaggattggatagctttagtcaaagcagctgctgcagctgcagccaagaacaaaacagggagtaaacctcgaaccagcgctaacagcaataaagataaggataaagatgagagaaagtggtttaaagtaccttcaaagaaggaggaaacttcaacttgtatagccacaccagacgtagagaagaaggaagatctgcctacatctagtgaaacatttggacttcatgtagagaacgttccaaagatggtctttccacagccagagagcacattatcaaacaagaggaaaaataatcaaggcaactcgtttcaggcaaagagagctcgacttaacaagattactggtttgttggcatccaaagctgttggggttgatggtgctgaaaaaaaggaagactacaatgaaacagctccaatgctggagcaggcgatttcacctaaacctcaaagtcagaaaaaaaatgaagctgacattagcagttctgccaacactcagaaacctgcactgttatcctcaactttgtcttcagggaaggctcgcagcaagaaatgcaaacatgaatctggagattcttctgggtgtataaaaccccctaaatcaccactttccccagaattaatacaagtcgaggatttgacgcttgtatctcagctttcttcttcagtgataaataaaactagtcctccacagcctgtgaatccccctagacctttcaagcatagtgagcggagaagaagatctcagcgtttagccaccttacccatgcctgatgattctgtagaaaaggtttcttctccctctccagccactgatgggaaagtattctccatcagttctcaaaatcagcaagaatcttcagtaccagaggtgcctgatgttgcacatttgccacttgagaagctgggaccctgtctccctcttgacttaagtcgtggttcagaagttacagcaccggtagcctcagattcctcttaccgtaatgaatgtcccagggcagaaaaagaggatacacagatgcttccaaatccttcttccaaagcaatagctgatggaagaggagctccagcagcagcaggaatatcgaaaacagaaaaaaaagtgaaattggaagacaaaagctcaacagcatttggtatcaggagttgggatttctcagcactgctaatgaagatcccctcttatagtccaataagcttatcaggacttccagagtcatgacatgaacagtttaattgaacccatccactctgggcaggtaagagaaaagaaaaagataaggaaagaagagagaagagagacaaagatcactacagaccaaaacagaagaagaagaaaaaaaagaaaaagaaatctaagcaacatgactattcagactatgaagacagttccctcgaatttttggaaaggtgctcttctccactaactcgatcttctgggagttctctggcttcacgaagcatgtttacggagaaaactacaacctatcagtacccaagggcaattctatccgttgatcttagtggtgaaaacttatcagatgtagacttcctagatgattcttcaacggagagtttgcttctgagtggggatgaatacaatcaggactttgattcaaccaattttgaggaatctcaggatgaggatgatgctcttaatgaaattgtgcgatgtatttgtgagatggatgaggagaatggcttcatgatccagtgtgaagagtgcttgtgttggcaacacagcgtgtgcatggggctgctggaggagagcattccagagcagtacatctgctatatctgccgggacccaccaggtcagaggtggagtgcaaaatatcgttatgataaggagtggttgaataatgggagaatgtgcgggttatcatttttcaaagaaaattattctcatctcaatgccaaaaagatagtttctacacatcacctgcttgctgatgtctatggtgttacagaagtgctacacgggctacagctgaagattggaatactaaagaataaacatcatcctgaccttcatctctgggcttgttccgggaagcgaaaagaccaagatcaaataatagctggggtggagaaaaaaatagctcaagacacagttaatcgagaagaaaagaaatatgtacagaaccataaagaaccacctcgtttgcccctaaaaatggaaggaacttatataacaagtgagcatagctatcaaaagccacaaagttttggtcaggactgtaaatctctcgcagaccctgggagctcagatgatgatgatgttagtagtttggaagaagaacaagaattccacatgagaagtaaaaacagtttacagtactcagcaaaagaacatggaatgcctgaaaagaatccagctgaagggaatacagtatttgtttataatgataaaaagggcaccgaagacccaggagactcacatcttcagtggcagctcaatctccttacacacatagaaaatgtgcagaacgaagttaccagcaggatggacctaatagaaaaagaagtcgatgttctggaaagctggcttgatttcacaggggagttggagccaccagatcctcttgcaagattgccccaacttaaacgccacataaaacagctcctaattgacatgggcaaagtacagcagatagcaactctttgctctgtatgacaacagtgaacacttaatgaaagaatgtggctttcttcagtcaaagcatttttattatccacgtgatggctaagtggataatttaaaagcttagtaatgtctggtcattcactgatttgtgatgtcaataggatggcaccttggaaagaaaaatgaagaacaactttatcaaggaagctagtatttaaaaacaaattcatgagcaagctgcaaatgagaatgtgttatatgccaaggaacaatgaagtagaatataatgtatactaagggatttcaagttctcagaatttttgagtagttgcttacgtgaagctcaagatacctgtagaaagaaatatggtatatttgtatagtttttaatagaaagatctatgtttataaaccagcacttggccaaaaacaaaattgtaaaggaaatttaaattctggagaattctacagggttgctctaagaactgtcttctcagcagttgatccagctgtacggaaatttagggtatttaaacttttaaaggatcatgagctgtttcttgggcgatgaatgttctcaatcagaaaactgacagtagaaatctcacttctggggaaaacagttgtggaattcttacttcattatgaatgtatttaaaaaacaaacaccaaataattggaatatattgcaggcattaagctcattaaaaacaaactggcttgcagaagggtccgatgtgccaagtgatcatgattctgctggaaagaggattttaaatattgtgggagttctcccaccctaagtcttacataatgccaccagtccatccaaaacctatatatcacctatactatatatatcatatatatagttgaatggcagtattcaggctcaacgtacagtttgatcctgagtatgcttggtgtttgccttcagaaaaaaaaaatacattgtaaataacctcagctgggatgaggagtgacagaatatcaaaataatttgtggctgtggatttttttaactgctagtagtggaatactggaaaagcttcatttctgaagatgaattttatttttaaaaaatacatgcacactcaaaacttttagctttgatcacaagtggacaaatttctgaaaccaaaggcaactaagttgctgtgttagctcttgctggattttgagcctaggtcctactgtctgccagtactcatgtgagttgtatgtgcccccagtgctacatacgcaggtatgcgtaagtgtgtatgcttgttttaaacaaacactcaacgtacatatgtacataatctacacatatttatatcacatatctagttttattactatagactatacgaattggtggttaacatgaaatgttaccttttaacagactgtttttaaaaattaaaaatgtatgtataggttttgaaatttttttaaaaggggagaaagactgttaagaggaggctatttgatgacataacacttgaatattttatgcctcattctgtttatcagttctcgcaatctgtataaatgcattttagaactgatagacagtaaacttgaatttatctttgataagaatacatgccactgtacattcagatattatttaaatttgcaaacacattgttctatatgtaagggtactgtatgtaaaactctgtattaaaactattccacatatcctaaaatttcagcttgcctttttgcggccttatattttgatgtaaagattaaaagaatgtgc

SEQ ID NO: 346829 - DNA, 5020 bp, Homo sapiens
ggcacgaggcggcggaggcggcggcggcggcggcgatggcagcggaccctgagcgagcttgagggctcggacccagctccctcccgcgaaaccttgggcggatccggcgctgcggccccagctcgctccgctcctgctccctccccggccgctgcctgggcggaggcagaggcagaggcccgggctggccgccctgctcgtgccccagctcggccccggacggcccggctgctgtgcagagaggaggccgagtcgtgaaaagagaatactgaagaataggatctcaagatgagtaaaaagcccccaaatcgccctggaatcacttttgagattggtgctcgtttggaggcactggactacttacaaaaatggtatccatcacgaattgaaaaaattgactatgaggagggcaagatgttggtccattttgagcgctggagtcatcgttatgatgagtggatttactgggatagcaatagattgcgaccccttgagagaccagcactaagaaaagaagggctaaaagatgaggaagatttctttgattttaaagctggagaagaagttctggctcgttggacagactgtcgctattaccctgccaagattgaagcaattaacaaagaaggaacatttacagttcagttttatgatggagtaattcgttgtttaaaaagaatgcacattaaagccatgcccgaggatgctaaggggcaggattggatagctttagtcaaagcagctgctgcagctgcagccaagaacaaaacagggagtaaacctcgaaccagcgctaacagcaataaagataaggataaagatgagagaaagtggtttaaagtaccttcaaagaaggaggaaacttcaacttgtatagccacaccagacgtagagaagaaggaagatctgcctacatctagtgaaacatttgataaactctcatatatgtgttctgttgaaagtagacttcatgtagagaacgttccaaagatggtctttccacagccagagagcacattatcaaacaagaggaaaaataatcaaggcaactcgtttcaggcaaagagagctcgacttaacaagattactggtttgttggcatccaaagctgttggggttgatggtgctgaaaaaaaggaagactacaatgaaacagctccaatgctggagcaggcgatttcacctaaacctcaaagtcagaaaaaaaatgaagctgacattagcagttctgccaacactcagaaacctgcactgttatcctcaactttgtcttcagggaaggctcgcagcaagaaatgcaaacatgaatctggagattcttctgggtgtataaaaccccctaaatcaccactttccccagaattaatacaagtcgaggatttgacgcttgtatctcagctttcttcttcagtgataaataaaactagtcctccacagcctgtgaatccccctagacctttcaagcatagtgagcggagaagaagatctcagcgtttagccaccttacccatgcctgatgattctgtagaaaaggtttcttctccctctccagccactgatgggaaagtattctccatcagttctcaaaatcagcaagaatcttcagtaccagaggtgcctgatgttgcacatttgccacttgagaagctgggaccctgtctccctcttgacttaagtcgtggttcagaagttacagcaccggtagcctcagattcctcttaccgtaatgaatgtcccagggcagaaaaagaggatacacagatgcttccaaatccttcttccaaagcaatagctgatggaagaggagctccagcagcagcaggaatatcgaaaacagaaaaaaaagtgaaattggaagacaaaagctcaacagcatttggtaagagaaaagaaaaagataaggaaagaagagagaagagagacaaagatcactacagaccaaaacagaagaagaagaaaaaaaagaaaaagaaatctaagcaacatgactattcagactatgaagacagttccctcgaatttttggaaaggtgctcttctccactaactcgatcttctgggagttctctggcttcacgaagcatgtttacggagaaaactacaacctatcagtacccaagggcaattctatccgttgatcttagtggtgaaaacttatcagatgtagacttcctagatgattcttcaacggagagtttgcttctgagtggggatgaatacaatcaggactttgattcaaccaattttgaggaatctcaggatgaggatgatgctcttaatgaaattgtgcgatgtatttgtgagatggatgaggagaatggcttcatgatccagtgtgaagagtgcttgtgttggcaacacagcgtgtgcatggggctgctggaggagagcattccagagcagtacatctgctatatctgccgggacccaccaggtcagaggtggagtgcaaaatatcgttatgataaggagtggttgaataatgggagaatgtgcgggttatcatttttcaaagaaaattattctcatctcaatgccaaaaagatagtttctacacatcacctgcttgctgatgtctatggtgttacagaagtgctacacgggctacagctgaagattggaatactaaagaataaacatcatcctgaccttcatctctgggcttgttccgggaagcgaaaagaccaagatcaaataatagctggggtggagaaaaaaatagctcaagacacagttaatcgagaagaaaagaaatatgtacagaaccataaagaaccacctcgtttgcccctaaaaatggaaggaacttatataacaagtgagcatagctatcaaaagccacaaagttttggtcaggactgtaaatctctcgcagaccctgggagctcagatgatgatgatgttagtagtttggaagaagaacaagaattccacatgagaagtaaaaacagtttacagtactcagcaaaagaacatggaatgcctgaaaagaatccagctgaagggaatacagtatttgtttataatgataaaaagggcaccgaagacccaggagactcacatcttcagtggcagctcaatctccttacacacatagaaaatgtgcagaacgaagttaccagcaggatggacctaatagaaaaagaagtcgatgttctggaaagctggcttgatttcacaggggagttggagccaccagatcctcttgcaagattgccccaacttaaacgccacataaaacagctcctaattgacatgggcaaagtacagcagatagcaactctttgctctgtatgacaacagtgaacacttaatgaaagaatgtggctttcttcagtcaaagcatttttattatccacgtgatggctaagtggataatttaaaagcttagtaatgtctggtcattcactgatttgtgatgtcaataggatggcaccttggaaagaaaaatgaagaacaactttatcaaggaagctagtatttaaaaacaaattcatgagcaagctgcaaatgagaatgtgttatatgccaaggaacaatgaagtagaatataatgtatactaagggatttcaagttctcagaatttttgagtagttgcttacgtgaagctcaagatacctgtagaaagaaatatggtatatttgtatagtttttaatagaaagatctatgtttataaaccagcacttggccaaaaacaaaattgtaaaggaaatttaaattctggagaattctacagggttgctctaagaactgtcttctcagcagttgatccagctgtacggaaatttagggtatttaaacttttaaaggatcatgagctgtttcttgggcgatgaatgttctcaatcagaaaactgacagtagaaatctcacttctggggaaaacagttgtggaattcttacttcattatgaatgtatttaaaaaacaaacaccaaataattggaatatattgcaggcattaagctcattaaaaacaaactggcttgcagaagggtccgatgtgccaagtgatcatgattctgctggaaagaggattttaaatattgtgggagttctcccaccctaagtcttacataatgccaccagtccatccaaaacctatatatcacctatactatatatatcatatatatagttgaatggcagtattcaggctcaacgtacagtttgatcctgagtatgcttggtgtttgccttcagaaaaaaaaaatacattgtaaataacctcagctgggatgaggagtgacagaatatcaaaataatttgtggctgtggatttttttaactgctagtagtggaatactggaaaagcttcatttctgaagatgaattttatttttaaaaaatacatgcacactcaaaacttttagctttgatcacaagtggacaaatttctgaaaccaaaggcaactaagttgctgtgttagctcttgctggattttgagcctaggtcctactgtctgccagtactcatgtgagttgtatgtgcccccagtgctacatacgcaggtatgcgtaagtgtgtatgcttgttttaaacaaacactcaacgtacatatgtacataatctacacatatttatatcacatatctagttttattactatagactatacgaattggtggttaacatgaaatgttaccttttaacagactgtttttaaaaattaaaaatgtatgtataggttttgaaatttttttaaaaggggagaaagactgttaagaggaggctatttgatgacataacacttgaatattttatgcctcattctgtttatcagttctcgcaatctgtataaatgcattttagaactgatagacagtaaacttgaatttatctttgataagaatacatgccactgtacattcagatattatttaaatttgcaaacacattgttctatatgtaagggtactgtatgtaaaactctgtattaaaactattccacatatcctaaaatttcagcttgcctttttgcggccttatattttgatgtaaagattaaaagaatgtgc

SEQ ID NO: 346830 - DNA, 4982 bp, Homo sapiens
ggcacgaggcggcggaggcggcggcggcggcggcgatggcagcggaccctgagcgagcttgagggctcggacccagctccctcccgcgaaaccttgggcggatccggcgctgcggccccagctcgctccgctcctgctccctccccggccgctgcctgggcggaggcagaggcagaggcccgggctggccgccctgctcgtgccccagctcggccccggacggcccggctgctgtgcagagaggaggccgagtcgtgaaaagagaatactgaagaataggatctcaagatgagtaaaaagcccccaaatcgccctggaatcacttttgagattggtgctcgtttggaggcactggactacttacaaaaatggtatccatcacgaattgaaaaaattgactatgaggagggcaagatgttggtccattttgagcgctggagtcatcgttatgatgagtggatttactgggatagcaatagattgcgaccccttgagagaccagcactaagaaaagaagggctaaaagatgaggaagatttctttgattttaaagctggagaagaagttctggctcgttggacagactgtcgctattaccctgccaagattgaagcaattaacaaagaaggaacatttacagttcagttttatgatggagtaattcgttgtttaaaaagaatgcacattaaagccatgcccgaggatgctaaggggcaggattggatagctttagtcaaagcagctgctgcagctgcagccaagaacaaaacagggagtaaacctcgaaccagcgctaacagcaataaagataaggataaagatgagagaaagtggtttaaagtaccttcaaagaaggaggaaacttcaacttgtatagccacaccagacgtagagaagaaggaagatctgcctacatctagtgaaacatttggacttcatgtagagaacgttccaaagatggtctttccacagccagagagcacattatcaaacaagaggaaaaataatcaaggcaactcgtttcaggcaaagagagctcgacttaacaagattactggaagagaccagctgtgtattttatagctaatatagaatactggaaggttgtaactttattggtttgttggcatccaaagctgttggggttgatggtgctgaaaaaaaggaagactacaatgaaacagctccaatgctggagcaggcgatttcacctaaacctcaaagtcagaaaaaaaatgaagctgacattagcagttctgccaacactcagaaacctgcactgttatcctcaactttgtcttcagggaaggctcgcagcaagaaatgcaaacatgaatctggagattcttctgggtgtataaaaccccctaaatcaccactttccccagaattaatacaagtcgaggatttgacgcttgtatctcagctttcttcttcagtgataaataaaactatgcctgatgttgcacatttgccacttgagaagctgggaccctgtctccctcttgacttaagtcgtggttcagaagttacagcaccggtagcctcagattcctcttaccgtaatgaatgtcccagggcagaaaaagaggatacacagatgcttccaaatccttcttccaaagcaatagctgatggaagaggagctccagcagcagcaggaatatcgaaaacagaaaaaaaagtgaaattggaagacaaaagctcaacagcatttggtatcaggagttgggatttctcagcactgctaatgaagatcccctcttatagtccaataagcttatcaggacttccagagtcatgacatgaacagtttaattgaacccatccactctgggcaggtaagagaaaagaaaaagataaggaaagaagagagaagagagacaaagatcactacagaccaaaacagaagaagaagaaaaaaaagaaaaagaaatctaagcaacatgactattcagactatgaagacagttccctcgaatttttggaaaggtgctcttctccactaactcgatcttctgggagttctctggcttcacgaagcatgtttacggagaaaactacaacctatcagtacccaagggcaattctatccgttgatcttagtggtgaaaacttatcagatgtagacttcctagatgattcttcaacggagagtttgcttctgagtggggatgaatacaatcaggactttgattcaaccaattttgaggaatctcaggatgaggatgatgctcttaatgaaattgtgcgatgtatttgtgagatggatgaggagaatggcttcatgatccagtgtgaagagtgcttgtgttggcaacacagcgtgtgcatggggctgctggaggagagcattccagagcagtacatctgctatatctgccgggacccaccaggtcagaggtggagtgcaaaatatcgttatgataaggagtggttgaataatgggagaatgtgcgggttatcatttttcaaagaaaattattctcatctcaatgccaaaaagatagtttctacacatcacctgcttgctgatgtctatggtgttacagaagtgctacacgggctacagctgaagattggaatactaaagaataaacatcatcctgaccttcatctctgggcttgttccgggaagcgaaaagaccaagatcaaataatagctggggtggagaaaaaaatagctcaagacacagttaatcgagaagaaaagaaatatgtacagaaccataaagaaccacctcgtttgcccctaaaaatggaaggaacttatataacaagtgagcatagctatcaaaagccacaaagttttggtcaggactgtaaatctctcgcagaccctgggagctcagatgatgatgatgttagtagtttggaagaagaacaagaattccacatgagaagtaaaaacagtttacagtactcagcaaaagaacatggaatgcctgaaaagaatccagctgaagggaatacagtatttgtttataatgataaaaagggcaccgaagacccaggagactcacatcttcagtggcagctcaatctccttacacacatagaaaatgtgcagaacgaagttaccagcaggatggacctaatagaaaaagaagtcgatgttctggaaagctggcttgatttcacaggggagttggagccaccagatcctcttgcaagattgccccaacttaaacgccacataaaacagctcctaattgacatgggcaaagtacagcagatagcaactctttgctctgtatgacaacagtgaacacttaatgaaagaatgtggctttcttcagtcaaagcatttttattatccacgtgatggctaagtggataatttaaaagcttagtaatgtctggtcattcactgatttgtgatgtcaataggatggcaccttggaaagaaaaatgaagaacaactttatcaaggaagctagtatttaaaaacaaattcatgagcaagctgcaaatgagaatgtgttatatgccaaggaacaatgaagtagaatataatgtatactaagggatttcaagttctcagaatttttgagtagttgcttacgtgaagctcaagatacctgtagaaagaaatatggtatatttgtatagtttttaatagaaagatctatgtttataaaccagcacttggccaaaaacaaaattgtaaaggaaatttaaattctggagaattctacagggttgctctaagaactgtcttctcagcagttgatccagctgtacggaaatttagggtatttaaacttttaaaggatcatgagctgtttcttgggcgatgaatgttctcaatcagaaaactgacagtagaaatctcacttctggggaaaacagttgtggaattcttacttcattatgaatgtatttaaaaaacaaacaccaaataattggaatatattgcaggcattaagctcattaaaaacaaactggcttgcagaagggtccgatgtgccaagtgatcatgattctgctggaaagaggattttaaatattgtgggagttctcccaccctaagtcttacataatgccaccagtccatccaaaacctatatatcacctatactatatatatcatatatatagttgaatggcagtattcaggctcaacgtacagtttgatcctgagtatgcttggtgtttgccttcagaaaaaaaaaatacattgtaaataacctcagctgggatgaggagtgacagaatatcaaaataatttgtggctgtggatttttttaactgctagtagtggaatactggaaaagcttcatttctgaagatgaattttatttttaaaaaatacatgcacactcaaaacttttagctttgatcacaagtggacaaatttctgaaaccaaaggcaactaagttgctgtgttagctcttgctggattttgagcctaggtcctactgtctgccagtactcatgtgagttgtatgtgcccccagtgctacatacgcaggtatgcgtaagtgtgtatgcttgttttaaacaaacactcaacgtacatatgtacataatctacacatatttatatcacatatctagttttattactatagactatacgaattggtggttaacatgaaatgttaccttttaacagactgtttttaaaaattaaaaatgtatgtataggttttgaaatttttttaaaaggggagaaagactgttaagaggaggctatttgatgacataacacttgaatattttatgcctcattctgtttatcagttctcgcaatctgtataaatgcattttagaactgatagacagtaaacttgaatttatctttgataagaatacatgccactgtacattcagatattatttaaatttgcaaacacattgttctatatgtaagggtactgtatgtaaaactctgtattaaaactattccacatatcctaaaatttcagcttgcctttttgcggccttatattttgatgtaaagattaaaagaatgtgc

SEQ ID NO: 346831 - DNA, 4934 bp, Homo sapiens
ggcacgaggcggcggaggcggcggcggcggcggcgatggcagcggaccctgagcgagcttgagggctcggacccagctccctcccgcgaaaccttgggcggatccggcgctgcggccccagctcgctccgctcctgctccctccccggccgctgcctgggcggaggcagaggcagaggcccgggctggccgccctgctcgtgccccagctcggccccggacggcccggctgctgtgcagagaggaggccgagtcgtgaaaagagaatactgaagaataggatctcaagatgagtaaaaagcccccaaatcgccctggaatcacttttgagattggtgctcgtttggaggcactggactacttacaaaaatggtatccatcacgaattgaaaaaattgactatgaggagggcaagatgttggtccattttgagcgctggagtcatcgttatgatgagtggatttactgggatagcaatagattgcgaccccttgagagaccagcactaagaaaagaagggctaaaagatgaggaagatttctttgattttaaagctggagaagaagttctggctcgttggacagactgtcgctattaccctgccaagattgaagcaattaacaaagaaggaacatttacagttcagttttatgatggagtaattcgttgtttaaaaagaatgcacattaaagccatgcccgaggatgctaaggggcaggattggatagctttagtcaaagcagctgctgcagctgcagccaagaacaaaacagggagtaaacctcgaaccagcgctaacagcaataaagataaggataaagatgagagaaagtggtttaaagtaccttcaaagaaggaggaaacttcaacttgtatagccacaccagacgtagagaagaaggaagatctgcctacatctagtgaaacatttggacttcatgtagagaacgttccaaagatggtctttccacagccagagagcacattatcaaacaagaggaaaaataatcaaggcaactcgtttcaggcaaagagagctcgacttaacaagattactggtttgttggcatccaaagctgttggggttgatggtgctgaaaaaaaggaagactacaatgaaacagctccaatgctggagcaggcgatttcacctaaacctcaaagtcagaaaaaaaatgaagctgacattagcagttctgccaacactcagaaacctgcactgttatcctcaactttgtcttcagggaaggctcgcagcaagaaatgcaaacatgaatctggagattcttctgggtgtataaaaccccctaaatcaccactttccccagaattaatacaagtcgaggatttgacgcttgtatctcagctttcttcttcagtgataaataaaactagtcctccacagcctgtgaatccccctagacctttcaagcatagtgagcggagaagaagatctcagcgtttagccaccttacccatgcctgatgattctgtagaaaaggtttcttctccctctccagccactgatgggaaagtattctccatcagttctcattgagaagctgggaccctgtctccctcttgacttaagtcgtggttcagaagttacagcaccggtagcctcagattcctcttaccgtaatgaatgtcccagggcagaaaaagaggatacacagatgcttccaaatccttcttccaaagcaatagctgatggaagaggagctccagcagcagcaggaatatcgaaaacagaaaaaaaagtgaaattggaagacaaaagctcaacagcatttggtaagagaaaagaaaaagataaggaaagaagagagaagagagacaaagatcactacagaccaaaacagaagaagaagaaaaaaaagaaaaagaaatctaagcaacatgactattcagactatgaagacagttccctcgaatttttggaaaggtgctcttctccactaactcgatcttctgggagttctctggcttcacgaagcatgtttacggagaaaactacaacctatcagtacccaagggcaattctatccgttgatcttagtggtgaaaacttatcagatgtagacttcctagatgattcttcaacggagagtttgcttctgagtggggatgaatacaatcaggactttgattcaaccaattttgaggaatctcaggatgaggatgatgctcttaatgaaattgtgcgatgtatttgtgagatggatgaggagaatggcttcatgatccagtgtgaagagtgcttgtgttggcaacacagcgtgtgcatggggctgctggaggagagcattccagagcagtacatctgctatatctgccgggacccaccaggtcagaggtggagtgcaaaatatcgttatgataaggagtggttgaataatgggagaatgtgcgggttatcatttttcaaagaaaattattctcatctcaatgccaaaaagatagtttctacacatcacctgcttgctgatgtctatggtgttacagaagtgctacacgggctacagctgaagattggaatactaaagaataaacatcatcctgaccttcatctctgggcttgttccgggaagcgaaaagaccaagatcaaataatagctggggtggagaaaaaaatagctcaagacacagttaatcgagaagaaaagaaatatgtacagaaccataaagaaccacctcgtttgcccctaaaaatggaaggaacttatataacaagtgagcatagctatcaaaagccacaaagttttggtcaggactgtaaatctctcgcagaccctgggagctcagatgatgatgatgttagtagtttggaagaagaacaagaattccacatgagaagtaaaaacagtttacagtactcagcaaaagaacatggaatgcctgaaaagaatccagctgaagggaatacagtatttgtttataatgataaaaagggcaccgaagacccaggagactcacatcttcagtggcagctcaatctccttacacacatagaaaatgtgcagaacgaagttaccagcaggatggacctaatagaaaaagaagtcgatgttctggaaagctggcttgatttcacaggggagttggagccaccagatcctcttgcaagattgccccaacttaaacgccacataaaacagctcctaattgacatgggcaaagtacagcagatagcaactctttgctctgtatgacaacagtgaacacttaatgaaagaatgtggctttcttcagtcaaagcatttttattatccacgtgatggctaagtggataatttaaaagcttagtaatgtctggtcattcactgatttgtgatgtcaataggatggcaccttggaaagaaaaatgaagaacaactttatcaaggaagctagtatttaaaaacaaattcatgagcaagctgcaaatgagaatgtgttatatgccaaggaacaatgaagtagaatataatgtatactaagggatttcaagttctcagaatttttgagtagttgcttacgtgaagctcaagatacctgtagaaagaaatatggtatatttgtatagtttttaatagaaagatctatgtttataaaccagcacttggccaaaaacaaaattgtaaaggaaatttaaattctggagaattctacagggttgctctaagaactgtcttctcagcagttgatccagctgtacggaaatttagggtatttaaacttttaaaggatcatgagctgtttcttgggcgatgaatgttctcaatcagaaaactgacagtagaaatctcacttctggggaaaacagttgtggaattcttacttcattatgaatgtatttaaaaaacaaacaccaaataattggaatatattgcaggcattaagctcattaaaaacaaactggcttgcagaagggtccgatgtgccaagtgatcatgattctgctggaaagaggattttaaatattgtgggagttctcccaccctaagtcttacataatgccaccagtccatccaaaacctatatatcacctatactatatatatcatatatatagttgaatggcagtattcaggctcaacgtacagtttgatcctgagtatgcttggtgtttgccttcagaaaaaaaaaatacattgtaaataacctcagctgggatgaggagtgacagaatatcaaaataatttgtggctgtggatttttttaactgctagtagtggaatactggaaaagcttcatttctgaagatgaattttatttttaaaaaatacatgcacactcaaaacttttagctttgatcacaagtggacaaatttctgaaaccaaaggcaactaagttgctgtgttagctcttgctggattttgagcctaggtcctactgtctgccagtactcatgtgagttgtatgtgcccccagtgctacatacgcaggtatgcgtaagtgtgtatgcttgttttaaacaaacactcaacgtacatatgtacataatctacacatatttatatcacatatctagttttattactatagactatacgaattggtggttaacatgaaatgttaccttttaacagactgtttttaaaaattaaaaatgtatgtataggttttgaaatttttttaaaaggggagaaagactgttaagaggaggctatttgatgacataacacttgaatattttatgcctcattctgtttatcagttctcgcaatctgtataaatgcattttagaactgatagacagtaaacttgaatttatctttgataagaatacatgccactgtacattcagatattatttaaatttgcaaacacattgttctatatgtaagggtactgtatgtaaaactctgtattaaaactattccacatatcctaaaatttcagcttgcctttttgcggccttatattttgatgtaaagattaaaagaatgtgc

SEQ ID NO: 346832 - DNA, 3634 bp, Homo sapiens
atgtatctgcgtcgactgaacattgaagatctttttctaggtcctccacagcctgtgaatccccctagacctttcaagcatagtgagcggagaagaagatctcagcgtttagccaccttacccatgcctgatgattctgtagaaaaggtttcttctccctctccagccactgatgggaaagtattctccatcagttctcaaaatcagcaagaatcttcagtaccagaggtgcctgatgttgcacatttgccacttgagaagctgggaccctgtctccctcttgacttaagtcgtggttcagaagttacagcaccggtagcctcagattcctcttaccgtaatgaatgtcccagggcagaaaaagaggatacacagatgcttccaaatccttcttccaaagcaatagctgatggaagaggagctccagcagcagcaggaatatcgaaaacagaaaaaaaagtgaaattggaagacaaaagctcaacagcatttggtaagagaaaagaaaaagataaggaaagaagagagaagagagacaaagatcactacagaccaaaacagaagaagaagaaaaaaaagaaaaagaaatctaagcaacatgactattcagactatgaagacagttccctcgaatttttggaaaggtgctcttctccactaactcgatcttctgggagttctctggcttcacgaagcatgtttacggagaaaactacaacctatcagtacccaagggcaattctatccgttgatcttagtggtgaaaacttatcagatgtagacttcctagatgattcttcaacggagagtttgcttctgagtggggatgaatacaatcaggactttgattcaaccaattttgaggaatctcaggatgaggatgatgctcttaatgaaattgtgcgatgtatttgtgagatggatgaggagaatggcttcatgatccagtgtgaagagtgcttgtgttggcaacacagcgtgtgcatggggctgctggaggagagcattccagagcagtacatctgctatatctgccgggacccaccaggtcagaggtggagtgcaaaatatcgttatgataaggagtggttgaataatgggagaatgtgcgggttatcatttttcaaagaaaattattctcatctcaatgccaaaaagatagtttctacacatcacctgcttgctgatgtctatggtgttacagaagtgctacacgggctacagctgaagattggaatactaaagaataaacatcatcctgaccttcatctctgggcttgttccgggaagcgaaaagaccaagatcaaataatagctggggtggagaaaaaaatagctcaagacacagttaatcgagaagaaaagaaatatgtacagaaccataaagaaccacctcgtttgcccctaaaaatggaaggaacttatataacaagtgagcatagctatcaaaagccacaaagttttggtcaggactgtaaatctctcgcagaccctgggagctcagatgatgatgatgttagtagtttggaagaagaacaagaattccacatgagaagtaaaaacagtttacagtactcagcaaaagaacatggaatgcctgaaaagaatccagctgaagggaatacagtatttgtttataatgataaaaagggcaccgaagacccaggagactcacatcttcagtggcagctcaatctccttacacacatagaaaatgtgcagaacgaagttaccagcaggatggacctaatagaaaaagaagtcgatgttctggaaagctggcttgatttcacaggggagttggagccaccagatcctcttgcaagattgccccaacttaaacgccacataaaacagctcctaattgacatgggcaaagtacagcagatagcaactctttgctctgtatgacaacagtgaacacttaatgaaagaatgtggctttcttcagtcaaagcatttttattatccacgtgatggctaagtggataatttaaaagcttagtaatgtctggtcattcactgatttgtgatgtcaataggatggcaccttggaaagaaaaatgaagaacaactttatcaaggaagctagtatttaaaaacaaattcatgagcaagctgcaaatgagaatgtgttatatgccaaggaacaatgaagtagaatataatgtatactaagggatttcaagttctcagaatttttgagtagttgcttacgtgaagctcaagatacctgtagaaagaaatatggtatatttgtatagtttttaatagaaagatctatgtttataaaccagcacttggccaaaaacaaaattgtaaaggaaatttaaattctggagaattctacagggttgctctaagaactgtcttctcagcagttgatccagctgtacggaaatttagggtatttaaacttttaaaggatcatgagctgtttcttgggcgatgaatgttctcaatcagaaaactgacagtagaaatctcacttctggggaaaacagttgtggaattcttacttcattatgaatgtatttaaaaaacaaacaccaaataattggaatatattgcaggcattaagctcattaaaaacaaactggcttgcagaagggtccgatgtgccaagtgatcatgattctgctggaaagaggattttaaatattgtgggagttctcccaccctaagtcttacataatgccaccagtccatccaaaacctatatatcacctatactatatatatcatatatatagttgaatggcagtattcaggctcaacgtacagtttgatcctgagtatgcttggtgtttgccttcagaaaaaaaaaatacattgtaaataacctcagctgggatgaggagtgacagaatatcaaaataatttgtggctgtggatttttttaactgctagtagtggaatactggaaaagcttcatttctgaagatgaattttatttttaaaaaatacatgcacactcaaaacttttagctttgatcacaagtggacaaatttctgaaaccaaaggcaactaagttgctgtgttagctcttgctggattttgagcctaggtcctactgtctgccagtactcatgtgagttgtatgtgcccccagtgctacatacgcaggtatgcgtaagtgtgtatgcttgttttaaacaaacactcaacgtacatatgtacataatctacacatatttatatcacatatctagttttattactatagactatacgaattggtggttaacatgaaatgttaccttttaacagactgtttttaaaaattaaaaatgtatgtataggttttgaaatttttttaaaaggggagaaagactgttaagaggaggctatttgatgacataacacttgaatattttatgcctcattctgtttatcagttctcgcaatctgtataaatgcattttagaactgatagacagtaaacttgaatttatctttgataagaatacatgccactgtacattcagatattatttaaatttgcaaacacattgttctatatgtaagggtactgtatgtaaaactctgtattaaaactattccacatatcctaaaatttcagcttgcctttttgcggccttatattttgatgtaaagattaaaagaatgtgc

SEQ ID NO: 346833 - DNA, 3501 bp, Homo sapiens
gcactgtttaaattatgtaacactttaattcacagtgatagtaactgagccattttatctgtgttaatattacattacactctttattttgtgtagtgcctgatgttgcacatttgccacttgagaagctgggaccctgtctccctcttgacttaagtcgtggttcagaagttacagcaccggtagcctcagattcctcttaccgtaatgaatgtcccagggcagaaaaagaggatacacagatgcttccaaatccttcttccaaagcaatagctgatggaagaggagctccagcagcagcaggaatatcgaaaacagaaaaaaaagtgaaattggaagacaaaagctcaacagcatttggtaagagaaaagaaaaagataaggaaagaagagagaagagagacaaagatcactacagaccaaaacagaagaagaagaaaaaaaagaaaaagaaatctaagcaacatgactattcagactatgaagacagttccctcgaatttttggaaaggtgctcttctccactaactcgatcttctgggagttctctggcttcacgaagcatgtttacggagaaaactacaacctatcagtacccaagggcaattctatccgttgatcttagtggtgaaaacttatcagatgtagacttcctagatgattcttcaacggagagtttgcttctgagtggggatgaatacaatcaggactttgattcaaccaattttgaggaatctcaggatgaggatgatgctcttaatgaaattgtgcgatgtatttgtgagatggatgaggagaatggcttcatgatccagtgtgaagagtgcttgtgttggcaacacagcgtgtgcatggggctgctggaggagagcattccagagcagtacatctgctatatctgccgggacccaccaggtcagaggtggagtgcaaaatatcgttatgataaggagtggttgaataatgggagaatgtgcgggttatcatttttcaaagaaaattattctcatctcaatgccaaaaagatagtttctacacatcacctgcttgctgatgtctatggtgttacagaagtgctacacgggctacagctgaagattggaatactaaagaataaacatcatcctgaccttcatctctgggcttgttccgggaagcgaaaagaccaagatcaaataatagctggggtggagaaaaaaatagctcaagacacagttaatcgagaagaaaagaaatatgtacagaaccataaagaaccacctcgtttgcccctaaaaatggaaggaacttatataacaagtgagcatagctatcaaaagccacaaagttttggtcaggactgtaaatctctcgcagaccctgggagctcagatgatgatgatgttagtagtttggaagaagaacaagaattccacatgagaagtaaaaacagtttacagtactcagcaaaagaacatggaatgcctgaaaagaatccagctgaagggaatacagtatttgtttataatgataaaaagggcaccgaagacccaggagactcacatcttcagtggcagctcaatctccttacacacatagaaaatgtgcagaacgaagttaccagcaggatggacctaatagaaaaagaagtcgatgttctggaaagctggcttgatttcacaggggagttggagccaccagatcctcttgcaagattgccccaacttaaacgccacataaaacagctcctaattgacatgggcaaagtacagcagatagcaactctttgctctgtatgacaacagtgaacacttaatgaaagaatgtggctttcttcagtcaaagcatttttattatccacgtgatggctaagtggataatttaaaagcttagtaatgtctggtcattcactgatttgtgatgtcaataggatggcaccttggaaagaaaaatgaagaacaactttatcaaggaagctagtatttaaaaacaaattcatgagcaagctgcaaatgagaatgtgttatatgccaaggaacaatgaagtagaatataatgtatactaagggatttcaagttctcagaatttttgagtagttgcttacgtgaagctcaagatacctgtagaaagaaatatggtatatttgtatagtttttaatagaaagatctatgtttataaaccagcacttggccaaaaacaaaattgtaaaggaaatttaaattctggagaattctacagggttgctctaagaactgtcttctcagcagttgatccagctgtacggaaatttagggtatttaaacttttaaaggatcatgagctgtttcttgggcgatgaatgttctcaatcagaaaactgacagtagaaatctcacttctggggaaaacagttgtggaattcttacttcattatgaatgtatttaaaaaacaaacaccaaataattggaatatattgcaggcattaagctcattaaaaacaaactggcttgcagaagggtccgatgtgccaagtgatcatgattctgctggaaagaggattttaaatattgtgggagttctcccaccctaagtcttacataatgccaccagtccatccaaaacctatatatcacctatactatatatatcatatatatagttgaatggcagtattcaggctcaacgtacagtttgatcctgagtatgcttggtgtttgccttcagaaaaaaaaaatacattgtaaataacctcagctgggatgaggagtgacagaatatcaaaataatttgtggctgtggatttttttaactgctagtagtggaatactggaaaagcttcatttctgaagatgaattttatttttaaaaaatacatgcacactcaaaacttttagctttgatcacaagtggacaaatttctgaaaccaaaggcaactaagttgctgtgttagctcttgctggattttgagcctaggtcctactgtctgccagtactcatgtgagttgtatgtgcccccagtgctacatacgcaggtatgcgtaagtgtgtatgcttgttttaaacaaacactcaacgtacatatgtacataatctacacatatttatatcacatatctagttttattactatagactatacgaattggtggttaacatgaaatgttaccttttaacagactgtttttaaaaattaaaaatgtatgtataggttttgaaatttttttaaaaggggagaaagactgttaagaggaggctatttgatgacataacacttgaatattttatgcctcattctgtttatcagttctcgcaatctgtataaatgcattttagaactgatagacagtaaacttgaatttatctttgataagaatacatgccactgtacattcagatattatttaaatttgcaaacacattgttctatatgtaagggtactgtatgtaaaactctgtattaaaactattccacatatcctaaaatttcagcttgcctttttgcggccttatattttgatgtaaagattaaaagaatgtgc

SEQ ID NO: 346834 - DNA, 3574 bp, Homo sapiens
tttaaagcttatccaaagcaaaaagtccatcaggttttttttttttaaatctcctaatttattctctcattaaattacatatggaaatgctgagtctcttcattcaggtcctttgtaaattatggagtttaacttcttaccacatcaggaaattgagaatattactcattgaaggttttaactactgtctgtgttaactttaaggtatcaggagttgggatttctcagcactgctaatgaagatcccctcttatagtccaataagcttatcaggacttccagagtcatgacatgaacagtttaattgaacccatccactctgggcaggtgactggaatagctgattaaaacataaatgctgcttttaggttaaccacaaaggaacaactcaggatcagtcgtgattgctaaagtattcacttttatcttttaggtaagagaaaagaaaaagataaggaaagaagagagaagagagacaaagatcactacagaccaaaacagaagaagaagaaaaaaaagaaaaagaaatctaagcaacatgactattcagactatgaagacagttccctcgaatttttggaaaggtgctcttctccactaactcgatcttctgggagttctctggcttcacgaagcatgtttacggagaaaactacaacctatcagtacccaagggcaattctatccgttgatcttagtggtgaaaacttatcagatgtagacttcctagatgattcttcaacggagagtttgcttctgagtggggatgaatacaatcaggactttgattcaaccaattttgaggaatctcaggatgaggatgatgctcttaatgaaattgtgcgatgtatttgtgagatggatgaggagaatggcttcatgatccagtgtgaagagtgcttgtgttggcaacacagcgtgtgcatggggctgctggaggagagcattccagagcagtacatctgctatatctgccgggacccaccaggtcagaggtggagtgcaaaatatcgttatgataaggagtggttgaataatgggagaatgtgcgggttatcatttttcaaagaaaattattctcatctcaatgccaaaaagatagtttctacacatcacctgcttgctgatgtctatggtgttacagaagtgctacacgggctacagctgaagattggaatactaaagaataaacatcatcctgaccttcatctctgggcttgttccgggaagcgaaaagaccaagatcaaataatagctggggtggagaaaaaaatagctcaagacacagttaatcgagaagaaaagaaatatgtacagaaccataaagaaccacctcgtttgcccctaaaaatggaaggaacttatataacaagtgagcatagctatcaaaagccacaaagttttggtcaggactgtaaatctctcgcagaccctgggagctcagatgatgatgatgttagtagtttggaagaagaacaagaattccacatgagaagtaaaaacagtttacagtactcagcaaaagaacatggaatgcctgaaaagaatccagctgaagggaatacagtatttgtttataatgataaaaagggcaccgaagacccaggagactcacatcttcagtggcagctcaatctccttacacacatagaaaatgtgcagaacgaagttaccagcaggatggacctaatagaaaaagaagtcgatgttctggaaagctggcttgatttcacaggggagttggagccaccagatcctcttgcaagattgccccaacttaaacgccacataaaacagctcctaattgacatgggcaaagtacagcagatagcaactctttgctctgtatgacaacagtgaacacttaatgaaagaatgtggctttcttcagtcaaagcatttttattatccacgtgatggctaagtggataatttaaaagcttagtaatgtctggtcattcactgatttgtgatgtcaataggatggcaccttggaaagaaaaatgaagaacaactttatcaaggaagctagtatttaaaaacaaattcatgagcaagctgcaaatgagaatgtgttatatgccaaggaacaatgaagtagaatataatgtatactaagggatttcaagttctcagaatttttgagtagttgcttacgtgaagctcaagatacctgtagaaagaaatatggtatatttgtatagtttttaatagaaagatctatgtttataaaccagcacttggccaaaaacaaaattgtaaaggaaatttaaattctggagaattctacagggttgctctaagaactgtcttctcagcagttgatccagctgtacggaaatttagggtatttaaacttttaaaggatcatgagctgtttcttgggcgatgaatgttctcaatcagaaaactgacagtagaaatctcacttctggggaaaacagttgtggaattcttacttcattatgaatgtatttaaaaaacaaacaccaaataattggaatatattgcaggcattaagctcattaaaaacaaactggcttgcagaagggtccgatgtgccaagtgatcatgattctgctggaaagaggattttaaatattgtgggagttctcccaccctaagtcttacataatgccaccagtccatccaaaacctatatatcacctatactatatatatcatatatatagttgaatggcagtattcaggctcaacgtacagtttgatcctgagtatgcttggtgtttgccttcagaaaaaaaaaatacattgtaaataacctcagctgggatgaggagtgacagaatatcaaaataatttgtggctgtggatttttttaactgctagtagtggaatactggaaaagcttcatttctgaagatgaattttatttttaaaaaatacatgcacactcaaaacttttagctttgatcacaagtggacaaatttctgaaaccaaaggcaactaagttgctgtgttagctcttgctggattttgagcctaggtcctactgtctgccagtactcatgtgagttgtatgtgcccccagtgctacatacgcaggtatgcgtaagtgtgtatgcttgttttaaacaaacactcaacgtacatatgtacataatctacacatatttatatcacatatctagttttattactatagactatacgaattggtggttaacatgaaatgttaccttttaacagactgtttttaaaaattaaaaatgtatgtataggttttgaaatttttttaaaaggggagaaagactgttaagaggaggctatttgatgacataacacttgaatattttatgcctcattctgtttatcagttctcgcaatctgtataaatgcattttagaactgatagacagtaaacttgaatttatctttgataagaatacatgccactgtacattcagatattatttaaatttgcaaacacattgttctatatgtaagggtactgtatgtaaaactctgtattaaaactattccacatatcctaaaatttcagcttgcctttttgcggccttatattttgatgtaaagattaaaagaatgtgc

SEQ ID NO: 346835 - DNA, 3258 bp, Homo sapiens
  misc_feature (22)..(22): n is a, c, g, or t
agggggggaaaaggggcctttncaccccccaaatgggacctaatggggtcccaatgcagtgaatatcgaaaacagaaaaaaaagtgaaattggaagacaaaagctcaacagcatttggtaagagaaaagaaaaagataaggaaagaagagagaagagagacaaagatcactacagaccaaaacagaagaagaagaaaaaaaagaaaaagaaatctaagcaacatgactattcagactatgaagacagttccctcgaatttttggaaaggtgctcttctccactaactcgatcttctgggagttctctggcttcacgaagcatgtttacggagaaaactacaacctatcagtacccaagggcaattctatccgttgatcttagtggtgaaaacttatcagatgtagacttcctagatgattcttcaacggagagtttgcttctgagtggggatgaatacaatcaggactttgattcaaccaattttgaggaatctcaggatgaggatgatgctcttaatgaaattgtgcgatgtatttgtgagatggatgaggagaatggcttcatgatccagtgtgaagagtgcttgtgttggcaacacagcgtgtgcatggggctgctggaggagagcattccagagcagtacatctgctatatctgccgggacccaccaggtcagaggtggagtgcaaaatatcgttatgataaggagtggttgaataatgggagaatgtgcgggttatcatttttcaaagaaaattattctcatctcaatgccaaaaagatagtttctacacatcacctgcttgctgatgtctatggtgttacagaagtgctacacgggctacagctgaagattggaatactaaagaataaacatcatcctgaccttcatctctgggcttgttccgggaagcgaaaagaccaagatcaaataatagctggggtggagaaaaaaatagctcaagacacagttaatcgagaagaaaagaaatatgtacagaaccataaagaaccacctcgtttgcccctaaaaatggaaggaacttatataacaagtgagcatagctatcaaaagccacaaagttttggtcaggactgtaaatctctcgcagaccctgggagctcagatgatgatgatgttagtagtttggaagaagaacaagaattccacatgagaagtaaaaacagtttacagtactcagcaaaagaacatggaatgcctgaaaagaatccagctgaagggaatacagtatttgtttataatgataaaaagggcaccgaagacccaggagactcacatcttcagtggcagctcaatctccttacacacatagaaaatgtgcagaacgaagttaccagcaggatggacctaatagaaaaagaagtcgatgttctggaaagctggcttgatttcacaggggagttggagccaccagatcctcttgcaagattgccccaacttaaacgccacataaaacagctcctaattgacatgggcaaagtacagcagatagcaactctttgctctgtatgacaacagtgaacacttaatgaaagaatgtggctttcttcagtcaaagcatttttattatccacgtgatggctaagtggataatttaaaagcttagtaatgtctggtcattcactgatttgtgatgtcaataggatggcaccttggaaagaaaaatgaagaacaactttatcaaggaagctagtatttaaaaacaaattcatgagcaagctgcaaatgagaatgtgttatatgccaaggaacaatgaagtagaatataatgtatactaagggatttcaagttctcagaatttttgagtagttgcttacgtgaagctcaagatacctgtagaaagaaatatggtatatttgtatagtttttaatagaaagatctatgtttataaaccagcacttggccaaaaacaaaattgtaaaggaaatttaaattctggagaattctacagggttgctctaagaactgtcttctcagcagttgatccagctgtacggaaatttagggtatttaaacttttaaaggatcatgagctgtttcttgggcgatgaatgttctcaatcagaaaactgacagtagaaatctcacttctggggaaaacagttgtggaattcttacttcattatgaatgtatttaaaaaacaaacaccaaataattggaatatattgcaggcattaagctcattaaaaacaaactggcttgcagaagggtccgatgtgccaagtgatcatgattctgctggaaagaggattttaaatattgtgggagttctcccaccctaagtcttacataatgccaccagtccatccaaaacctatatatcacctatactatatatatcatatatatagttgaatggcagtattcaggctcaacgtacagtttgatcctgagtatgcttggtgtttgccttcagaaaaaaaaaatacattgtaaataacctcagctgggatgaggagtgacagaatatcaaaataatttgtggctgtggatttttttaactgctagtagtggaatactggaaaagcttcatttctgaagatgaattttatttttaaaaaatacatgcacactcaaaacttttagctttgatcacaagtggacaaatttctgaaaccaaaggcaactaagttgctgtgttagctcttgctggattttgagcctaggtcctactgtctgccagtactcatgtgagttgtatgtgcccccagtgctacatacgcaggtatgcgtaagtgtgtatgcttgttttaaacaaacactcaacgtacatatgtacataatctacacatatttatatcacatatctagttttattactatagactatacgaattggtggttaacatgaaatgttaccttttaacagactgtttttaaaaattaaaaatgtatgtataggttttgaaatttttttaaaaggggagaaagactgttaagaggaggctatttgatgacataacacttgaatattttatgcctcattctgtttatcagttctcgcaatctgtataaatgcattttagaactgatagacagtaaacttgaatttatctttgataagaatacatgccactgtacattcagatattatttaaatttgcaaacacattgttctatatgtaagggtactgtatgtaaaactctgtattaaaactattccacatatcctaaaatttcagcttgcctttttgcggccttatattttgatgtaaagattaaaagaatgtgc

SEQ ID NO: 346836 - DNA, 5001 bp, Homo sapiens
ggcacgaggcggcggaggcggcggcggcggcggcgatggcagcggaccctgagcgagcttgagggctcggacccagctccctcccgcgaaaccttgggcggatccggcgctgcggccccagctcgctccgctcctgctccctccccggccgctgcctgggcggaggcagaggcagaggcccgggctggccgccctgctcgtgccccagctcggccccggacggcccggctgctgtgcagagaggaggccgagtcgtgaaaagagaatactgaagaataggatctcaagatgagtaaaaagcccccaaatcgccctggaatcacttttgagattggtgctcgtttggaggcactggactacttacaaaaatggtatccatcacgaattgaaaaaattgactatgaggagggcaagatgttggtccattttgagcgctggagtcatcgttatgatgagtggatttactgggatagcaatagattgcgaccccttgagagaccagcactaagaaaagaagggctaaaagatgaggaagatttctttgattttaaagctggagaagaagttctggctcgttggacagactgtcgctattaccctgccaagattgaagcaattaacaaagaaggaacatttacagttcagttttatgatggagtaattcgttgtttaaaaagaatgcacattaaagccatgcccgaggatgctaaggggcaggtgaaatcccagcatccactaagctggtgttgtcctatcgacccagctggatcgtgtaaccagtctatgggaagtgaggattggatagctttagtcaaagcagctgctgcagctgcagccaagaacaaaacagggagtaaacctcgaaccagcgctaacagcaataaagataaggataaagatgagagaaagtggtttaaagtaccttcaaagaaggaggaaacttcaacttgtatagccacaccagacgtagagaagaaggaagatctgcctacatctagtgaaacatttggacttcatgtagagaacgttccaaagatggtctttccacagccagagagcacattatcaaacaagaggaaaaataatcaaggcaactcgtttcaggcaaagagagctcgacttaacaagattactggtttgttggcatccaaagctgttggggttgatggtgctgaaaaaaaggaagactacaatgaaacagctccaatgctggagcaggcgatttcacctaaacctcaaagtcagaaaaaaaatgaagctgacattagcagttctgccaacactcagaaacctgcactgttatcctcaactttgtcttcagggaaggctcgcagcaagaaatgcaaacatgaatctggagattcttctgggtgtataaaaccccctaaatcaccactttccccagaattaatacaagtcgaggatttgacgcttgtatctcagctttcttcttcagtgataaataaaactagtcctccacagcctgtgaatccccctagacctttcaagcatagtgagcggagaagaagatctcagcgtttagccaccttacccatgcctgatgattctgtagaaaaggtttcttctccctctccagccactgatgggaaagtattctccatcagttctcaaaatcagcaagaatcttcagtaccagaggtgcctgatgttgcacatttgccacttgagaagctgggaccctgtctccctcttgacttaagtcgtggttcagaagttacagcaccggtagcctcagattcctcttaccgtaatgaatgtcccagggcagaaaaagaggatacacagatgcttccaaatccttcttccaaagcaatagctgatggaagaggagctccagcagcagcaggaatatcgaaaacagaaaaaaaagtgaaattggaagacaaaagctcaacagcatttggtaagagaaaagaaaaagataaggaaagaagagagaagagagacaaagatcactacagaccaaaacagaagaagaagaaaaaaaagaaaaagaaatctaagcaacatgactattcagactatgaagacagttccctcgaatttttggaaaggtgctcttctccactaactcgatcttctgggagttctctggcttcacgaagcatgtttacggagaaaactacaacctatcagtacccaagggcaattctatccgttgatcttagtggtgaaaacttatcagatgtagacttcctagatgattcttcaacggagagtttgcttctgagtggggatgaatacaatcaggactttgattcaaccaattttgaggaatctcaggatgaggatgatgctcttaatgaaattgtgcgatgtatttgtgagatggatgaggagaatggcttcatgatccagtgtgaagagtgcttgtgttggcaacacagcgtgtgcatggggctgctggaggagagcattccagagcagtacatctgctatatctgccgggacccaccaggtcagaggtggagtgcaaaatatcgttatgataaggagtggttgaataatgggagaatgtgcgggttatcatttttcaaagaaaattattctcatctcaatgccaaaaagatagtttctacacatcacctgcttgctgatgtctatggtgttacagaagtgctacacgggctacagctgaagattggaatactaaagaataaacatcatcctgaccttcatctctgggcttgttccgggaagcgaaaagaccaagatcaaataatagctggggtggagaaaaaaatagctcaagacacagttaatcgagaagaaaagaaatatgtacagaaccataaagaaccacctcgtttgcccctaaaaatggaaggaacttatataacaagtgagcatagctatcaaaagccacaaagttttggtcaggactgtaaatctctcgcagaccctgggagctcagatgatgatgatgttagtagtttggaagaagaacaagaattccacatgagaagtaaaaacagtttacagtactcagcaaaagaacatggaatgcctgaaaagaatccagctgaagggaatacagtatttgtttataatgataaaaagggcaccgaagacccaggagactcacatcttcagtggcagctcaatctccttacacacatagaaaatgtgcagaacgaagttaccagcaggatggacctaatagaaaaagaagtcgatgttctggaaagctggcttgatttcacaggggagttggagccaccagatcctcttgcaagattgccccaacttaaacgccacataaaacagctcctaattgacatgggcaaagtacagcagatagcaactctttgctctgtatgacaacagtgaacacttaatgaaagaatgtggctttcttcagtcaaagcatttttattatccacgtgatggctaagtggataatttaaaagcttagtaatgtctggtcattcactgatttgtgatgtcaataggatggcaccttggaaagaaaaatgaagaacaactttatcaaggaagctagtatttaaaaacaaattcatgagcaagctgcaaatgagaatgtgttatatgccaaggaacaatgaagtagaatataatgtatactaagggatttcaagttctcagaatttttgagtagttgcttacgtgaagctcaagatacctgtagaaagaaatatggtatatttgtatagtttttaatagaaagatctatgtttataaaccagcacttggccaaaaacaaaattgtaaaggaaatttaaattctggagaattctacagggttgctctaagaactgtcttctcagcagttgatccagctgtacggaaatttagggtatttaaacttttaaaggatcatgagctgtttcttgggcgatgaatgttctcaatcagaaaactgacagtagaaatctcacttctggggaaaacagttgtggaattcttacttcattatgaatgtatttaaaaaacaaacaccaaataattggaatatattgcaggcattaagctcattaaaaacaaactggcttgcagaagggtccgatgtgccaagtgatcatgattctgctggaaagaggattttaaatattgtgggagttctcccaccctaagtcttacataatgccaccagtccatccaaaacctatatatcacctatactatatatatcatatatatagttgaatggcagtattcaggctcaacgtacagtttgatcctgagtatgcttggtgtttgccttcagaaaaaaaaaatacattgtaaataacctcagctgggatgaggagtgacagaatatcaaaataatttgtggctgtggatttttttaactgctagtagtggaatactggaaaagcttcatttctgaagatgaattttatttttaaaaaatacatgcacactcaaaacttttagctttgatcacaagtggacaaatttctgaaaccaaaggcaactaagttgctgtgttagctcttgctggattttgagcctaggtcctactgtctgccagtactcatgtgagttgtatgtgcccccagtgctacatacgcaggtatgcgtaagtgtgtatgcttgttttaaacaaacactcaacgtacatatgtacataatctacacatatttatatcacatatctagttttattactatagactatacgaattggtggttaacatgaaatgttaccttttaacagactgtttttaaaaattaaaaatgtatgtataggttttgaaatttttttaaaaggggagaaagactgttaagaggaggctatttgatgacataacacttgaatattttatgcctcattctgtttatcagttctcgcaatctgtataaatgcattttagaactgatagacagtaaacttgaatttatctttgataagaatacatgccactgtacattcagatattatttaaatttgcaaacacattgttctatatgtaagggtactgtatgtaaaactctgtattaaaactattccacata

SEQ ID NO: 346837 - DNA, 3280 bp, Homo sapiens
ggcacgaggcggcggaggcggcggcggcggcggcgatggcagcggaccctgagcgagcttgagggctcggacccagctccctcccgcgaaaccttgggcggatccggcgctgcggccccagctcgctccgctcctgctccctccccggccgctgcctgggcggaggcagaggcagaggcccgggctggccgccctgctcgtgccccagctcggccccggacggcccggctgctgtgcagagaggaggccgagtcgtgaaaagagaatactgaagaataggatctcaagatgagtaaaaagcccccaaatcgccctggaatcacttttgagattggtgctcgtttggaggcactggactacttacaaaaatggtatccatcacgaattgaaaaaattgactatgaggagggcaagatgttggtccattttgagcgctggagtcatcgttatgatgagtggatttactgggatagcaatagattgcgaccccttgagagaccagcactaagaaaagaagggctaaaagatgaggaagatttctttgattttaaagctggagaagaagttctggctcgttggacagactgtcgctattaccctgccaagattgaagcaattaacaaagaaggaacatttacagttcagttttatgatggagtaattcgttgtttaaaaagaatgcacattaaagccatgcccgaggatgctaaggggcaggtgaaatcccagcatccactaagctggtgttgtcctatcgacccagctggatcgtgtaaccagtctatgggaagtgaggattggatagctttagtcaaagcagctgctgcagctgcagccaagaacaaaacagggagtaaacctcgaaccagcgctaacagcaataaagataaggataaagatgagagaaagtggtttaaagtaccttcaaagaaggaggaaacttcaacttgtatagccacaccagacgtagagaagaaggaagatctgcctacatctagtgaaacatttggacttcatgtagagaacgttccaaagatggtctttccacagccagagagcacattatcaaacaagaggaaaaataatcaaggcaactcgtttcaggcaaagagagctcgacttaacaagattactggtttgttggcatccaaagctgttggggttgatggtgctgaaaaaaaggaagactacaatgaaacagctccaatgctggagcaggcgatttcacctaaacctcaaagtcagaaaaaaaatgaagctgacattagcagttctgccaacactcagaaacctgcactgttatcctcaactttgtcttcagggaaggctcgcagcaagaaatgcaaacatgaatctggagattcttctgggtgtataaaaccccctaaatcaccactttccccagaattaatacaagtcgaggatttgacgcttgtatctcagctttcttcttcagtgataaataaaactagtcctccacagcctgtgaatccccctagacctttcaagcatagtgagcggagaagaagatctcagcgtttagccaccttacccatgcctgatgattctgtagaaaaggtttcttctccctctccagccactgatgggaaagtattctccatcagttctcaaaatcagcaagaatcttcagtaccagaggtgcctgatgttgcacatttgccacttgagaagctgggaccctgtctccctcttgacttaagtcgtggttcagaagttacagcaccggtagcctcagattcctcttaccgtaatgaatgtcccagggcagaaaaagaggatacacagatgcttccaaatccttcttccaaagcaatagctgatggaagaggagctccagcagcagcaggaatatcgaaaacagaaaaaaaagtgaaattggaagacaaaagctcaacagcatttggtaagagaaaagaaaaagataaggaaagaagagagaagagagacaaagatcactacagaccaaaacagaagaagaagaaaaaaaagaaaaagaaatctaagcaacatgactattcagactatgaagacagttccctcgaatttttggaaaggtgctcttctccactaactcgatcttctgggagttctctggcttcacgaagcatgtttacggagaaaactacaacctatcagtacccaagggcaattctatccgttgatcttagtggtgaaaacttatcagatgtagacttcctagatgattcttcaacggagagtttgcttctgagtggggatgaatacaatcaggactttgattcaaccaattttgaggaatctcaggatgaggatgatgctcttaatgaaattgtgcgatgtatttgtgagatggatgaggagaatggcttcatgatccagtgtgaagagtgcttgtgttggcaacacagcgtgtgcatggggctgctggaggagagcattccagagcagtacatctgctatatctgccgggacccaccaggtcagaggtggagtgcaaaatatcgttatgataaggagtggttgaataatgggagaatgtgcgggttatcatttttcaaagaaaattattctcatctcaatgccaaaaagatagtttctacacatcacctgcttgctgatgtctatggtgttacagaagtgctacacgggctacagctgaagattggaatactaaagaataaacatcatcctgaccttcatctctgggcttgttccgggaagcgaaaagaccaagatcaaataatagctggggtggagaaaaaaatagctcaagacacagttaatcgagaagaaaagaaatatgtacagaaccataaagaaccacctcgtttgcccctaaaaatggaaggaacttatataacaagtgagcatagctatcaaaagccacaaagttttggtcaggactgtaaatctctcgcagaccctgggagctcagatgatgatgatgttagtagtttggaagaagaacaagaattccacatgagaagtaaaaacagtttacagtactcagcaaaagaacatggaatgcctgaaaaggtaaaactagttcatttttctttgcttggaaactatgagagaagaacaaaggaaaattttataaaataaggcatactgaattcccagattttagttgtatttccaagttccccagtaccttgttaaagtaaggagatttttttgttttctctacaggaaaacactggccatttgaacatttgattatctcctaattcagaattgtagtaattcaataaactgttactctaacaaaagtttcaat

SEQ ID NO: 346838 - DNA, 2502 bp, Homo sapiens
ggcacgaggcggcggaggcggcggcggcggcggcgatggcagcggaccctgagcgagcttgagggctcggacccagctccctcccgcgaaaccttgggcggatccggcgctgcggccccagctcgctccgctcctgctccctccccggccgctgcctgggcggaggcagaggcagaggcccgggctggccgccctgctcgtgccccagctcggccccggacggcccggctgctgtgcagagaggaggccgagtcgtgaaaagagaatactgaagaataggatctcaagatgagtaaaaagcccccaaatcgccctggaatcacttttgagattggtgctcgtttggaggcactggactacttacaaaaatggtatccatcacgaattgaaaaaattgactatgaggagggcaagatgttggtccattttgagcgctggagtcatcgttatgatgagtggatttactgggatagcaatagattgcgaccccttgagagaccagcactaagaaaagaagggctaaaagatgaggaagatttctttgattttaaagctggagaagaagttctggctcgttggacagactgtcgctattaccctgccaagattgaagcaattaacaaagaaggaacatttacagttcagttttatgatggagtaattcgttgtttaaaaagaatgcacattaaagccatgcccgaggatgctaaggggcaggtgaaatcccagcatccactaagctggtgttgtcctatcgacccagctggatcgtgtaaccagtctatgggaagtgaggattggatagctttagtcaaagcagctgctgcagctgcagccaagaacaaaacagggagtaaacctcgaaccagcgctaacagcaataaagataaggataaagatgagagaaagtggtttaaagtaccttcaaagaaggaggaaacttcaacttgtatagccacaccagacgtagagaagaaggaagatctgcctacatctagtgaaacatttggacttcatgtagagaacgttccaaagatggtctttccacagccagagagcacattatcaaacaagaggaaaaataatcaaggcaactcgtttcaggcaaagagagctcgacttaacaagattactggtttgttggcatccaaagctgttggggttgatggtgctgaaaaaaaggaagactacaatgaaacagctccaatgctggagcaggcgatttcacctaaacctcaaagtcagaaaaaaaatgaagctgacattagcagttctgccaacactcagaaacctgcactgttatcctcaactttgtcttcagggaaggctcgcagcaagaaatgcaaacatgaatctggagattcttctgggtgtataaaaccccctaaatcaccactttccccagaattaatacaagtcgaggatttgacgcttgtatctcagctttcttcttcagtgataaataaaactagtcctccacagcctgtgaatccccctagacctttcaagcatagtgagcggagaagaagatctcagcgtttagccaccttacccatgcctgatgattctgtagaaaaggtttcttctccctctccagccactgatgggaaagtattctccatcagttctcaaaatcagcaagaatcttcagtaccagaggtgcctgatgttgcacatttgccacttgagaagctgggaccctgtctccctcttgacttaagtcgtggttcagaagttacagcaccggtagcctcagattcctcttaccgtaatgaatgtcccagggcagaaaaagaggatacacagatgcttccaaatccttcttccaaagcaatagctgatggaagaggagctccagcagcagcaggaatatcgaaaacagaaaaaaaagtgaaattggaagacaaaagctcaacagcatttggtaagagaaaagaaaaagataaggaaagaagagagaagagagacaaagatcactacagaccaaaacagaagaagaagaaaaaaaagaaaaagaaatctaagcaacatgactattcagactatgaagacagttccctcgaatttttggaaaggtgctcttctccactaactcgatcttctgggagttctctggcttcacgaagcatgtttacggagaaaactacaacctatcagtacccaagggcaattctatccgttgatcttagtggtgaaaaagtatgtgtaaccatgtgatggttaaaacaagacttacaattcctaaatgtgtaactgagaataaaacgtactctgttaagagcatgcgatttaaaaacttgttagctaaactaatatgaaagtcttgatgtgagaaatttgagctactttttaatttatataaagttaaattggctttatacttattggtggaagagagtcataaggaaaatattactagtgtatatacttctgtaggtttttgcacatatatttttatattcttcactatcaactgacagagtaggtattattcacatttga

SEQ ID NO: 346839 - DNA, 2411 bp, Homo sapiens
ggcacgaggcggcggaggcggcggcggcggcggcgatggcagcggaccctgagcgagcttgagggctcggacccagctccctcccgcgaaaccttgggcggatccggcgctgcggccccagctcgctccgctcctgctccctccccggccgctgcctgggcggaggcagaggcagaggcccgggctggccgccctgctcgtgccccagctcggccccggacggcccggctgctgtgcagagaggaggccgagtcgtgaaaagagaatactgaagaataggatctcaagatgagtaaaaagcccccaaatcgccctggaatcacttttgagattggtgctcgtttggaggcactggactacttacaaaaatggtatccatcacgaattgaaaaaattgactatgaggagggcaagatgttggtccattttgagcgctggagtcatcgttatgatgagtggatttactgggatagcaatagattgcgaccccttgagagaccagcactaagaaaagaagggctaaaagatgaggaagatttctttgattttaaagctggagaagaagttctggctcgttggacagactgtcgctattaccctgccaagattgaagcaattaacaaagaaggaacatttacagttcagttttatgatggagtaattcgttgtttaaaaagaatgcacattaaagccatgcccgaggatgctaaggggcaggtgaaatcccagcatccactaagctggtgttgtcctatcgacccagctggatcgtgtaaccagtctatgggaagtgaggattggatagctttagtcaaagcagctgctgcagctgcagccaagaacaaaacagggagtaaacctcgaaccagcgctaacagcaataaagataaggataaagatgagagaaagtggtttaaagtaccttcaaagaaggaggaaacttcaacttgtatagccacaccagacgtagagaagaaggaagatctgcctacatctagtgaaacatttggacttcatgtagagaacgttccaaagatggtctttccacagccagagagcacattatcaaacaagaggaaaaataatcaaggcaactcgtttcaggcaaagagagctcgacttaacaagattactggtttgttggcatccaaagctgttggggttgatggtgctgaaaaaaaggaagactacaatgaaacagctccaatgctggagcaggcgatttcacctaaacctcaaagtcagaaaaaaaatgaagctgacattagcagttctgccaacactcagaaacctgcactgttatcctcaactttgtcttcagggaaggctcgcagcaagaaatgcaaacatgaatctggagattcttctgggtgtataaaaccccctaaatcaccactttccccagaattaatacaagtcgaggatttgacgcttgtatctcagctttcttcttcagtgataaataaaactagtcctccacagcctgtgaatccccctagacctttcaagcatagtgagcggagaagaagatctcagcgtttagccaccttacccatgcctgatgattctgtagaaaaggtttcttctccctctccagccactgatgggaaagtattctccatcagttctcaaaatcagcaagaatcttcagtaccagaggtgcctgatgttgcacatttgccacttgagaagctgggaccctgtctccctcttgacttaagtcgtggttcagaagttacagcaccggtagcctcagattcctcttaccgtaatgaatgtcccagggcagaaaaagaggatacacagatgcttccaaatccttcttccaaagcaatagctgatggaagaggagctccagcagcagcaggaatatcgaaaacagaaaaaaaagtgaaattggaagacaaaagctcaacagcatttggtaagagaaaagaaaaagataaggaaagaagagagaagagagacaaagatcactacagaccaaaacagaagaagaagaaaaaaaagaaaaagaaatctaagcaacatgactattcagactatgaagacagttccctcgaatttttggaaaggtgctcttctccactaactcgatcttctgggagttctctggcttcacgaagcatgtttacggagaaaactacaacctatcagtacccaagggcaattctatccgttgatcttagtggtgaaaacttatcagatgtagacttcctagatgattcttcaacggagagtttgcttctgagtggggatgaatacaatcaggactttgattcaaccaattttgaggaatctcaggatgaggatgatgctcttttttaaaccccgcaacccctttgtgaaatggttaaggataatggggcggtgttttaggctcaggaaagagctatgggcatgactgggac

SEQ ID NO: 346840 - DNA, 2403 bp, Homo sapiens
ggcacgaggcggcggaggcggcggcggcggcggcgatggcagcggaccctgagcgagcttgagggctcggacccagctccctcccgcgaaaccttgggcggatccggcgctgcggccccagctcgctccgctcctgctccctccccggccgctgcctgggcggaggcagaggcagaggcccgggctggccgccctgctcgtgccccagctcggccccggacggcccggctgctgtgcagagaggaggccgagtcgtgaaaagagaatactgaagaataggatctcaagatgagtaaaaagcccccaaatcgccctggaatcacttttgagattggtgctcgtttggaggcactggactacttacaaaaatggtatccatcacgaattgaaaaaattgactatgaggagggcaagatgttggtccattttgagcgctggagtcatcgttatgatgagtggatttactgggatagcaatagattgcgaccccttgagagaccagcactaagaaaagaagggctaaaagatgaggaagatttctttgattttaaagctggagaagaagttctggctcgttggacagactgtcgctattaccctgccaagattgaagcaattaacaaagaaggaacatttacagttcagttttatgatggagtaattcgttgtttaaaaagaatgcacattaaagccatgcccgaggatgctaaggggcaggattggatagctttagtcaaagcagctgctgcagctgcagccaagaacaaaacagggagtaaacctcgaaccagcgctaacagcaataaagataaggataaagatgagagaaagtggtttaaagtaccttcaaagaaggaggaaacttcaacttgtatagccacaccagacgtagagaagaaggaagatctgcctacatctagtgaaacatttggacttcatgtagagaacgttccaaagatggtctttccacagccagagagcacattatcaaacaagaggaaaaataatcaaggcaactcgtttcaggcaaagagagctcgacttaacaagattactggtttgttggcatccaaagctgttggggttgatggtgctgaaaaaaaggaagactacaatgaaacagctccaatgctggagcaggcgatttcacctaaacctcaaagtcagaaaaaaaatgaagctgacattagcagttctgccaacactcagaaacctgcactgttatcctcaactttgtcttcagggaaggctcgcagcaagaaatgcaaacatgaatctggagattcttctgggtgtataaaaccccctaaatcaccactttccccagaattaatacaagtcgaggatttgacgcttgtatctcagctttcttcttcagtgataaataaaactagtgagcacagatttttaaaaaatagttatttatcctataagatacattaaaaacagtttgattgtagttatattgtatttttatgaagttgctttttaaaaactcaagtggatatgatagggaaggcttgaaactatttcaggggcaaaaaccatagacatttcttactgatttattgcttagagactactgctggttgagaatcctttccatttaataacacagattccactgtagtttgactctcctcaactcataatccaagcatactgagaggcctgattcattacaaaaaaaaaaagttataaaaagacccaggatagctatttttacttaagactattcctgtagattttttgtccccacttgtctataactttcctctgcaatacattttattcattcttattataatatttatagtctagacttcagtttaatctttttaatgaaaaaaaaatgcccccatgattgtatttttaaagattttactgtttcagtacttctaatttttcaagagttaacgcagtctttttcgaaaacacctttcacatgggtatatctatctatctccctatatatctgtatatataaataatacaagatttgtgttgaccctgagtttctcatattagtttagtatcctaagttggagacatgaataacagttatttgaaaagtcagttggtaaatgatggttttttttgctctttatgcaaaaaatgaaatacatgatcagttgagtgaatatgacatgtttccttattccatattgtgtcttccagaataatcaaagatgttggcattcagaagacttttatcaaacttattaacctattttccttcagttgccatattttctactgaatcattttttcattttgatcaggttttgctttttctttttaataggtggaaagaatgggaacataattcaattgttttcctaataagcttcatttcattatggcatttatcatgaaatagtgtcagtagtagtcactggaatg

SEQ ID NO: 346841 - DNA, 840 bp, Homo sapiens
cttgggtagtacctatcaaaataaatgtgcatgttatccagcaatcccatatctagaaatttatctgactgaaatattctgacttgtgtgcaaagacacacacaggtacacaaacatataatggtagggaattggttggctcgactggtacatttgtaactcttcagccctagagtaaaagtaagggaaatctatctgtatgacatgatatggcaagatgcccctagcatgttacgtacaaaaaggcagattgtatgtgtcctggatgtgtcacaagaagatgtgtatacttatccatttaagaactaattttaggtatacagaaaaagtctggaagattatacctcagttatttatgtttgccatgggagaggaaatttttactttctgtgcatttatatttaggatttttgtcatcaggagttatcactttttgactgaataaaagtttttaaaatatgctcacattaaagtttttcaaattttacaatgaaaatgacaatgacaaatcagtagaaaaagaaatgcatgtatcaaatgatgatgtgaactatcaacacaattaaatttgttattgcttttctgagtattatttctttaattgagaagattcaaattttggatgaaatcatggagggagttaatttaaagattacctttgcttttgtcttgagtcctagatgtcctcctaacctaattctgaaatagatcattgtattcagcttgttaatagatttttttttttttctgaactgctgtttttccaactttgttttaaggaataaacatcatcctgaccttcatctctgggcttgttccgggaagcgaaaagaccaagat

SEQ ID NO: 346842 - DNA, 290 bp, Homo sapiens
ccaagagggactagaactctgtggggtgggatgacaggacgctaacctctcggaaatgtcttgagtatgttggccttctaaagatggggaagtgaacccttaactccatcacagctccaactttctgattgtttcattttctgactgttcttccagttgcagtttaaatttgtttatcttcttctctcttttagttctggaaagctggcttgatttcacaggggagttggagccaccagatcctcttgcaagattgccccaacttaaacgccacataaaacagctcctaa

SEQ ID NO: 346843 - DNA, 261 bp, Homo sapiens
cttttcatggatgagaagcgaaagtggtagcatgattatttggtgtatcctgaaacatgactttcgttatttttatagtgaccttaattatctgacactttattaatatttctttctgtatcttatgttgcagactattcagactatgaagacagttccctcgaatttttggaaaggtgctcttctccactaactcgatcttctgggagttctctggcttcacgaagcatgtttacggagaaaactacaacctatcagtac

SEQ ID NO: 346844 - DNA, 2766 bp, Homo sapiens
  misc_feature (263)..(263): n is a, c, g, or t
gctattttagattttattcctgtgaaaatatatccatggaatacctgttattgaatatgcttcctattttatgagaggttatgcaatctaactcatttgattattaaatttgataacctaccatgttcagctatcatgtaaatattgttatctctatatttatgtttatgtagttacctgtgaaagtagctttgaaaatgtgacacatatttttattagtgtaattacattttaattaatttttaatacttcacatgttttgngtttttcctttggaggattggatagctttagtcaaagcagctgctgcagctgcagccaagaacaaaacagggagtaaacctcgaaccagcgctaacagcaataaagataaggataaagatgagagaaagtggtttaaagtaccttcaaagaaggaggaaacttcaacttgtatagccacaccagacgtagagaagaaggaagatctgcctacatctagtgaaacatttggacttcatgtagagaacgttccaaagatggtctttccacagccagagagcacattatcaaacaagaggaaaaataatcaaggcaactcgtttcaggcaaagagagctcgacttaacaagattactggtttgttggcatccaaagctgttggggttgatggtgctgaaaaaaaggaagactacaatgaaacagctccaatgctggagcaggtatgaaatggtagcatttgatttttttcaaggttcccactggaatgatcacggagctctagtatctacgtaattgaaattccccttttgatcagatatgggaataggaagctaattaattgatgatatatttttaactctgccttctccaaggtatacagataactacagacttcattagtgtttgatttcatagactggcattaaagcctttgtctccaaaatttgaaggcctggagacaggcatcccagggtataagcttccagctggatcacctttaactagcttacaaaaagacccttacacaaatactttccatttgtgagttaaaacagggttttttgacatcgaataaagcttcttttgtaagaagtttcttttatattgtaacaattggtgttgttagactgactatgtgttttatgaattgatcaatgagccatacatttttgctaggatgtatattttaataactacaaaaaaagagagtttaaaaaactattaagggtctgtctttaaaccacctaatagaggaatttaaaagtgaaggttgcagttgctagattttgccttggctaccttcagattcccacaatacttgtacataatgaactgtgcatgcttttacattctctaagggcttaacttcttaggcactgtaagactataagaacgcagtaatagccataactggatttccttggttctcctgttttaaaatctgagccttaatgtagttttaatatatcctttttgtattacttttctttattagtagcctaataaagaagactttgagtatcttttgctctcctctagatgcgttttaaaaactattccaaatttaattgatattgtattgagtttttcagggttattttaggcctgatttgataacaatgcgttgttttggtgcctccattaatgttgtattaaatcaatgggtcttttaaattgattaatatgtcattgaatcataccttctgattttctgtgatcatccaacggttaagtctttgccgttattgtcaatatatcaaccaaattttaaataactttttttactgtgtattactatattcaacgtcccagatataacaatattttgtattttcaccactgtttatggtattctcagaatgcgataaatcagggacttgggtaataaaatgtttctggaaaattcattacaatgtcaatctttgattatgcacaatcctgctgaggtgaatgtgattgtgaaaagtacttattaaatgtggaagttagtgtagagggcagtacccgtcttagagagaagtacagaaaaccacgttttgaaattgaatttaaaaaagaaaggaaaattgtgtaactcggctgtttctattttcataattaaaaacttttgagagtccttgccagttttgtaacaaagagaccaacaatcattaatgaaaaccttgtaaattattttagattttcaggaacaccatgccattccctcattttctacttgtcattcaggttgatttcaatgtgaaaatgttttgtgaacaaacacttatttttatcctatgtgttagcctcgcttcatagttaaaaagccgagttataaagctcttaattacatctcaattggtatcagcaatagacctaaaggagaggtattgattgttactaacctctgtttcctaatgagttaaagtaatgtcactcatgacatagattgataacaggcctgtagtcaaaacttactgtgctaatggacttatttatattttttaaaaattcaaactgtggtcttgaaccccaattctcagcttattaattatagattatttaattgtattagggatatgtcatgttatatttacttttggataaaacttgcattagatgcataataactcagtaagttttaaaaacaatgttaatttttccttgtttagaagttaagcaccttatcaagatattaagttttaaaatcttgttttataactttgtaacttgagagtaatggatgctgtagtgatgtctttcacatatgtgaagatgaacaataaaattgtttatttacaagta

SEQ ID NO: 346845 - DNA, 5065 bp, Homo sapiens
ggcacgaggcggcggaggcggcggcggcggcggcgatggcagcggaccctgagcgagcttgagggctcggacccagctccctcccgcgaaaccttgggcggatccggcgctgcggccccagctcgctccgctcctgctccctccccggccgctgcctgggcggaggcagaggcagaggcccgggctggccgccctgctcgtgccccagctcggccccggacggcccggctgctgtgcagagaggaggccgagtcgtgaaaagagaatactgaagaataggatctcaagatgagtaaaaagcccccaaatcgccctggaatcacttttgagattggtgctcgtttggaggcactggactacttacaaaaatggtatccatcacgaattgaaaaaattgactatgaggagggcaagatgttggtccattttgagcgctggagtcatcgttatgatgagtggatttactgggatagcaatagattgcgaccccttgagagaccagcactaagaaaagaagggctaaaagatgaggaagatttctttgattttaaagctggagaagaagttctggctcgttggacagactgtcgctattaccctgccaagattgaagcaattaacaaagaaggaacatttacagttcagttttatgatggagtaattcgttgtttaaaaagaatgcacattaaagccatgcccgaggatgctaaggggcaggtgaaatcccagcatccactaagctggtgttgtcctatcgacccagctggatcgtgtaaccagtctatgggaagtgaggattggatagctttagtcaaagcagctgctgcagctgcagccaagaacaaaacagggagtaaacctcgaaccagcgctaacagcaataaagataaggataaagatgagagaaagtggtttaaagtaccttcaaagaaggaggaaacttcaacttgtatagccacaccagacgtagagaagaaggaagatctgcctacatctagtgaaacatttggacttcatgtagagaacgttccaaagatggtctttccacagccagagagcacattatcaaacaagaggaaaaataatcaaggcaactcgtttcaggcaaagagagctcgacttaacaagattactggtttgttggcatccaaagctgttggggttgatggtgctgaaaaaaaggaagactacaatgaaacagctccaatgctggagcaggcgatttcacctaaacctcaaagtcagaaaaaaaatgaagctgacattagcagttctgccaacactcagaaacctgcactgttatcctcaactttgtcttcagggaaggctcgcagcaagaaatgcaaacatgaatctggagattcttctgggtgtataaaaccccctaaatcaccactttccccagaattaatacaagtcgaggatttgacgcttgtatctcagctttcttcttcagtgataaataaaactagtcctccacagcctgtgaatccccctagacctttcaagcatagtgagcggagaagaagatctcagcgtttagccaccttacccatgcctgatgattctgtagaaaaggtttcttctccctctccagccactgatgggaaagtattctccatcagttctcaaaatcagcaagaatcttcagtaccagaggtgcctgatgttgcacatttgccacttgagaagctgggaccctgtctccctcttgacttaagtcgtggttcagaagttacagcaccggtagcctcagattcctcttaccgtaatgaatgtcccagggcagaaaaagaggatacacagatgcttccaaatccttcttccaaagcaatagctgatggaagaggagctccagcagcagcaggaatatcgaaaacagaaaaaaaagtgaaattggaagacaaaagctcaacagcatttggtaagagaaaagaaaaagataaggaaagaagagagaagagagacaaagatcactacagaccaaaacagaagaagaagaaaaaaaagaaaaagaaatctaagcaacatgactattcagactatgaagacagttccctcgaatttttggaaaggtgctcttctccactaactcgatcttctgggagttctctggcttcacgaagcatgtttacggagaaaactacaacctatcagtacccaagggcaattctatccgttgatcttagtggtgaaaacttatcagatgtagacttcctagatgattcttcaacggagagtttgcttctgagtggggatgaatacaatcaggactttgattcaaccaattttgaggaatctcaggatgaggatgatgctcttaatgaaattgtgcgatgtatttgtgagatggatgaggagaatggcttcatgatccagtgtgaagagtgcttgtgttggcaacacagcgtgtgcatggggctgctggaggagagcattccagagcagtacatctgctatatctgccgggacccaccaggtcagaggtggagtgcaaaatatcgttatgataaggagtggttgaataatgggagaatgtgcgggttatcatttttcaaagaaaattattctcatctcaatgccaaaaagatagtttctacacatcacctgcttgctgatgtctatggtgttacagaagtgctacacgggctacagctgaagattggaatactaaagaataaacatcatcctgaccttcatctctgggcttgttccgggaagcgaaaagaccaagatcaaataatagctggggtggagaaaaaaatagctcaagacacagttaatcgagaagaaaagaaatatgtacagaaccataaagaaccacctcgtttgcccctaaaaatggaaggaacttatataacaagtgagcatagctatcaaaagccacaaagttttggtcaggactgtaaatctctcgcagaccctgggagctcagatgatgatgatgttagtagtttggaagaagaacaagaattccacatgagaagtaaaaacagtttacagtactcagcaaaagaacatggaatgcctgaaaagaatccagctgaagggaatacagtatttgtttataatgataaaaagggcaccgaagacccaggagactcacatcttcagtggcagctcaatctccttacacacatagaaaatgtgcagaacgaagttaccagcaggatggacctaatagaaaaagaagtcgatgttctggaaagctggcttgatttcacaggggagttggagccaccagatcctcttgcaagattgccccaacttaaacgccacataaaacagctcctaattgacatgggcaaagtacagcagatagcaactctttgctctgtatgacaacagtgaacacttaatgaaagaatgtggctttcttcagtcaaagcatttttattatccacgtgatggctaagtggataatttaaaagcttagtaatgtctggtcattcactgatttgtgatgtcaataggatggcaccttggaaagaaaaatgaagaacaactttatcaaggaagctagtatttaaaaacaaattcatgagcaagctgcaaatgagaatgtgttatatgccaaggaacaatgaagtagaatataatgtatactaagggatttcaagttctcagaatttttgagtagttgcttacgtgaagctcaagatacctgtagaaagaaatatggtatatttgtatagtttttaatagaaagatctatgtttataaaccagcacttggccaaaaacaaaattgtaaaggaaatttaaattctggagaattctacagggttgctctaagaactgtcttctcagcagttgatccagctgtacggaaatttagggtatttaaacttttaaaggatcatgagctgtttcttgggcgatgaatgttctcaatcagaaaactgacagtagaaatctcacttctggggaaaacagttgtggaattcttacttcattatgaatgtatttaaaaaacaaacaccaaataattggaatatattgcaggcattaagctcattaaaaacaaactggcttgcagaagggtccgatgtgccaagtgatcatgattctgctggaaagaggattttaaatattgtgggagttctcccaccctaagtcttacataatgccaccagtccatccaaaacctatatatcacctatactatatatatcatatatatagttgaatggcagtattcaggctcaacgtacagtttgatcctgagtatgcttggtgtttgccttcagaaaaaaaaaatacattgtaaataacctcagctgggatgaggagtgacagaatatcaaaataatttgtggctgtggatttttttaactgctagtagtggaatactggaaaagcttcatttctgaagatgaattttatttttaaaaaatacatgcacactcaaaacttttagctttgatcacaagtggacaaatttctgaaaccaaaggcaactaagttgctgtgttagctcttgctggattttgagcctaggtcctactgtctgccagtactcatgtgagttgtatgtgcccccagtgctacatacgcaggtatgcgtaagtgtgtatgcttgttttaaacaaacactcaacgtacatatgtacataatctacacatatttatatcacatatctagttttattactatagactatacgaattggtggttaacatgaaatgttaccttttaacagactgtttttaaaaattaaaaatgtatgtataggttttgaaatttttttaaaaggggagaaagactgttaagaggaggctatttgatgacataacacttgaatattttatgcctcattctgtttatcagttctcgcaatctgtataaatgcattttagaactgatagacagtaaacttgaatttatctttgataagaatacatgccactgtacattcagatattatttaaatttgcaaacacattgttctatatgtaagggtactgtatgtaaaactctgtattaaaactattccacatatcctaaaatttcagcttgcctttttgcggccttatattttgatgtaaagattaaaagaatgtgc

SEQ ID NO: 346846 - DNA, 4987 bp, Homo sapiens
ggcacgaggcggcggaggcggcggcggcggcggcgatggcagcggaccctgagcgagcttgagggctcggacccagctccctcccgcgaaaccttgggcggatccggcgctgcggccccagctcgctccgctcctgctccctccccggccgctgcctgggcggaggcagaggcagaggcccgggctggccgccctgctcgtgccccagctcggccccggacggcccggctgctgtgcagagaggaggccgagtcgtgaaaagagaatactgaagaataggatctcaagatgagtaaaaagcccccaaatcgccctggaatcacttttgagattggtgctcgtttggaggcactggactacttacaaaaatggtatccatcacgaattgaaaaaattgactatgaggagggcaagatgttggtccattttgagcgctggagtcatcgttatgatgagtggatttactgggatagcaatagattgcgaccccttgagagaccagcactaagaaaagaagggctaaaagatgaggaagatttctttgattttaaagctggagaagaagttctggctcgttggacagactgtcgctattaccctgccaagattgaagcaattaacaaagaaggaacatttacagttcagttttatgatggagtaattcgttgtttaaaaagaatgcacattaaagccatgcccgaggatgctaaggggcaggattggatagctttagtcaaagcagctgctgcagctgcagccaagaacaaaacagggagtaaacctcgaaccagcgctaacagcaataaagataaggataaagatgagagaaagtggtttaaagtaccttcaaagaaggaggaaacttcaacttgtatagccacaccagacgtagagaagaaggaagatctgcctacatctagtgaaacatttggacttcatgtagagaacgttccaaagatggtctttccacagccagagagcacattatcaaacaagaggaaaaataatcaaggcaactcgtttcaggcaaagagagctcgacttaacaagattactggtttgttggcatccaaagctgttggggttgatggtgctgaaaaaaaggaagactacaatgaaacagctccaatgctggagcaggcgatttcacctaaacctcaaagtcagaaaaaaaatgaagctgacattagcagttctgccaacactcagaaacctgcactgttatcctcaactttgtcttcagggaaggctcgcagcaagaaatgcaaacatgaatctggagattcttctgggtgtataaaaccccctaaatcaccactttccccagaattaatacaagtcgaggatttgacgcttgtatctcagctttcttcttcagtgataaataaaactagtcctccacagcctgtgaatccccctagacctttcaagcatagtgagcggagaagaagatctcagcgtttagccaccttacccatgcctgatgattctgtagaaaaggtttcttctccctctccagccactgatgggaaagtattctccatcagttctcaaaatcagcaagaatcttcagtaccagaggtgcctgatgttgcacatttgccacttgagaagctgggaccctgtctccctcttgacttaagtcgtggttcagaagttacagcaccggtagcctcagattcctcttaccgtaatgaatgtcccagggcagaaaaagaggatacacagatgcttccaaatccttcttccaaagcaatagctgatggaagaggagctccagcagcagcaggaatatcgaaaacagaaaaaaaagtgaaattggaagacaaaagctcaacagcatttggtaagagaaaagaaaaagataaggaaagaagagagaagagagacaaagatcactacagaccaaaacagaagaagaagaaaaaaaagaaaaagaaatctaagcaacatgactattcagactatgaagacagttccctcgaatttttggaaaggtgctcttctccactaactcgatcttctgggagttctctggcttcacgaagcatgtttacggagaaaactacaacctatcagtacccaagggcaattctatccgttgatcttagtggtgaaaacttatcagatgtagacttcctagatgattcttcaacggagagtttgcttctgagtggggatgaatacaatcaggactttgattcaaccaattttgaggaatctcaggatgaggatgatgctcttaatgaaattgtgcgatgtatttgtgagatggatgaggagaatggcttcatgatccagtgtgaagagtgcttgtgttggcaacacagcgtgtgcatggggctgctggaggagagcattccagagcagtacatctgctatatctgccgggacccaccaggtcagaggtggagtgcaaaatatcgttatgataaggagtggttgaataatgggagaatgtgcgggttatcatttttcaaagaaaattattctcatctcaatgccaaaaagatagtttctacacatcacctgcttgctgatgtctatggtgttacagaagtgctacacgggctacagctgaagattggaatactaaagaataaacatcatcctgaccttcatctctgggcttgttccgggaagcgaaaagaccaagatcaaataatagctggggtggagaaaaaaatagctcaagacacagttaatcgagaagaaaagaaatatgtacagaaccataaagaaccacctcgtttgcccctaaaaatggaaggaacttatataacaagtgagcatagctatcaaaagccacaaagttttggtcaggactgtaaatctctcgcagaccctgggagctcagatgatgatgatgttagtagtttggaagaagaacaagaattccacatgagaagtaaaaacagtttacagtactcagcaaaagaacatggaatgcctgaaaagaatccagctgaagggaatacagtatttgtttataatgataaaaagggcaccgaagacccaggagactcacatcttcagtggcagctcaatctccttacacacatagaaaatgtgcagaacgaagttaccagcaggatggacctaatagaaaaagaagtcgatgttctggaaagctggcttgatttcacaggggagttggagccaccagatcctcttgcaagattgccccaacttaaacgccacataaaacagctcctaattgacatgggcaaagtacagcagatagcaactctttgctctgtatgacaacagtgaacacttaatgaaagaatgtggctttcttcagtcaaagcatttttattatccacgtgatggctaagtggataatttaaaagcttagtaatgtctggtcattcactgatttgtgatgtcaataggatggcaccttggaaagaaaaatgaagaacaactttatcaaggaagctagtatttaaaaacaaattcatgagcaagctgcaaatgagaatgtgttatatgccaaggaacaatgaagtagaatataatgtatactaagggatttcaagttctcagaatttttgagtagttgcttacgtgaagctcaagatacctgtagaaagaaatatggtatatttgtatagtttttaatagaaagatctatgtttataaaccagcacttggccaaaaacaaaattgtaaaggaaatttaaattctggagaattctacagggttgctctaagaactgtcttctcagcagttgatccagctgtacggaaatttagggtatttaaacttttaaaggatcatgagctgtttcttgggcgatgaatgttctcaatcagaaaactgacagtagaaatctcacttctggggaaaacagttgtggaattcttacttcattatgaatgtatttaaaaaacaaacaccaaataattggaatatattgcaggcattaagctcattaaaaacaaactggcttgcagaagggtccgatgtgccaagtgatcatgattctgctggaaagaggattttaaatattgtgggagttctcccaccctaagtcttacataatgccaccagtccatccaaaacctatatatcacctatactatatatatcatatatatagttgaatggcagtattcaggctcaacgtacagtttgatcctgagtatgcttggtgtttgccttcagaaaaaaaaaatacattgtaaataacctcagctgggatgaggagtgacagaatatcaaaataatttgtggctgtggatttttttaactgctagtagtggaatactggaaaagcttcatttctgaagatgaattttatttttaaaaaatacatgcacactcaaaacttttagctttgatcacaagtggacaaatttctgaaaccaaaggcaactaagttgctgtgttagctcttgctggattttgagcctaggtcctactgtctgccagtactcatgtgagttgtatgtgcccccagtgctacatacgcaggtatgcgtaagtgtgtatgcttgttttaaacaaacactcaacgtacatatgtacataatctacacatatttatatcacatatctagttttattactatagactatacgaattggtggttaacatgaaatgttaccttttaacagactgtttttaaaaattaaaaatgtatgtataggttttgaaatttttttaaaaggggagaaagactgttaagaggaggctatttgatgacataacacttgaatattttatgcctcattctgtttatcagttctcgcaatctgtataaatgcattttagaactgatagacagtaaacttgaatttatctttgataagaatacatgccactgtacattcagatattatttaaatttgcaaacacattgttctatatgtaagggtactgtatgtaaaactctgtattaaaactattccacatatcctaaaatttcagcttgcctttttgcggccttatattttgatgtaaagattaaaagaatgtgc

SEQ ID NO: 346847 - DNA, 5299 bp, Homo sapiens
ggcacgaggcggcggaggcggcggcggcggcggcgatggcagcggaccctgagcgagcttgagggctcggacccagctccctcccgcgaaaccttgggcggatccggcgctgcggccccagctcgctccgctcctgctccctccccggccgctgcctgggcggaggcagaggcagaggcccgggctggccgccctgctcgtgccccagctcggccccggacggcccggctgctgtgcagagaggaggccgagtcgtgaaaagagaatactgaagaataggatctcaagatgagtaaaaagcccccaaatcgccctggaatcacttttgagattggtgctcgtttggaggcactggactacttacaaaaatggtatccatcacgaattgaaaaaattgactatgaggagggcaagatgttggtccattttgagcgctggagtcatcgttatgatgagtggatttactgggatagcaatagattgcgaccccttgagagaccagcactaagaaaagaagggctaaaagatgaggaagatttctttgattttaaagctggagaagaagttctggctcgttggacagactgtcgctattaccctgccaagattgaagcaattaacaaagaaggaacatttacagttcagttttatgatggagtaattcgttgtttaaaaagaatgcacattaaagccatgcccgaggatgctaaggggcaggtaagagtgttcagtattcctagctacccaaagggttatcttcttgaacggtgactgatcaaaatatatttatatgtatattttttaaaaatgaactaattgtagggttatgtgctgatagccccaaatagcagcaagaaaaggaagcttagactgtaaaataaattatacatttgatttttgcttctttggtttagacctgctaaagttataggtcactagtttctgttccaggtgaaatcccagcatccactaagctggtgttgtcctatcgacccagctggatcgtgtaaccagtctatgggaagtgaggattggatagctttagtcaaagcagctgctgcagctgcagccaagaacaaaacagggagtaaacctcgaaccagcgctaacagcaataaagataaggataaagatgagagaaagtggtttaaagtaccttcaaagaaggaggaaacttcaacttgtatagccacaccagacgtagagaagaaggaagatctgcctacatctagtgaaacatttggacttcatgtagagaacgttccaaagatggtctttccacagccagagagcacattatcaaacaagaggaaaaataatcaaggcaactcgtttcaggcaaagagagctcgacttaacaagattactggtttgttggcatccaaagctgttggggttgatggtgctgaaaaaaaggaagactacaatgaaacagctccaatgctggagcaggcgatttcacctaaacctcaaagtcagaaaaaaaatgaagctgacattagcagttctgccaacactcagaaacctgcactgttatcctcaactttgtcttcagggaaggctcgcagcaagaaatgcaaacatgaatctggagattcttctgggtgtataaaaccccctaaatcaccactttccccagaattaatacaagtcgaggatttgacgcttgtatctcagctttcttcttcagtgataaataaaactagtcctccacagcctgtgaatccccctagacctttcaagcatagtgagcggagaagaagatctcagcgtttagccaccttacccatgcctgatgattctgtagaaaaggtttcttctccctctccagccactgatgggaaagtattctccatcagttctcaaaatcagcaagaatcttcagtaccagaggtgcctgatgttgcacatttgccacttgagaagctgggaccctgtctccctcttgacttaagtcgtggttcagaagttacagcaccggtagcctcagattcctcttaccgtaatgaatgtcccagggcagaaaaagaggatacacagatgcttccaaatccttcttccaaagcaatagctgatggaagaggagctccagcagcagcaggaatatcgaaaacagaaaaaaaagtgaaattggaagacaaaagctcaacagcatttggtaagagaaaagaaaaagataaggaaagaagagagaagagagacaaagatcactacagaccaaaacagaagaagaagaaaaaaaagaaaaagaaatctaagcaacatgactattcagactatgaagacagttccctcgaatttttggaaaggtgctcttctccactaactcgatcttctgggagttctctggcttcacgaagcatgtttacggagaaaactacaacctatcagtacccaagggcaattctatccgttgatcttagtggtgaaaacttatcagatgtagacttcctagatgattcttcaacggagagtttgcttctgagtggggatgaatacaatcaggactttgattcaaccaattttgaggaatctcaggatgaggatgatgctcttaatgaaattgtgcgatgtatttgtgagatggatgaggagaatggcttcatgatccagtgtgaagagtgcttgtgttggcaacacagcgtgtgcatggggctgctggaggagagcattccagagcagtacatctgctatatctgccgggacccaccaggtcagaggtggagtgcaaaatatcgttatgataaggagtggttgaataatgggagaatgtgcgggttatcatttttcaaagaaaattattctcatctcaatgccaaaaagatagtttctacacatcacctgcttgctgatgtctatggtgttacagaagtgctacacgggctacagctgaagattggaatactaaagaataaacatcatcctgaccttcatctctgggcttgttccgggaagcgaaaagaccaagatcaaataatagctggggtggagaaaaaaatagctcaagacacagttaatcgagaagaaaagaaatatgtacagaaccataaagaaccacctcgtttgcccctaaaaatggaaggaacttatataacaagtgagcatagctatcaaaagccacaaagttttggtcaggactgtaaatctctcgcagaccctgggagctcagatgatgatgatgttagtagtttggaagaagaacaagaattccacatgagaagtaaaaacagtttacagtactcagcaaaagaacatggaatgcctgaaaagaatccagctgaagggaatacagtatttgtttataatgataaaaagggcaccgaagacccaggagactcacatcttcagtggcagctcaatctccttacacacatagaaaatgtgcagaacgaagttaccagcaggatggacctaatagaaaaagaagtcgatgttctggaaagctggcttgatttcacaggggagttggagccaccagatcctcttgcaagattgccccaacttaaacgccacataaaacagctcctaattgacatgggcaaagtacagcagatagcaactctttgctctgtatgacaacagtgaacacttaatgaaagaatgtggctttcttcagtcaaagcatttttattatccacgtgatggctaagtggataatttaaaagcttagtaatgtctggtcattcactgatttgtgatgtcaataggatggcaccttggaaagaaaaatgaagaacaactttatcaaggaagctagtatttaaaaacaaattcatgagcaagctgcaaatgagaatgtgttatatgccaaggaacaatgaagtagaatataatgtatactaagggatttcaagttctcagaatttttgagtagttgcttacgtgaagctcaagatacctgtagaaagaaatatggtatatttgtatagtttttaatagaaagatctatgtttataaaccagcacttggccaaaaacaaaattgtaaaggaaatttaaattctggagaattctacagggttgctctaagaactgtcttctcagcagttgatccagctgtacggaaatttagggtatttaaacttttaaaggatcatgagctgtttcttgggcgatgaatgttctcaatcagaaaactgacagtagaaatctcacttctggggaaaacagttgtggaattcttacttcattatgaatgtatttaaaaaacaaacaccaaataattggaatatattgcaggcattaagctcattaaaaacaaactggcttgcagaagggtccgatgtgccaagtgatcatgattctgctggaaagaggattttaaatattgtgggagttctcccaccctaagtcttacataatgccaccagtccatccaaaacctatatatcacctatactatatatatcatatatatagttgaatggcagtattcaggctcaacgtacagtttgatcctgagtatgcttggtgtttgccttcagaaaaaaaaaatacattgtaaataacctcagctgggatgaggagtgacagaatatcaaaataatttgtggctgtggatttttttaactgctagtagtggaatactggaaaagcttcatttctgaagatgaattttatttttaaaaaatacatgcacactcaaaacttttagctttgatcacaagtggacaaatttctgaaaccaaaggcaactaagttgctgtgttagctcttgctggattttgagcctaggtcctactgtctgccagtactcatgtgagttgtatgtgcccccagtgctacatacgcaggtatgcgtaagtgtgtatgcttgttttaaacaaacactcaacgtacatatgtacataatctacacatatttatatcacatatctagttttattactatagactatacgaattggtggttaacatgaaatgttaccttttaacagactgtttttaaaaattaaaaatgtatgtataggttttgaaatttttttaaaaggggagaaagactgttaagaggaggctatttgatgacataacacttgaatattttatgcctcattctgtttatcagttctcgcaatctgtataaatgcattttagaactgatagacagtaaacttgaatttatctttgataagaatacatgccactgtacattcagatattatttaaatttgcaaacacattgttctatatgtaagggtactgtatgtaaaactctgtattaaaactattccacatatcctaaaatttcagcttgcctttttgcggccttatattttgatgtaaagattaaaagaatgtgc

SEQ ID NO: 346848 - DNA, 4548 bp, Homo sapiens
  misc_feature (263)..(263): n is a, c, g, or t
gctattttagattttattcctgtgaaaatatatccatggaatacctgttattgaatatgcttcctattttatgagaggttatgcaatctaactcatttgattattaaatttgataacctaccatgttcagctatcatgtaaatattgttatctctatatttatgtttatgtagttacctgtgaaagtagctttgaaaatgtgacacatatttttattagtgtaattacattttaattaatttttaatacttcacatgttttgngtttttcctttggaggattggatagctttagtcaaagcagctgctgcagctgcagccaagaacaaaacagggagtaaacctcgaaccagcgctaacagcaataaagataaggataaagatgagagaaagtggtttaaagtaccttcaaagaaggaggaaacttcaacttgtatagccacaccagacgtagagaagaaggaagatctgcctacatctagtgaaacatttggacttcatgtagagaacgttccaaagatggtctttccacagccagagagcacattatcaaacaagaggaaaaataatcaaggcaactcgtttcaggcaaagagagctcgacttaacaagattactggtttgttggcatccaaagctgttggggttgatggtgctgaaaaaaaggaagactacaatgaaacagctccaatgctggagcaggcgatttcacctaaacctcaaagtcagaaaaaaaatgaagctgacattagcagttctgccaacactcagaaacctgcactgttatcctcaactttgtcttcagggaaggctcgcagcaagaaatgcaaacatgaatctggagattcttctgggtgtataaaaccccctaaatcaccactttccccagaattaatacaagtcgaggatttgacgcttgtatctcagctttcttcttcagtgataaataaaactagtcctccacagcctgtgaatccccctagacctttcaagcatagtgagcggagaagaagatctcagcgtttagccaccttacccatgcctgatgattctgtagaaaaggtttcttctccctctccagccactgatgggaaagtattctccatcagttctcaaaatcagcaagaatcttcagtaccagaggtgcctgatgttgcacatttgccacttgagaagctgggaccctgtctccctcttgacttaagtcgtggttcagaagttacagcaccggtagcctcagattcctcttaccgtaatgaatgtcccagggcagaaaaagaggatacacagatgcttccaaatccttcttccaaagcaatagctgatggaagaggagctccagcagcagcaggaatatcgaaaacagaaaaaaaagtgaaattggaagacaaaagctcaacagcatttggtaagagaaaagaaaaagataaggaaagaagagagaagagagacaaagatcactacagaccaaaacagaagaagaagaaaaaaaagaaaaagaaatctaagcaacatgactattcagactatgaagacagttccctcgaatttttggaaaggtgctcttctccactaactcgatcttctgggagttctctggcttcacgaagcatgtttacggagaaaactacaacctatcagtacccaagggcaattctatccgttgatcttagtggtgaaaacttatcagatgtagacttcctagatgattcttcaacggagagtttgcttctgagtggggatgaatacaatcaggactttgattcaaccaattttgaggaatctcaggatgaggatgatgctcttaatgaaattgtgcgatgtatttgtgagatggatgaggagaatggcttcatgatccagtgtgaagagtgcttgtgttggcaacacagcgtgtgcatggggctgctggaggagagcattccagagcagtacatctgctatatctgccgggacccaccaggtcagaggtggagtgcaaaatatcgttatgataaggagtggttgaataatgggagaatgtgcgggttatcatttttcaaagaaaattattctcatctcaatgccaaaaagatagtttctacacatcacctgcttgctgatgtctatggtgttacagaagtgctacacgggctacagctgaagattggaatactaaagaataaacatcatcctgaccttcatctctgggcttgttccgggaagcgaaaagaccaagatcaaataatagctggggtggagaaaaaaatagctcaagacacagttaatcgagaagaaaagaaatatgtacagaaccataaagaaccacctcgtttgcccctaaaaatggaaggaacttatataacaagtgagcatagctatcaaaagccacaaagttttggtcaggactgtaaatctctcgcagaccctgggagctcagatgatgatgatgttagtagtttggaagaagaacaagaattccacatgagaagtaaaaacagtttacagtactcagcaaaagaacatggaatgcctgaaaagaatccagctgaagggaatacagtatttgtttataatgataaaaagggcaccgaagacccaggagactcacatcttcagtggcagctcaatctccttacacacatagaaaatgtgcagaacgaagttaccagcaggatggacctaatagaaaaagaagtcgatgttctggaaagctggcttgatttcacaggggagttggagccaccagatcctcttgcaagattgccccaacttaaacgccacataaaacagctcctaattgacatgggcaaagtacagcagatagcaactctttgctctgtatgacaacagtgaacacttaatgaaagaatgtggctttcttcagtcaaagcatttttattatccacgtgatggctaagtggataatttaaaagcttagtaatgtctggtcattcactgatttgtgatgtcaataggatggcaccttggaaagaaaaatgaagaacaactttatcaaggaagctagtatttaaaaacaaattcatgagcaagctgcaaatgagaatgtgttatatgccaaggaacaatgaagtagaatataatgtatactaagggatttcaagttctcagaatttttgagtagttgcttacgtgaagctcaagatacctgtagaaagaaatatggtatatttgtatagtttttaatagaaagatctatgtttataaaccagcacttggccaaaaacaaaattgtaaaggaaatttaaattctggagaattctacagggttgctctaagaactgtcttctcagcagttgatccagctgtacggaaatttagggtatttaaacttttaaaggatcatgagctgtttcttgggcgatgaatgttctcaatcagaaaactgacagtagaaatctcacttctggggaaaacagttgtggaattcttacttcattatgaatgtatttaaaaaacaaacaccaaataattggaatatattgcaggcattaagctcattaaaaacaaactggcttgcagaagggtccgatgtgccaagtgatcatgattctgctggaaagaggattttaaatattgtgggagttctcccaccctaagtcttacataatgccaccagtccatccaaaacctatatatcacctatactatatatatcatatatatagttgaatggcagtattcaggctcaacgtacagtttgatcctgagtatgcttggtgtttgccttcagaaaaaaaaaatacattgtaaataacctcagctgggatgaggagtgacagaatatcaaaataatttgtggctgtggatttttttaactgctagtagtggaatactggaaaagcttcatttctgaagatgaattttatttttaaaaaatacatgcacactcaaaacttttagctttgatcacaagtggacaaatttctgaaaccaaaggcaactaagttgctgtgttagctcttgctggattttgagcctaggtcctactgtctgccagtactcatgtgagttgtatgtgcccccagtgctacatacgcaggtatgcgtaagtgtgtatgcttgttttaaacaaacactcaacgtacatatgtacataatctacacatatttatatcacatatctagttttattactatagactatacgaattggtggttaacatgaaatgttaccttttaacagactgtttttaaaaattaaaaatgtatgtataggttttgaaatttttttaaaaggggagaaagactgttaagaggaggctatttgatgacataacacttgaatattttatgcctcattctgtttatcagttctcgcaatctgtataaatgcattttagaactgatagacagtaaacttgaatttatctttgataagaatacatgccactgtacattcagatattatttaaatttgcaaacacattgttctatatgtaagggtactgtatgtaaaactctgtattaaaactattccacatatcctaaaatttcagcttgcctttttgcggccttatattttgatgtaaagattaaaagaatgtgc

SEQ ID NO: 346849 - DNA, 4109 bp, Homo sapiens
ttatgttccgaaaatattatgaataatatattttaaaaaatgaatttagactgaaagttgacagcatccctttaaagacagcctattcaacttttagttaataatttgtggggttctttttggtttttcatttgtaatagaaatgttatatgttgcttaacaatgtttctggatactaaagttgcttaacagtcaaaatagaatacaagaacaaaaatgaagaagccaaaataaaaatatcaattttttattatttattcaggcgatttcacctaaacctcaaagtcagaaaaaaaatgaagctgacattagcagttctgccaacactcagaaacctgcactgttatcctcaactttgtcttcagggaaggctcgcagcaagaaatgcaaacatgaatctggagattcttctgggtgtataaaaccccctaaatcaccactttccccagaattaatacaagtcgaggatttgacgcttgtatctcagctttcttcttcagtgataaataaaactagtcctccacagcctgtgaatccccctagacctttcaagcatagtgagcggagaagaagatctcagcgtttagccaccttacccatgcctgatgattctgtagaaaaggtttcttctccctctccagccactgatgggaaagtattctccatcagttctcaaaatcagcaagaatcttcagtaccagaggtgcctgatgttgcacatttgccacttgagaagctgggaccctgtctccctcttgacttaagtcgtggttcagaagttacagcaccggtagcctcagattcctcttaccgtaatgaatgtcccagggcagaaaaagaggatacacagatgcttccaaatccttcttccaaagcaatagctgatggaagaggagctccagcagcagcaggaatatcgaaaacagaaaaaaaagtgaaattggaagacaaaagctcaacagcatttggtaagagaaaagaaaaagataaggaaagaagagagaagagagacaaagatcactacagaccaaaacagaagaagaagaaaaaaaagaaaaagaaatctaagcaacatgactattcagactatgaagacagttccctcgaatttttggaaaggtgctcttctccactaactcgatcttctgggagttctctggcttcacgaagcatgtttacggagaaaactacaacctatcagtacccaagggcaattctatccgttgatcttagtggtgaaaacttatcagatgtagacttcctagatgattcttcaacggagagtttgcttctgagtggggatgaatacaatcaggactttgattcaaccaattttgaggaatctcaggatgaggatgatgctcttaatgaaattgtgcgatgtatttgtgagatggatgaggagaatggcttcatgatccagtgtgaagagtgcttgtgttggcaacacagcgtgtgcatggggctgctggaggagagcattccagagcagtacatctgctatatctgccgggacccaccaggtcagaggtggagtgcaaaatatcgttatgataaggagtggttgaataatgggagaatgtgcgggttatcatttttcaaagaaaattattctcatctcaatgccaaaaagatagtttctacacatcacctgcttgctgatgtctatggtgttacagaagtgctacacgggctacagctgaagattggaatactaaagaataaacatcatcctgaccttcatctctgggcttgttccgggaagcgaaaagaccaagatcaaataatagctggggtggagaaaaaaatagctcaagacacagttaatcgagaagaaaagaaatatgtacagaaccataaagaaccacctcgtttgcccctaaaaatggaaggaacttatataacaagtgagcatagctatcaaaagccacaaagttttggtcaggactgtaaatctctcgcagaccctgggagctcagatgatgatgatgttagtagtttggaagaagaacaagaattccacatgagaagtaaaaacagtttacagtactcagcaaaagaacatggaatgcctgaaaagaatccagctgaagggaatacagtatttgtttataatgataaaaagggcaccgaagacccaggagactcacatcttcagtggcagctcaatctccttacacacatagaaaatgtgcagaacgaagttaccagcaggatggacctaatagaaaaagaagtcgatgttctggaaagctggcttgatttcacaggggagttggagccaccagatcctcttgcaagattgccccaacttaaacgccacataaaacagctcctaattgacatgggcaaagtacagcagatagcaactctttgctctgtatgacaacagtgaacacttaatgaaagaatgtggctttcttcagtcaaagcatttttattatccacgtgatggctaagtggataatttaaaagcttagtaatgtctggtcattcactgatttgtgatgtcaataggatggcaccttggaaagaaaaatgaagaacaactttatcaaggaagctagtatttaaaaacaaattcatgagcaagctgcaaatgagaatgtgttatatgccaaggaacaatgaagtagaatataatgtatactaagggatttcaagttctcagaatttttgagtagttgcttacgtgaagctcaagatacctgtagaaagaaatatggtatatttgtatagtttttaatagaaagatctatgtttataaaccagcacttggccaaaaacaaaattgtaaaggaaatttaaattctggagaattctacagggttgctctaagaactgtcttctcagcagttgatccagctgtacggaaatttagggtatttaaacttttaaaggatcatgagctgtttcttgggcgatgaatgttctcaatcagaaaactgacagtagaaatctcacttctggggaaaacagttgtggaattcttacttcattatgaatgtatttaaaaaacaaacaccaaataattggaatatattgcaggcattaagctcattaaaaacaaactggcttgcagaagggtccgatgtgccaagtgatcatgattctgctggaaagaggattttaaatattgtgggagttctcccaccctaagtcttacataatgccaccagtccatccaaaacctatatatcacctatactatatatatcatatatatagttgaatggcagtattcaggctcaacgtacagtttgatcctgagtatgcttggtgtttgccttcagaaaaaaaaaatacattgtaaataacctcagctgggatgaggagtgacagaatatcaaaataatttgtggctgtggatttttttaactgctagtagtggaatactggaaaagcttcatttctgaagatgaattttatttttaaaaaatacatgcacactcaaaacttttagctttgatcacaagtggacaaatttctgaaaccaaaggcaactaagttgctgtgttagctcttgctggattttgagcctaggtcctactgtctgccagtactcatgtgagttgtatgtgcccccagtgctacatacgcaggtatgcgtaagtgtgtatgcttgttttaaacaaacactcaacgtacatatgtacataatctacacatatttatatcacatatctagttttattactatagactatacgaattggtggttaacatgaaatgttaccttttaacagactgtttttaaaaattaaaaatgtatgtataggttttgaaatttttttaaaaggggagaaagactgttaagaggaggctatttgatgacataacacttgaatattttatgcctcattctgtttatcagttctcgcaatctgtataaatgcattttagaactgatagacagtaaacttgaatttatctttgataagaatacatgccactgtacattcagatattatttaaatttgcaaacacattgttctatatgtaagggtactgtatgtaaaactctgtattaaaactattccacatatcctaaaatttcagcttgcctttttgcggccttatattttgatgtaaagattaaaagaatgtgc

SEQ ID NO: 346850 - DNA, 5657 bp, Homo sapiens
ggcacgaggcggcggaggcggcggcggcggcggcgatggcagcggaccctgagcgagcttgagggctcggacccagctccctcccgcgaaaccttgggcggatccggcgctgcggccccagctcgctccgctcctgctccctccccggccgctgcctgggcggaggcagaggcagaggcccgggctggccgccctgctcgtgccccagctcggccccggacggcccggctgctgtgcagagaggaggccgagtcgtgaaaagagaatactgaagaataggatctcaagatgagtaaaaagcccccaaatcgccctggaatcacttttgagattggtgctcgtttggaggcactggactacttacaaaaatggtatccatcacgaattgaaaaaattgactatgaggagggcaagatgttggtccattttgagcgctggagtcatcgttatgatgagtggatttactgggatagcaatagattgcgaccccttgagagaccagcactaagaaaagaagggctaaaagatgaggaagatttctttgattttaaagctggagaagaagttctggctcgttggacagactgtcgctattaccctgccaagattgaagcaattaacaaagaaggaacatttacagttcagttttatgatggagtaattcgttgtttaaaaagaatgcacattaaagccatgcccgaggatgctaaggggcaggtgaaatcccagcatccactaagctggtgttgtcctatcgacccagctggatcgtgtaaccagtctatgggaagtgaggattggatagctttagtcaaagcagctgctgcagctgcagccaagaacaaaacagggagtaaacctcgaaccagcgctaacagcaataaagataaggataaagatgagagaaagtggtttaaagtaccttcaaagaaggaggaaacttcaacttgtatagccacaccagacgtagagaagaaggaagatctgcctacatctagtgaaacatttggacttcatgtagagaacgttccaaagatggtctttccacagccagagagcacattatcaaacaagaggaaaaataatcaaggcaactcgtttcaggcaaagagagctcgacttaacaagattactggtttgttggcatccaaagctgttggggttgatggtgctgaaaaaaaggaagactacaatgaaacagctccaatgctggagcaggcgatttcacctaaacctcaaagtcagaaaaaaaatgaagctgacattagcagttctgccaacactcagaaacctgcactgttatcctcaactttgtcttcagggaaggctcgcagcaagaaatgcaaacatgaatctggagattcttctgggtgtataaaaccccctaaatcaccactttccccagaattaatacaagtcgaggatttgacgcttgtatctcagctttcttcttcagtgataaataaaactagtcctccacagcctgtgaatccccctagacctttcaagcatagtgagcggagaagaagatctcagcgtttagccaccttacccatgcctgatgattctgtagaaaaggtttcttctccctctccagccactgatgggaaagtattctccatcagttctcaaaatcagcaagaatcttcagtaccagaggtgcctgatgttgcacatttgccacttgagaagctgggaccctgtctccctcttgacttaagtcgtggttcagaagttacagcaccggtagcctcagattcctcttaccgtaatgaatgtcccagggcagaaaaagaggatacacagatgcttccaaatccttcttccaaagcaatagctgatggaagaggagctccagcagcagcaggaatatcgaaaacagaaaaaaaagtgaaattggaagacaaaagctcaacagcatttggtaagagaaaagaaaaagataaggaaagaagagagaagagagacaaagatcactacagaccaaaacagaagaagaagaaaaaaaagaaaaagaaatctaagcaacatgactattcagactatgaagacagttccctcgaatttttggaaaggtgctcttctccactaactcgatcttctgggagttctctggcttcacgaagcatgtttacggagaaaactacaacctatcagtacccaagggcaattctatccgttgatcttagtggtgaaaacttatcagatgtagacttcctagatgattcttcaacggagagtttgcttctgagtggggatgaatacaatcaggactttgattcaaccaattttgaggaatctcaggatgaggatgatgctcttaatgaaattgtgcgatgtatttgtgagatggatgaggagaatggcttcatgatccagtgtgaagagtgcttgtgttggcaacacagcgtgtgcatggggctgctggaggagagcattccagagcagtacatctgctatatctgccgggacccaccaggtcagaggtggagtgcaaaatatcgttatgataaggagtggttgaataatgggagaatgtgcgggttatcatttttcaaagaaaattattctcatctcaatgccaaaaagatagtttctacacatcacctgcttgctgatgtctatggtgttacagaagtgctacacgggctacagctgaagattggaatactaaagaataaacatcatcctgaccttcatctctgggcttgttccgggaagcgaaaagaccaagatcaaataatagctggggtggagaaaaaaatagctcaagacacagttaatcgagaagaaaagaaatatgtacagaaccataaagaaccacctcgtttgcccctaaaaatggaaggaacttatataacaagtgagcatagctatcaaaagccacaaagttttggtcaggactgtaaatctctcgcagaccctgggagctcagatgatgatgatgttagtagtttggaagaagaacaagaattccacatgagaagtaaaaacagtttacagtactcagcaaaagaacatggaatgcctgaaaagaatccagctgaagggaatacagtatttgtttataatgataaaaagggcaccgaagacccaggagactcacatcttcagtggcagctcaatctccttacacacatagaaaatgtgcagaacgaagttaccagcaggatggacctaatagaaaaagaagtcgatgttctggaaagctggcttgatttcacaggggagttggagccaccagatcctcttgcaagattgccccaacttaaacgccacataaaacagctcctaattgacatgggcaaagtacagcagatagcaactctttgctctgtatgacaacagtgaacacttaatgaaagaatgtggctttcttcagtcaaagcatttttattatccacgtgatggctaagtggataatttaaaagcttagtaatgtctggtcattcactgatttgtgatgtcaataggatggcaccttggaaagaaaaatgaagaacaactttatcaaggaagctagtatttaaaaacaaattcatgagcaagctgcaaatgagaatgtgttatatgccaaggaacaatgaagtagaatataatgtatactaagggatttcaagttctcagaatttttgagtagttgcttacgtgaagctcaagatacctgtagaaagaaatatggtatatttgtatagtttttaatagaaagatctatgtttataaaccagcacttggccaaaaacaaaattgtaaaggaaatttaaattctggagaattctacagggttgctctaagaactgtcttctcagcagttgatccagctgtacggaaatttagggtatttaaacttttaaaggatcatgagctgtttcttgggcgatgaatgttctcaatcagaaaactgacagtagaaatctcacttctggggaaaacagttgtggaattcttacttcattatgaatgtatttaaaaaacaaacaccaaataattggaatatattgcaggcattaagctcattaaaaacaaactggcttgcagaagggtccgatgtgccaagtgatcatgattctgctggaaagaggattttaaatattgtgggagttctcccaccctaagtcttacataatgccaccagtccatccaaaacctatatatcacctatactatatatatcatatatatagttgaatggcagtattcaggctcaacgtacagtttgatcctgagtatgcttggtgtttgccttcagaaaaaaaaaatacattgtaaataacctcagctgggatgaggagtgacagaatatcaaaataatttgtggctgtggatttttttaactgctagtagtggaatactggaaaagcttcatttctgaagatgaattttatttttaaaaaatacatgcacactcaaaacttttagctttgatcacaagtggacaaatttctgaaaccaaaggcaactaagttgctgtgttagctcttgctggattttgagcctaggtcctactgtctgccagtactcatgtgagttgtatgtgcccccagtgctacatacgcaggtatgcgtaagtgtgtatgcttgttttaaacaaacactcaacgtacatatgtacataatctacacatatttatatcacatatctagttttattactatagactatacgaattggtggttaacatgaaatgttaccttttaacagactgtttttaaaaattaaaaatgtatgtataggttttgaaatttttttaaaaggggagaaagactgttaagaggaggctatttgatgacataacacttgaatattttatgcctcattctgtttatcagttctcgcaatctgtataaatgcattttagaactgatagacagtaaacttgaatttatctttgataagaatacatgccactgtacattcagatattatttaaatttgcaaacacattgttctatatgtaagggtactgtatgtaaaactctgtattaaaactattccacatatcctaaaatttcagcttgcctttttgcggccttatattttgatgtaaagattaaaagaatgtgcaaaacagtcagaaatttttattgccttttgagattctccaacttgacaaatgtgccaaagatcaacagacagaaaatatcatcctgtgtatttacttgtcatactttaactttgtgaaagatcttactgataaatgaaaagctttagcagaggtggtattgtggggtaattgcttaaatttacatatcaaagtaaaaaagtagtgcctgtattccatgtgtggagtaaatttgctaatgtctatattttatgattgatactattatttttcctttgcattttaaaatagtggctctaatattttccctgtcatggctacattctagacattgaatttatatcttctttttttcagatacggagcaaatagcatccttaacctatgaataatggtgttgcctagattcttgtcacacacacagaagaccctttgtacctagtaacattcatcctcttgattcctggtgaacacggttaaattcatgcacatttgttcttgtagtttctaaaaattagatcaatttatttgttagccagcaaattgaaaattccattattagattaatgaaatttttgctctgcttatatgtat

SEQ ID NO: 346851 - DNA, 3219 bp, Homo sapiens
tttttacctcctaccccacgggaatatcgaaaacagaaaaaaaagtgaaattggaagacaaaagctcaacagcatttggtaagagaaaagaaaaagataaggaaagaagagagaagagagacaaagatcactacagaccaaaacagaagaagaagaaaaaaaagaaaaagaaatctaagcaacatgactattcagactatgaagacagttccctcgaatttttggaaaggtgctcttctccactaactcgatcttctgggagttctctggcttcacgaagcatgtttacggagaaaactacaacctatcagtacccaagggcaattctatccgttgatcttagtggtgaaaacttatcagatgtagacttcctagatgattcttcaacggagagtttgcttctgagtggggatgaatacaatcaggactttgattcaaccaattttgaggaatctcaggatgaggatgatgctcttaatgaaattgtgcgatgtatttgtgagatggatgaggagaatggcttcatgatccagtgtgaagagtgcttgtgttggcaacacagcgtgtgcatggggctgctggaggagagcattccagagcagtacatctgctatatctgccgggacccaccaggtcagaggtggagtgcaaaatatcgttatgataaggagtggttgaataatgggagaatgtgcgggttatcatttttcaaagaaaattattctcatctcaatgccaaaaagatagtttctacacatcacctgcttgctgatgtctatggtgttacagaagtgctacacgggctacagctgaagattggaatactaaagaataaacatcatcctgaccttcatctctgggcttgttccgggaagcgaaaagaccaagatcaaataatagctggggtggagaaaaaaatagctcaagacacagttaatcgagaagaaaagaaatatgtacagaaccataaagaaccacctcgtttgcccctaaaaatggaaggaacttatataacaagtgagcatagctatcaaaagccacaaagttttggtcaggactgtaaatctctcgcagaccctgggagctcagatgatgatgatgttagtagtttggaagaagaacaagaattccacatgagaagtaaaaacagtttacagtactcagcaaaagaacatggaatgcctgaaaagaatccagctgaagggaatacagtatttgtttataatgataaaaagggcaccgaagacccaggagactcacatcttcagtggcagctcaatctccttacacacatagaaaatgtgcagaacgaagttaccagcaggatggacctaatagaaaaagaagtcgatgttctggaaagctggcttgatttcacaggggagttggagccaccagatcctcttgcaagattgccccaacttaaacgccacataaaacagctcctaattgacatgggcaaagtacagcagatagcaactctttgctctgtatgacaacagtgaacacttaatgaaagaatgtggctttcttcagtcaaagcatttttattatccacgtgatggctaagtggataatttaaaagcttagtaatgtctggtcattcactgatttgtgatgtcaataggatggcaccttggaaagaaaaatgaagaacaactttatcaaggaagctagtatttaaaaacaaattcatgagcaagctgcaaatgagaatgtgttatatgccaaggaacaatgaagtagaatataatgtatactaagggatttcaagttctcagaatttttgagtagttgcttacgtgaagctcaagatacctgtagaaagaaatatggtatatttgtatagtttttaatagaaagatctatgtttataaaccagcacttggccaaaaacaaaattgtaaaggaaatttaaattctggagaattctacagggttgctctaagaactgtcttctcagcagttgatccagctgtacggaaatttagggtatttaaacttttaaaggatcatgagctgtttcttgggcgatgaatgttctcaatcagaaaactgacagtagaaatctcacttctggggaaaacagttgtggaattcttacttcattatgaatgtatttaaaaaacaaacaccaaataattggaatatattgcaggcattaagctcattaaaaacaaactggcttgcagaagggtccgatgtgccaagtgatcatgattctgctggaaagaggattttaaatattgtgggagttctcccaccctaagtcttacataatgccaccagtccatccaaaacctatatatcacctatactatatatatcatatatatagttgaatggcagtattcaggctcaacgtacagtttgatcctgagtatgcttggtgtttgccttcagaaaaaaaaaatacattgtaaataacctcagctgggatgaggagtgacagaatatcaaaataatttgtggctgtggatttttttaactgctagtagtggaatactggaaaagcttcatttctgaagatgaattttatttttaaaaaatacatgcacactcaaaacttttagctttgatcacaagtggacaaatttctgaaaccaaaggcaactaagttgctgtgttagctcttgctggattttgagcctaggtcctactgtctgccagtactcatgtgagttgtatgtgcccccagtgctacatacgcaggtatgcgtaagtgtgtatgcttgttttaaacaaacactcaacgtacatatgtacataatctacacatatttatatcacatatctagttttattactatagactatacgaattggtggttaacatgaaatgttaccttttaacagactgtttttaaaaattaaaaatgtatgtataggttttgaaatttttttaaaaggggagaaagactgttaagaggaggctatttgatgacataacacttgaatattttatgcctcattctgtttatcagttctcgcaatctgtataaatgcattttagaactgatagacagtaaacttgaatttatctttgataagaatacatgccactgtacattcagatattatttaaatttgcaaacacattgttctatatgtaagggtactgtatgtaaaactctgtattaaaactattccacatatcctaaaatttcagcttgcctttttgcggccttatattttgatgtaaagattaaaagaatgtgc

SEQ ID NO: 346852 - DNA, 3110 bp, Homo sapiens
gacactttgagttacttataatagtgtatactataagatataaagcagtcataattacctaagcttcaaaaatcttttgtttccatgtccagagacaagtacagtacagtattcttatttgtttgctccccctttttaaaatatttaatagcttatgttcacttctcatagctcctttctttatgaaaaataacatgaaaatagaaaagttgttctaagtatactttttgtatatattctagacttatcagatgtagacttcctagatgattcttcaacggagagtttgcttctgagtggggatgaatacaatcaggactttgattcaaccaattttgaggaatctcaggatgaggatgatgctcttaatgaaattgtgcgatgtatttgtgagatggatgaggagaatggcttcatgatccagtgtgaagagtgcttgtgttggcaacacagcgtgtgcatggggctgctggaggagagcattccagagcagtacatctgctatatctgccgggacccaccaggtcagaggtggagtgcaaaatatcgttatgataaggagtggttgaataatgggagaatgtgcgggttatcatttttcaaagaaaattattctcatctcaatgccaaaaagatagtttctacacatcacctgcttgctgatgtctatggtgttacagaagtgctacacgggctacagctgaagattggaatactaaagaataaacatcatcctgaccttcatctctgggcttgttccgggaagcgaaaagaccaagatcaaataatagctggggtggagaaaaaaatagctcaagacacagttaatcgagaagaaaagaaatatgtacagaaccataaagaaccacctcgtttgcccctaaaaatggaaggaacttatataacaagtgagcatagctatcaaaagccacaaagttttggtcaggactgtaaatctctcgcagaccctgggagctcagatgatgatgatgttagtagtttggaagaagaacaagaattccacatgagaagtaaaaacagtttacagtactcagcaaaagaacatggaatgcctgaaaagaatccagctgaagggaatacagtatttgtttataatgataaaaagggcaccgaagacccaggagactcacatcttcagtggcagctcaatctccttacacacatagaaaatgtgcagaacgaagttaccagcaggatggacctaatagaaaaagaagtcgatgttctggaaagctggcttgatttcacaggggagttggagccaccagatcctcttgcaagattgccccaacttaaacgccacataaaacagctcctaattgacatgggcaaagtacagcagatagcaactctttgctctgtatgacaacagtgaacacttaatgaaagaatgtggctttcttcagtcaaagcatttttattatccacgtgatggctaagtggataatttaaaagcttagtaatgtctggtcattcactgatttgtgatgtcaataggatggcaccttggaaagaaaaatgaagaacaactttatcaaggaagctagtatttaaaaacaaattcatgagcaagctgcaaatgagaatgtgttatatgccaaggaacaatgaagtagaatataatgtatactaagggatttcaagttctcagaatttttgagtagttgcttacgtgaagctcaagatacctgtagaaagaaatatggtatatttgtatagtttttaatagaaagatctatgtttataaaccagcacttggccaaaaacaaaattgtaaaggaaatttaaattctggagaattctacagggttgctctaagaactgtcttctcagcagttgatccagctgtacggaaatttagggtatttaaacttttaaaggatcatgagctgtttcttgggcgatgaatgttctcaatcagaaaactgacagtagaaatctcacttctggggaaaacagttgtggaattcttacttcattatgaatgtatttaaaaaacaaacaccaaataattggaatatattgcaggcattaagctcattaaaaacaaactggcttgcagaagggtccgatgtgccaagtgatcatgattctgctggaaagaggattttaaatattgtgggagttctcccaccctaagtcttacataatgccaccagtccatccaaaacctatatatcacctatactatatatatcatatatatagttgaatggcagtattcaggctcaacgtacagtttgatcctgagtatgcttggtgtttgccttcagaaaaaaaaaatacattgtaaataacctcagctgggatgaggagtgacagaatatcaaaataatttgtggctgtggatttttttaactgctagtagtggaatactggaaaagcttcatttctgaagatgaattttatttttaaaaaatacatgcacactcaaaacttttagctttgatcacaagtggacaaatttctgaaaccaaaggcaactaagttgctgtgttagctcttgctggattttgagcctaggtcctactgtctgccagtactcatgtgagttgtatgtgcccccagtgctacatacgcaggtatgcgtaagtgtgtatgcttgttttaaacaaacactcaacgtacatatgtacataatctacacatatttatatcacatatctagttttattactatagactatacgaattggtggttaacatgaaatgttaccttttaacagactgtttttaaaaattaaaaatgtatgtataggttttgaaatttttttaaaaggggagaaagactgttaagaggaggctatttgatgacataacacttgaatattttatgcctcattctgtttatcagttctcgcaatctgtataaatgcattttagaactgatagacagtaaacttgaatttatctttgataagaatacatgccactgtacattcagatattatttaaatttgcaaacacattgttctatatgtaagggtactgtatgtaaaactctgtattaaaactattccacatatcctaaaatttcagcttgcctttttgcggccttatattttgatgtaaagattaaaagaatgtgc

SEQ ID NO: 346853 - DNA, 2372 bp, Homo sapiens
ggcacgaggcggcggaggcggcggcggcggcggcgatggcagcggaccctgagcgagcttgagggctcggacccagctccctcccgcgaaaccttgggcggatccggcgctgcggccccagctcgctccgctcctgctccctccccggccgctgcctgggcggaggcagaggcagaggcccgggctggccgccctgctcgtgccccagctcggccccggacggcccggctgctgtgcagagaggaggccgagtcgtgaaaagagaatactgaagaataggatctcaagatgagtaaaaagcccccaaatcgccctggaatcacttttgagattggtgctcgtttggaggcactggactacttacaaaaatggtatccatcacgaattgaaaaaattgactatgaggagggcaagatgttggtccattttgagcgctggagtcatcgttatgatgagtggatttactgggatagcaatagattgcgaccccttgagagaccagcactaagaaaagaagggctaaaagatgaggaagatttctttgattttaaagctggagaagaagttctggctcgttggacagactgtcgctattaccctgccaagattgaagcaattaacaaagaaggaacatttacagttcagttttatgatggagtaattcgttgtttaaaaagaatgcacattaaagccatgcccgaggatgctaaggggcaggtgaaatcccagcatccactaagctggtgttgtcctatcgacccagctggatcgtgtaaccagtctatgggaagtgaggattggatagctttagtcaaagcagctgctgcagctgcagccaagaacaaaacagggagtaaacctcgaaccagcgctaacagcaataaagataaggataaagatgagagaaagtggtttaaagtaccttcaaagaaggaggaaacttcaacttgtatagccacaccagacgtagagaagaaggaagatctgcctacatctagtgaaacatttggacttcatgtagagaacgttccaaagatggtctttccacagccagagagcacattatcaaacaagaggaaaaataatcaaggcaactcgtttcaggcaaagagagctcgacttaacaagattactggtttgttggcatccaaagctgttggggttgatggtgctgaaaaaaaggaagactacaatgaaacagctccaatgctggagcaggcgatttcacctaaacctcaaagtcagaaaaaaaatgaagctgacattagcagttctgccaacactcagaaacctgcactgttatcctcaactttgtcttcagggaaggctcgcagcaagaaatgcaaacatgaatctggagattcttctgggtgtataaaaccccctaaatcaccactttccccagaattaatacaagtcgaggatttgacgcttgtatctcagctttcttcttcagtgataaataaaactagtcctccacagcctgtgaatccccctagacctttcaagcatagtgagcggagaagaagatctcagcgtttagccaccttacccatgcctgatgattctgtagaaaaggtttcttctccctctccagccactgatgggaaagtattctccatcagttctcaaaatcagcaagaatcttcagtaccagaggtgcctgatgttgcacatttgccacttgagaagctgggaccctgtctccctcttgacttaagtcgtggttcagaagttacagcaccggtagcctcagattcctcttaccgtaatgaatgtcccagggcagaaaaagaggatacacagatgcttccaaatccttcttccaaagcaatagctgatggaagaggagctccagcagcagcaggaatatcgaaaacagaaaaaaaagtgaaattggaagacaaaagctcaacagcatttggtatcaggagttgggatttctcagcactgctaatgaagatcccctcttatagtccaataagcttatcaggacttccagagtcatgacatgaacagtttaattgaacccatccactctgggcaggtgactggaatagctgattaaaacataaatgctgcttttaggttaaccacaaaggaacaactcaggatcagtcgtgattgctaaagtattcacttttatcttttaggtaagagaaaagaaaaagataaggaaagaagagagaagagagacaaagatcactacagaccaaaacagaagaagaagaggcacctctggtactgaagattcctgctgattttgagaactggatggagaatactttcccatcaggggctggagagggagaagaaacctttttctacagaatcatcaggcatgggtaaggtggctaacgctgagatctctt

SEQ ID NO: 346854 - DNA, 2421 bp, Homo sapiens
ggcacgaggcggcggaggcggcggcggcggcggcgatggcagcggaccctgagcgagcttgagggctcggacccagctccctcccgcgaaaccttgggcggatccggcgctgcggccccagctcgctccgctcctgctccctccccggccgctgcctgggcggaggcagaggcagaggcccgggctggccgccctgctcgtgccccagctcggccccggacggcccggctgctgtgcagagaggaggccgagtcgtgaaaagagaatactgaagaataggatctcaagatgagtaaaaagcccccaaatcgccctggaatcacttttgagattggtgctcgtttggaggcactggactacttacaaaaatggtatccatcacgaattgaaaaaattgactatgaggagggcaagatgttggtccattttgagcgctggagtcatcgttatgatgagtggatttactgggatagcaatagattgcgaccccttgagagaccagcactaagaaaagaagggctaaaagatgaggaagatttctttgattttaaagctggagaagaagttctggctcgttggacagactgtcgctattaccctgccaagattgaagcaattaacaaagaaggaacatttacagttcagttttatgatggagtaattcgttgtttaaaaagaatgcacattaaagccatgcccgaggatgctaaggggcaggtgaaatcccagcatccactaagctggtgttgtcctatcgacccagctggatcgtgtaaccagtctatgggaagtgaggattggatagctttagtcaaagcagctgctgcagctgcagccaagaacaaaacagggagtaaacctcgaaccagcgctaacagcaataaagataaggataaagatgagagaaagtggtttaaagtaccttcaaagaaggaggaaacttcaacttgtatagccacaccagacgtagagaagaaggaagatctgcctacatctagtgaaacatttggacttcatgtagagaacgttccaaagatggtctttccacagccagagagcacattatcaaacaagaggaaaaataatcaaggcaactcgtttcaggcaaagagagctcgacttaacaagattactggtttgttggcatccaaagctgttggggttgatggtgctgaaaaaaaggaagactacaatgaaacagctccaatgctggagcaggcgatttcacctaaacctcaaagtcagaaaaaaaatgaagctgacattagcagttctgccaacactcagaaacctgcactgttatcctcaactttgtcttcagggaaggctcgcagcaagaaatgcaaacatgaatctggagattcttctgggtgtataaaaccccctaaatcaccactttccccagaattaatacaagtcgaggatttgacgcttgtatctcagctttcttcttcagtgataaataaaactagtcctccacagcctgtgaatccccctagacctttcaagcatagtgagcggagaagaagatctcagcgtttagccaccttacccatgcctgatgattctgtagaaaaggtttcttctccctctccagccactgatgggaaagtattctccatcagttctcaaaatcagcaagaatcttcagtaccagaggtgcctgatgttgcacatttgccacttgagaagctgggaccctgtctccctcttgacttaagtcgtggttcagaagttacagcaccggtagcctcagattcctcttaccgtaatgaatgtcccagggcagaaaaagaggatacacagatgcttccaaatccttcttccaaagcaatagctgatggaagaggagctccagcagcagcaggaatatcgaaaacagaaaaaaaagtgaaattggaagacaaaagctcaacagcatttggtaagagaaaagaaaaagataaggaaagaagagagaagagagacaaagatcactacagaccaaaacagaagaagaagaaaaaaaagaaaaagaaatctaagcaacatgactattcagactatgaagacagttccctcgaatttttggaaaggtgctcttctccactaactcgatcttctgggagttctctggcttcacgaagcatgtttacggagaaaactacaacctatcagtacccaagggcaattctatccgttgatcttagtggtgaaaacttatcagatgtagacttcctagatgattcttcaacggagagtttgcttctgagtggggatgaatacaatcaggactttgattcaaccaattttgaggaatctcaggatgaggatgatgctcttaatgaaattgtgcgatgtatttgtgagatggatgaggagaatggcttcatgatccagtgtgaagagtgcttgtgtgcaccgcgtgtgctgggccgaacc

SEQ ID NO: 346855 - DNA, 2048 bp, Homo sapiens
ggcacgaggcggcggaggcggcggcggcggcggcgatggcagcggaccctgagcgagcttgagggctcggacccagctccctcccgcgaaaccttgggcggatccggcgctgcggccccagctcgctccgctcctgctccctccccggccgctgcctgggcggaggcagaggcagaggcccgggctggccgccctgctcgtgccccagctcggccccggacggcccggctgctgtgcagagaggaggccgagtcgtgaaaagagaatactgaagaataggatctcaagatgagtaaaaagcccccaaatcgccctggaatcacttttgagattggtgctcgtttggaggcactggactacttacaaaaatggtatccatcacgaattgaaaaaattgactatgaggagggcaagatgttggtccattttgagcgctggagtcatcgttatgatgagtggatttactgggatagcaatagattgcgaccccttgagagaccagcactaagaaaagaagggctaaaagatgaggaagatttctttgattttaaagctggagaagaagttctggctcgttggacagactgtcgctattaccctgccaagattgaagcaattaacaaagaaggaacatttacagttcagttttatgatggagtaattcgttgtttaaaaagaatgcacattaaagccatgcccgaggatgctaaggggcaggattggatagctttagtcaaagcagctgctgcagctgcagccaagaacaaaacagggagtaaacctcgaaccagcgctaacagcaataaagataaggataaagatgagagaaagtggtttaaagtaccttcaaagaaggaggaaacttcaacttgtatagccacaccagacgtagagaagaaggaagatctgcctacatctagtgaaacatttggacttcatgtagagaacgttccaaagatggtctttccacagccagagagcacattatcaaacaagaggaaaaataatcaaggcaactcgtttcaggcaaagagagctcgacttaacaagattactggtttgttggcatccaaagctgttggggttgatggtgctgaaaaaaaggaagactacaatgaaacagctccaatgctggagcaggcgatttcacctaaacctcaaagtcagaaaaaaaatgaagctgacattagcagttctgccaacactcagaaacctgcactgttatcctcaactttgtcttcagggaaggctcgcagcaagaaatgcaaacatgaatctggagattcttctgggtgtataaaaccccctaaatcaccactttccccagaattaatacaagtcgaggatttgacgcttgtatctcagctttcttcttcagtgataaataaaactagtcctccacagcctgtgaatccccctagacctttcaagcatagtgagcggagaagaagatctcagcgtttagccaccttacccatgcctgatgattctgtagaaaaggtttcttctccctctccagccactgatgggaaagtattctccatcagttctcaaaatcagcaagaatcttcagtaccagaggtgcctgatgttgcacatttgccacttgagaagctgggaccctgtctccctcttgacttaagtcgtggttcagaagttacagcaccggtagcctcagattcctcttaccgtaatgaatgtcccagggcagaaaaagaggatacacagatgcttccaaatccttcttccaaagcaatagctgatggaagaggagctccagcagcagcaggtaaaagaaaaaaaataaaggctcctataagtagataagtagctaggcttgcagttattaggtataaacattttgaggtttaactacattattttgattcctatataattccttttcataaatactttaacatttataggagagtttcatctccgttttaaaggtcttttgtgtgatcattttacaatcatattccctggacatacatgctgcttaaccttgtcacttgatctatttccttctccctgcttctttttta

SEQ ID NO: 346856 - DNA, 1824 bp, Homo sapiens
ggcacgaggcggcggaggcggcggcggcggcggcgatggcagcggaccctgagcgagcttgagggctcggacccagctccctcccgcgaaaccttgggcggatccggcgctgcggccccagctcgctccgctcctgctccctccccggccgctgcctgggcggaggcagaggcagaggcccgggctggccgccctgctcgtgccccagctcggccccggacggcccggctgctgtgcagagaggaggccgagtcgtgaaaagagaatactgaagaataggatctcaagatgagtaaaaagcccccaaatcgccctggaatcacttttgagattggtgctcgtttggaggcactggactacttacaaaaatggtatccatcacgaattgaaaaaattgactatgaggagggcaagatgttggtccattttgagcgctggagtcatcgttatgatgagtggatttactgggatagcaatagattgcgaccccttgagagaccagcactaagaaaagaagggctaaaagatgaggaagatttctttgattttaaagctggagaagaagttctggctcgttggacagactgtcgctattaccctgccaagattgaagcaattaacaaagaaggaacatttacagttcagttttatgatggagtaattcgttgtttaaaaagaatgcacattaaagccatgcccgaggatgctaaggggcaggtaagagtgttcagtattcctagctacccaaagggttatcttcttgaacggtgactgatcaaaatatatttatatgtatattttttaaaaatgaactaattgtagggttatgtgctgatagccccaaatagcagcaagaaaaggaagcttagactgtaaaataaattatacatttgatttttgcttctttggtttagacctgctaaagttataggtcactagtttctgttccaggtgaaatcccagcatccactaagctggtgttgtcctatcgacccagctggatcgtgtaaccagtctatgggaagtgaggtaagagccttttttttaaaaattttgttttgtttttcctggtatataatgtcatttagaaagttaaaaatttttaatataaaaatttacattgagttcttatcttcttctttccttctacaaatcatagtcattcatcttcctttaaaaggcgcttacctgacactctgtaggctgtttcagatagggctctctgagtcatgtgatggaagcagtgtattgtatgctttgtcactgctcaaagcaagaatggatggtaagcattggaaggagaatcttgggtggaggtaaaaaccacaattccatttgttggctatgttttctgaaatactggaaagaaaggtgccattagaaatttaaaatattttcttttctattctgctgttatttgggattttcagcacctggacctacaattaattttaagaaattgaaagtagtgtgtaaaaatgtctaatatggaaatatgctacgtatttgttccataccatgcggtgaaaactgtcattctgaaatgtattgaaattacctggtcagcttcagtcaagtgtaaacatttagtgctctagaaatgtatatctaccacattaaaaaaattattcatgaagaaataagtgtgattgttttaaattgcctggttttcaaaaatttagttatgaaatgattagcaagcagatttcttctaattaatatgtaaatgcaatttaaaatgaaaatgcttttgatcaggaagtggctttgtgtcttcccacatgtatgtataaataaagtgttcttttaagcattcagtggtgt

SEQ ID NO: 346857 - DNA, 443 bp, Homo sapiens
cgccactgcactccagcctgggtgacagagtgagactccatctcaaaaaaacaaaaggataagtcatggcttaagtctggagctgccctgctctggtccgaggcattggtggtaactggactccatggtaatttggctggtgagaaagaactaagatcctgggaaggtgtcttgcttgctttcgactgcagtgattgtttcagaccagatggtgctgattcgagttcatgcgtcagtacctccactgcagtcctgagaagttagacaagaggcaatggggaggatgtgcagaggaaacatgaagggacacagtacaagccggtggtcacatcagctttattgcacttggagtattctgtttttcatgcgggatgataggtagcaacactgatgtgtggtttattgctctctgtgctttgcaaatgtctaaaataattttatta

SEQ ID NO: 346858 - DNA, 537 bp, Homo sapiens
cgccactgcactccagcctgggtgacagagtgagactccatctcaaaaaaacaaaaggataagtcatggcttaagtctggagctgccctgctctggtccgaggcattggtggtaactggactccatggtaatttggctggtgagaaagaactaagatcctgggaaggtgtcttgcttgctttcgactgcagtgattgtttcagaccagatggtgctgattcgagttcatgcgtcagtacctccactgcagtcctgagaagttagacaagaggcaatggggaggatgtgcagaggaaacatgaagggacacagtacaagccggtggtcacatcagctttattgcacttggagtattctgtttttcatgcgggatgataggtagaaaggattcagattgtggaagggtaaatggatgagatgaccattaaggtcttgttttactgagaggctgtaagtctgccagcgacagctgtcagtaaggctgcagaagggctggggggctacacaaggaagagcagagcaggacaaccagctgat

SEQ ID NO: 346859 - DNA, 376 bp, Homo sapiens
tttttttttgtagggatggggggtcttgctatgttgcgcaggctggtattgaactcctggcctcaagcaatcctcttgcctcagtctcccaaagtgattggattacaggcataagccactgcaccgggcctacatacatatttttacatgatccttaattcaatggccagcagggtttcatgcacacaaggtctgttcttgttttgctcagtaatgtatgctcacatttaaaatgatgccttcgtggttcctgaaggaatgtttgatgaatattcattcttctctttttgtatttgaactttaaaccaccaattcacaaatatccaacactgagttacagcactcagctcttcataaagaatctatctatctatca

SEQ ID NO: 346860 - DNA, 2655 bp, Homo sapiens
  misc_feature (49)..(49): n is a, c, g, or t
  misc_feature (131)..(131): n is a, c, g, or t
  misc_feature (133)..(133): n is a, c, g, or t
  misc_feature (136)..(136): n is a, c, g, or t
  misc_feature (143)..(145): n is a, c, g, or t
  misc_feature (1202)..(1202): n is a, c, g, or t
  misc_feature (1300)..(1300): n is a, c, g, or t
  misc_feature (2399)..(2399): n is a, c, g, or t
aaaacgaattaaggaagatgaagatgaattgtaaattatactctcaccnacaatagaaagggccaggaggtgctgaggcgaggagaggccgaactccaagggacgacgctcgcggaagcagaggtttgggntnctnatctgtnnncctcatctgtccggtgctgcgtttctcataggtcctgtgctcggtagtcttgcatgttcatctttgactagaagcagctctcctgggtcgtgtacccactaataatgtgggtggaaccacctagactccctcccgctctatctgagcaatggttggatcttctcttttagaacctgagcttgaggtctggcctcaggaagtggggagggtacagaagcagtaggaatgtgccatctcttcttaccagtcccacattttcccatcagtccacccaattacctgttcctgtgctgtatctgacccccctggcagggcttcccttgaatttccagccttcacccccacttcaaggcaagaccctctgtgggtcagtgtgatttcccctgacttgtagtctttctttgggcaggttcacatgtacttttggttaatatctttcaagagatctaagtggctcctaagacatacttatccctctcttcttcagcctgtcctcagaaggtcaccctttctcattagaaagctgggacagtgaaaaaaacaaagagggaaccctctgccaagtcccacccttgctgccagtcctcacccctccaaatcaagcctggccaggccttcaggacacgccaggtcatttccctcacattacgggagatgtacagactctcaatgatctctttcagtttgtctacacttaatcatatgtagcagatctcagagttctagcatggaatttggccactctcttgtttcaataagttgtctttatatattgagctattttttgcttttttcctagagtgccaaggagttattatgcaaatgagtacttactccacttctttccaagaagttcttcaactgctatatattttaaatagtgagaagataaaggtaaaatatgtcagaaggttaagaggaacatattttttaaaattagaaagttaggactagaaaagataaaagaaatgagtaaatagattaaaattaacagtgaggagacaaaatctgaacagttttagaagtcagagaatttgatgaaagtgcaaaaaaaganctctaagagtaacgatgccaaaaagataaaattaaatgagagaaaaggtttaaaaaggctagcctttcaaatttttaataaaatcttaaagtttaaanggctagaaaagaacatggtaagataattaaatcatcttagtatttaaagattaaaaagctaaaaagaatgtaaacaatgtattctgtaatattccaaattaaggatgcatgtatatttactgatgtagaaagatgtgtaagacctctagtttagaaagaaaagcaagtcacagaacattgtatagtccaagcgtatatattgcataaaggtttgcagatagagaaaagaatggtaggaagccaaactactgaagtggtagggagctactgaagaggaaagggagtggggtggggggtgtcatggacatcgtcagccagtccccttaggtgccctcaggtccctttaccgtttctgtgctctttttcccatcctgagtgccatgcaccgccagccctcacaatggtaactcgcaggtgaactgcctttgcacccttgcaccccacatgtgtagacagcttgaaggattcacttgggcctttacatcaccccatcctcactcccaccctgtggccctcagccagtaactgaggctgcaggaaatggaagcctcgccccttgtctcaggtggggacaactctgagatgtcagttgccttgagcagcagtgtccaaaatataaagcaacctacatatgtgactttacattttctagtagccacattaaaattcattttaataaggggctaggcatggcattcatgcttgtaatcccaacactttgggaagtcgaggtgggaggatcacttgagctgaggagtttcagaccactgtgggcaacatagggagacccatgtctatacaaataatgttttaaaaaattagccagatgtgatggtgcacacctgtggtcccagctactcaggaggttgaggcaggagtatctcctgagtctgggaagtcaaagctatagtgagttatgattgtgccactgcactccatcctgggtggcagagtgagaccctgtctcaaaaaaattttttttaattaaaatcattctaacagtgtatttatatcattcaacatgtaatcagtgtgaaaaactattaatgagatgttttgaattcatttttatttgtactaagtcttcaaaacccagtgngtaacacacttcacttgggatgtccctatttcagttgctcagtagtggctagtggctacccagtcggacagctcagcgtcagtcacatggaagctgttcctccgcagggctctgcctgaaactgaagtctcactgggtttcttctcgttccctgtcctgcttcctccactccctcatcggtatcttgagagcactgcttaataaatcttttgcatacaagtattatctttgtaattaaaataaatctgggaggttc

SEQ ID NO: 346861 - DNA, 4206 bp, Homo sapiens
cggccctcccatgtgcagcccggccagccgggctctcctcctcgcggcggatgggtgaccttttcctggcacgggcaggctgtgggaggcagcggagcaggcgatgaagaagaagcagcagcatcccggcggcggcgcggatccctggccccatggggcccctatggggggcgcccctccgggcctgggcagctggaagcgtcgggtgcccctgctgcctttcctgcgcttctccctccgggactacggcttctgcatggccaccctgctggtcttctgcctgggctccctcctctatcagctcagcgggggaccccctcgcttcctgctcgacctgcggcagtacttgggaaattccacttacttggatgaccatggaccacctcctagtaaggtactacctttcccaagccaggtggtgtacaacagggtaggcaagtgtgggagccgtactgtggtcttgcttctgagaatcttgtcggagaagcacggatttaatttggtcacatcagacattcacaacaaaaccaggcttactaaaaatgaacaaatggaactgattaaaaatataagtactgccgaacaaccctatttattcactcgacatgttcatttcctcaacttctcaaggtttggaggagaccagcctgtctacatcaacatcattagagaccccgtcaaccggttcttatccaactattttttccgtcgctttggagactggagaggggaacaaaatcacatgatccgcacccccagcatgaggcaggaggagcgctacctggatatcaatgagtgtattcttgaaaactatcccgagtgctccaaccccaggttattttacatcattccgtacttttgtggacagcatcccagatgcagggagcctggtgaatgggcccttgagagagcaaagctgaacgtgaatgaaaacttcctgctcgtggggattcttgaagagttggaagatgtgctgctgttactggaaagatttttacctcattacttcaagggcgtgctcagtatctacaaagacccagagcacaggaagcttggaaacatgactgtgacggtgaagaagactgtcccctctcctgaggctgtgcagatcctctaccagcggatgagatacgagtacgagttttaccactacgtcaaagagcagttccacctgctgaagcgcaagtttggacttaagtctcacgtcagcaagccccccctgaggccacacttctttatcccaactccactggaaaccgaggagccaatcgacgatgaagaacaggatgatgaaaagtggctggaagatatttataagaggtgatgtgactgtgttgcctctatggctttatctcccttttccagaaagttctttgtttggggaagtaaaatccttaagggactaaattaatgcttgggtgcattaaaaagaacaaaacattcccacatgttggggtcattgggagatgcccggttttgcgggttttatttgtttaattttattctgtgttttctcttggctctttgggtctttcccgggtacactagatggctccatcccaaggcatcttgtcataaaacagctttcccccaccccatatcatgggaaaagggggagaaatatagcccctagcctaataacttatcatttgtaaaatgacttataaaaatattacctcaatggtaggagacatccagacttgtatatttcagtggaaatacaaaaccacttcagagaccagggtatctcctctggaaggatctaagagaaggtaagacagattaggacatcgaaaaggaggatggagccaggtgccatggcttgagcctataatccgaggctgaggtgggaggatcacttgagcccaggagtttgaggttgcagtgagctgtgatcacaccactgcactccagcctgggtgacagagtgagactctgtctcaattaattttttttttttaaaggaggaggatctccatgggtaagtggtttctacccgcatgggtagagttctgcctctggtccttctcagggggcactttcaccaagagcagtgtaattatctctgaaagagcaagtcagcttgtgccgcatccccaaccaatccacagcctggagtacctttcaaggtcaaagtgcatggccagctccattgagacattccatttcaaagcaccgtgctgacagatatcaaagtactctagcagggaaaataatttgtttgctgtgtaaggaagaatgtagacaagacagataaatctgaaggtcatgtggcatcagggaaagggcatggctgtgtcttttgcacccaatatgaaacatcttctcccaacactgctttaatggaagttctaggaaccaatttagctcaggcatttgactcctacagcagaagttctgagcctgaccacagatggtgtgtaatctatcaaacacacccctggccaagttgggtcctataggacctggtactatgtactattgtaacttctagttccctaagaggtacctgttttcagtaaaaaggggtcctgagttctgtgcaggtggaagagctacccgagaactacctgagttctgtgcaggtagagtcccatttcttatgggacctgtgtgctcctgagaactcttacttgagacatcaaaaagaagcagcaagagcttctgggacagagactgcttggccagctttgtaagtaagtggctgcctccaatgtgatgtgagtacatgttgggcagtctcactgtcctaaggtatgtcttctttccacctcccactgcccctcccctgccacctatcaatgatgccttggttcagtcattagaaatctgttgctttgagttctgaaatattttcaccttaaaaaaaatgctgaaaatacacattctcctgggaagacgataaacagctagctaagaagccgaggttcagtggtggcagcaggaaggacactgccacaaattttgtctatttcatatttgtcccctagagccagccctagcaaatgtgtgagttgggagtagttaatagtaaataagactctgactttacacaagctacacattttatacttttcataaaccacaaagtctctctagaattttttctgccttcactaaaattggactgtagccaagatataaagcaagtcatttggaacctgccgagtgagcactgaagctactttatcatgagatgtgtgttaagaaggctgcagcccacaggagtccagggaaggcggggaccacagaggcacagagtccagcacttggccgctcatgggccttctttctgcctcagaggacgggggcagagaagtgatgaagggaaatgttcttagaggaggaaatatcctttgtcctgttcagagagaccagggccctaccattaggcatactttcagaagcaacctggagaacagctatcaatcatattcaaaaccagtacaagaactgctgcctggtaccctgtgagtcatttctatgaaattccatataaagaatgatgataagtttacacactgtgcaatctcacaatctgaaaataaagttgagttggctgtgttttctctgctcttgtcagaacattgggacaattggtcgttcaaaaacattcatcctcttactgcaagtttatctgggtacttttacctgtgtgttcaaaggcatttcttttcagcagtgatcattataacttcacaaaaaaagatgctgacggatttacttacagggccttaatgttattttgtcccagccaacaccctctaggtcctaaaagtcaaggtacttcagtttatttggcaaacatgacaacattttttttggccctgggcccaacagtttgtacttcatgaaacatattgtacattttacatagtttaatttaaaaaataccttttaagctagttgatctttgactgtcttatttattataacctttcagcacattccaaggttttagttactcaggaaggagttaattaaaatgattttattttggtctgatggatgttttttaaaaggaaaattattattatgaaccttcagcctactttcttgagtgccgtaaaagtgcttgtaaatctttttttttttttaagaagaaagaaaaaaatggtgtttgacgttgatggaaattcaaaaatatatatggaactgaaacattaacttagctaaaataaaagcaatctgtgtttgaaaaaaaaa

SEQ ID NO: 346862 - DNA, 3245 bp, Homo sapiens
tgtgaggcgccctctgagctaccaacaaggaagcgagagtaactgaatggagtacagaaggaacagaaagcaggttttgagcacaggaagcttggaaacatgactgtgacggtgaagaagactgtcccctctcctgaggctgtgcagatcctctaccagcggatgagatacgagtacgagttttaccactacgtcaaagagcagttccacctgctgaagcgcaagtttggacttaagtctcacgtcagcaagccccccctgaggccacacttctttatcccaactccactggaaaccgaggagccaatcgacgatgaagaacaggatgatgaaaagtggctggaagatatttataagaggtgatgtgactgtgttgcctctatggctttatctcccttttccagaaagttctttgtttggggaagtaaaatccttaagggactaaattaatgcttgggtgcattaaaaagaacaaaacattcccacatgttggggtcattgggagatgcccggttttgcgggttttatttgtttaattttattctgtgttttctcttggctctttgggtctttcccgggtacactagatggctccatcccaaggcatcttgtcataaaacagctttcccccaccccatatcatgggaaaagggggagaaatatagcccctagcctaataacttatcatttgtaaaatgacttataaaaatattacctcaatggtaggagacatccagacttgtatatttcagtggaaatacaaaaccacttcagagaccagggtatctcctctggaaggatctaagagaaggtaagacagattaggacatcgaaaaggaggatggagccaggtgccatggcttgagcctataatccgaggctgaggtgggaggatcacttgagcccaggagtttgaggttgcagtgagctgtgatcacaccactgcactccagcctgggtgacagagtgagactctgtctcaattaattttttttttttaaaggaggaggatctccatgggtaagtggtttctacccgcatgggtagagttctgcctctggtccttctcagggggcactttcaccaagagcagtgtaattatctctgaaagagcaagtcagcttgtgccgcatccccaaccaatccacagcctggagtacctttcaaggtcaaagtgcatggccagctccattgagacattccatttcaaagcaccgtgctgacagatatcaaagtactctagcagggaaaataatttgtttgctgtgtaaggaagaatgtagacaagacagataaatctgaaggtcatgtggcatcagggaaagggcatggctgtgtcttttgcacccaatatgaaacatcttctcccaacactgctttaatggaagttctaggaaccaatttagctcaggcatttgactcctacagcagaagttctgagcctgaccacagatggtgtgtaatctatcaaacacacccctggccaagttgggtcctataggacctggtactatgtactattgtaacttctagttccctaagaggtacctgttttcagtaaaaaggggtcctgagttctgtgcaggtggaagagctacccgagaactacctgagttctgtgcaggtagagtcccatttcttatgggacctgtgtgctcctgagaactcttacttgagacatcaaaaagaagcagcaagagcttctgggacagagactgcttggccagctttgtaagtaagtggctgcctccaatgtgatgtgagtacatgttgggcagtctcactgtcctaaggtatgtcttctttccacctcccactgcccctcccctgccacctatcaatgatgccttggttcagtcattagaaatctgttgctttgagttctgaaatattttcaccttaaaaaaaatgctgaaaatacacattctcctgggaagacgataaacagctagctaagaagccgaggttcagtggtggcagcaggaaggacactgccacaaattttgtctatttcatatttgtcccctagagccagccctagcaaatgtgtgagttgggagtagttaatagtaaataagactctgactttacacaagctacacattttatacttttcataaaccacaaagtctctctagaattttttctgccttcactaaaattggactgtagccaagatataaagcaagtcatttggaacctgccgagtgagcactgaagctactttatcatgagatgtgtgttaagaaggctgcagcccacaggagtccagggaaggcggggaccacagaggcacagagtccagcacttggccgctcatgggccttctttctgcctcagaggacgggggcagagaagtgatgaagggaaatgttcttagaggaggaaatatcctttgtcctgttcagagagaccagggccctaccattaggcatactttcagaagcaacctggagaacagctatcaatcatattcaaaaccagtacaagaactgctgcctggtaccctgtgagtcatttctatgaaattccatataaagaatgatgataagtttacacactgtgcaatctcacaatctgaaaataaagttgagttggctgtgttttctctgctcttgtcagaacattgggacaattggtcgttcaaaaacattcatcctcttactgcaagtttatctgggtacttttacctgtgtgttcaaaggcatttcttttcagcagtgatcattataacttcacaaaaaaagatgctgacggatttacttacagggccttaatgttattttgtcccagccaacaccctctaggtcctaaaagtcaaggtacttcagtttatttggcaaacatgacaacattttttttggccctgggcccaacagtttgtacttcatgaaacatattgtacattttacatagtttaatttaaaaaataccttttaagctagttgatctttgactgtcttatttattataacctttcagcacattccaaggttttagttactcaggaaggagttaattaaaatgattttattttggtctgatggatgttttttaaaaggaaaattattattatgaaccttcagcctactttcttgagtgccgtaaaagtgcttgtaaatctttttttttttttaagaagaaagaaaaaaatggtgtttgacgttgatggaaattcaaaaatatatatggaactgaaacattaacttagctaaaataaaagcaatctgtgtttgaaaaaaaaa

SEQ ID NO: 346863 - DNA, 444 bp, Homo sapiens
atgtaaacccaggcgaagcagagctcttctggcttgggtagggcaggaggtcttggagccctgcccatccagcacctccccaacagaccctctgtgtatgttgacgtttccttttactgggaactccttacatccctctcttctgggtccaggatcagccatagaattggagagggttgagcggccctggctgtagaggaaagaagactccagaagctggagaagaattcgggatctgacaggaagttcaaggtgacctctgggagccttctgagaagaaaaagggcatgcaacctcagcagtgtctctctgcctctcaccaaattgacagtgggcccgaactttgctcatttaatgagatagaattagtaaagtctccagtgtacttttcattccttccacaagcttttaccgaataaaatgattggtactcagtaaaggtta

SEQ ID NO: 346864 - DNA, 1070 bp, Homo sapiens
cggccctcccatgtgcagcccggccagccgggctctcctcctcgcggcggatgggtgaccttttcctggcacgggcaggctgtgggaggcagcggagcaggcgatgaagaagaagcagcagcatcccggcggcggcgcggatccctggccccatggggcccctatggggggcgcccctccgggcctgggcagctggaagcgtcgggtgcccctgctgcctttcctgcgcttctccctccgggactacggcttctgcatggccaccctgctggtcttctgcctgggctccctcctctatcagctcagcgggggaccccctcgcttcctgctcgacctgcggcagtacttgggaaattccacttacttggatgaccatggaccacctcctagtaaggtactacctttcccaagccaggtggtgtacaacagggtaggcaagtgtgggagccgtactgtggtcttgcttctgagaatcttgtcggagaagcacggatttaatttggtcacatcagacattcacaacaaaaccaggcttactaaaaatgaacaaatggaactgattaaaaatataagtactgccgaacaaccctatttattcactcgacatgttcatttcctcaacttctcaaggtttggaggagaccagcctgtctacatcaacatcattagagaccccgtcaaccggttcttatccaactattttttccgtcgctttggagactggagaggggaacaaaatcacatgatccgcacccccagcatgaggcaggaggagcgctacctggatcagccatagaattggagagggttgagcggccctggctgtagaggaaagaagactccagaagctggagaagaattcgggatctgacaggaagttcaaggtgacctctgggagccttctgagaagaaaaagggcatgcaacctcagcagtgtctctctgcctctcaccaaattgacagtgggcccgaactttgctcatttaatgagatagaattagtaaagtctccagtgtacttttcattccttccacaagcttttaccgaataaaatgattggtactcagtaa

SEQ ID NO: 346865 - DNA, 444 bp, Homo sapiens
ttgtggtaggtactaggtctacgttggagtgtggaaggttttcagatctcacaaagcttagaaactcatgcatctgttaaatacaggtctgtgcattaggcacgtgcaggggctgtgggcacagagatgaagagtgaattccaaagaactcaaacctgtgtggagaagtcagagaaagggtcactgataatggtcctaggagaggcaaggtggtgtgataaaagtctgcacagaggaaggggccctcagacctgggcaggtgcgtgcatcctggagaagatgatacctgaattgagttgagaaggtactgtaggaattaactaggtgaaagaaataggagagggtattcctggataaagaaacagcaaaagcaaaggcaaggaagcctaaaggcttgcaggagtggctgggaaaccgcacatggattactcccataaatgttac

SEQ ID NO: 346866 - DNA, 482 bp, Homo sapiens
cccaaaataagcaggcttaggaatttgcaaaagagtcaaagcttttccttaactaaattcctgaatgacatttctcatcttggacactacatttgagacttcgatgataaacgaagttcttgacaagatttttctataataaattcaggacagtttttcatgtggatattcttggtaagactcttcagtaaaagctgaagccataatggcaaagggcttttcaacgagaggattctagattcaggtgtactgcattttcatagaaatgggcttttagtgacagtgcatatatccacctgttatttccctctgatagagagaccttcttctgactttttcaatcaaatttgttcttattttccataatgaacaaggttagcttcaacatgactctaccagcctagacatataggcctagactttaaccagttaacccaaacattgtgctaccagagtcctgtttagataacttagtgagcctc

SEQ ID NO: 346867 - DNA, 3771 bp, Homo sapiens
ggcggctgcggcacgggaaaggctcagtgactgaagctccaaaggccagcaggctggtggggacgtgaccgaagcgaggctctggttccctttcggtgggcgccatttgagcctcatctctggcttccccaggatgcgccggcagccggggagcggctccgggcgcgaggtctgaggatgatctttcctgtcgcccgctacgcgctccggtggctgcgacggcccgaagaccgtgccttttcccgcgccgccatggagatggccctccgaggcgtgcggaaagtcctctgtgtggccgaaaaaaacgacgcggccaaggggatcgccgacctgctgtcaaacggtcgcatgaggcggagagaaggactttcaaaattcaacaagatctatgaatttgattatcatctgtatggccagaatgttaccatggtaatgacttcagtttctggacatttactggctcatgatttccagatgcagtttcgaaaatggcagagctgcaaccctcttgtcctctttgaagcagaaattgaaaagtactgcccagagaattttgtagacatcaagaaaactttggaacgagagactcgccagtgccaggctctggtgatctggactgactgtgatagagaaggcgaaaacatcgggtttgagattatccacgtgtgtaaggctgtaaagcccaatctgcaggtgttgcgagcccgattctctgagatcacaccccatgccgtcaggacagcttgtgaaaacctgaccgagcctgatcagagggtgagcgatgctgtggatgtgaggcaggagctggacctgaggattggagctgcctttactaggttccagaccctgcggcttcagaggatttttcctgaggtgctggcagagcagctcatcagttacggcagctgccagttccccacactgggctttgtggtggagcggttcaaagccattcaggcttttgtaccagaaatcttccacagaattaaagtaactcatgaccacaaagatggtatcgtagaattcaactggaaaaggcatcgactctttaaccacacggcttgcctagttctctatcagttgtgtgtggaggatcccatggcaactgtggtagaggtcagatctaagcccaagagcaagtggcggcctcaagccttggacactgtggagcttgagaagctggcttctcgaaagttgagaataaatgctaaagaaaccatgaggattgctgagaagctctacactcaagggtacatcagctatccccgaacagaaacaaacatttttcccagagacttaaacctgacggtgttggtggaacagcagacccccgatccacgctggggggcctttgcccagagcattctagagcggggtggtcccaccccacgcaatgggaacaagtctgaccaagctcaccctcccattcaccccaccaaatacaccaacaacttacagggagatgaacagcgactgtatgagtttattgttcgccatttcctggcttgctgctcccaggatgctcaggggcaggagaccacagtggagatcgacatcgctcaggaacgctttgtggcccatggcctcatgattctggcccgaaactatctggatgtgtatccatatgatcactggagtgacaagatcctccctgtctatgagcaaggatcccactttcagcccagcaccgtggagatggtggatggggagaccagcccacccaagctgctcaccgaggccgacctcattgccctcatggagaagcatggcattggtacggatgccactcatgcggagcacatcgagaccatcaaagcccggatgtacgtgggcctcaccccagacaagcggttcctccctgggcacctgggcatgggacttgtggaaggttatgattccatgggctatgaaatgtctaagcctgacctccgggctgaactggaagctgatctgaagctgatctgtgatggcaaaaaggacaaatttgtggttctaaggcagcaagtgcagaaatacaagcaggttttcattgaagcggtggctaaagcaaagaaattggacgaggccttggcccagtactttgggaatgggacagagttggcccagcaagaagatatctacccagccatgccagagcccatcaggaagtgcccacagtgcaacaaggacatggtccttaagaccaagaagaatggcgggttctacctcagctgcatgggtttcccagagtgtcgctcagctgtgtggcttcctgactcaggtgctgtaggccagcggggacagcagtgtgtgtccagtttgtcagccacaccctgtgtacaggttaaagttaaagtttaagcgcggtagccttcccccgaccatgcctctggagtttgtttgctgcatcggcggatgcgacgacaccctgagggagatcctggacctgagattttcagggggcccccccagggctagccagccctctggccgcctgcaggctaaccagtccctgaacaggatggacaacagccagcacccccagcctgctgacagcagacagactgggtcctcaaaggcgctggcctacagcaccatcccaccacccacggctgctggtgaaagcaattctgtgacctgcaactgtggccaggaggctgtgctgctcactgtccgtaaggagggccccaaccggggccggcagttctttaagtgcaacggaggtagctgcaacttcttcctgtgggcagacagccccaatccgggagcaggagggcctcctgccttggcatatagacccctgggcgcctccctgggatgcccaccaggcccagggatccacctaggtgggtttggcaaccctggtgatggcagtggtagtggcacatcctgcctttgcagccagccctccgtcacacggactgtgcagaaggatggacccaacaaggggcgccagttccacacatgtgccaagccgagagagcagcagtgtggctttttccagtgggtcgatgagaacaccgctccagggacttctggagccccgtcctggacaggagacagaggaagaaccctggagtcggaagccagaagcaaaaggccccgggccagttcctcagacatggggtccacagcaaagaaaccccggaaatgcagcctttgccaccagcctggacacacccgtcccttttgtcctcagaacagatgagctcagggtagggtagagaacgccactttctcagacctgtcccctttgtgtttagaaatgagttaaccaggaccaagtggccatttagtgtcctggaaacttagaggacagtgttggcctttggagtcgggccttcttgtgttaaggggcacaaggtccagatcactctggagcaggccagctctgctggacagtgaccctcttcccaggcctcaggagtgaccatagccactgctgaaaagtcacgcagctgctccctcggaccccccaaggatggttgctgttagcagaggattggtgcagtcccagctgaagcccactgtgtgccaaaggaagaagctcccagggctgcttccttcacctgcagaaagccccaagtgagccaccagcactcatggggcagtccctgtccaggctgcccagggcttctcatagacgtcctgagaaggacggtgtaatgcaaggaaatggctgtggtaacactgatccttcagaagaagcttcattccctcttaatctagttaagccaggacatccagaattcattgctttaataaagaacccaggccgggtgcagtggctca

SEQ ID NO: 346868 - DNA, 1002 bp, Homo sapiens
ttgttgttgagttgtaggagttcttaatagtttctggatatcagatgcctttgtggttttcacatctctgcaggcaactgtgtgtctcaaaagcaaactgcaggattgggctgcaccatggactgggccaggcatctgagatcagacagacccaggctcagctcccacttcctggcctcttctgccaccctgggtgtgcagcctcatccttggagccccagttgcctcatccgtaatggggtgtccttgttcatattgaggctctctagtgaaggcttacggtcaggcacgactgcaaattaaagcttcacaaatcaaacctgttggaatttctaagtctctctcgatggcccactcaggttagcagcatgcagctcatcctaccccgtcaacgttgactggaagggtttttagtccctgtgttgagccacatctgcagcttgtgcaatgcaaaaccaaggaaaagaaaatggaccccccccgccccccccttgatggatctagctgagactaggcactggccaggctgtcacctacagtggtttcaacctcctgctgccagcaagacagcatctcctgtcctttttgtgcaggaaccatagctctgttgggttaagtgttttcctctaccaagcagctaacctggccttgaaacctaatctctgatgccatgtccccccaagccccatcagagttttgtaaaaagcccctccctgctctccacaccaatgctgagagcccatggggtaactggaggcttccctgccatcttggcaaagaagcctggctgacgtcctgcacatgcttccccaggtgattgcttgcacttaacagcagaggaaacgagaccaccccacacaacttgtagcagttgaggagtctctgcctgatcccaccccggatacttagagcatccagaattaaaaataagccttgtcaccaacatccggctcccccactccccagagccaggctcaatgtgcccaacagcgctggggcccg

SEQ ID NO: 346869 - DNA, 617 bp, Homo sapiens
ggcggctgcggcacgggaaaggctcagtgactgaagctccaaaggccagcaggctggtggggacgtgaccgaagcgaggctctggttccctttcggtgggcgccatttgagcctcatctctggcttccccaggatgcgccggcagccggggagcggctccgggcgcgaggtctgaggatgatctttcctgtcgcccgctacgcgctccggtggctgcgacggcccgaagaccgtgccttttcccgcgccgccatggagatggccctccgaggcgtgcggaaagtcctctgtgtggccgaaaaaaacgacgcggccaaggggatcgccgacctgctgtcaaacggtcgcatgaggcggagagaaggactttcaaaattcaacaagatctatgaatttgattatcatctgtatggccaggtaggtgctaaaatatttctaaaatatttcaatcataagcaagagaaagtagtcagcctcgtcatatgtagaatatgtcgctgtcttaagaataacaactgttaacaacctaaaggttcctggatatggggtgatcactttataatttatgaggagttctctttttaataaaatatggtcccatctcagctcttcattac

SEQ ID NO: 346870 - DNA, 5675 bp, Homo sapiens
ggcggctgcggcacgggaaaggctcagtgactgaagctccaaaggccagcaggctggtggggacgtgaccgaagcgaggctctggttccctttcggtgggcgccatttgagcctcatctctggcttccccaggatgcgccggcagccggggagcggctccgggcgcgaggtctgaggatgatctttcctgtcgcccgctacgcgctccggtggctgcgacggcccgaagaccgtgccttttcccgcgccgccatggagatggccctccgaggcgtgcggaaagtcctctgtgtggccgaaaaaaacgacgcggccaaggggatcgccgacctgctgtcaaacggtcgcatgaggcggagagaaggactttcaaaattcaacaagatctatgaatttgattatcatctgtatggccagaatgttaccatggtaatgacttcagtttctggacatttactggctcatgatttccagatgcagtttcgaaaatggcagagctgcaaccctcttgtcctctttgaagcagaaattgaaaagtactgcccagagaattttgtagacatcaagaaaactttggaacgagagactcgccagtgccaggctctggtgatctggactgactgtgatagagaaggcgaaaacatcgggtttgagattatccacgtgtgtaaggctgtaaagcccaatctgcaggtgttgcgagcccgattctctgagatcacaccccatgccgtcaggacagcttgtgaaaacctgaccgagcctgatcagagggtgagcgatgctgtggatgtgaggcaggagctggacctgaggattggagctgcctttactaggttccagaccctgcggcttcagaggatttttcctgaggtgctggcagagcagctcatcagttacggcagctgccagttccccacactgggctttgtggtggagcggttcaaagccattcaggcttttgtaccagaaatcttccacagaattaaagtaactcatgaccacaaagatggtatcgtagaattcaactggaaaaggcatcgactctttaaccacacggcttgcctagttctctatcagttgtgtgtggaggatcccatggcaactgtggtagaggtcagatctaagcccaagagcaagtggcggcctcaagccttggacactgtggagcttgagaagctggcttctcgaaagttgagaataaatgctaaagaaaccatgaggattgctgagaagctctacactcaagggtacatcagctatccccgaacagaaacaaacatttttcccagagacttaaacctgacggtgttggtggaacagcagacccccgatccacgctggggggcctttgcccagagcattctagagcggggtggtcccaccccacgcaatgggaacaagtctgaccaagctcaccctcccattcaccccaccaaatacaccaacaacttacagggagatgaacagcgactgtatgagtttattgttcgccatttcctggcttgctgctcccaggatgctcaggggcaggagaccacagtggagatcgacatcgctcaggaacgctttgtggcccatggcctcatgattctggcccgaaactatctggatgtgtatccatatgatcactggagtgacaagatcctccctgtctatgagcaaggatcccactttcagcccagcaccgtggagatggtggatggggagaccagcccacccaagctgctcaccgaggccgacctcattgccctcatggagaagcatggcattggtacggatgccactcatgcggagcacatcgagaccatcaaagcccggatgtacgtgggcctcaccccagacaagcggttcctccctgggcacctgggcatgggacttgtggaaggttatgattccatgggctatgaaatgtctaagcctgacctccgggctgaactggaagctgatctgaagctgatctgtgatggcaaaaaggacaaatttgtggttctaaggcagcaagtgcagaaatacaagcaggttttcattgaagcggtggctaaagcaaagaaattggacgaggccttggcccagtactttgggaatgggacagagttggcccagcaagaagatatctacccagccatgccagagcccatcaggaagtgcccacagtgcaacaaggacatggtccttaagaccaagaagaatggcgggttctacctcagctgcatgggtttcccagagtgtcgctcagctgtgtggcttcctgactcaggtgctgtaggccagcggggacagcagtgtgtgtccagtttgtcagccacaccctgtgtacaggttaaagttaaagtttaagcgcggtagccttcccccgaccatgcctctggagtttgtttgctgcatcggcggatgcgacgacaccctgagggagatcctggacctgagattttcagggggcccccccagggctagccagccctctggccgcctgcaggctaaccagtccctgaacaggatggacaacagccagcacccccagcctgctgacagcagacagactgggtcctcaaaggcgctggcctacagcaccatcccaccacccacggctgctggtgaaagcaattctgtgacctgcaactgtggccaggaggctgtgctgctcactgtccgtaaggagggccccaaccggggccggcagttctttaagtgcaacggaggtagctgcaacttcttcctgtgggcagacagccccaatccgggagcaggagggcctcctgccttggcatatagacccctgggcgcctccctgggatgcccaccaggcccagggatccacctaggtgggtttggcaaccctggtgatggcagtggtagtggcacatcctgcctttgcagccagccctccgtcacacggactgtgcagaaggatggacccaacaaggggcgccagttccacacatgtgccaagccgagagagcagcagtgtggctttttccagtgggtcgatgagaacaccgctccagggacttctggagccccgtcctggacaggagacagaggaagaaccctggagtcggaagccagaagcaaaaggccccgggccagttcctcagacatggggtccacagcaaagaaaccccggaaatgcagcctttgccaccagcctggacacacccgtcccttttgtcctcagaacagatgagctcagggtagggtagagaacgccactttctcagacctgtcccctttgtgtttagaaatgagttaaccaggaccaagtggccatttagtgtcctggaaacttagaggacagtgttggcctttggagtcgggccttcttgtgttaaggggcacaaggtccagatcactctggagcaggccagctctgctggacagtgaccctcttcccaggcctcaggagtgaccatagccactgctgaaaagtcacgcagctgctccctcggaccccccaaggatggttgctgttagcagaggattggtgcagtcccagctgaagcccactgtgtgccaaaggaagaagctcccagggctgcttccttcacctgcagaaagccccaagtgagccaccagcactcatggggcagtccctgtccaggctgcccagggcttctcatagacgtcctgagaaggacggtgtaatgcaaggaaatggctgtggtaacactgatccttcagaagaagcttcattccctcttaatctagttaagccaggacatccagaattcattgctttaataaagaacccaggccgggtgcagtggctcatgcctgtaatcccagcactttgggaggctgtggggggcggattgcctgagctcaggagttcgagaccagccagggcaacatggtgaaaccctgtctctactaaaatacaaaaaattagccaggtgtggcggtgtgcgcctgtagacccggctactcaggaggctgaggcaggagaattgcttgaacccgggaggcggaggttgcagttagctgagattgcgccactggacgacagagcgagactcagtctcaaaaaaaaatttaaaaatttaaaaaaataaaaagaatccaaccccggcagggcgtggaggctcacacctgtaatccagcacttagggaggccaaggctggaggattgcttgagatcaggagttcaagaccagcctgggcaacatagttagaccttgtctctatttttaaaaatataacaagcacagttgtacacgtctttagttcagctgctcaggaggctgaagtgggaggatcctttgaacccaagagtttgaggctgcagcaagccatgatcacaccactgcactccagcctgggtgacagagtaagaccctgtctcaaactttttttaaaatgaaagaatccaacctttttttactctgacctgcgagagtgcagagggtctggggaacatttgcagaagcaacaggtaccagccagtgctggaaggagctcaccctgggaggtctcgtcagcctctgtccttcatggctgtcccttgtgtcccatgtggagagcccttcctccctttccacatggtaagcactgagcccaatttcttctcaccccacagatggtccctcagagcagagatgtctaatgaaaggttcagattcagatcactaactttccatcttccactttttccagtggtggccatgttcccccgtttgccttcacaaaaaccttgtgaataatacaagccatatggactctgatttacagtttagaagatgagcagaggcaactgtgtgtctcaaaagcaaactgcaggattgggctgcaccatggactgggccaggcatctgagatcagacagacccaggctcagctcccacttcctggcctcttctgccaccctgggtgtgcagcctcatccttggagccccagttgcctcatccgtaatggggtgtccttgttcatattgaggctctctagtgaaggcttacggtcaggcacgactgcaaattaaagcttcacaaatcaaacctgttggaatttctaagtctctctcgatggcccactcaggttagcagcatgcagctcatcctaccccgtcaacgttgactggaagggtttttagtccctgtgttgagccacatctgcagcttgtgcaatgcaaaaccaaggaaaagaaaatggaccccccccgccccccccttgatggatctagctgagactaggcactggccaggctgtcacctacagtggtttcaacctcctgctgccagcaagacagcatctcctgtcctttttgtgcaggaaccatagctctgttgggttaagtgttttcctctaccaagcagctaacctggccttgaaacctaatctctgatgccatgtccccccaagccccatcagagttttgtaaaaagcccctccctgctctccacaccaatgctgagagcccatggggtaactggaggcttccctgccatcttggcaaagaagcctggctgacgtcctgcacatgcttccccaggtgattgcttgcacttaacagcagaggaaacgagaccaccccacacaacttgtagcagttgaggagtctctgcctgatcccaccccggatacttagagcatccagaattaaaaataagccttgtcaccaacatccggctcccccactccccagagccaggctcaatgtgcccaacagcgctggggcccg

SEQ ID NO: 346871 - DNA, 4990 bp, Homo sapiens
ggcggctgcggcacgggaaaggctcagtgactgaagctccaaaggccagcaggctggtggggacgtgaccgaagcgaggctctggttccctttcggtgggcgccatttgagcctcatctctggcttccccaggatgcgccggcagccggggagcggctccgggcgcgaggtctgaggatgatctttcctgtcgcccgctacgcgctccggtggctgcgacggcccgaagaccgtgccttttcccgcgccgccatggagatggccctccgaggcgtgcggaaagtcctctgtgtggccgaaaaaaacgacgcggccaaggggatcgccgacctgctgtcaaacggtcgcatgaggcggagagaaggactttcaaaattcaacaagatctatgaatttgattatcatctgtatggccagaatgttaccatggtaatgacttcagtttctggacatttactggctcatgatttccagatgcagtttcgaaaatggcagagctgcaaccctcttgtcctctttgaagcagaaattgaaaagtactgcccagagaattttgtagacatcaagaaaactttggaacgagagactcgccagtgccaggctctggtgatctggactgactgtgatagagaaggcgaaaacatcgggtttgagattatccacgtgtgtaaggctgtaaagcccaatctgcaggtgttgcgagcccgattctctgagatcacaccccatgccgtcaggacagcttgtgaaaacctgaccgagcctgatcagagggtgagcgatgctgtggatgtgaggcaggagctggacctgaggattggagctgcctttactaggttccagaccctgcggcttcagaggatttttcctgaggtgctggcagagcagctcatcagttacggcagctgccagttccccacactgggctttgtggtggagcggttcaaagccattcaggcttttgtaccagaaatcttccacagaattaaagtaactcatgaccacaaagatggtatcgtagaattcaactggaaaaggcatcgactctttaaccacacggcttgcctagttctctatcagttgtgtgtggaggatcccatggcaactgtggtagaggtcagatctaagcccaagagcaagtggcggcctcaagccttggacactgtggagcttgagaagctggcttctcgaaagttgagaataaatgctaaagaaaccatgaggattgctgagaagctctacactcaagggtacatcagctatccccgaacagaaacaaacatttttcccagagacttaaacctgacggtgttggtggaacagcagacccccgatccacgctggggggcctttgcccagagcattctagagcggggtggtcccaccccacgcaatgggaacaagtctgaccaagctcaccctcccattcaccccaccaaatacaccaacaacttacagggagatgaacagcgactgtatgagtttattgttcgccatttcctggcttgctgctcccaggatgctcaggggcaggagaccacagtggagatcgacatcgctcaggaacgctttgtggcccatggcctcatgattctggcccgaaactatctggatgtgtatccatatgatcactggagtgacaagatcctccctgtctatgagcaaggatcccactttcagcccagcaccgtggagatggtggatggggagaccagcccacccaagctgctcaccgaggccgacctcattgccctcatggagaagcatggcattggtacggatgccactcatgcggagcacatcgagaccatcaaagcccggatgtacgtgggcctcaccccagacaagcggttcctccctgggcacctgggcatgggacttgtggaaggttatgattccatgggctatgaaatgtctaagcctgacctccgggctgaactggaagctgatctgaagctgatctgtgatggcaaaaaggacaaatttgtggttctaaggcagcaagtgcagaaatacaagcaggttttcattgaagcggtggctaaagcaaagaaattggacgaggccttggcccagtactttgggaatgggacagagttggcccagcaagaagatatctacccagccatgccagagcccatcaggaagtgcccacagtgcaacaaggacatggtccttaagaccaagaagaatggcgggttctacctcagctgcatgggtttcccagagtgtcgctcagctgtgtggcttcctgactcaggtgctgtaggccagcggggacagcagtgtgtgtccagtttgtcagccacaccctgtgtacaggttaaagttaaagtttaagcgcggtagccttcccccgaccatgcctctggagtttgtttgctgcatcggcggatgcgacgacaccctgagggagatcctggacctgagattttcagggggcccccccagggctagccagccctctggccgcctgcaggctaaccagtccctgaacaggatggacaacagccagcacccccagcctgctgacagcagacagactgggtcctcaaaggcgctggcctacagcaccatcccaccacccacggctgctggtgaaagcaattctgtgacctgcaactgtggccaggaggctgtgctgctcactgtccgtaaggagggccccaaccggggccggcagttctttaagtgcaacggaggtagctgcaacttcttcctgtgggcagacagccccaatccgggagcaggagggcctcctgccttggcatatagacccctgggcgcctccctgggatgcccaccaggcccagggatccacctaggtgggtttggcaaccctggtgatggcagtggtagtggcacatcctgcctttgcagccagccctccgtcacacggactgtgcagaaggatggacccaacaaggggcgccagttccacacatgtgccaagccgagagagcagcagtgtggctttttccagtgggtcgatgagaacaccgctccagggacttctggagccccgtcctggacaggagacagaggaagaaccctggagtcggaagccagaagcaaaaggccccgggccagttcctcagacatggggtccacagcaaagaaaccccggaaatgcagcctttgccaccagcctggacacacccgtcccttttgtcctcagaacagatgagctcagggtagggtagagaacgccactttctcagacctgtcccctttgtgtttagaaatgagttaaccaggaccaagtggccatttagtgtcctggaaacttagaggacagtgttggcctttggagtcgggccttcttgtgttaaggggcacaaggtccagatcactctggagcaggccagctctgctggacagtgaccctcttcccaggcctcaggagtgaccatagccactgctgaaaagtcacgcagctgctccctcggaccccccaaggatggttgctgttagcagaggattggtgcagtcccagctgaagcccactgtgtgccaaaggaagaagctcccagggctgcttccttcacctgcagaaagccccaagtgagccaccagcactcatggggcagtccctgtccaggctgcccagggcttctcatagacgtcctgagaaggacggtgtaatgcaaggaaatggctgtggtaacactgatccttcagaagaagcttcattccctcttaatctagttaagccaggacatccagaattcattgctttaataaagaacccaggccgggtgcagtggctcatgcctgtaatcccagcactttgggaggctgtggggggcggattgcctgagctcaggagttcgagaccagccagggcaacatggtgaaaccctgtctctactaaaatacaaaaaattagccaggtgtggcggtgtgcgcctgtagacccggctactcaggaggctgaggcaggagaattgcttgaacccgggaggcggaggttgcagttagctgagattgcgccactggacgacagagcgagactcagtctcaaaaaaaaatttaaaaatttaaaaaaataaaaagaatccaaccccggcagggcgtggaggctcacacctgtaatccagcacttagggaggccaaggctggaggattgcttgagatcaggagttcaagaccagcctgggcaacatagttagaccttgtctctatttttaaaaatataacaagcacagttgtacacgtctttagttcagctgctcaggaggctgaagtgggaggatcctttgaacccaagagtttgaggctgcagcaagccatgatcacaccactgcactccagcctgggtgacagagtaagaccctgtctcaaactttttttaaaatgaaagaatccaacctttttttactctgacctgcgagagtgcagagggtctggggaacatttgcagaagcaacaggtaccagccagtgctggaaggagctcaccctgggaggtctcgtcagcctctgtccttcatggctgtcccttgtgtcccatgtggagagcccttcctccctttccacatggtaagcactgagcccaatttcttctcaccccacagatggtccctcagagcagagatgtctaatgaaaggttcagattcagatcactaactttccatcttccactttttccagtggtggccatgttcccccgtttgccttcacaaaaaccttgtgaataatacaagccatatggactctgatttacagtttagaagatgagcagaggcaactgtgtgtctcaaaagcaaactgcaggattgggctgcaccatggactgggccaggcatctgagatcagacagacccaggctcagctcccacttcctggcctcttctgccaccctgggtgtgcagcctcatccttggagccccagttgcctcatccgtaatggggtgtccttgttcatattgaggctctctagtgaaggcttacggtcaggcacgactgcaaattaaagcttcacaaatca

SEQ ID NO: 346872 - DNA, 4009 bp, Homo sapiens
ggcggctgcggcacgggaaaggctcagtgactgaagctccaaaggccagcaggctggtggggacgtgaccgaagcgaggctctggttccctttcggtgggcgccatttgagcctcatctctggcttccccaggatgcgccggcagccggggagcggctccgggcgcgaggtctgaggatgatctttcctgtcgcccgctacgcgctccggtggctgcgacggcccgaagaccgtgccttttcccgcgccgccatggagatggccctccgaggcgtgcggaaagtcctctgtgtggccgaaaaaaacgacgcggccaaggggatcgccgacctgctgtcaaacggtcgcatgaggcggagagaaggactttcaaaattcaacaagatctatgaatttgattatcatctgtatggccagaatgttaccatggtaatgacttcagtttctggacatttactggctcatgatttccagatgcagtttcgaaaatggcagagctgcaaccctcttgtcctctttgaagcagaaattgaaaagtactgcccagagaattttgtagacatcaagaaaactttggaacgagagactcgccagtgccaggctctggtgatctggactgactgtgatagagaaggcgaaaacatcgggtttgagattatccacgtgtgtaaggctgtaaagcccaatctgcaggtgttgcgagcccgattctctgagatcacaccccatgccgtcaggacagcttgtgaaaacctgaccgagcctgatcagagggtgagcgatgctgtggatgtgaggcaggagctggacctgaggattggagctgcctttactaggttccagaccctgcggcttcagaggatttttcctgaggtgctggcagagcagctcatcagttacggcagctgccagttccccacactgggctttgtggtggagcggttcaaagccattcaggcttttgtaccagaaatcttccacagaattaaagtaactcatgaccacaaagatggtatcgtagaattcaactggaaaaggcatcgactctttaaccacacggcttgcctagttctctatcagttgtgtgtggaggatcccatggcaactgtggtagaggtcagatctaagcccaagagcaagtggcggcctcaagccttggacactgtggagcttgagaagctggcttctcgaaagttgagaataaatgctaaagaaaccatgaggattgctgagaagctctacactcaagggtacatcagctatccccgaacagaaacaaacatttttcccagagacttaaacctgacggtgttggtggaacagcagacccccgatccacgctggggggcctttgcccagagcattctagagcggggtggtcccaccccacgcaatgggaacaagtctgaccaagctcaccctcccattcaccccaccaaatacaccaacaacttacagggagatgaacagcgactgtatgagtttattgttcgccatttcctggcttgctgctcccaggatgctcaggggcaggagaccacagtggagatcgacatcgctcaggaacgctttgtggcccatggcctcatgattctggcccgaaactatctggatgtgtatccatatgatcactggagtgacaagatcctccctgtctatgagcaaggatcccactttcagcccagcaccgtggagatggtggatggggagaccagcccacccaagctgctcaccgaggccgacctcattgccctcatggagaagcatggcattggtacggatgccactcatgcggagcacatcgagaccatcaaagcccggatgtacgtgggcctcaccccagacaagcggttcctccctgggcacctgggcatgggacttgtggaaggttatgattccatgggctatgaaatgtctaagcctgacctccgggctgaactggaagctgatctgaagctgatctgtgatggcaaaaaggacaaatttgtggttctaaggcagcaagtgcagaaatacaagcaggttttcattgaagcggtggctaaagcaaagaaattggacgaggccttggcccagtactttgggaatgggacagagttggcccagcaagaagatatctacccagccatgccagagcccatcaggaagtgcccacagtgcaacaaggacatggtccttaagaccaagaagaatggcgggttctacctcagctgcatgggtttcccagagtgtcgctcagctgtgtggcttcctgactcaggtgctgtaggccagcggggacagcagtgtgtgtccagtttgtcagccacaccctgtgtacaggttaaagttaaagtttaagcgcggtagccttcccccgaccatgcctctggagtttgtttgctgcatcggcggatgcgacgacaccctgagggagatcctggacctgagattttcagggggcccccccagggctagccagccctctggccgcctgcaggctaaccagtccctgaacaggatggacaacagccagcacccccagcctgctgacagcagacagactgggtcctcaaaggcgctggcctacagcaccatcccaccacccacggctgctggtgaaagcaattctgtgacctgcaactgtggccaggaggctgtgctgctcactgtccgtaaggagggccccaaccggggccggcagttctttaagtgcaacggaggtagctgcaacttcttcctgtgggcagacagccccaatccgggagcaggagggcctcctgccttggcatatagacccctgggcgcctccctgggatgcccaccaggcccagggatccacctaggtgggtttggcaaccctggtgatggcagtggtagtggcacatcctgcctttgcagccagccctccgtcacacggactgtgcagaaggatggacccaacaaggggcgccagttccacacatgtgccaagccgagagagcagcagtgtggctttttccagtgggtcgatgagaacaccgctccagggacttctggagccccgtcctggacaggagacagaggaagaaccctggagtcggaagccagaagcaaaaggccccgggccagttcctcagacatggggtccacagcaaagaaaccccggaaatgcagcctttgccaccagcctggacacacccgtcccttttgtcctcagaacagatgagctcagggtagggtagagaacgccactttctcagacctgtcccctttgtgtttagaaatgagttaaccaggaccaagtggccatttagtgtcctggaaacttagaggacagtgttggcctttggagtcgggccttcttgtgttaaggggcacaaggtccagatcactctggagcaggccagctctgctggacagtgaccctcttcccaggcctcaggagtgaccatagccactgctgaaaagtcacgcagctgctccctcggaccccccaaggatggttgctgttagcagaggattggtgcagtcccagctgaagcccactgtgtgccaaaggaagaagctcccagggctgcttccttcacctgcagaaagccccaagtgagccaccagcactcatggggcagtccctgtccaggctgcccagggcttctcatagacgtcctgagaaggacggtgtaatgcaaggaaatggctgtggtaacactgatccttcagaagaagcttcattccctcttaatctagttaagccaggacatccagaattcattgctttaataaagaacccaggccgggtgcagtggctcatgcctgtaatcccagcactttgggaggctgtggggggcggattgcctgaggtcaggagttcgagaccagcctgaccaatatgatgaaaccccgtctctaaaaaaatacaaaaattagccgggcgtggtgtcaggcacctgtaatcccagctactcaggaagcagaggttgcagtgagctgagatcgggccattgcactccagcctgggcaaaaagagtgaaactctgtctcaagaaaa

SEQ ID NO: 346873 - DNA, 3674 bp, Homo sapiens
ggcggctgcggcacgggaaaggctcagtgactgaagctccaaaggccagcaggctggtggggacgtgaccgaagcgaggctctggttccctttcggtgggcgccatttgagcctcatctctggcttccccaggatgcgccggcagccggggagcggctccgggcgcgaggtctgaggatgatctttcctgtcgcccgctacgcgctccggtggctgcgacggcccgaagaccgtgccttttcccgcgccgccatggagatggccctccgaggcgtgcggaaagtcctctgtgtggccgaaaaaaacgacgcggccaaggggatcgccgacctgctgtcaaacggtcgcatgaggcggagagaaggactttcaaaattcaacaagatctatgaatttgattatcatctgtatggccagaatgttaccatggtaatgacttcagtttctggacatttactggctcatgatttccagatgcagtttcgaaaatggcagagctgcaaccctcttgtcctctttgaagcagaaattgaaaagtactgcccagagaattttgtagacatcaagaaaactttggaacgagagactcgccagtgccaggctctggtgatctggactgactgtgatagagaaggcgaaaacatcgggtttgagattatccacgtgtgtaaggctgtaaagcccaatctgcaggtgttgcgagcccgattctctgagatcacaccccatgccgtcaggacagcttgtgaaaacctgaccgagcctgatcagagggtgagcgatgctgtggatgtgaggcaggagctggacctgaggattggagctgcctttactaggttccagaccctgcggcttcagaggatttttcctgaggtgctggcagagcagctcatcagttacggcagctgccagttccccacactgggctttgtggtggagcggttcaaagccattcaggcttttgtaccagaaatcttccacagaattaaagtaactcatgaccacaaagatggtatcgtagaattcaactggaaaaggcatcgactctttaaccacacggcttgcctagttctctatcagttgtgtgtggaggatcccatggcaactgtggtagaggtcagatctaagcccaagagcaagtggcggcctcaagccttggacactgtggagcttgagaagctggcttctcgaaagttgagaataaatgctaaagaaaccatgaggattgctgagaagctctacactcaagggtacatcagctatccccgaacagaaacaaacatttttcccagagacttaaacctgacggtgttggtggaacagcagacccccgatccacgctggggggcctttgcccagagcattctagagcggggtggtcccaccccacgcaatgggaacaagtctgaccaagctcaccctcccattcaccccaccaaatacaccaacaacttacagggagatgaacagcgactgtatgagtttattgttcgccatttcctggcttgctgctcccaggatgctcaggggcaggagaccacagtggagatcgacatcgctcaggaacgctttgtggcccatggcctcatgattctggcccgaaactatctggatgtgtatccatatgatcactggagtgacaagatcctccctgtctatgagcaaggatcccactttcagcccagcaccgtggagatggtggatggggagaccagcccacccaagctgctcaccgaggccgacctcattgccctcatggagaagcatggcattggtacggatgccactcatgcggagcacatcgagaccatcaaagcccggatgtacgtgggccccccaaggatggttgctgttagcagaggattggtgcagtcccagctgaagcccactgtgtgccaaaggaagaagctcccagggctgcttccttcacctgcagaaagccccaagtgagccaccagcactcatggggcagtccctgtccaggctgcccagggcttctcatagacgtcctgagaaggacggtgtaatgcaaggaaatggctgtggtaacactgatccttcagaagaagcttcattccctcttaatctagttaagccaggacatccagaattcattgctttaataaagaacccaggccgggtgcagtggctcatgcctgtaatcccagcactttgggaggctgtggggggcggattgcctgagctcaggagttcgagaccagccagggcaacatggtgaaaccctgtctctactaaaatacaaaaaattagccaggtgtggcggtgtgcgcctgtagacccggctactcaggaggctgaggcaggagaattgcttgaacccgggaggcggaggttgcagttagctgagattgcgccactggacgacagagcgagactcagtctcaaaaaaaaatttaaaaatttaaaaaaataaaaagaatccaaccccggcagggcgtggaggctcacacctgtaatccagcacttagggaggccaaggctggaggattgcttgagatcaggagttcaagaccagcctgggcaacatagttagaccttgtctctatttttaaaaatataacaagcacagttgtacacgtctttagttcagctgctcaggaggctgaagtgggaggatcctttgaacccaagagtttgaggctgcagcaagccatgatcacaccactgcactccagcctgggtgacagagtaagaccctgtctcaaactttttttaaaatgaaagaatccaacctttttttactctgacctgcgagagtgcagagggtctggggaacatttgcagaagcaacaggtaccagccagtgctggaaggagctcaccctgggaggtctcgtcagcctctgtccttcatggctgtcccttgtgtcccatgtggagagcccttcctccctttccacatggtaagcactgagcccaatttcttctcaccccacagatggtccctcagagcagagatgtctaatgaaaggttcagattcagatcactaactttccatcttccactttttccagtggtggccatgttcccccgtttgccttcacaaaaaccttgtgaataatacaagccatatggactctgatttacagtttagaagatgagcagaggtgggtgtgagttgcccagtcatgttgctagttgttgaagaaactaggattgttctcaggtcttgggctcctggcccatagaccagtggctctgtgttctgatggggtattggggaggatttttacaaatgcaggttcctgagattgttcctggaacatctccgagtgggtgtgggttgtggccctgcgtgtgtgattttgcctatcccagctccggggtaccaccaaccactttttgtctctgtgggtttacctactctggatattttgtttaaatggaatcataccaggctgggcacagtggctcacgcctgtaatcctagcactttgggaggccaaggtgggcagatcacctgaggtcaggagttcgagaccagcctgaccaatatgatgaaaccccgtctctaaaaaaatacaaaaattagccgggcgtggtgtcaggcacctgtaatcccagctactcaggaagcagaggttgcagtgagctgagatcgggccattgcactccagcctgggcaaaaagagtgaaactctgtctcaagaaaa

SEQ ID NO: 346874 - DNA, 1080 bp, Homo sapiens
  misc_feature (163)..(163): n is a, c, g, or t
  misc_feature (272)..(272): n is a, c, g, or t
  misc_feature (386)..(386): n is a, c, g, or t
gaagcccatgatcacatgcactgctctccagcgtgtgtgacataaatatgacgcctgttctcatagttgttctatatgtgacacgaatccactgcttctcggtagcatctgaccatgctagagtgcacagggtgtggggaacttttgcaaaagcaatgggatntcgagtcagtgctggctggagcttcgccctggcaggtctcgtcagcctctgttgcttctagggatgatcaccttgggtgattccactgttggcacgaagacgccggctntcactcgcacttgttccacgatggatataggactatttgtagcactcaagtaactttacttctagctccatctataatgtgctcccttcaagtagctagaagaattgttctaantggaaatgggttcatgcattcagatcactaactttccatcttccactttttccagtggtggccatgttcccccgtttgccttcacaaaaaccttgtgaataatacaagccatatggactctgatttacagtttagaagatgagcagaggtgggtgtgagttgcccagtcatgttgctagttgttgaagaaactaggattgttctcaggtcttgggctcctggcccatagaccagtggctctgtgttctgatggggtattggggaggatttttacaaatgcaggttcctgagattgttcctggaacatctccgagtgggtgtgggttgtggccctgcgtgtgtgattttgcctatcccagctccggggtaccaccaaccactttttgtctctgtgggtttacctactctggatattttgtttaaatggaatcataccaggctgggcacagtggctcacgcctgtaatcctagcactttgggaggccaaggtgggcagatcacctgaggtcaggagttcgagaccagcctgaccaatatgatgaaaccccgtctctaaaaaaatacaaaaattagccgggcgtggtgtcaggcacctgtaatcccagctactcaggaagcagaggttgcagtgagctgagatcgggccattgcactccagcctgggcaaaaagagtgaaactctgtctcaagaaaa

SEQ ID NO: 346875 - DNA, 1333 bp, Homo sapiens
  misc_feature (1265)..(1265): n is a, c, g, or t
  misc_feature (1289)..(1289): n is a, c, g, or t
ggcggctgcggcacgggaaaggctcagtgactgaagctccaaaggccagcaggctggtggggacgtgaccgaagcgaggctctggttccctttcggtgggcgccatttgagcctcatctctggcttccccaggatgcgccggcagccggggagcggctccgggcgcgaggtctgaggatgatctttcctgtcgcccgctacgcgctccggtggctgcgacggcccgaagaccgtgccttttcccgcgccgccatggagatggccctccgaggcgtgcggaaagtcctctgtgtggccgaaaaaaacgacgcggccaaggggatcgccgacctgctgtcaaacggtcgcatgaggcggagagaaggactttcaaaattcaacaagatctatgaatttgattatcatctgtatggccagaatgttaccatggtaatgacttcagtttctggacatttactggctcatgatttccagatgcagtttcgaaaatggcagagctgcaaccctcttgtcctctttgaagcagaaattgaaaagtactgcccagagaattttgtagacatcaagaaaactttggaacgagagactcgccagtgccaggctctggtgatctggactgactgtgatagagaaggcgaaaacatcgggtttgagattatccacgtgtgtaaggctgtaaagcccaatctgcaggtgttgcgagcccgattctctgagatcacaccccatgccgtcaggacagcttgtgaaaacctgaccgagcctgatcagagggtgagcgatgctgtggatgtgaggcaggagctggacctgaggattggagctgcctttactaggttccagaccctgcggcttcagaggatttttcctgaggtgctggcagagcagctcatcagttacggcagctgccagttccccacactgggctttgtggtggagcggttcaaagccattcaggcttttgtaccagaaatcttccacagaattaaagtaactcatgaccacaaagatggtatcgtagaattcaactggaaaaggcatcgactctttaaccacacggcttgcctagttctctatcagttgtgtgtggaggatcccatggcaactgtggtagaggtcagatctaagcccaagagcaagtggcggcctcaagccttggacactgtggagcttgagaagctggcttctcgaaagttgagaataaatgctaaagaaaccatgaggattgctgagaagctctacactcaaggggtacatcaagcttntcccccgaacaggaaaccaaaccntttttttcccaagaagacctttaaaaccctggacccggtggttt

SEQ ID NO: 346876 - DNA, 371 bp, Homo sapiens
ggacaagtcacagattattaacagcatctcaaagcagaacaatttttcttagtacagatcaaaatggagtttctttatgtcttcctttttctactagacacagtaacgatctgatctctcttttccccacagttactagctaaaattaactccatcactatttctgacagtacactcagtttaaaggttatggtgatgtttcctctttagacactgtacaccattgatttaacctaataggtaaattggtcatctcacagcttcttgaactggtttgcctttatttcaaggggctttaagaaaagtgagtcctttatgatggagggcagtgtgatttgactttgaccttggtaacaccttgtgttctgcag

SEQ ID NO: 346877 - DNA, 908 bp, Homo sapiens
ggcggctgcggcacgggaaaggctcagtgactgaagctccaaaggccagcaggctggtggggacgtgaccgaagcgaggctctggttccctttcggtgggcgccatttgagcctcatctctggcttccccaggatgcgccggcagccggggagcggctccgggcgcgaggtctgaggatgatctttcctgtcgcccgctacgcgctccggtggctgcgacggcccgaagaccgtgccttttcccgcgccgccatggagatggccctccgaggcgtgcggaaagtcctctgtgtggccgaaaaaaacgacgcggccaaggggatcgccgacctgctgtcaaacggtcgcatgaggcggagagaaggactttcaaaattcaacaagatctatgaatttgattatcatctgtatggccagaatgttaccatggtaatgacttcagtttctggacatttactggctcatgatttccagatgcagtttcgaaaatggcagagctgcaaccctcttgtcctctttgaagcagaaattgaaaagtactgcccagagaattttgtagacatcaaggtagggtcttttggaagacatatggcactgagtcaaaccacagagtcaaacagagtgatttctttgtttttaatgcattggcatttggagataaggttttccaccaaagtcactaccatgatttaaaaagctggttcccacccattgtataaatgtggctaagtggccaagggactgaagtaaactttttttatgaatggtagttgtttaaatcctaggaataaaggctggacatggtggtttatgcctgtaatcccagcaatttgtggggccaaggcaggatcacatgaactccaggaatttgagaccagcctgggcaacatagtgagaccctatctctc

SEQ ID NO: 346878 - DNA, 5292 bp, Homo sapiens
ggcggctgcggcacgggaaaggctcagtgactgaagctccaaaggccagcaggctggtggggacgtgaccgaagcgaggctctggttccctttcggtgggcgccatttgagcctcatctctggcttccccaggatgcgccggcagccggggagcggctccgggcgcgaggtctgaggatgatctttcctgtcgcccgctacgcgctccggtggctgcgacggcccgaagaccgtgccttttcccgcgccgccatggagatggccctccgaggcgtgcggaaagtcctctgtgtggccgaaaaaaacgacgcggccaaggggatcgccgacctgctgtcaaacggtcgcatgaggcggagagaaggactttcaaaattcaacaagatctatgaatttgattatcatctgtatggccagaatgttaccatggtaatgacttcagtttctggacatttactggctcatgatttccagatgcagtttcgaaaatggcagagctgcaaccctcttgtcctctttgaagcagaaattgaaaagtactgcccagagaattttgtagacatcaagaaaactttggaacgagagactcgccagtgccaggctctggtgatctggactgactgtgatagagaaggcgaaaacatcgggtttgagattatccacgtgtgtaaggctgtaaagcccaatctgcaggtgttgcgagcccgattctctgagatcacaccccatgccgtcaggacagcttgtgaaaacctgaccgagcctgatcagagggtgagcgatgctgtggatgtgaggcaggagctggacctgaggattggagctgcctttactaggttccagaccctgcggcttcagaggatttttcctgaggtgctggcagagcagctcatcagttacggcagctgccagttccccacactgggctttgtggtggagcggttcaaagccattcaggcttttgtaccagaaatcttccacagaattaaagtaactcatgaccacaaagatggtatcgtagaattcaactggaaaaggcatcgactctttaaccacacggcttgcctagttctctatcagttgtgtgtggaggatcccatggcaactgtggtagaggtcagatctaagcccaagagcaagtggcggcctcaagccttggacactgtggagcttgagaagctggcttctcgaaagttgagaataaatgctaaagaaaccatgaggattgctgagaagctctacactcaagggtacatcagctatccccgaacagaaacaaacatttttcccagagacttaaacctgacggtgttggtggaacagcagacccccgatccacgctggggggcctttgcccagagcattctagagcggggtggtcccaccccacgcaatgggaacaagtctgaccaagctcaccctcccattcaccccaccaaatacaccaacaacttacagggagatgaacagcgactgtatgagtttattgttcgccatttcctggcttgctgctcccaggatgctcaggggcaggagaccacagtggagatcgacatcgctcaggaacgctttgtggcccatggcctcatgattctggcccgaaactatctggatgtgtatccatatgatcactggagtgacaagatcctccctgtctatgagcaaggatcccactttcagcccagcaccgtggagatggtggatggggagaccagcccacccaagctgctcaccgaggccgacctcattgccctcatggagaagcatggcattggtacggatgccactcatgcggagcacatcgagaccatcaaagcccggatgtacgtgggcctcaccccagacaagcggttcctccctgggcacctgggcatgggacttgtggaaggttatgattccatgggctatgaaatgtctaagcctgacctccgggctgaactggaagctgatctgaagctgatctgtgatggcaaaaaggacaaatttgtggttctaaggcagcaagtgcagaaatacaagcaggttttcattgaagcggtggctaaagcaaagaaattggacgaggccttggcccagtactttgggaatgggacagagttggcccagcaagaagatatctacccagccatgccagagcccatcaggaagtgcccacagtgcaacaaggacatggtccttaagaccaagaagaatggcgggttctacctcagctgcatgggtttcccagagtgtcgctcagctgtgtggcttcctgactcaggtgctgtaggccagcggggacagcagtgtgtgtccagtttgtcagccacaccctgtgtacaggttaaagttaaagtttaagcgcggtagccttcccccgaccatgcctctggagtttgtttgctgcatcggcggatgcgacgacaccctgagggagatcctggacctgagattttcagggggcccccccagggctagccagccctctggccgcctgcaggctaaccagtccctgaacaggatggacaacagccagcacccccagcctgctgacagcagacagactgggtcctcaaaggcgctggcctacagcaccatcccaccacccacggctgctggtgaaagcaattctgtgacctgcaactgtggccaggaggctgtgctgctcactgtccgtaaggagggccccaaccggggccggcagttctttaagtgcaacggaggtagctgcaacttcttcctgtgggcagacagccccaatccgggagcaggagggcctcctgccttggcatatagacccctgggcgcctccctgggatgcccaccaggcccagggatccacctaggtgggtttggcaaccctggtgatggcagtggtagtggcacatcctgcctttgcagccagccctccgtcacacggactgtgcagaaggatggacccaacaaggggcgccagttccacacatgtgccaagccgagagagcagcagtgtggctttttccagtgggtcgatgagaacaccgctccagggacttctggagccccgtcctggacaggagacagaggaagaaccctggagtcggaagccagaagcaaaaggccccgggccagttcctcagacatggggtccacagcaaagaaaccccggaaatgcagcctttgccaccagcctggacacacccgtcccttttgtcctcagaacagatgagctcagggtagggtagagaacgccactttctcagacctgtcccctttgtgtttagaaatgagttaaccaggaccaagtggccatttagtgtcctggaaacttagaggacagtgttggcctttggagtcgggccttcttgtgttaaggggcacaaggtccagatcactctggagcaggccagctctgctggacagtgaccctcttcccaggcctcaggagtgaccatagccactgctgaaaagtcacgcagctgctccctcggaccccccaaggatggttgctgttagcagaggattggtgcagtcccagctgaagcccactgtgtgccaaaggaagaagctcccagggctgcttccttcacctgcagaaagccccaagtgagccaccagcactcatggggcagtccctgtccaggctgcccagggcttctcatagacgtcctgagaaggacggtgtaatgcaaggaaatggctgtggtaacactgatccttcagaagaagcttcattccctcttaatctagttaagccaggacatccagaattcattgctttaataaagaacccaggccgggtgcagtggctcatgcctgtaatcccagcactttgggaggctgtggggggcggattgcctgagctcaggagttcgagaccagccagggcaacatggtgaaaccctgtctctactaaaatacaaaaaattagccaggtgtggcggtgtgcgcctgtagacccggctactcaggaggctgaggcaggagaattgcttgaacccgggaggcggaggttgcagttagctgagattgcgccactggacgacagagcgagactcagtctcaaaaaaaaatttaaaaatttaaaaaaataaaaagaatccaaccccggcagggcgtggaggctcacacctgtaatccagcacttagggaggccaaggctggaggattgcttgagatcaggagttcaagaccagcctgggcaacatagttagaccttgtctctatttttaaaaatataacaagcacagttgtacacgtctttagttcagctgctcaggaggctgaagtgggaggatcctttgaacccaagagtttgaggctgcagcaagccatgatcacaccactgcactccagcctgggtgacagagtaagaccctgtctcaaactttttttaaaatgaaagaatccaacctttttttactctgacctgcgagagtgcagagggtctggggaacatttgcagaagcaacaggtaccagccagtgctggaaggagctcaccctgggaggtctcgtcagcctctgtccttcatggctgtcccttgtgtcccatgtggagagcccttcctccctttccacatggtaagcactgagcccaatttcttctcaccccacagatggtccctcagagcagagatgtctaatgaaaggttcagattcagatcactaactttccatcttccactttttccagtggtggccatgttcccccgtttgccttcacaaaaaccttgtgaataatacaagccatatggactctgatttacagtttagaagatgagcagaggtgggtgtgagttgcccagtcatgttgctagttgttgaagaaactaggattgttctcaggtcttgggctcctggcccatagaccagtggctctgtgttctgatggggtattggggaggatttttacaaatgcaggttcctgagattgttcctggaacatctccgagtgggtgtgggttgtggccctgcgtgtgtgattttgcctatcccagctccggggtaccaccaaccactttttgtctctgtgggtttacctactctggatattttgtttaaatggaatcataccaggctgggcacagtggctcacgcctgtaatcctagcactttgggaggccaaggtgggcagatcacctgaggtcaggagttcgagaccagcctgaccaatatgatgaaaccccgtctctaaaaaaatacaaaaattagccgggcgtggtgtcaggcacctgtaatcccagctactcaggaagcagaggttgcagtgagctgagatcgggccattgcactccagcctgggcaaaaagagtgaaactctgtctcaagaaaa

SEQ ID NO: 346879 - DNA, 4207 bp, Homo sapiens
atcacttactgtgttgctttcatccctcctggagaatagaagtttcctactcccatgtacctgatggctgacaagatcctctcaccagttcatgggagctaccctgattggaactctttcagcagcagccatggcacaccctcataactctcccacagtacccttagaatactgcaacgcgttgattaggctgtctccgagcgcattggccggtactacaccgcctgcgcgagggtccctccgcccgacagcaatccatggagcgggtgtggctcactgcaggcactgtcaaggcaacccagaatgtgagcagagcctccaccttaaccaattcaacccacccaattaccaccaaactaaattcatcgggacaggagatgaacagcgactgtatgagtttattgttcgccatttcctggcttgctgctcccaggatgctcaggggcaggagaccacagtggagatcgacatcgctcaggaacgctttgtggcccatggcctcatgattctggcccgaaactatctggatgtgtatccatatgatcactggagtgacaagatcctccctgtctatgagcaaggatcccactttcagcccagcaccgtggagatggtggatggggagaccagcccacccaagctgctcaccgaggccgacctcattgccctcatggagaagcatggcattggtacggatgccactcatgcggagcacatcgagaccatcaaagcccggatgtacgtgggcctcaccccagacaagcggttcctccctgggcacctgggcatgggacttgtggaaggttatgattccatgggctatgaaatgtctaagcctgacctccgggctgaactggaagctgatctgaagctgatctgtgatggcaaaaaggacaaatttgtggttctaaggcagcaagtgcagaaatacaagcaggttttcattgaagcggtggctaaagcaaagaaattggacgaggccttggcccagtactttgggaatgggacagagttggcccagcaagaagatatctacccagccatgccagagcccatcaggaagtgcccacagtgcaacaaggacatggtccttaagaccaagaagaatggcgggttctacctcagctgcatgggtttcccagagtgtcgctcagctgtgtggcttcctgactcaggtgctgtaggccagcggggacagcagtgtgtgtccagtttgtcagccacaccctgtgtacaggttaaagttaaagtttaagcgcggtagccttcccccgaccatgcctctggagtttgtttgctgcatcggcggatgcgacgacaccctgagggagatcctggacctgagattttcagggggcccccccagggctagccagccctctggccgcctgcaggctaaccagtccctgaacaggatggacaacagccagcacccccagcctgctgacagcagacagactgggtcctcaaaggcgctggcctacagcaccatcccaccacccacggctgctggtgaaagcaattctgtgacctgcaactgtggccaggaggctgtgctgctcactgtccgtaaggagggccccaaccggggccggcagttctttaagtgcaacggaggtagctgcaacttcttcctgtgggcagacagccccaatccgggagcaggagggcctcctgccttggcatatagacccctgggcgcctccctgggatgcccaccaggcccagggatccacctaggtgggtttggcaaccctggtgatggcagtggtagtggcacatcctgcctttgcagccagccctccgtcacacggactgtgcagaaggatggacccaacaaggggcgccagttccacacatgtgccaagccgagagagcagcagtgtggctttttccagtgggtcgatgagaacaccgctccagggacttctggagccccgtcctggacaggagacagaggaagaaccctggagtcggaagccagaagcaaaaggccccgggccagttcctcagacatggggtccacagcaaagaaaccccggaaatgcagcctttgccaccagcctggacacacccgtcccttttgtcctcagaacagatgagctcagggtagggtagagaacgccactttctcagacctgtcccctttgtgtttagaaatgagttaaccaggaccaagtggccatttagtgtcctggaaacttagaggacagtgttggcctttggagtcgggccttcttgtgttaaggggcacaaggtccagatcactctggagcaggccagctctgctggacagtgaccctcttcccaggcctcaggagtgaccatagccactgctgaaaagtcacgcagctgctccctcggaccccccaaggatggttgctgttagcagaggattggtgcagtcccagctgaagcccactgtgtgccaaaggaagaagctcccagggctgcttccttcacctgcagaaagccccaagtgagccaccagcactcatggggcagtccctgtccaggctgcccagggcttctcatagacgtcctgagaaggacggtgtaatgcaaggaaatggctgtggtaacactgatccttcagaagaagcttcattccctcttaatctagttaagccaggacatccagaattcattgctttaataaagaacccaggccgggtgcagtggctcatgcctgtaatcccagcactttgggaggctgtggggggcggattgcctgagctcaggagttcgagaccagccagggcaacatggtgaaaccctgtctctactaaaatacaaaaaattagccaggtgtggcggtgtgcgcctgtagacccggctactcaggaggctgaggcaggagaattgcttgaacccgggaggcggaggttgcagttagctgagattgcgccactggacgacagagcgagactcagtctcaaaaaaaaatttaaaaatttaaaaaaataaaaagaatccaaccccggcagggcgtggaggctcacacctgtaatccagcacttagggaggccaaggctggaggattgcttgagatcaggagttcaagaccagcctgggcaacatagttagaccttgtctctatttttaaaaatataacaagcacagttgtacacgtctttagttcagctgctcaggaggctgaagtgggaggatcctttgaacccaagagtttgaggctgcagcaagccatgatcacaccactgcactccagcctgggtgacagagtaagaccctgtctcaaactttttttaaaatgaaagaatccaacctttttttactctgacctgcgagagtgcagagggtctggggaacatttgcagaagcaacaggtaccagccagtgctggaaggagctcaccctgggaggtctcgtcagcctctgtccttcatggctgtcccttgtgtcccatgtggagagcccttcctccctttccacatggtaagcactgagcccaatttcttctcaccccacagatggtccctcagagcagagatgtctaatgaaaggttcagattcagatcactaactttccatcttccactttttccagtggtggccatgttcccccgtttgccttcacaaaaaccttgtgaataatacaagccatatggactctgatttacagtttagaagatgagcagaggtgggtgtgagttgcccagtcatgttgctagttgttgaagaaactaggattgttctcaggtcttgggctcctggcccatagaccagtggctctgtgttctgatggggtattggggaggatttttacaaatgcaggttcctgagattgttcctggaacatctccgagtgggtgtgggttgtggccctgcgtgtgtgattttgcctatcccagctccggggtaccaccaaccactttttgtctctgtgggtttacctactctggatattttgtttaaatggaatcataccaggctgggcacagtggctcacgcctgtaatcctagcactttgggaggccaaggtgggcagatcacctgaggtcaggagttcgagaccagcctgaccaatatgatgaaaccccgtctctaaaaaaatacaaaaattagccgggcgtggtgtcaggcacctgtaatcccagctactcaggaagcagaggttgcagtgagctgagatcgggccattgcactccagcctgggcaaaaagagtgaaactctgtctcaagaaaa

SEQ ID NO: 346880 - DNA, 4216 bp, Homo sapiens
ggcggctgcggcacgggaaaggctcagtgactgaagctccaaaggccagcaggctggtggggacgtgaccgaagcgaggctctggttccctttcggtgggcgccatttgagcctcatctctggcttccccaggatgcgccggcagccggggagcggctccgggcgcgaggtctgaggatgatctttcctgtcgcccgctacgcgctccggtggctgcgacggcccgaagaccgtgccttttcccgcgccgccatggagatggccctccgaggcgtgcggaaagtcctctgtgtggccgaaaaaaacgacgcggccaaggggatcgccgacctgctgtcaaacggtcgcatgaggcggagagaaggactttcaaaattcaacaagatctatgaatttgattatcatctgtatggccagaatgttaccatggtaatgacttcagtttctggacatttactggctcatgatttccagatgcagtttcgaaaatggcagagctgcaaccctcttgtcctctttgaagcagaaattgaaaagtactgcccagagaattttgtagacatcaagaaaactttggaacgagagactcgccagtgccaggctctggtgatctggactgactgtgatagagaaggcgaaaacatcgggtttgagattatccacgtgtgtaaggctgtaaagcccaatctgcaggtgttgcgagcccgattctctgagatcacaccccatgccgtcaggacagcttgtgaaaacctgaccgagcctgatcagagggtgagcgatgctgtggatgtgaggcaggagctggacctgaggattggagctgcctttactaggttccagaccctgcggcttcagaggatttttcctgaggtgctggcagagcagctcatcagttacggcagctgccagttccccacactgggctttgtggtggagcggttcaaagccattcaggcttttgtaccagaaatcttccacagaattaaagtaactcatgaccacaaagatggtatcgtagaattcaactggaaaaggcatcgactctttaaccacacggcttgcctagttctctatcagttgtgtgtggaggatcccatggcaactgtggtagaggtcagatctaagcccaagagcaagtggcggcctcaagccttggacactgtggagcttgagaagctggcttctcgaaagttgagaataaatgctaaagaaaccatgaggattgctgagaagctctacactcaagggtacatcagctatccccgaacagaaacaaacatttttcccagagacttaaacctgacggtgttggtggaacagcagacccccgatccacgctggggggcctttgcccagagcattctagagcggggtggtcccaccccacgcaatgggaacaagtctgaccaagctcaccctcccattcaccccaccaaatacaccaacaacttacagggagatgaacagcgactgtatgagtttattgttcgccatttcctggcttgctgctcccaggatgctcaggggcaggagaccacagtggagatcgacatcgctcaggaacgctttgtggcccatggcctcatgattctggcccgaaactatctggatgtgtatccatatgatcactggagtgacaagatcctccctgtctatgagcaaggatcccactttcagcccagcaccgtggagatggtggatggggagaccagcccacccaagctgctcaccgaggccgacctcattgccctcatggagaagcatggcattggtacggatgccactcatgcggagcacatcgagaccatcaaagcccggatgtacgtgggcctcaccccagacaagcggttcctccctgggcacctgggcatgggacttgtggaaggttatgattccatgggctatgaaatgtctaagcctgacctccgggctgaactggaagctgatctgaagctgatctgtgatggcaaaaaggacaaatttgtggttctaaggcagcaagtgcagaaatacaagcaggttttcattgaagcggtggctaaagcaaagaaattggacgaggccttggcccagtactttgggaatgggacagagttggcccagcaagaagatatctacccagccatgccagagcccatcaggaagtgcccacagtgcaacaaggacatggtccttaagaccaagaagaatggcgggttctacctcagctgcatgggtttcccagagtgtcgctcagctgtgtggcttcctgactcaggtgctgtaggccagcggggacagcagtgtgtgtccagtttgtcagccacaccctgtgtacaggttaaagttaaagtttaagcgcggtagccttcccccgaccatgcctctggagtttgtttgctgcatcggcggatgcgacgacaccctgagggagatcctggacctgagattttcagggggcccccccagggctagccagccctctggccgcctgcaggctaaccagtccctgaacaggatggacaacagccagcacccccagcctgctgacagcagacagactgggtcctcaaaggcgctggcctacagcaccatcccaccacccacggctgctggtgaaagcaattctgtgacctgcaactgtggccaggaggctgtgctgctcactgtccgtaaggagggccccaaccggggccggcagttctttaagtgcaacggaggtagctgcaacttcttcctgtgggcagacagccccaatccgggagcaggagggcctcctgccttggcatatagacccctgggcgcctccctgggatgcccaccaggcccagggatccacctaggtgggtttggcaaccctggtgatggcagtggtagtggcacatcctgcctttgcagccagccctccgtcacacggactgtgcagaaggatggacccaacaaggggcgccagttccacacatgtgccaagccgagagagcagcagtgtggctttttccagtgggtcgatgagaacaccgctccagggacttctggagccccgtcctggacaggagacagaggaagaaccctggagtcggaagccagaagcaaaaggccccgggccagttcctcagacatggggtccacagcaaagaaaccccggaaatgcagcctttgccaccagcctggacacacccgtcccttttgtcctcagaacagatgagctcaggtggtggccatgttcccccgtttgccttcacaaaaaccttgtgaataatacaagccatatggactctgatttacagtttagaagatgagcagaggcaactgtgtgtctcaaaagcaaactgcaggattgggctgcaccatggactgggccaggcatctgagatcagacagacccaggctcagctcccacttcctggcctcttctgccaccctgggtgtgcagcctcatccttggagccccagttgcctcatccgtaatggggtgtccttgttcatattgaggctctctagtgaaggcttacggtcaggcacgactgcaaattaaagcttcacaaatcaaacctgttggaatttctaagtctctctcgatggcccactcaggttagcagcatgcagctcatcctaccccgtcaacgttgactggaagggtttttagtccctgtgttgagccacatctgcagcttgtgcaatgcaaaaccaaggaaaagaaaatggaccccccccgccccccccttgatggatctagctgagactaggcactggccaggctgtcacctacagtggtttcaacctcctgctgccagcaagacagcatctcctgtcctttttgtgcaggaaccatagctctgttgggttaagtgttttcctctaccaagcagctaacctggccttgaaacctaatctctgatgccatgtccccccaagccccatcagagttttgtaaaaagcccctccctgctctccacaccaatgctgagagcccatggggtaactggaggcttccctgccatcttggcaaagaagcctggctgacgtcctgcacatgcttccccaggtgattgcttgcacttaacagcagaggaaacgagaccaccccacacaacttgtagcagttgaggagtctctgcctgatcccaccccggatacttagagcatccagaattaaaaataagccttgtcaccaacatccggctcccccactccccagagccaggctcaatgtgcccaacagcgctggggcccg

SEQ ID NO: 346881 - DNA, 2673 bp, Homo sapiens
ggcggctgcggcacgggaaaggctcagtgactgaagctccaaaggccagcaggctggtggggacgtgaccgaagcgaggctctggttccctttcggtgggcgccatttgagcctcatctctggcttccccaggatgcgccggcagccggggagcggctccgggcgcgaggtctgaggatgatctttcctgtcgcccgctacgcgctccggtggctgcgacggcccgaagaccgtgccttttcccgcgccgccatggagatggccctccgaggcgtgcggaaagtcctctgtgtggccgaaaaaaacgacgcggccaaggggatcgccgacctgctgtcaaacggtcgcatgaggcggagagaaggactttcaaaattcaacaagatctatgaatttgattatcatctgtatggccagaatgttaccatggtaatgacttcagtttctggacatttactggctcatgatttccagatgcagtttcgaaaatggcagagctgcaaccctcttgtcctctttgaagcagaaattgaaaagtactgcccagagaattttgtagacatcaagaaaactttggaacgagagactcgccagtgccaggctctggtgatctggactgactgtgatagagaaggcgaaaacatcgggtttgagattatccacgtgtgtaaggctgtaaagcccaatctgcaggtgttgcgagcccgattctctgagatcacaccccatgccgtcaggacagcttgtgaaaacctgaccgagcctgatcagagggtgagcgatgctgtggatgtgaggcaggagctggacctgaggattggagctgcctttactaggttccagaccctgcggcttcagaggatttttcctgaggtgctggcagagcagctcatcagttacggcagctgccagttccccacactgggctttgtggtggagcggttcaaagccattcaggcttttgtaccagaaatcttccacagaattaaagtaactcatgaccacaaagatggtatcgtagaattcaactggaaaaggcatcgactctttaaccacacggcttgcctagttctctatcagttgtgtgtggaggatcccatggcaactgtggtagaggtcagatctaagcccaagagcaagtggcggcctcaagccttggacactgtggagcttgagaagctggcttctcgaaagttgagaataaatgctaaagaaaccatgaggattgctgagaagctctacactcaagggtacatcagctatccccgaacagaaacaaacatttttcccagagacttaaacctgacggtgttggtggaacagcagacccccgatccacgctggggggcctttgcccagagcattctagagcggggtggtcccaccccacgcaatgggaacaagtctgaccaagctcaccctcccattcaccccaccaaatacaccaacaacttacagggagatgaacagcgactgtatgagtttattgttcgccatttcctggcttgctgctcccaggatgctcaggggcaggagaccacagtggagatcgacatcgctcaggaacgctttgtggcccatggcctcatgattctggcccgaaactatctggatgtgtatccatatgatcactggagtgacaagatcctccctgtctatgagcaaggatcccactttcagcccagcaccgtggagatggtggatggggagaccagcccacccaagctgctcaccgaggccgacctcattgccctcatggagaagcatggcattggtacggatgccactcatgcggagcacatcgagaccatcaaagcccggatgtacgtgggcctcaccccagacaagcggttcctccctgggcacctgggcatgggacttgtggaaggttatgattccatgggctatgaaatgtctaagcctgacctccgggctgaactggaagctgatctgaagctgatctgtgatggcaaaaaggacaaatttgtggttctaaggcagcaagtgcagaaatacaagcaggttttcattgaagcggtggctaaagcaaagaaattggacgaggccttggcccagtactttgggaatgggacagagttggcccagcaagaagatatctacccagccatgccagagcccatcaggaagtgcccacagtgcaacaaggacatggtccttaagaccaagaagaatggcgggttctacctcagctgcatgggtttcccagagtgtcgctcagctgtgtggcttcctgactcaggtgctgtaggccagcggggacagcagtgtgtgtccagtttgtcagccacaccctgtgtacaggtgagctgggcacctgagtcaggtgcctcctctggagtgtgtacaccatctttcccttgctcctgccagaacccagagaggagtgtcggggattccactcaggccctgcaggggcgtagctgtgttctgcagcagccagttcagcagggctggtccagttctgttgtgttccatgctgtcactgctttggcaggtatgaccctgtttggagtgggccatgggcaaagaaccatgaagggctctttccctgccctctccagatagatgattgctacaccaggcttaggaaattattcacatattaaatacaacatccaagcttgggctacgtagcaagaccccatctcttta

SEQ ID NO: 346882 - DNA, 389 bp, Homo sapiens
aggttgcagtgagccgaaattgtgcccctgcacttcaacctgggcaagggagccagactcccatctcaaaaaaaaaaaaaaagagaagtcttgggaaggaggacagtggagacacacagggaatgatccaactgaagtaagcttcagcactcagtaagtgtccagctctgttctttccacagactgcctccttcaattttcagccagttttgtggctaggtgttaaccccattttacaggtgggagacattgaggctgactgatgaggttagtttctcagccacccttctaagatctaagtccacttttgagcaagtgctctgaataacaataattatcttacagcttaatgtacgattattaaataccactcccctttcattttacca

SEQ ID NO: 346883 - DNA, 1033 bp, Homo sapiens
atagatacattgaataagaatctttatttcattcccagtgtggtttggagtataagacttaggaaagtgtctgtgaaacctacagtgagaaattccactgggtcttgacagctggagtgagcactcaaatgtgcccagcacttttctctagctcccttctctgcttgagctgtggtctgctttctccttctctgtagctcagatcatcttcctccacttctcagcccacatgtctaacgtggctgggaccagctcagagtgtttcaaatgtgtaggtgctcggagagagagagacccaaccctcttagactcaggtacacattctcagggaagaaaactggaaccagtagaaatatcagatccctatgttccctgacgagtgcttccttctctaagaagaaaaacctactaagaagacaaattacagctggaaggttgtttggtaagcgtggaatcacctatctaatctcccagcaagtcttaattgctctaccataaaaaaaaagcaacccaaatccatccttttcccagcttcactccagcctgggcaacacagcgagactccgtctcgaggaaaacaaaacgaaaagacgcgtgcctgcggtgaggaagctgggcgctgtcttcgagttcaggtgaattagcctcaatcccccgtgttcaccttggactcccatagccctcttgcatggatcacgtaaacactgaaaggcagccggggagcagacaacagatgaggtctacaactgtccttcatggggatttcaacgctatggttatattagcaccaaacttctacaaaccaagctccagggcccaaccctagcaagggcccaaatgagagaatggtacttacggatgcgaaaccggagcctggctagacgctctcggatgctgtgtgcctgacatgagtgtactgcctaccatatgtgctgattatatggctttgcacggtgcttgtaactcatggcaacttgttgcttaatatatgtatgtatatctctttactgcacacttatatataatatcaaca

SEQ ID NO: 346884 - DNA, 4185 bp, Homo sapiens
cggccgcgagcgcagtggtgtggagcgcgccgggtcccggagccggctgtctgagggatggacgagacgagcccactagtgtcccccgagcgggcccaacccccggactacaccttcccgtcgggctcgggcgctcactttccgcaggtgcccgggggcgcggtccgagtggcggcggcggccggctcgggcccctctccgccgggctcgccgggccacgaccgcgagcggcagccactgttggatcgggcccggggcgcggcggcccagggccagacccaaaccgtggcggcgcaggcccaggctctggccgctcaggccgcggcggcagcccacgccgctcaggcccaccgcgagcggaacgagttcccggaggatcctgagttcgaggcggtggtgcggcaggccgagctggccatcgagcgctgcatctttcccgagcgcatctaccagggctccagcggaagctacttcgtcaaggaccctcaggggaggatcattgctgtcttcaaacccaagaatgaagagccctatgggcatcttaatcctaagtggaccaagtggctgcagaagctgtgctgtccttgctgctttggccgtgactgccttgtccttaaccagggctatctctcagaagcaggggccagcctggtggaccaaaaactggaactcaacattgttccccgtacaaaggtagtatacctggccagtgagaccttcaactatagtgccattgaccgagtgaagtccaggggcaagcggcttgcactagagaaagtgccaaaagttggacagcggtttaaccgcatcgggctaccaccaaaggttggttcattccagctctttgttgaaggctacaaagatgcagactattggctgcggcgttttgaagcagaacctcttcctgagaacactaaccggcaactactgctccagtttgagcggttggtggtgctggattacatcatccgcaacactgatcgaggcaatgacaactggctgattaaatatgactgtccaatggatagttctagctctcgggacacagactgggtggtggtgaaggagcctgttatcaaggtggctgccatagacaatgggctggccttcccactgaagcatcctgactcctggagggcatatcctttttactgggcctggttgccccaggcgaaagtcccattttctcaggagatcaaagatctgatccttccaaagatatcggaccctaacttcgtcaaggacttggaagaggacctatatgaactcttcaagaaagatcctggtttcgacaggggccagttccataagcagattgctgtcatgcggggccagatcttaaatctgacccaggccttgaaagacaacaagagtcccctgcacctcgtccagatgccacctgtgattgtcgagacggcccgttcccaccagcggtcttctagcgagtcctacacacagagctttcagagccggaagcccttcttttcatggtggtagctccagaggcaggcagaggaaatattgtcagagactggtgggaggaagcctggggagtggggtgcaggaaaagccagagaagccggtggagagcagcacctttaagagccctctctctctgcttgccaccctgctcagagctttccacccacagggagaagcacaatcaggaacagtgagtgctcctcgcccttctgatgtgggggaggctggagctccatgcacgtagtccagatgcctgggaaggaacatctcccttccagcatctgctggtagcaggctgggacagtcccttccttccctgaaaccctgctctattgcaattccctattatattctgcatcagaaaaacaaacaaaacaaaaacaactttaaatgcttgtagcagaaccccgggtcatctcatgtcagaaacctttaatccaggcctaaatttgcatagacctgacattcagctgccttgcagttgcttcctcccatgagccaaggtggtgtcagagggcaactggatgactcgcagtaccacagcactgggacagacagaagccacacctttcttttgggtttttgccaagcctcctccatctcccatcagtgctgtgggctggctgcaagcctcgaaacagttctcctggaagggaggtttttgctttacccccgccagcacttccgcacacaatcatagagaacctctctgctctctgctggcctacagcttgtctgtttctcaagcagaggcaggaagagctagtcttagcatttatattttaataggaagttgactcccagcatgtaaaagtgatccacgcagccggagtgtatgccgggagctaagtggtctatgggtgaacatatcccaccttgcttcctgagtccttggtcccaatcttctcatttgttcctctcgttttaaattttttccccccaactcttttgatgtaagagttcagtttgtcttcgggagtgggtctctgcaagggctctgggatgagtcttggcttccaagaggacaggctattaggttcttggacttttttctgtgctaccgctgctgcttggtggaagtaacaggacgtggattctgcctcataagtggcagtttcccttttctctctgacttgtcctaggccgatttctctatggcttccctgagaaaggtgaggcccaaaggagagaggccttcaaactgtcccaggtcctgcgcagctcagtgcgtatcttcttgcttccatgtgtcttttcccctgctgcctcactccccacccccacttgccaggtgtttgagccatttctacaccaaagcaaagtacggcctcaggagggagtaaaaagggtgccatctgtgtctggaggggcagctgtgttcatgccctgtgctactggacatttcacaattctggcaccttgcgattggtcagtcaacctcagaaagtaactatcttgaaggtttgaaaaacaaccaaagaaagggagtgaggactatggctgcatgtcctctgcttgcccggctgcagagcagagatgtgcagccctctggtcagctggtccaggctggtccccgccggtccccttccagtccagccaccaagagtccacttgtcccgggcttccacctggctgacaggaagaatttctgagagctggatgtgcatgccctgtggacgaaggtacagctcgcctgcctgccccaatcccagccccgacaatcacatgcagctgactcggacactggccttgggaacaatgttcgagagaacacttgccccttgactgtaggagccagaaggggacccaggtgtgcatagctctctgtagacatttttacccaaacctgttggtaaagtgcccatctggtgctcaagagagcctgggggtctaacagggagcccggctgcctcacctggccacagcctccacaccagatctccacattgtcttgatccagaccagctctgtgatcagaaggaaattgggtccagtgtaggagagagctggtcctgggcctggcaggcaagagtgtgggcatcctttcctggcctttctccactctccctcaagcctgtgctcaggttgccttgaatgtggactctggaagagccaggggcccagaatgccgggggaggcttctgagtggcactcatggaacaccgtccctctgccagccataggccctgcctccagtgtcagggaatggaggctgggctgcgagagtgttgctgccccctgtgtcattcttctaatccaatgtagaaattgtacgtaatgtatttaaatcaacgcaaatgtatgaataacaaatacagttctgaccttttttgtccagtttctttgggggaaggaagacaaagaaggtaggaacggaattttgagggcaaagaaacctgtgtttccatggaattgctgagacgtggctcctggggctatttctccctaataaaggatgatccaggtcctcatttccaaagtcccaatgctctgaaaaccaaaagtattttcataacccatttgaaaccaaacctgacctgaacttacactgataggaagctatgggtaattatgatgtgttccttttagtgtgattctttgttgcagaaatgtcaatatattttatgacatggttccctactagggattatacagtatttgctgactacttcctaagagccaaaaataaaaaatctgaattcc

SEQ ID NO: 346885 - DNA, 4348 bp, Homo sapiens
cggccgcgagcgcagtggtgtggagcgcgccgggtcccggagccggctgtctgagggatggacgagacgagcccactagtgtcccccgagcgggcccaacccccggactacaccttcccgtcgggctcgggcgctcactttccgcaggtgcccgggggcgcggtccgagtggcggcggcggccggctcgggcccctctccgccgggctcgccgggccacgaccgcgagcggcagccactgttggatcgggcccggggcgcggcggcccagggccagacccaaaccgtggcggcgcaggcccaggctctggccgctcaggccgcggcggcagcccacgccgctcaggcccaccgcgagcggaacgagttcccggaggatcctgagttcgaggcggtggtgcggcaggccgagctggccatcgagcgctgcatctttcccgagcgcatctaccagggctccagcggaagctacttcgtcaaggaccctcaggggaggatcattgctgtcttcaaacccaagaatgaagagccctatgggcatcttaatcctaagtggaccaagtggctgcagaagctgtgctgtccttgctgctttggccgtgactgccttgtccttaaccagggctatctctcagaagcaggggccagcctggtggaccaaaaactggaactcaacattgttccccgtacaaaggtagtatacctggccagtgagaccttcaactatagtgccattgaccgagtgaagtccaggggcaagcggcttgcactagagaaagtgccaaaagttggacagcggtttaaccgcatcgggctaccaccaaaggttggttcattccagctctttgttgaaggctacaaagatgcagactattggctgcggcgttttgaagcagaacctcttcctgagaacactaaccggcaactactgctccagtttgagcggttggtggtgctggattacatcatccgcaacactgatcgaggcaatgacaactggctgattaaatatgactgtccaatggatagttctagctctcgggacacagactgggtggtggtgaaggagcctgttatcaaggtggctgccatagacaatgggctggccttcccactgaagcatcctgactcctggagggcatatcctttttactgggcctggttgccccaggcgaaagtcccattttctcaggagatcaaagatctgatccttccaaagatatcggaccctaacttcgtcaaggacttggaagaggacctatatgaactcttcaagaaagatcctggtttcgacaggggccagttccataagcagattgctgtcatgcggggccagatcttaaatctgacccaggccttgaaagacaacaagagtcccctgcacctcgtccagatgccacctgtgattgtcgagacggcccgttcccaccagcggtcttctagcgagtcctacacacagagctttcagagccggaagcccttcttttcatggtggtagctccagaggcaggcagaggaaatattgtcagagactggtgggaggaagcctggggagtggggtgcaggaaaagccagagaagccggtggagagcagcacctttaagagccctctctctctgcttgccaccctgctcagagctttccacccacagggagaagcacaatcaggaacagtgagtgctcctcgcccttctgatgtgggggaggctggagctccatgcacgtagtccagatgcctgggaaggaacatctcccttccagcatctgctggtagcaggctgggacagtcccttccttccctgaaaccctgctctattgcaattccctattatattctgcatcagaaaaacaaacaaaacaaaaacaactttaaatgcttgtagcagaaccccgggtcatctcatgtcagaaacctttaatccaggcctaaatttgcatagacctgacattcagctgccttgcagttgcttcctcccatgagccaaggtggtgtcagagggcaactggatgactcgcagtaccacagcactgggacagacagaagccacacctttcttttgggtttttgccaagcctcctccatctcccatcagtgctgtgggctggctgcaagcctcgaaacagttctcctggaagggaggtttttgctttacccccgccagcacttccgcacacaatcatagagaacctctctgctctctgctggcctacagcttgtctgtttctcaagcagaggcaggaagagctagtcttagcatttatattttaataggaagttgactcccagcatgtaaaagtgatccacgcagccggagtgtatgccgggagctaagtggtctatgggtgaacatatcccaccttgcttcctgagtccttggtcccaatcttctcatttgttcctctcgttttaaattttttccccccaactcttttgatgtaagagttcagtttgtcttcgggagtgggtctctgcaagggctctgggatgagtcttggcttccaagaggacaggctattaggttcttggacttttttctgtgctaccgctgctgcttggtggaagtaacaggacgtggattctgcctcataagtggcagtttcccttttctctctgacttgtcctaggccgatttctctatggcttccctgagaaaggtgaggcccaaaggagagaggccttcaaactgtcccaggtcctgcgcagctcagtgcgtatcttcttgcttccatgtgtcttttcccctgctgcctcactccccacccccacttgccaggtgtttgagccatttctacaccaaagcaaagtacggcctcaggagggagtaaaaagggtgccatctgtgtctggaggggcagctgtgttcatgccctgtgctactggacatttcacaattctggcaccttgcgattggtcagtcaacctcagaaagtaactatcttgaaggtttgaaaaacaaccaaagaaagggagtgaggactatggctgcatgtcctctgcttgcccggctgcagagcagagatgtgcagccctctggtcagctggtccaggctggtccccgccggtccccttccagtccagccaccaagagtccacttgtcccgggcttccacctggctgacaggaagaatttctgagagctggatgtgcatgccctgtggacgaaggtacagctcgcctgcctgccccaatcccagccccgacaatcacatgcagctgactcggacactggccttgggaacaatgttcgagagaacacttgccccttgactgtaggagccagaaggggacccaggtgtgcatagctctctgtagacatttttacccaaacctgttggtaaagtgcccatctggtgctcaagagagcctgggggtctaacagggagcccggctgcctcacctggccacagcctccacaccagatctccacattgtcttgatccagaccagctctgtgatcagaaggaaattgggtccagtgtaggagagagctggtcctgggcctggcaggcaagagtgtgggcatcctttcctggcctttctccactctccctcaagcctgtgctcaggttgccttgaatgtggactctggaagagccaggggcccagaatgccgggggaggcttctgagtggcactcatggaacaccgtccctctgccagccataggccctgcctccagtgtcagggaatggaggctgggctgcgagagtgttgctgccccctgtgtcattcttctaatccaatgtagaaattgtacgtaatgtatttaaatcaacgcaaatgtatgaataacaaatacagttctgaccttttttgtccagtttctttgggggaaggaagacaaagaaggtaggaacggaattttgagggcaaagaaacctgtgtttccatggaattgctgagacgtggctcctggggctatttctccctaataaaggatgatccaggtcctcatttccaaagtcccaatgctctgaaaaccaaaagtattttcataacccatttgaaaccaaacctgacctgaacttacactgataggaagctatgggtaattatgatgtgttccttttagtgtgattctttgttgcagaaatgtcaatatattttatgacatggttccctactagggattatacagtatttgctgactacttcctaagagccaaaaataaaaaatctgaattccaaaataatctagtgccaagggcttgggataagaaatgtggacctacaggctgggtgcagtgactcacaccagtaatcccagcactttgggaggctgaggtgggtgaattgcttgaggtcaggagtttgagaccagcctggccaacatggcgaaacctcgtctc

SEQ ID NO: 346886 - DNA, 4295 bp, Homo sapiens
cggccgcgagcgcagtggtgtggagcgcgccgggtcccggagccggctgtctgagggatggacgagacgagcccactagtgtcccccgagcgggcccaacccccggactacaccttcccgtcgggctcgggcgctcactttccgcaggtgcccgggggcgcggtccgagtggcggcggcggccggctcgggcccctctccgccgggctcgccgggccacgaccgcgagcggcagccactgttggatcgggcccggggcgcggcggcccagggccagacccaaaccgtggcggcgcaggcccaggctctggccgctcaggccgcggcggcagcccacgccgctcaggcccaccgcgagcggaacgagttcccggaggatcctgagttcgaggcggtggtgcggcaggccgagctggccatcgagcgctgcatctttcccgagcgcatctaccagggctccagcggaagctacttcgtcaaggaccctcaggggaggatcattgctgtcttcaaacccaagaatgaagagccctatgggcatcttaatcctaagtggaccaagtggctgcagaagctgtgctgtccttgctgctttggccgtgactgccttgtccttaaccagggctatctctcagaagcaggggccagcctggtggaccaaaaactggaactcaacattgttccccgtacaaaggtagtatacctggccagtgagaccttcaactatagtgccattgaccgagtgaagtccaggggcaagcggcttgcactagagaaagtgccaaaagttggacagcggtttaaccgcatcgggctaccaccaaaggttggttcattccagctctttgttgaaggctacaaagatgcagactattggctgcggcgttttgaagcagaacctcttcctgagaacactaaccggcaactactgctccagtttgagcggttggtggtgctggattacatcatccgcaacactgatcgaggcaatgacaactggctgattaaatatgactgtccaatggatagttctagctctcgggacacagactgggtggtggtgaaggagcctgttatcaaggtggctgccatagacaatgggctggccttcccactgaagcatcctgactcctggagggcatatcctttttactgggcctggttgccccaggcgaaagtcccattttctcaggagatcaaagatctgatccttccaaagatatcggaccctaacttcgtcaaggacttggaagaggacctatatgaactcttcaagaaagatcctggtttcgacaggggccagttccataagcagattgctgtcatgcggggccagatcttaaatctgacccaggccttgaaagacaacaagagtcccctgcacctcgtccagatgccacctgtgattgtcgagacggcccgttcccaccagcggtcttctagcgagtcctacacacagagctttcagagccggaagcccttcttttcatggtggtagctccagaggcaggcagaggaaatattgtcagagactggtgggaggaagcctggggagtggggtgcaggaaaagccagagaagccggtggagagcagcacctttaagagccctctctctctgcttgccaccctgctcagagctttccacccacagggagaagcacaatcaggaacagtgagtgctcctcgcccttctgatgtgggggaggctggagctccatgcacgtagtccagatgcctgggaaggaacatctcccttccagcatctgctggtagcaggctgggacagtcccttccttccctgaaaccctgctctattgcaattccctattatattctgcatcagaaaaacaaacaaaacaaaaacaactttaaatgcttgtagcagaaccccgggtcatctcatgtcagaaacctttaatccaggcctaaatttgcatagacctgacattcagctgccttgcagttgcttcctcccatgagccaaggtggtgtcagagggcaactggatgactcgcagtaccacagcactgggacagacagaagccacacctttcttttgggtttttgccaagcctcctccatctcccatcagtgctgtgggctggctgcaagcctcgaaacagttctcctggaagggaggtttttgctttacccccgccagcacttccgcacacaatcatagagaacctctctgctctctgctggcctacagcttgtctgtttctcaagcagaggcaggaagagctagtcttagcatttatattttaataggaagttgactcccagcatgtaaaaatatcccaccttgcttcctgagtccttggtcccaatcttctcatttgttcctctcgttttaaattttttccccccaactcttttgatgtaagagttcagtttgtcttcgggagtgggtctctgcaagggctctgggatgagtcttggcttccaagaggacaggctattaggttcttggacttttttctgtgctaccgctgctgcttggtggaagtaacaggacgtggattctgcctcataagtggcagtttcccttttctctctgacttgtcctaggccgatttctctatggcttccctgagaaaggtgaggcccaaaggagagaggccttcaaactgtcccaggtcctgcgcagctcagtgcgtatcttcttgcttccatgtgtcttttcccctgctgcctcactccccacccccacttgccaggtgtttgagccatttctacaccaaagcaaagtacggcctcaggagggagtaaaaagggtgccatctgtgtctggaggggcagctgtgttcatgccctgtgctactggacatttcacaattctggcaccttgcgattggtcagtcaacctcagaaagtaactatcttgaaggtttgaaaaacaaccaaagaaagggagtgaggactatggctgcatgtcctctgcttgcccggctgcagagcagagatgtgcagccctctggtcagctggtccaggctggtccccgccggtccccttccagtccagccaccaagagtccacttgtcccgggcttccacctggctgacaggaagaatttctgagagctggatgtgcatgccctgtggacgaaggtacagctcgcctgcctgccccaatcccagccccgacaatcacatgcagctgactcggacactggccttgggaacaatgttcgagagaacacttgccccttgactgtaggagccagaaggggacccaggtgtgcatagctctctgtagacatttttacccaaacctgttggtaaagtgcccatctggtgctcaagagagcctgggggtctaacagggagcccggctgcctcacctggccacagcctccacaccagatctccacattgtcttgatccagaccagctctgtgatcagaaggaaattgggtccagtgtaggagagagctggtcctgggcctggcaggcaagagtgtgggcatcctttcctggcctttctccactctccctcaagcctgtgctcaggttgccttgaatgtggactctggaagagccaggggcccagaatgccgggggaggcttctgagtggcactcatggaacaccgtccctctgccagccataggccctgcctccagtgtcagggaatggaggctgggctgcgagagtgttgctgccccctgtgtcattcttctaatccaatgtagaaattgtacgtaatgtatttaaatcaacgcaaatgtatgaataacaaatacagttctgaccttttttgtccagtttctttgggggaaggaagacaaagaaggtaggaacggaattttgagggcaaagaaacctgtgtttccatggaattgctgagacgtggctcctggggctatttctccctaataaaggatgatccaggtcctcatttccaaagtcccaatgctctgaaaaccaaaagtattttcataacccatttgaaaccaaacctgacctgaacttacactgataggaagctatgggtaattatgatgtgttccttttagtgtgattctttgttgcagaaatgtcaatatattttatgacatggttccctactagggattatacagtatttgctgactacttcctaagagccaaaaataaaaaatctgaattccaaaataatctagtgccaagggcttgggataagaaatgtggacctacaggctgggtgcagtgactcacaccagtaatcccagcactttgggaggctgaggtgggtgaattgcttgaggtcaggagtttgagaccagcctggccaacatggcgaaacctcgtctc

SEQ ID NO: 346887 - DNA, 3798 bp, Homo sapiens
cggccgcgagcgcagtggtgtggagcgcgccgggtcccggagccggctgtctgagggatggacgagacgagcccactagtgtcccccgagcgggcccaacccccggactacaccttcccgtcgggctcgggcgctcactttccgcaggtgcccgggggcgcggtccgagtggcggcggcggccggctcgggcccctctccgccgggctcgccgggccacgaccgcgagcggcagccactgttggatcgggcccggggcgcggcggcccagggccagacccaaaccgtggcggcgcaggcccaggctctggccgctcaggccgcggcggcagcccacgccgctcaggcccaccgcgagcggaacgagttcccggaggatcctgagttcgaggcggtggtgcggcaggccgagctggccatcgagcgctgcatctttcccgagcgcatctaccagggctccagcggaagctacttcgtcaaggaccctcaggggaggatcattgctgtcttcaaacccaagaatgaagagccctatgggcatcttaatcctaagtggaccaagtggctgcagaagctgtgctgtccttgctgctttggccgtgactgccttgtccttaaccagggctatctctcagaagcaggggccagcctggtggaccaaaaactggaactcaacattgttccccgtacaaaggtagtatacctggccagtgagaccttcaactatagtgccattgaccgagtgaagtccaggggcaagcggcttgcactagagaaagtgccaaaagttggacagcggtttaaccgcatcgggctaccaccaaaggttggttcattccagctctttgttgaaggctacaaagatgcagactattggctgcggcgttttgaagcagaacctcttcctgagaacactaaccggcaactactgctccagtttgagcggttggtggtgctggattacatcatccgcaacactgatcgaggcaatgacaactggctgattaaatatgactgtccaatggatagttctagctctcgggacacagactgggtggtggtgaaggagcctgttatcaaggtggctgccatagacaatgggctggccttcccactgaagcatcctgactcctggagggcatatcctttttactgggcctggttgccccaggcgaaagtcccattttctcaggagatcaaagatctgatccttccaaagatatcggaccctaacttcgtcaaggacttggaagaggacctatatgaactcttcaagaaagatcctggtttcgacaggggccagttccataagcagattgctgtcatgcggggccagatcttaaatctgacccaggccttgaaagacaacaagagtcccctgcacctcgtccagatgccacctgtgattgtcgagacggcccgttcccaccagcggtcttctagcgagtcctacacacagagctttcagagccggaagcccttcttttcatggtggtagctccagaggcaggcagaggaaatattgtcagagactggtgggaggaagcctggggagtggggtgcaggaaaagccagagaagccggtggagagcagcacctttaagagccctctctctctgcttgccaccctgctcagagctttccacccacagggagaagcacaatcaggaacagtgagtgctcctcgcccttctgatgtgggggaggctggagctccatgcacgtagtccagatgcctgggaaggaacatctcccttccagcatctgctggtagcaggctgggacagtcccttccttccctgaaaccctgctctattgcaattccctattatattctgcatcagaaaaacaaacaaaacaaaaacaactttaaatgcttgtagcagaaccccgggtcatctcatgtcagaaacctttaatccaggcctaaatttgcatagacctgacattcagctgccttgcagttgcttcctcccatgagccaaggtggtgtcagagggcaactggatgactcgcagtaccacagcactgggacagacagaagccacacctttcttttgggtttttgccaagcctcctccatctcccatcagtgctgtgggctggctgcaagcctcgaaacagttctcctggaagggaggtttttgctttacccccgccagcacttccgcacacaatcatagagaacctctctgctctctgctggcctacagcttgtctgtttctcaagcagaggcaggaagagctagtcttagcatttatattttaataggaagttgactcccagcatgtaaaagtgatccacgcagccggagtgtatgccgggagctaagtggtctatgggtgaacatatcccaccttgcttcctgagtccttggtcccaatcttctcatttgttcctctcgttttaaattttttccccccaactcttttgatgtaagagttcagtttgtcttcgggagtgggtctctgcaagggctctgggatgagtcttggcttccaagaggacaggctattaggttcttggacttttttctgtgctaccgctgctgcttggtggaagtaacaggacgtggattctgcctcataagtggcagtttcccttttctctctgacttgtcctaggccgatttctctatggcttccctgagaaaggtgaggcccaaaggagagaggccttcaaactgtcccaggtcctgcgcagctcagtgcgtatcttcttgcttccatgtgtcttttcccctgctgcctcactccccacccccacttgccaggtgtttgagccatttctacaccaaagcaaagtacggcctcaggagggagtaaaaagggtgccatctgtgtctggaggggcagctgtgttcatgccctgtgctactggacatttcacaattctggcaccttgcgattggtcagtcaacctcagaaagtaactatcttgaaggtttgaaaaacaaccaaagaaagggagtgaggactatggctgcatgtcctctgcttgcccggctgcagagcagagatgtgcagccctctggtcagctggtccaggctggtccccgccggtccccttccagtccagccaccaagagtccacttgtcccgggcttccacctggctgacaggaagaatttctgagagctggatgtgcatgccctgtggacgaaggtacagctcgcctgcctgccccaatcccagccccgacaatcacatgcagctgactcggacactggccttgggaacaatgttcgagagaacacttgccccttgactgtaggagccagaaggggacccaggtgtgcatagctctctgtagacatttttacccaaacctgttggtaaagtgcccatctggtgctcaagagagcctgggggtctaacagggagcccggctgcctcacctggccacagcctccacaccagatctccacattgtcttgatccagaccagctctgtgatcagaaggaaattgggtccagtgtaggagagagctggtcctgggcctggcaggcaagagtgtgggcatcctttcctggcctttctccactctccctcaagcctgtgctcaggttgccttgaatgtggactctggaagagccaggggcccagaatgccgggggaggcttctgagtggcactcatggaacaccgtccctctgccagccataggccctgcctccagtgtcagggaatggaggctgggctgcgagagtgttgctgccccctgtgtcattcttctaatccaatgtagaaattgtacgtaatgtatttaaatcaacgcaaatgtatgaataacaaatac

SEQ ID NO: 346888 - DNA, 1002 bp, Homo sapiens
aatttatcttcaggctggaaaaagaaaaggaaggcctgatgaaaaccgtgtatttggctttgtttacattaatgaagtgattggacagaaaaagtcacaatgacttttttcttttgtgaaaaaaattattgggaatggaattttgaagtcagggagactgaaagaggactcacctatgtctatctggaagatgtatccaaaacacccaggagttttgtgcgcatgtgtatgaaggaagttcagctaggaaaagcttgcagcctgggcaatacagcaagaccccaattctaaaaaattttttttttaattagctgggtgtgatggtgtggcacctgtggtcctagctactcaggaggctgaggtaggaggatcacttgagactgggaggtcaaggccgcagggagaaataatagcatcactgtactctacctcgaccctgcctcgaaaaaaaaataagaaaagaaaaaggaaaaggaaaagaaaaaagttcagatacttcaaaatgtggatttgccataaaaaccttttcttgaagcattcttgaaatttcttaccagatgtcaaacagaaaaagcctcacattactggagaaactttatctaaagccacatacactgggaatatggagatttgtgaatagaaagaggtaaaagctggaagtgattccttagtcagatgaggtgcttccatgaagaagagtaggcatgtcttgaagcaagttatggaggaattggccacctcgccattcctcccacgtcactctgtgaaactccaggtatccttccaggtagtcacctgcctgttttgttcatgatgtgcctgctgacttcaacaaagaaagatttttttttgtgagtgcctttggaaactacaaagctgctgatgttttgcagatggtataaaggttttttgttttgttttgcttgtgtcaaacaaaagtgactcgacagaaaaggttcatttccttgcacagacagtgctgttgcaatgcgtggctatgca

SEQ ID NO: 346889 - DNA, 358 bp, Homo sapiens
tcttcctaaatactatgacaattgtccatttttcttctggttcaacacgtcttttattcaaaataacaggctttgtctaccaagaaatgaattggataatccacataaacaaaaagcatggaaaatttatccaccagaatttgctgtggagatactttttggcgagaaatgacttccaatgatgttgtagctggatccgactaagtatagctcccccttccccttctgggaaagaattatgttctttccaacccctgccacatgttcatgtgtcctaagtcttccttgatgatgcatctatatttatatatgtttatatatgttcttcataaatctattaaatatatatagataaaat

SEQ ID NO: 346890 - DNA, 371 bp, Homo sapiens
aaagggctgatttcctgagtacacattaatctgagctccctcagccctaggggtagggggattgggggcacaagatgggtggagccagatagggaagattcccccagtgttgtcctgctgccagtccaggtttgggaaaatgccggcagcgtttccctgtgtctttcccccacaaagtctccaagtctctcctcaaatgagctccaaggcttgggagaaacaatctcttcctctgcccgggttgcgtggatctccagtggaaaggtgagacagagggatgctgtctgcctctctcacaccctgaggcttcactcacttttatcagtcgaatgctgtcctgagggctgcttgcctgcattgtcctccccagg

SEQ ID NO: 346891 - DNA, 975 bp, Homo sapiens
aaagggctgatttcctgagtacacattaatctgagctccctcagccctaggggtagggggattgggggcacaagatgggtggagccagatagggaagattcccccagtgttgtcctgctgccagtccaggtttgggaaaatgccggcagcgtttccctgtgtctttcccccacaaagtctccaagtctctcctcaaatgagctccaaggcttgggagaaacaatctcttcctctgcccgggttgcgtggatctccagtggaaaggaagaaccgggactatggtttgtgccctccttattgcctccgaaatatttttaactgccgaggaaagcctatattattttggagaaaggcgaaccaataaaacccacagcaataaatttcagggagtagaaactccttctcagaatagatatgttggatattttgcacaagtgaaacatctctacaactggaatctccctccaagacggatactctttataaaaagattcattatttattcgattcgtggtgatgtatgtgatctaaaagtccaagtagtaatggagaaaaaggttgtcttttccagtacttcattaggaaattgttcgatattgcatgacattgaaacagacaaaatattaattaatgtatatgacggtccacctctgtatgatgatgtgaaagtgcagtttttctcttcggctttgtctaccaagaaatgaattggataatccacataaacaaaaagcatggaaaatttatccaccagaatttgctgtggagatactttttggcgagaaatgacttccaatgatgttgtagctggatccgactaagtatagctcccccttccccttctgggaaagaattatgttctttccaacccctgccacatgttcatgtgtcctaagtcttccttgatgatgcatctatatttatatatgtttatatatgttcttcataaatctattaaatatatatagataaaat

SEQ ID NO: 346892 - DNA, 819 bp, Homo sapiens
  misc_feature (58)..(58): n is a, c, g, or t
tagagcgagaaagacatgagagcacaccatgaacacatacggctaggtgcgaggcctnggtggtcggagactggcctcctccgtcgcccgcgctcccacctaccccggcagcctgcctttggtccgcgcttgcgggccaggcttctcaggctcgaggggttggaggaccgttgatcggaaggggcctgctatagagtgaacgggattttgctttttcatcagtttcaggggagggtatgttggagtcggaaaaaaaaaagttttacggggccaccgctcgctttcgtacacgctaagaagcgttttcacttagcacaagcacggatctctgcgcgtcagggcaagctgtgagggagccggtgaagcttatgaccgacaggatgagaggaggacctgaatgaggctacagccgtgcagggaagaattaagtctgtttcttaacaccagggcttcacatgtgccagaagttagaaaatattagggacttgccgtgagtttcgatcttctcagctcaggccctagtagaataaggaaggtgtaaagctggagaagagaaagtgcagaggtgttagggacaaaaactcagccctcgactgtccataaggagagtggcctttcaggtggacacgatcctcatcagtcgggaatgctgctgaaggggagatgcaaatgtagagaacttgaattcctacagatgagcatttcgaacccacaacatgtttatggttagatactagttggcacaacatgaatatacgctttccaaaaggtagaaagtatctcctttacacaatcattcagtaaggcttcattgagcac

SEQ ID NO: 346893 - DNA, 670 bp, Homo sapiens
tgtcttaatttattgtatgtattattgaaaattgagagtactttgagctcagtgtcttaatttcctgtgtggtttgtttaaaatcaagttttgtagctatccccccaatagagtaaaaaaaaaatacccaaaatatctgagaaattttaaatacatgattcatacagtatattttaaagaaatatcttcatggagatgttatccacaatttctttgtgttcaaaggctttttaaaaaatctgactcttaattgtttttgctggcatctttcaaaatttagtaacatatcagcagacgacatgctgtataccgagacagatttggaagaaagcatggacaaaattgaaactatcaactttcatgaagttaaggaagttgcgggaatcaagtttggtgttaccatgcaggtcacgtcctaggagccgccatgttcatgattgagatcgcaggcgtgaaggtaccctctggctgtggcgcttttctccccagagaaatcagtacagagctttgtgccaccaagtactatttaaaaaaaaaattccctaagacttgcaaagtgtcagaacatggaaacataagataaaaatacagttaacgcttgttccttttaaatattgcagttcctacctccattacaatactttctttatcaagactgaggaaaaaaaaa

SEQ ID NO: 346894 - DNA, 2324 bp, Homo sapiens
  misc_feature (2288)..(2288): n is a, c, g, or t
gaggggaggagtctagtgccgcgggctccggagtgacggaagttgtgctcttggtgaatggggttcttccttttttatttaccggtggctgtgcttccaatttaggaagaccccggcgacctgttcctcacccccgcttcgccctcacactttcgggatgtctgcgattcctgctgaggagagcgaccagctgctgatccgaccccttggagctgggcaagaagtaggaagatcatgtattattctcgagttcaaaggaagaaaaataatgctcgactgtgggatccaccctggcctagaaggaatggatgctcttccttatattgatttaattgacccagctgagattgatctcctattaattagtcatttccatttggatcactgtggagctctgccctggtttctacagaagacaagtttcaaaggaagaacatttatgactcatgccacaaaagctatttatagatggcttctttctgattatgtcaaagttagtaacatatcagcagacgacatgctgtataccgagacagatttggaagaaagcatggacaaaattgaaactatcaactttcatgaagttaaggaagttgcgggaatcaagtttggtgttaccatgcaggtcacgtcctaggagccgccatgttcatgattgagatcgcaggcgtgaagcttttgtacactggtgatttctcaagacaagaagataggcacttaatggcagctgaaattcctaatattaagcctgatattcttatcattgaatctacttatgggacccatatccatgagaaacgtgaagagcgagaagcaagattctgtaacactgtccacgatattgtaaacagaggaggcaggggtctcattcctgtctttgctcttggaagggctcaggagctgctcttgattctagatgagtactggcagaatcacccagaactacatgacattccaatatactatgcatcatctttggccaagaagtgtatggcagtgtaccagacatatgtaaatgccatgaatgacaaaatccgcaaacagatcaacatcaataatccctttgttttcaaacacattagtaacctcaagagcatggatcattttgatgacattggtcccagtgttgtaatggcctccccaggcatgatgcaaagtggcttatccagagaattatttgaaagctggtgtactgataagaggaatggtgtcattatagcgggatactgtgtagaagggacacttgccaagcacatcatgtctgaacctgaagaaatcactactatgtctggacagaagttaccactgaaaatgtctgttgattacatttctttctcagctcacacggattaccagcaaaccagtgaatttattcgtgctttgaaaccgcctcatgtgattttagtccatggagaacagaatgaaatggccagattgaaagcagcactgattcgagaatatgaagataacgatgaagttcacatagaggttcataatcctcggaatacagaagcagtgaccttaaacttcagaggagaaaaactagccaaggttatgggatttttagcagacaaaaaaccagaacaaggccagcgggtctcaggaatacttgttaaaagaaactttaattatcacatactttctccttgcgacctgtccaattatactgacctggccatgagcacggtgaagcagacccaagccattccatatactggtccctttaatttgctctgttaccagctgcagaaattgacaggtgatgtggaagaattagaaattcaagaaaaacctgctctgaaagtgttcaaaaatattactgtaatacaagaaccaggcatggtggtattagaatggctggcaaacccttctaatgatatgtatgcagatacagtaacaactgtgatattggaagttcagtcaaatcccaaaataagaaaaggtgcagtacagaaggtttctaaaaaattagaaatgcacgtttacagcaagaggttggagatcatgctccaggacatatttggagaagactgtgtaagtgtaaaggatgactctattcttagcgtcacagtggacgggaaaactgccaaccttaacttggagacacggactgtagaatgtgaagagggaagtgaagacgatgaatccctccgagaaatggtggagctggctgcacagagactgtacgaggccctgacgccagttcactgagactgtgcctgtatatgaactttgaaaaaatacttgactctacttttgttacctaaaataaaatgatgcggccgggncgtaatttttgtttccagtgagtttccgacgggcgc

SEQ ID NO: 346895 - DNA, 2329 bp, Homo sapiens
gaggggaggagtctagtgccgcgggctccggagtgacggaagttgtgctcttggtgaatggggttcttccttttttatttaccggtggctgtgcttccaatttaggaagaccccggcgacctgttcctcacccccgcttcgccctcacactttcgggatgtctgcgattcctgctgaggagagcgaccagctgctgatccgaccccttggagctgggcaagaagtaggaagatcatgtattattctcgagttcaaaggaagaaaaataatgctcgactgtgggatccaccctggcctagaaggaatggatgctcttccttatattgatttaattgacccagctgagattgatctcctattaattagtcatttccatttggatcactgtggagctctgccctggtttctacagaagacaagtttcaaaggaagaacatttatgactcatgccacaaaagctatttatagatggcttctttctgattatgtcaaagttagtaacatatcagcagacgacatgctgtataccgagacagatttggaagaaagcatggacaaaattgaaactatcaactttcatgaagttaaggaagttgcgggaatcaagtttggtgttaccatgcaggtcacgtcctaggagccgccatgttcatgattgagatcgcaggcgtgaagcttttgtacactggtgatttctcaagacaagaagataggcacttaatggcagctgaaattcctaatattaagcctgatattcttatcattgaatctacttatgggacccatatccatgagaaacgtgaagagcgagaagcaagattctgtaacactgtccacgatattgtaaacagaggaggcaggggtctcattcctgtctttgctcttggaagggctcaggagctgctcttgattctagatgagtactggcagaatcacccagaactacatgacattccaatatactatgcatcatctttggccaagaagtgtatggcagtgtaccagacatatgtaaatgccatgaatgacaaaatccgcaaacagatcaacatcaataatccctttgttttcaaacacattagtaacctcaagagcatggatcattttgatgacattggtcccagtgttgtaatggcctccccaggcatgatgcaaagtggcttatccagagaattatttgaaagctggtgtactgataagaggaatggtgtcattatagcgggatactgtgtagaagggacacttgccaagcacatcatgtctgaacctgaagaaatcactactatgtctggacagaagttaccactgaaaatgtctgttgattacatttctttctcagctcacacggattaccagcaaaccagtgaatttattcgtgctttgaaaccgcctcatgtgattttagtccatggagaacagaatgaaatggccagattgaaagcagcactgattcgagaatatgaagataacgatgaagttcacatagaggttcataatcctcggaatacagaagcagtgaccttaaacttcagaggagaaaaactagccaaggttatgggatttttagcagacaaaaaaccagaacaaggccagcgggtctcaggaatacttgttaaaagaaactttaattatcacatactttctccttgcgacctgtccaattatactgacctggccatgagcacggtgaagcagacccaagccattccatatactggtccctttaatttgctctgttaccagctgcagaaattgacaggtgatgtggaagaattagaaattcaagaaaaacctgctctgaaagtgttcaaaaatattactgtaatacaagaaccaggcatggtggtattagaatggctggcaaacccttctaatgatatgtatgcagatacagtaacaactgtgatattggaagttcagtcaaatcccaaaataagaaaaggtgcagtacagaaggtttctaaaaaattagaaatgcacgtttacagcaagaggttggagatcatgctccaggacatatttggagaagactgtgtaagtgtaaaggatgactctattcttagcgtcacagtggacgggaaaactgccaaccttaacttggagacacggactgtagaatgtgaagagggaagtgaagacgatgaatccctccgagaaatggtggagctggctgcacagagactgtacgaggccctgacgccagttcactgagactgtgcctgtatatgaactttgaaaaaatacttgactctacttttgttacctaaaataaaattcagttgcgcctaacggttcttcttccctactattagttgatgtagaatatgag

SEQ ID NO: 346896 - DNA, 1804 bp, Homo sapiens
cagaaccccttggccgaacccttggccgaaccgatgagatcgcaggcgtgaagcttttgtacactggtgatttctcaagacaagaagataggcacttaatggcagctgaaattcctaatattaagcctgatattcttatcattgaatctacttatgggacccatatccatgagaaacgtgaagagcgagaagcaagattctgtaacactgtccacgatattgtaaacagaggaggcaggggtctcattcctgtctttgctcttggaagggctcaggagctgctcttgattctagatgagtactggcagaatcacccagaactacatgacattccaatatactatgcatcatctttggccaagaagtgtatggcagtgtaccagacatatgtaaatgccatgaatgacaaaatccgcaaacagatcaacatcaataatccctttgttttcaaacacattagtaacctcaagagcatggatcattttgatgacattggtcccagtgttgtaatggcctccccaggcatgatgcaaagtggcttatccagagaattatttgaaagctggtgtactgataagaggaatggtgtcattatagcgggatactgtgtagaagggacacttgccaagcacatcatgtctgaacctgaagaaatcactactatgtctggacagaagttaccactgaaaatgtctgttgattacatttctttctcagctcacacggattaccagcaaaccagtgaatttattcgtgctttgaaaccgcctcatgtgattttagtccatggagaacagaatgaaatggccagattgaaagcagcactgattcgagaatatgaagataacgatgaagttcacatagaggttcataatcctcggaatacagaagcagtgaccttaaacttcagaggagaaaaactagccaaggttatgggatttttagcagacaaaaaaccagaacaaggccagcgggtctcaggaatacttgttaaaagaaactttaattatcacatactttctccttgcgacctgtccaattatactgacctggccatgagcacggtgaagcagacccaagccattccatatactggtccctttaatttgctctgttaccagctgcagaaattgacaggtgatgtggaagaattagaaattcaagaaaaacctgctctgaaagtgttcaaaaatattactgtaatacaagaaccaggcatggtggtattagaatggctggcaaacccttctaatgatatgtatgcagatacagtaacaactgtgatattggaagttcagtcaaatcccaaaataagaaaaggtgcagtacagaaggtttctaaaaaattagaaatgcacgtttacagcaagaggttggagatcatgctccaggacatatttggagaagactgtgtaagtgtaaaggatgactctattcttagcgtcacagtggacgggaaaactgccaaccttaacttggagacacggactgtagaatgtgaagagggaagtgaagacgatgaatccctccgagaaatggtggagctggctgcacagagactgtacgaggccctgacgccagttcactgagactgtgcctgtatatgaactttgaaaaaatacttgactctacttttgttacctaaaataaaatgcattcgtttctctgggggaaaacaacaataatcaaaacaaaaataacaaaatataaacagacaaaaacacaacaaaaacccaacaacacaacaacaaaaaaaacaacaacaaaacaaccacacaaacaaaataacaacccaaaacactag

SEQ ID NO: 346897 - DNA, 1392 bp, Homo sapiens
gatgacaaatcgaacgatcacatcataatccttgaaccaacacattagtcagctcaagagcatggatcattttgatgacattggtcccagtgttgtaatggcctccccaggcatgatgcaaagtggcttatccagagaattatttgaaagctggtgtactgataagaggaatggtgtcattatagcgggatactgtgtagaagggacacttgccaagcacatcatgtctgaacctgaagaaatcactactatgtctggacagaagttaccactgaaaatgtctgttgattacatttctttctcagctcacacggattaccagcaaaccagtgaatttattcgtgctttgaaaccgcctcatgtgattttagtccatggagaacagaatgaaatggccagattgaaagcagcactgattcgagaatatgaagataacgatgaagttcacatagaggttcataatcctcggaatacagaagcagtgaccttaaacttcagaggagaaaaactagccaaggttatgggatttttagcagacaaaaaaccagaacaaggccagcgggtctcaggaatacttgttaaaagaaactttaattatcacatactttctccttgcgacctgtccaattatactgacctggccatgagcacggtgaagcagacccaagccattccatatactggtccctttaatttgctctgttaccagctgcagaaattgacaggtgatgtggaagaattagaaattcaagaaaaacctgctctgaaagtgttcaaaaatattactgtaatacaagaaccaggcatggtggtattagaatggctggcaaacccttctaatgatatgtatgcagatacagtaacaactgtgatattggaagttcagtcaaatcccaaaataagaaaaggtgcagtacagaaggtttctaaaaaattagaaatgcacgtttacagcaagaggttggagatcatgctccaggacatatttggagaagactgtgtaagtgtaaaggatgactctattcttagcgtcacagtggacgggaaaactgccaaccttaacttggagacacggactgtagaatgtgaagagggaagtgaagacgatgaatccctccgagaaatggtggagctggctgcacagagactgtacgaggccctgacgccagttcactgagactgtgcctgtatatgaactttgaaaaaatacttgactctacttttgttacctaaaataaaatgcattcgtttctctgggggaaaacaacaataatcaaaacaaaaataacaaaatataaacagacaaaaacacaacaaaaacccaacaacacaacaacaaaaaaaacaacaacaaaacaaccacacaaacaaaataacaacccaaaacactag

SEQ ID NO: 346898 - DNA, 1066 bp, Homo sapiens
  misc_feature (1)..(1): n is a, c, g, or t
  misc_feature (26)..(26): n is a, c, g, or t
nctagcggaactgctctcttaactanccagcgctacagattttagtccatggagaacagaatgaaatggccagattgaaagcagcactgattcgagaatatgaagataacgatgaagttcacatagaggttcataatcctcggaatacagaagcagtgaccttaaacttcagaggagaaaaactagccaaggttatgggatttttagcagacaaaaaaccagaacaaggccagcgggtctcaggaatacttgttaaaagaaactttaattatcacatactttctccttgcgacctgtccaattatactgacctggccatgagcacggtgaagcagacccaagccattccatatactggtccctttaatttgctctgttaccagctgcagaaattgacaggtgatgtggaagaattagaaattcaagaaaaacctgctctgaaagtgttcaaaaatattactgtaatacaagaaccaggcatggtggtattagaatggctggcaaacccttctaatgatatgtatgcagatacagtaacaactgtgatattggaagttcagtcaaatcccaaaataagaaaaggtgcagtacagaaggtttctaaaaaattagaaatgcacgtttacagcaagaggttggagatcatgctccaggacatatttggagaagactgtgtaagtgtaaaggatgactctattcttagcgtcacagtggacgggaaaactgccaaccttaacttggagacacggactgtagaatgtgaagagggaagtgaagacgatgaatccctccgagaaatggtggagctggctgcacagagactgtacgaggccctgacgccagttcactgagactgtgcctgtatatgaactttgaaaaaatacttgactctacttttgttacctaaaataaaatgcattcgtttctctgggggaaaacaacaataatcaaaacaaaaataacaaaatataaacagacaaaaacacaacaaaaacccaacaacacaacaacaaaaaaaacaacaacaaaacaaccacacaaacaaaataacaacccaaaacactag

SEQ ID NO: 346899 - DNA, 2322 bp, Homo sapiens
gaggggaggagtctagtgccgcgggctccggagtgacggaagttgtgctcttggtgaatggggttcttccttttttatttaccggtggctgtgcttccaatttaggaagaccccggcgacctgttcctcacccccgcttcgccctcacactttcgggatgtctgcgattcctgctgaggagagcgaccagctgctgatccgaccccttggagctgggcaagaagtaggaagatcatgtattattctcgagttcaaaggaagaaaaataatgctcgactgtgggatccaccctggcctagaaggaatggatgctcttccttatattgatttaattgacccagctgagattgatctcctattaattagtcatttccatttggatcactgtggagctctgccctggtttctacagaagacaagtttcaaaggaagaacatttatgactcatgccacaaaagctatttatagatggcttctttctgattatgtcaaagttagtaacatatcagcagacgacatgctgtataccgagacagatttggaagaaagcatggacaaaattgaaactatcaactttcatgaagttaaggaagttgcgggaatcaagtttggtgttaccatgcaggtcacgtcctaggagccgccatgttcatgattgagatcgcaggcgtgaagcttttgtacactggtgatttctcaagacaagaagataggcacttaatggcagctgaaattcctaatattaagcctgatattcttatcattgaatctacttatgggacccatatccatgagaaacgtgaagagcgagaagcaagattctgtaacactgtccacgatattgtaaacagaggaggcaggggtctcattcctgtctttgctcttggaagggctcaggagctgctcttgattctagatgagtactggcagaatcacccagaactacatgacattccaatatactatgcatcatctttggccaagaagtgtatggcagtgtaccagacatatgtaaatgccatgaatgacaaaatccgcaaacagatcaacatcaataatccctttgttttcaaacacattagtaacctcaagagcatggatcattttgatgacattggtcccagtgttgtaatggcctccccaggcatgatgcaaagtggcttatccagagaattatttgaaagctggtgtactgataagaggaatggtgtcattatagcgggatactgtgtagaagggacacttgccaagcacatcatgtctgaacctgaagaaatcactactatgtctggacagaagttaccactgaaaatgtctgttgattacatttctttctcagctcacacggattaccagcaaaccagtgaatttattcgtgctttgaaaccgcctcatgtgattttagtccatggagaacagaatgaaatggccagattgaaagcagcactgattcgagaatatgaagataacgatgaagttcacatagaggttcataatcctcggaatacagaagcagtgaccttaaacttcagaggagaaaaactagccaaggttatgggatttttagcagacaaaaaaccagaacaaggccagcgggtctcaggaatacttgttaaaagaaactttaattatcacatactttctccttgcgacctgtccaattatactgacctggccatgagcacggtgaagcagacccaagccattccatatactggtccctttaatttgctctgttaccagctgcagaaattgacaggtgatgtggaagaattagaaattcaagaaaaacctgctctgaaagtgttcaaaaatattactgtaatacaagaaccaggcatggtggtattagaatggctggcaaacccttctaatgatatgtatgcagatacagtaacaactgtgatattggaagttcagtcaaatcccaaaataagaaaagagtcttgctttgttgcccaggctgctctcaaatgcctggggctcaaatgatcctctcacgtcagcctcctgagtggctgagactacaggcataagccactgtacccagctctttacatgttttgagctgtgagtctccggcatatggagtagtcctgtgtgctgtgctgggggaagtgaccatacgggaagtattctgggaagcctcagcctttacccttcacacaccattagatcctggactctcagagaatattattgttccttgaaaatatacagttagttagttctttgatttcatgagaaaaaagttgagcagactactttgtaattcatttcttatgctgcatctataatacaaacaaataaatacttagacaa

SEQ ID NO: 346900 - DNA, 1991 bp, Homo sapiens
gaggggaggagtctagtgccgcgggctccggagtgacggaagttgtgctcttggtgaatggggttcttccttttttatttaccggtggctgtgcttccaatttaggaagaccccggcgacctgttcctcacccccgcttcgccctcacactttcgggatgtctgcgattcctgctgaggagagcgaccagctgctgatccgaccccttggagctgggcaagaagtaggaagatcatgtattattctcgagttcaaaggaagaaaaataatgctcgactgtgggatccaccctggcctagaaggaatggatgctcttccttatattgatttaattgacccagctgagattgatctcctattaattagtcatttccatttggatcactgtggagctctgccctggtttctacagaagacaagtttcaaaggaagaacatttatgactcatgccacaaaagctatttatagatggcttctttctgattatgtcaaagttagtaacatatcagcagacgacatgctgtataccgagacagatttggaagaaagcatggacaaaattgaaactatcaactttcatgaagttaaggaagttgcgggaatcaagtttggtgttaccatgcaggtcacgtcctaggagccgccatgttcatgattgagatcgcaggcgtgaagcttttgtacactggtgatttctcaagacaagaagataggcacttaatggcagctgaaattcctaatattaagcctgatattcttatcattgaatctacttatgggacccatatccatgagaaacgtgaagagcgagaagcaagattctgtaacactgtccacgatattgtaaacagaggaggcaggggtctcattcctgtctttgctcttggaagggctcaggagctgctcttgattctagatgagtactggcagaatcacccagaactacatgacattccaatatactatgcatcatctttggccaagaagtgtatggcagtgtaccagacatatgtaaatgccatgaatgacaaaatccgcaaacagatcaacatcaataatccctttgttttcaaacacattagtaacctcaagagcatggatcattttgatgacattggtcccagtgttgtaatggcctccccaggcatgatgcaaagtggcttatccagagaattatttgaaagctggtgtactgataagaggaatggtgtcattatagcgggatactgtgtagaagggacacttgccaagcacatcatgtctgaacctgaagaaatcactactatgtctggacagaagttaccactgaaaatgtctgttgattacatttctttctcagctcacacggattaccagcaaaccagtgaatttattcgtgctttgaaaccgcctcatgtgattttagtccatggagaacagaatgaaatggccagattgaaagcagcactgattcgagaatatgaagataacgatgaagttcaccagtcaaatcccaaaataagaaaaggtgcagtacagaaggtttctaaaaaattagaaatgcacgtttacagcaagaggttggagatcatgctccaggacatatttggagaagactgtgtaagtgtaaaggatgactctattcttagcgtcacagtggacgggaaaactgccaaccttaacttggagacacggactgtagaatgtgaagagggaagtgaagacgatgaatccctccgagaaatggtggagctggctgcacagagactgtacgaggccctgacgccagttcactgagactgtgcctgtatatgaactttgaaaaaatacttgactctacttttgttacctaaaataaaatgcattcgtttctctgggggaaaacaacaataatcaaaacaaaaataacaaaatataaacagacaaaaacacaacaaaaacccaacaacacaacaacaaaaaaaacaacaacaaaacaaccacacaaacaaaataacaacccaaaacactag

SEQ ID NO: 346901 - DNA, 959 bp, Homo sapiens
gaggggaggagtctagtgccgcgggctccggagtgacggaagttgtgctcttggtgaatggggttcttccttttttatttaccggtggctgtgcttccaatttaggaagaccccggcgacctgttcctcacccccgcttcgccctcacactttcgggatgtctgcgattcctgctgaggagagcgaccagctgctgatccgaccccttggagctgggcaagaagtaggaagatcatgtattattctcgagttcaaaggaagaaaaataatgctcgactgtgggatccaccctggcctagaaggaatggatgctcttccttatattgatttaattgacccagctgagattgatctcctattaattagtcatttccatttggatcactgtggagctctgccctggtttctacagaagacaagtttcaaaggaagaacatttatgactcatgccacaaaagctatttatagatggcttctttctgattatgtcaaagttagtaacatatcagcagacgacatgctgtataccgagacagatttggaagggacatatttggagaagactgtgtaagtgtaaaggatgactctattcttagcgtcacagtggacgggaaaactgccaaccttaacttggagacacggactgtagaatgtgaagagggaagtgaagacgatgaatccctccgagaaatggtggagctggctgcacagagactgtacgaggccctgacgccagttcactgagactgtgcctgtatatgaactttgaaaaaatacttgactctacttttgttacctaaaataaaatgcattcgtttctctgggggaaaacaacaataatcaaaacaaaaataacaaaatataaacagacaaaaacacaacaaaaacccaacaacacaacaacaaaaaaaacaacaacaaaacaaccacacaaacaaaataacaacccaaaacactag

SEQ ID NO: 346902 - DNA, 474 bp, Homo sapiens
ttcctcaaatatataaagccgggcattttcactaatcctgcatttctgcttattttcaggggacatatttggagaagactgtgtaagtgtaaaggatgactctattcttagcgtcacagtggacgggaaaactgccaaccttaacttggagacacggactgtagaatgtgaagagggaagtgaagacgatgaatccctccgagaaatggtggagctggctgcacagagactgtacgaggccctgacgccagttcactgagactgtgcctgtatatgaactttgaaaaaatacttgactctacttttgttacctaaaataaaatgcattcgtttctctgggggaaaacaacaataatcaaaacaaaaataacaaaatataaacagacaaaaacacaacaaaaacccaacaacacaacaacaaaaaaaacaacaacaaaacaaccacacaaacaaaataacaacccaaaacactag

SEQ ID NO: 346903 - DNA, 482 bp, Homo sapiens
  misc_feature (56)..(57): n is a, c, g, or t
tagatatttatgttaggtaattagaaagtaagaaagagaataaaaattgaaaaatnntagatttttggggacatatttggagaagactgtgtaagtgtaaaggatgactctattcttagcgtcacagtggacgggaaaactgccaaccttaacttggagacacggactgtagaatgtgaagagggaagtgaagacgatgaatccctccgagaaatggtggagctggctgcacagagactgtacgaggccctgacgccagttcactgagactgtgcctgtatatgaactttgaaaaaatacttgactctacttttgttacctaaaataaaatgcattcgtttctctgggggaaaacaacaataatcaaaacaaaaataacaaaatataaacagacaaaaacacaacaaaaacccaacaacacaacaacaaaaaaaacaacaacaaaacaaccacacaaacaaaataacaacccaaaacactag

SEQ ID NO: 346904 - DNA, 467 bp, Homo sapiens
gggatactgtgtagaagggacacttgccaaggtcagttacagtcataggctgttgtgttattcctattcagaatcacggaggtggcacggtcctcacaggtttttgcactgaagtagttcttcaaataatacaagttttgatttttaaaaatgaggacgggaataggtagctagagatgtgcgtaggatgtagaattatgcagacactgaatggcataatgaggtcccaggtgattgatatacacattaaagtttgagaaatgctcatctggttgcaagtagagaagaatggacaggaacctgtttgagacaaacacgtgaatactctccgtcctctcatgaagaagaggttgactaatacatatgatcttaaaaagctgtagaatgtgtttgggttgaccactttctactattatgaaacattgattttcagctcttagggatgtagaaattgtagaaaatatatg

SEQ ID NO: 346905 - DNA, 309 bp, Homo sapiens
atatataaagccgggcattttcactaatcctgcatttctgcttattttcaggggacatatttggagaagactgtgtaagtgtaaaggatgactctattcttagcgtcacagtggacgggaaaactgccaaccttaacttggagacacgggtatgtagctgctctttcctacgtttcaagacatttgggaaataaagtgaaggcataaataatctgtgctctcacactcaacagtctactgttgcatattggcatttgcttccagtgtttccaacatttttttcacattgttctttttatattattatgg

SEQ ID NO: 346906 - DNA, 343 bp, Homo sapiens
tgctatctagttgaatgtttgcaatacatgttcagacctttccgttgctgtactttgctgtttaaaaattgactatacaaatgagttactaactttttaattgtgtagctgctttattttagctgtctctataaacaaacgaatggtctctggaagattatcagaaaagtatatacatcttatagttatgtctttctttcaggtgatgtggaagaattagaaattcaagaaaaacctgctctgaaagtgttcaaaaatattactgtaatacaagaaccaggcatggtggtattagaagtaagaaaagatcatttacctaaacaatgaggggaaaaaagtttta

SEQ ID NO: 346907 - DNA, 2426 bp, Homo sapiens
gaggggaggagtctagtgccgcgggctccggagtgacggaagttgtgctcttggtgaatggggttcttccttttttatttaccggtggctgtgcttccaatttaggaagaccccggcgacctgttcctcacccccgcttcgccctcacactttcgggatgtctgcgattcctgctgaggagagcgaccagctgctgatccgaccccttggagctgggcaagaagtaggaagatcatgtattattctcgagttcaaaggaagaaaaataatgctcgactgtgggatccaccctggcctagaaggaatggatgctcttccttatattgatttaattgacccagctgagattgatctcctattaattagtcatttccatttggatcactgtggagctctgccctggtttctacagaagacaagtttcaaaggaagaacatttatgactcatgccacaaaagctatttatagatggcttctttctgattatgtcaaagttagtaacatatcagcagacgacatgctgtataccgagacagatttggaagaaagcatggacaaaattgaaactatcaactttcatgaagttaaggaagttgcgggaatcaagtttggtgttaccatgcaggtcacgtcctaggagccgccatgttcatgattgagatcgcaggcgtgaagcttttgtacactggtgatttctcaagacaagaagataggcacttaatggcagctgaaattcctaatattaagcctgatattcttatcattgaatctacttatgggacccatatccatgagaaacgtgaagagcgagaagcaagattctgtaacactgtccacgatattgtaaacagaggaggcaggggtctcattcctgtctttgctcttggaagggctcaggagctgctcttgattctagatgagtactggcagaatcacccagaactacatgacattccaatatactatgcatcatctttggccaagaagtgtatggcagtgtaccagacatatgtaaatgccatgaatgacaaaatccgcaaacagatcaacatcaataatccctttgttttcaaacacattagtaacctcaagagcatggatcattttgatgacattggtcccagtgttgtaatggcctccccaggcatgatgcaaagtggcttatccagagaattatttgaaagctggtgtactgataagaggaatggtgtcattatagcgggatactgtgtagaagggacacttgccaagcacatcatgtctgaacctgaagaaatcactactatgtctggacagaagttaccactgaaaatgtctgttgattacatttctttctcagctcacacggattaccagcaaaccagtgaatttattcgtgctttgaaaccgcctcatgtgattttagtccatggagaacagaatgaaatggccagattgaaagcagcactgattcgagaatatgaagataacgatgaagttcacatagaggttcataatcctcggaatacagaagcagtgaccttaaacttcagaggagaaaaactagccaaggttatgggatttttagcagacaaaaaaccagaacaaggccagcgggtctcaggaatacttgttaaaagaaactttaattatcacatactttctccttgcgacctgtccaattatactgacctggccatgagcacggtgaagcagacccaagccattccatatactggtccctttaatttgctctgttaccagctgcagaaattgacaggtgatgtggaagaattagaaattcaagaaaaacctgctctgaaagtgttcaaaaatattactgtaatacaagaaccaggcatggtggtattagaatggctggcaaacccttctaatgatatgtatgcagatacagtaacaactgtgatattggaagttcagtcaaatcccaaaataagaaaaggtgcagtacagaaggtttctaaaaaattagaaatgcacgtttacagcaagaggttggagatcatgctccaggacatatttggagaagactgtgtaagtgtaaaggatgactctattcttagcgtcacagtggacgggaaaactgccaaccttaacttggagacacggactgtagaatgtgaagagggaagtgaagacgatgaatccctccgagaaatggtggagctggctgcacagagactgtacgaggccctgacgccagttcactgagactgtgcctgtatatgaactttgaaaaaatacttgactctacttttgttacctaaaataaaatgcattcgtttctctgggggaaaacaacaataatcaaaacaaaaataacaaaatataaacagacaaaaacacaacaaaaacccaacaacacaacaacaaaaaaaacaacaacaaaacaaccacacaaacaaaataacaacccaaaacactag

SEQ ID NO: 346908 - DNA, 2636 bp, Homo sapiens
  misc_feature (58)..(58): n is a, c, g, or t
tagagcgagaaagacatgagagcacaccatgaacacatacggctaggtgcgaggcctnggtggtcggagactggcctcctccgtcgcccgcgctcccacctaccccggcagcctgcctttggtccgcgcttgcgggccaggcttctcaggctcgaggggttggaggaccgttgatcggaaggggcctgctatagagtgaacgggattttgctttttcatcagtttcaggggagggtatgttggagtcggaaaaaaaaaagttttacggggccaccgctcgctttcgtacacgctaagaagcgttttcacttagcacaagcacggatctctgcgcgtcagggcaagctgtgagggagccggtgaagcttatgaccgacaggatgagaggaggacctgaatgaggctacagccgtgcagtggagctgggcaagaagtaggaagatcatgtattattctcgagttcaaaggaagaaaaataatgctcgactgtgggatccaccctggcctagaaggaatggatgctcttccttatattgatttaattgacccagctgagattgatctcctattaattagtcatttccatttggatcactgtggagctctgccctggtttctacagaagacaagtttcaaaggaagaacatttatgactcatgccacaaaagctatttatagatggcttctttctgattatgtcaaagttagtaacatatcagcagacgacatgctgtataccgagacagatttggaagaaagcatggacaaaattgaaactatcaactttcatgaagttaaggaagttgcgggaatcaagtttggtgttaccatgcaggtcacgtcctaggagccgccatgttcatgattgagatcgcaggcgtgaagcttttgtacactggtgatttctcaagacaagaagataggcacttaatggcagctgaaattcctaatattaagcctgatattcttatcattgaatctacttatgggacccatatccatgagaaacgtgaagagcgagaagcaagattctgtaacactgtccacgatattgtaaacagaggaggcaggggtctcattcctgtctttgctcttggaagggctcaggagctgctcttgattctagatgagtactggcagaatcacccagaactacatgacattccaatatactatgcatcatctttggccaagaagtgtatggcagtgtaccagacatatgtaaatgccatgaatgacaaaatccgcaaacagatcaacatcaataatccctttgttttcaaacacattagtaacctcaagagcatggatcattttgatgacattggtcccagtgttgtaatggcctccccaggcatgatgcaaagtggcttatccagagaattatttgaaagctggtgtactgataagaggaatggtgtcattatagcgggatactgtgtagaagggacacttgccaagcacatcatgtctgaacctgaagaaatcactactatgtctggacagaagttaccactgaaaatgtctgttgattacatttctttctcagctcacacggattaccagcaaaccagtgaatttattcgtgctttgaaaccgcctcatgtgattttagtccatggagaacagaatgaaatggccagattgaaagcagcactgattcgagaatatgaagataacgatgaagttcacatagaggttcataatcctcggaatacagaagcagtgaccttaaacttcagaggagaaaaactagccaaggttatgggatttttagcagacaaaaaaccagaacaaggccagcgggtctcaggaatacttgttaaaagaaactttaattatcacatactttctccttgcgacctgtccaattatactgacctggccatgagcacggtgaagcagacccaagccattccatatactggtccctttaatttgctctgttaccagctgcagaaattgacaggtgatgtggaagaattagaaattcaagaaaaacctgctctgaaagtgttcaaaaatattactgtaatacaagaaccaggcatggtggtattagaatggctggcaaacccttctaatgatatgtatgcagatacagtaacaactgtgatattggaagttcagtcaaatcccaaaataagaaaaggtgcagtacagaaggtttctaaaaaattagaaatgcacgtttacagcaagaggttggagatcatgctccaggacatatttggagaagactgtgtaagtgtaaaggatgactctattcttagcgtcacagtggacgggaaaactgccaaccttaacttggagacacggactgtagaatgtgaagagggaagtgaagacgatgaatccctccgagaaatggtggagctggctgcacagagactgtacgaggccctgacgccagttcactgagactgtgcctgtatatgaactttgaaaaaatacttgactctacttttgttacctaaaataaaatgcattcgtttctctgggggaaaacaacaataatcaaaacaaaaataacaaaatataaacagacaaaaacacaacaaaaacccaacaacacaacaacaaaaaaaacaacaacaaaacaaccacacaaacaaaataacaacccaaaacactag

SEQ ID NO: 346909 - DNA, 2543 bp, Homo sapiens
  misc_feature (58)..(58): n is a, c, g, or t
tagagcgagaaagacatgagagcacaccatgaacacatacggctaggtgcgaggcctnggtggtcggagactggcctcctccgtcgcccgcgctcccacctaccccggcagcctgcctttggtccgcgcttgcgggccaggcttctcaggctcgaggggttggaggaccgttgatcggaaggggcctgctatagagtgaacgggattttgctttttcatcagtttcaggggagggcttggaagtccttagcatgtcagaaagatgagaatgaagattgagaagttggccaaggagcaaaccctcggaatatcaacatttaaaggtggagctgggcaagaagtaggaagatcatgtattattctcgagttcaaaggaagaaaaataatgctcgactgtgggatccaccctggcctagaaggaatggatgctcttccttatattgatttaattgacccagctgagattgatctcctattaattagtcatttccatttggatcactgtggagctctgccctggtttctacagaagacaagtttcaaaggaagaacatttatgactcatgccacaaaagctatttatagatggcttctttctgattatgtcaaagttagtaacatatcagcagacgacatgctgtataccgagacagatttggaagaaagcatggacaaaattgaaactatcaactttcatgaagttaaggaagttgcgggaatcaagtttggtgttaccatgcaggtcacgtcctaggagccgccatgttcatgattgagatcgcaggcgtgaagcttttgtacactggtgatttctcaagacaagaagataggcacttaatggcagctgaaattcctaatattaagcctgatattcttatcattgaatctacttatgggacccatatccatgagaaacgtgaagagcgagaagcaagattctgtaacactgtccacgatattgtaaacagaggaggcaggggtctcattcctgtctttgctcttggaagggctcaggagctgctcttgattctagatgagtactggcagaatcacccagaactacatgacattccaatatactatgcatcatctttggccaagaagtgtatggcagtgtaccagacatatgtaaatgccatgaatgacaaaatccgcaaacagatcaacatcaataatccctttgttttcaaacacattagtaacctcaagagcatggatcattttgatgacattggtcccagtgttgtaatggcctccccaggcatgatgcaaagtggcttatccagagaattatttgaaagctggtgtactgataagaggaatggtgtcattatagcgggatactgtgtagaagggacacttgccaagcacatcatgtctgaacctgaagaaatcactactatgtctggacagaagttaccactgaaaatgtctgttgattacatttctttctcagctcacacggattaccagcaaaccagtgaatttattcgtgctttgaaaccgcctcatgtgattttagtccatggagaacagaatgaaatggccagattgaaagcagcactgattcgagaatatgaagataacgatgaagttcacatagaggttcataatcctcggaatacagaagcagtgaccttaaacttcagaggagaaaaactagccaaggttatgggatttttagcagacaaaaaaccagaacaaggccagcgggtctcaggaatacttgttaaaagaaactttaattatcacatactttctccttgcgacctgtccaattatactgacctggccatgagcacggtgaagcagacccaagccattccatatactggtccctttaatttgctctgttaccagctgcagaaattgacaggtgatgtggaagaattagaaattcaagaaaaacctgctctgaaagtgttcaaaaatattactgtaatacaagaaccaggcatggtggtattagaatggctggcaaacccttctaatgatatgtatgcagatacagtaacaactgtgatattggaagttcagtcaaatcccaaaataagaaaaggtgcagtacagaaggtttctaaaaaattagaaatgcacgtttacagcaagaggttggagatcatgctccaggacatatttggagaagactgtgtaagtgtaaaggatgactctattcttagcgtcacagtggacgggaaaactgccaaccttaacttggagacacggactgtagaatgtgaagagggaagtgaagacgatgaatccctccgagaaatggtggagctggctgcacagagactgtacgaggccctgacgccagttcactgagactgtgcctgtatatgaactttgaaaaaatacttgactctacttttgttacctaaaataaaatgcattcgtttctctgggggaaaacaacaataatcaaaacaaaaataacaaaatataaacagacaaaaacacaacaaaaacccaacaacacaacaacaaaaaaaacaacaacaaaacaaccacacaaacaaaataacaacccaaaacactag

SEQ ID NO: 346910 - DNA, 1422 bp, Homo sapiens
ttagccttttgttattctttaaaaagaaagaatgctttgtcagctgctggtagctaacatacttttcccattctgttttctctcttagagcatggatcattttgatgacattggtcccagtgttgtaatggcctccccaggcatgatgcaaagtggcttatccagagaattatttgaaagctggtgtactgataagaggaatggtgtcattatagcgggatactgtgtagaagggacacttgccaagcacatcatgtctgaacctgaagaaatcactactatgtctggacagaagttaccactgaaaatgtctgttgattacatttctttctcagctcacacggattaccagcaaaccagtgaatttattcgtgctttgaaaccgcctcatgtgattttagtccatggagaacagaatgaaatggccagattgaaagcagcactgattcgagaatatgaagataacgatgaagttcacatagaggttcataatcctcggaatacagaagcagtgaccttaaacttcagaggagaaaaactagccaaggttatgggatttttagcagacaaaaaaccagaacaaggccagcgggtctcaggaatacttgttaaaagaaactttaattatcacatactttctccttgcgacctgtccaattatactgacctggccatgagcacggtgaagcagacccaagccattccatatactggtccctttaatttgctctgttaccagctgcagaaattgacaggtgatgtggaagaattagaaattcaagaaaaacctgctctgaaagtgttcaaaaatattactgtaatacaagaaccaggcatggtggtattagaatggctggcaaacccttctaatgatatgtatgcagatacagtaacaactgtgatattggaagttcagtcaaatcccaaaataagaaaaggtgcagtacagaaggtttctaaaaaattagaaatgcacgtttacagcaagaggttggagatcatgctccaggacatatttggagaagactgtgtaagtgtaaaggatgactctattcttagcgtcacagtggacgggaaaactgccaaccttaacttggagacacggactgtagaatgtgaagagggaagtgaagacgatgaatccctccgagaaatggtggagctggctgcacagagactgtacgaggccctgacgccagttcactgagactgtgcctgtatatgaactttgaaaaaatacttgactctacttttgttacctaaaataaaatgcattcgtttctctgggggaaaacaacaataatcaaaacaaaaataacaaaatataaacagacaaaaacacaacaaaaacccaacaacacaacaacaaaaaaaacaacaacaaaacaaccacacaaacaaaataacaacccaaaacactag

SEQ ID NO: 346911 - DNA, 2625 bp, Homo sapiens
gaggggaggagtctagtgccgcgggctccggagtgacggaagttgtgctcttggtgaatggggttcttccttttttatttaccggtggctgtgcttccaatttaggaagaccccggcgacctgttcctcacccccgcttcgccctcacactttcgggatgtctgcgattcctgctgaggagagcgaccagctgctgatccgaccccttggagctgggcaagaagtaggaagatcatgtattattctcgagttcaaaggaagaaaaataatgctcgactgtgggatccaccctggcctagaaggaatggatgctcttccttatattgatttaattgacccagctgagattgatctcctattaattagtcatttccatttggatcactgtggagctctgccctggtttctacagaagacaagtttcaaaggaagaacatttatgactcatgccacaaaagctatttatagatggcttctttctgattatgtcaaagttagtaacatatcagcagacgacatgctgtataccgagacagatttggaagaaagcatggacaaaattgaaactatcaactttcatgaagttaaggaagttgcgggaatcaagtttggtgttaccatgcaggtcacgtcctaggagccgccatgttcatgattgagatcgcaggcgtgaagcttttgtacactggtgatttctcaagacaagaagataggcacttaatggcagctgaaattcctaatattaagcctgatattcttatcattgaatctacttatgggacccatatccatgagaaacgtgaagagcgagaagcaagattctgtaacactgtccacgatattgtaaacagaggaggcaggggtctcattcctgtctttgctcttggaagggctcaggagctgctcttgattctagatgagtactggcagaatcacccagaactacatgacattccaatatactatgcatcatctttggccaagaagtgtatggcagtgtaccagacatatgtaaatgccatgaatgacaaaatccgcaaacagatcaacatcaataatccctttgttttcaaacacattagtaacctcaagagcatggatcattttgatgacattggtcccagtgttgtaatggcctccccaggcatgatgcaaagtggcttatccagagaattatttgaaagctggtgtactgataagaggaatggtgtcattatagcgggatactgtgtagaagggacacttgccaagcacatcatgtctgaacctgaagaaatcactactatgtctggacagaagttaccactgaaaatgtctgttgattacatttctttctcagctcacacggattaccagcaaaccagtgaatttattcgtgctttgaaaccgcctcatgtgattttagtccatggagaacagaatgaaatggccagattgaaagcagcactgattcgagaatatgaagataacgatgaagttcacatagaggttcataatcctcggaatacagaagcagtgaccttaaacttcagaggagaaaaactagccaaggttatgggatttttagcagacaaaaaaccagaacaaggccagcgggtctcaggaatacttgttaaaagaaactttaattatcacatactttctccttgcgacctgtccaattatactgacctggccatgagcacggtgaagcagacccaagccattccatatactggtccctttaatttgctctgttaccagctgcagaaattgacaggtgatgtggaagaattagaaattcaagaaaaacctgctctgaaagtgttcaaaaatattactgtaatacaagaaccaggcatggtggtattagaatggctggcaaacccttctaatgatatgtatgcagatacagtaacaactgtgatattggaagttcagtcaaatcccaaaataagaaaaggtgcagtacagaaggtttctaaaaaattagaaatgcacgtttacagcaagaggttggagatcatgctccagtaagtttttcacccattatttctcaacaagacagtgacagcggccggaaggagccctggattcggctctgactccttcaaggactggggcgtggctctggccaggccactgccatgctcggaggcctgcttctctgttaggaaagagaggggctggaaccgttccctgccagctctgcactcacctgtgacctgctagggacatatttggagaagactgtgtaagtgtaaaggatgactctattcttagcgtcacagtggacgggaaaactgccaaccttaacttggagacacggactgtagaatgtgaagagggaagtgaagacgatgaatccctccgagaaatggtggagctggctgcacagagactgtacgaggccctgacgccagttcactgagactgtgcctgtatatgaactttgaaaaaatacttgactctacttttgttacctaaaataaaatgcattcgtttctctgggggaaaacaacaataatcaaaacaaaaataacaaaatataaacagacaaaaacacaacaaaaacccaacaacacaacaacaaaaaaaacaacaacaaaacaaccacacaaacaaaataacaacccaaaacactag

SEQ ID NO: 346912 - DNA, 2048 bp, Homo sapiens
  misc_feature (2048)..(2048): n is a, c, g, or t
gaggggaggagtctagtgccgcgggctccggagtgacggaagttgtgctcttggtgaatggggttcttccttttttatttaccggtggctgtgcttccaatttaggaagaccccggcgacctgttcctcacccccgcttcgccctcacactttcgggatgtctgcgattcctgctgaggagagcgaccagctgctgatccgaccccttggagctgggcaagaagtaggaagatcatgtattattctcgagttcaaaggaagaaaaataatgctcgactgtgggatccaccctggcctagaaggaatggatgctcttccttatattgatttaattgacccagctgagattgatctcctattaattagtcatttccatttggatcactgtggagctctgccctggtttctacagaagacaagtttcaaaggaagaacatttatgactcatgccacaaaagctatttatagatggcttctttctgattatgtcaaagttagtaacatatcagcagacgacatgctgtataccgagacagatttggaagaaagcatggacaaaattgaaactatcaactttcatgaagttaaggaagttgcgggaatcaagtttggtgttaccatgcaggtcacgtcctaggagccgccatgttcatgattgagatcgcaggcgtgaagcttttgtacactggtgatttctcaagacaagaagataggcacttaatggcagctgaaattcctaatattaagcctgatattcttatcattgaatctacttatgggacccatatccatgagaaacgtgaagagcgagaagcaagattctgtaacactgtccacgatattgtaaacagaggaggcaggggtctcattcctgtctttgctcttggaagggctcaggagctgctcttgattctagatgagtactggcagaatcacccagaactacatgacattccaatatactatgcatcatctttggccaagaagtgtatggcagtgtaccagacatatgtaaatgccatgaatgacaaaatccgcaaacagatcaacatcaataatccctttgttttcaaacacattagtaacctcaagagcatggatcattttgatgacattggtcccagtgttgtaatggcctccccaggcatgatgcaaagtggcttatccagagaattatttgaaagctggtgtactgataagaggaatggtgtcattatagcgggatactgtgtagaagggacacttgccaagcacatcatgtctgaacctgaagaaatcactactatgtctggacagaagttaccactgaaaatgtctgttgattacatttctttctcagctcacacggattaccagcaaaccagtgaatttattcgtgctttgaaaccgcctcatgtgattttagtccatggagaacagaatgaaatggccagattgaaagcagcactgattcgagaatatgaagataacgatgaagttcacatacagaagcagtgaccttaaacttcagaggagaaaaactagccaaggttatgggatttttagcagacaaaaaaccagaacaaggaatacttgttaaaagaaactttaattatcacatactttctccttgcgacctgtccaattatactgacctggccatgagcacgcattccatatactggtccctttaatttgctctgttaccagctgcagaaattgacaggtgatgtggaagaattagaaattcaagaaaaacctgtattactgtaatacaagaaccaggcatggtggtattagaatggctggcaaacccttctaatgatatgtatgcagatacagtaacaactgtgatattggaagttgtgcagtacagaaggtttctaaaaaattagaaatgcacgtttacagcaagaggttggagatcatgctccagacatatttggagaagactgtgttttaacgtacaagggacggaaaactgccaactttacttggaaaacggactgaaaatgtgagagggaagtgaaaacatgaatccttcaaaatggggagcttggtgacccaan

SEQ ID NO: 346913 - DNA, 754 bp, Homo sapiens
cttgagaagtggtttgaccagtgttccctcaacacccgggtcaccgtggccaccaaaatcaatgagctggattcagaactggagctgcatctgcacctgcaccagccaagagcccagcagattgaaaaagacatccacaacgtcagggcaggtacagatgctgcctgggaatgtctgccctgcccgcagccactccttcagcgtctgctccaccgcggctccatgttcattagctgccccagtttgtaccatgcaatgtttagcatgttctcatcacaccatggaagatgtacatgagggttcgcacctctgaggcttgcagaaaaaggtagtactccaaatccttctgtgagatttttttctcatttccatttttttttcaagagggtgttatagttgaaaacaaagagtgttgtactgttttagctcttggaacccagatctgctcatacacctgtcagatacacacctgcatggtggatgttctagaggcaagctcatagctcagggagttgaagctctcagtttcaactcctgtgaccgtgtgaccctatacaggttacctgacctctctgactcctctctcacctgcagaaggggttgatagaagtgttaaggaggtggtgataaacccttttaaaatggtatagtaaggaatcatgagcaccttgtacaagatacagcctccaaaagtggtagccattatttctactttatcatttatcatacttaaaaatacatgcatttcacacct

SEQ ID NO: 346914 - DNA, 502 bp, Homo sapiens
gaactctatgttttcctcccatccacagttttagttacatatctgtagatgtttcctctgaaggtctgccagttaggagggcagggtctaaaacttgaggatattttcttacttcttcctctccgtggtatcacttaccccaaaatctctgctgccccatttttaataaggccgtgtcaattacaaacaaggagaaaagaacttctaagccaccactcaaattttgacttattatgaccacaaggactgcaactaacttcaagattcttaaggaaggatattataatttattaagacacttttatcacatatatttctgtgatttctattactgtcaaattctctgaatgcactgcatttgcatttgcagactcaggggagctcactcatttgcttgttctcagcatatttcttctaacgttctctaagtatagccttcccatgggtccatttctttttgtctttaacttgttagataatgccacaatatttcttttttctt

SEQ ID NO: 346915 - DNA, 600 bp, Homo sapiens
gcccactctggactgaattgtaaatcttacccctttctcctcacccaaagcccaacaaagcaatttgaaattccaaacctgtgaccactggacaagatcacctttctcccactgagaagaagatcagcgttggctcgggccaagtctgggagacagacaaggcctcctttcaacatcgtgcctccaggggaaccaggccaagtatcggccctccagagacagctgcagcccttggaggcctccccactgagtccacacccctggcccagggcactcaggctagctgaccggccctgctccctggccagcctcatttcctcctgttctcttgcttggtgcccctagcagccgtcttgcacctggccactgcttcccacgccagggcctttgcctttgctgttcccctgcctggcatggtctcgtcattcagggctcagcctgaatgtcacctcctcctggaagccttaccctcatctcgttatgtcctaccccatcaccctatttctttcccttgggtcaccagtaagaacctgggttgagcttgtgcagccgtctcattgtcttagcctcacgaaactgtaaaccctttgacaaaaggga

SEQ ID NO: 346916 - DNA, 367 bp, Homo sapiens
tttgggaggcccaggcgggcggatcacaaggtcagggataggtttaagtaattgaaaactcaaacttgttagttactaggtggtacctattattttccctaacacatctcaaagaatttctggactagtgatatctgtgaactttgtcaaagtattatgttttagataaatgggagtttagaataatgatgagttctttatattttagttggaaagaattagttagatgcacagtaaaggaaaggatagtggaacaaaaataccacattctgttcctattctcattttcttcccatcattaatgggaataaaatggtttcaaagtaaacaatgaggctgggcacggtggctcatgcatggaatccca

SEQ ID NO: 346917 - DNA, 579 bp, Homo sapiens
aaaactttcaatgccttctcatcagcctcagacaaaaaaaaagatcaaaatccttatctggtacctacctacctcttcacagatgactctgtttactctgaagtacacaagtgtgtaacttgttcaaaatcactctgccttcactcttacctttgagcctgtacacatgctgctctcccctccacagagacactgttttcccttcccccaaatgttctcggttaacatatattcacccttcagatctcaactccaacattacttctatgacacaccaagctaggtggcagcacctgatgtatactttcatgtcacatgtaccttccctagatgtaatttattatagtttgagttatttgattaatggaggaggccaactataaaatcacttgagggtagaaactgtatctgattgacaaaacagtctgacacataatacgtgtaaaaagtcgcagaataactgagtatgtgacaaactaatatactctgtcatactaagaagcacaatacatataattataaatatatttcattttactgtgcattccttttggaactcctgtggttccaacttgggag

SEQ ID NO: 346918 - DNA, 1181 bp, Homo sapiens
aaatatgatcacacttttgaaataacagatggttttcatctcatttgtcaactttgatcgattgacaatggctgcttgaagtgctgcatcaagaagaattctggcacacctgtgaggatggctactatcaaagcagaaaataacaagtgttggtgaggaggtggagaaattgcaacccttgtaactgtacattgctggtggaagtgtgaaatggttgcagcctctgtgggaaatggtataacttcttcaaaaaattaagcattgaattgctatgtgattcagcacttccacttctggatatatacctaaaagaagaaagcagggactcaaacagctatttgtataatgatatggtttggctgtgtccccacccaaatctcatcttgaattaatcttagttcccataatcaccacaggtcgtcagagggacctgccaggaggtaattgactcatgggagcagttacccccatgctgctgttcttatgatagtgagtgagtgctcgtgagatctgatggttttatgaggggcttttcccccttttgcttggcacctctccttcctgccatcatgtgaagaaggatgtgtttgcttccccttctgccaagattgtaagtttcctgaggcctccccagacatgtggaactgtaagtcaattaaacttctttcctttataaattacccactctcgggcagtcctttatagaagcatgagaacggactaatacatatattcatgttcatagcatatattcatagtagccaaaaggtggaaacaacccaagtgtccggcaatggatgaatggataaaaaggaaattctgacacatgctgcaacacagatgaaccttgaagacattcagagacataagccagtcacaaaaaagcaaatactgtatgattccatttctatgaagtatctagcgtagtcaaatttatagagacagaaagtggaactttggttgacagaggctgggggaaaagaggaaatggagaattagtgtttaataggtttcagctggggaagatgaaaacattctggagctggctggtggtgatcattgcttaacaatgtaatgtacttaatgccatagtattgtacactaaaaatggttaaaataaattttatgtcatgtatattttaccacaataaaaacaataaaggcttttgagtgactgcagg

SEQ ID NO: 346919 - DNA, 285 bp, Homo sapiens
cctgcattgtccgtttcctgagtttccttttgtccgtttctctctcgtttgttcattttaaagagataggcacaaaaaagtcaataaatggcgatgccatctgtttgctgtaaaaacaatatgaatgtatcacttttttttttttttttttagctcagatgctaatgtgtctattttttggttagttgtgtgtcagctactttcccgttaaggtttacagtcaagaaaagacccattggtcttctggtttggggcttaagttgtgctgcagcatgttctttcttg

SEQ ID NO: 346920 - DNA, 570 bp, Homo sapiens
aaattaaatatattttctttgtcttattttcatgtcaacctgtaaaagcctgctgcccataatgcagcagcggaggtctctgaacctcttttagttctgagtgctgcctagtttatgaatcgctccttgctcaaataaatttaattttgcctaaagttttttttcttttctttttcttttttttttaaaaaacagtttctgtgctcaaatttttgcccttcctaaggacaccagtcttatcagaggcctaccctatcccagtatgatcttattctaatttaagtaattttatctgcagtgaccctatttgcaaactaaggtcacattctgagatactgggtttaagacttcattccatgaatttttggggggacacaattcaacccataacaatgggtaaaatgaaaggattgttaaaataatttaggcaaaaaaaccccacttacccacatttgcttgataaatccaagtcagtaggacaaaaattgattatatgagacactttcatttttgtttaagtttgaataccatttaaatcagaactttaaagcctgaaatcaagctctgctg

SEQ ID NO: 346921 - DNA, 1467 bp, Homo sapiens
aaaaagaaagaggcagtaattcctcttgtgggcaaggttctgcagaatgatttggctcctgcaggttaagtgcccagtcataggtgtgggatagagcagactcctacggatgccagtggagacgttgtgggcctgggtctgctgcccactccccagtgggtcaggactccggcagggtctcctgggctaaagcatggaggtgactgtgtcccaaggcactggcagctctgcccagcctgttcctttcccaccctctggccctcagcgactttggctgcatgtgcctctggcagggcagaaccagaagtgggggcctagtggccttccaatttggggttcttggagaaggagcctggcgtgccctccttggggagcaggtggacagactggatgttttatggagtctgggggagtcctgcggcagctatatctgttaaatgccaagaagccaagttggtttaatatgattgtagctgctgctttgataaatcaaaataattaaaaataataaatttgattcctcaaccaacaggctgtgtgtgggcgcagggcctgggctgccgagtcagggccgaggaggtgggagtgggcacggggacacaggaaggcctgtcttgtgggatcctaaatggggagtggacggcaacagggcggaaggggagactgcgaaccagtcgggggaggaacatctctcacttagcagagccgagccctgctgtccacaagcctgggctggggccccagctgggcctgcccctggccctgtggcattgggccagcctcagtttcctcatctgtcaaatgggaaggcagttccacccacctcccagggatgtgtgaagtcaggctttgctgagtgtgtctgcccagtgttgaatgggcctccgtagccccctcggcccgtccctgcacccgctttggtcgctgaggcgaccaggcgtgctcgcagcggctgcacagccttaaaggcccaccagcctgcccggactcttcctcccactgatggctgttgtcctaccacaggattgttctgtttatgaggacgtcctccggtgcaggacgtctctattcatagctcccttcggcttccagagttgggtcaggaagccccatgccacgccctgggaccgagttcagggtgccggcagctctgacatcagttgggggggaattggcaagggttttctacctccgcccctgtcccctgccccctgccccccatccatgtcctcaggagccgtatttggtgtctgatcccaaagtgtctgagcagctggaaatctgaactggttggagggggcaggggctggtgaggagggagggacagggtgtctgtctctttaaatgcactttgtgtcagtgcgataaggaatttgatggctttatcagaaataccaaagctttatttagcagggtgaggctcacaccactcagctccacacaacctgctgataaatagcaaaaaag

SEQ ID NO: 346922 - DNA, 1214 bp, Homo sapiens
aattttacggaatttaattaaaatcccgtgcctttctcacccactaccctccccccattcatatatcatatgaaaatgaaaattataattcttcttggattcctgggagccacattgtcagcaccacttatcccacagcgtcttatgtctgccagcaatagcaatgagttacttcttaatcttaataatggtcaacttttgccactacaacttcagggcccacttaattcatggattccacctttctctggaattttacaacagcagcagcaggctcaaattccaggactctcccagttctctttatcagctctagaccagtttgctggactgctcccaaatcagatacccttaacaggagaggccagttttgcccaaggagcccaggcaggccaagttgatcccttacagcttcaaacaccgcctcagacacaaccaggccccagtcacgtgatgccctatgtattctccttcaaaatgcctcaagagcaaggacagatgtttcaatactatccagtttacatggtcctaccctgggaacaacctcagcaaacagttccaaggtcacctcaacaaacaagacagcaacagtatgaggagcagataccattctatgctcaatttggatacattccacaactagcagaacctgctatatcaggaggacagcagcaactagcttttgatccccaactaggcacagctcctgaaattgctgtgatgtcaacaggagaagagacaccatatttacaaaaagaagcgatcaactttagacatgacagtgcaggagttttcatgccctcaacttcaccaaaacccagcacaaccaatgttttcacttctgctgtagaccaaactattaccccagagctcccagaagagaaggacaagactgacagcctaagggaaccataagaagttgccctgatcattcagacattttgggaaaaagatgtggccatgccttggatataattttaggctattagcttcctcaatactagtatcagttctttggaatacatgaaatatcttgactcttctcctaaatttgtttttacttatacatgttattaaactctttaaatatgtcatagaaaataatacaatcatgtaatgagtcttgtcttacaaaattatatgtctcttcaaatatcctatcattgtataatatggaatataataacacagaataaagctagtatcattaaatc

SEQ ID NO: 346923 - DNA, 1044 bp, Homo sapiens
aattttacggaatttaattaaaatcccgtgcctttctcacccactaccctccccccattcatatatcatatgaaaatgaaaattataattcttcttggattcctgggagccacattgtcagcaccacttatcccacagcgtcttatgtctgccagcaatagcaatgagttacttcttaatcttaataatggtcaacttttgccactacaacttcagggcccacttaattcatggattccacctttctctggaattttacaacagcagcagcaggctcaaattccaggactctcccagttctctttatcagctctagaccagtttgctggactgctcccaaatcagatacccttaacaggagaggccagttttgcccaaggagcccaggcaggccaagttgatcccttacagcttcaaacaccgcctcagacacaaccaggccccagtcacgtgatgccctatgtattctccttcaaaatgcctcaagagcaaggacagatgtttcaatactatccagtttacatggtcctaccctgggaacaacctcagcaaacatattaccccagagctcccagaagagaaggacaagactgacagcctaagggaaccataagaagttgccctgatcattcagacattttgggaaaaagatgtggccatgccttggatataattttaggctattagcttcctcaatactagtatcagttctttggaatacatgaaatatcttgactcttctcctaaatttgtttttacttatacatgttattaaactctttaaatatgtcatagaaaataatacaatcatgtaatgagtcttgtcttacaaaattatatgtctcttcaaatatcctatcattgtataatatggaatataataacacagaataaagctagtatcattaaatcaattggataattgcattagtaaatgatgcctctgcaaaatggtagtacccatgaagatatgtatattgtcattggatgtatgatgagtgttgtgattggaactgatgaagtaaaataagtatctagatttga

SEQ ID NO: 346924 - DNA, 1172 bp, Homo sapiens
aattttacggaatttaattaaaatcccgtgcctttctcacccactaccctccccccattcatatatcatatgaaaatgaaaattataattcttcttggattcctgggagccacattgtcagcaccattacttcttaatcttaataatggtcaacttttgccactacaacttcagggcccacttaattcatggattccacctttctctggaattttacaacagcagcagcaggctcaaattccaggactctcccagttctctttatcagctctagaccagtttgctggactgctcccaaatcagatacccttaacaggagaggccagttttgcccaaggagcccaggcaggccaagttgatcccttacagcttcaaacaccgcctcagacacaaccaggccccagtcacgtgatgccctatgtattctccttcaaaatgcctcaagagcaaggacagatgtttcaatactatccagtttacatggtcctaccctgggaacaacctcagcaaacagttccaaggtcacctcaacaaacaagacagcaacagtatgaggagcagataccattctatgctcaatttggatacattccacaactagcagaacctgctatatcaggaggacagcagcaactagcttttgatccccaactaggcacagctcctgaaattgctgtgatgtcaacaggagaagagacaccatatttacaaaaagaagcgatcaactttagacatgacagtgcaggagttttcatgccctcaacttcaccaaaacccagcacaaccaatgttttcacttctgctgtagaccaaactattaccccagagctcccagaagagaaggacaagactgacagcctaagggaaccataagaagttgccctgatcattcagacattttgggaaaaagatgtggccatgccttggatataattttaggctattagcttcctcaatactagtatcagttctttggaatacatgaaatatcttgactcttctcctaaatttgtttttacttatacatgttattaaactctttaaatatgtcatagaaaataatacaatcatgtaatgagtcttgtcttacaaaattatatgtctcttcaaatatcctatcattgtataatatggaatataataacacagaataaagctagtatcattaaatc

SEQ ID NO: 346925 - DNA, 1304 bp, Homo sapiens
aattttacggaatttaattaaaatcccgtgcctttctcacccactaccctccccccattcatatatcatatgaaaatgaaaattataattcttcttggattcctgggagccacattgtcagcaccattacttcttaatcttaataatggtcaacttttgccactacaacttcagggcccacttaattcatggattccacctttctctggaattttacaacagcagcagcaggctcaaattccaggactctcccagttctctttatcagctctagaccagtttgctggactgctcccaaatcagatacccttaacaggagaggccagttttgcccaaggagcccaggcaggccaagttgatcccttacagcttcaaacaccgcctcagacacaaccaggccccagtcacgtgatgccctatgtattctccttcaaaatgcctcaagagcaaggacagatgtttcaatactatccagtttacatggtcctaccctgggaacaacctcagcaaacagttccaaggtcacctcaacaaacaagacagcaacagtatgaggagcagataccattctatgctcaatttggatacattccacaactagcagaacctgctatatcaggaggacagcagcaactagcttttgatccccaactaggcacagctcctgaaattgctgtgatgtcaacaggagaagagacaccatatttacaaaaagaagcgatcaactttagacatgacagtgcaggagttttcatgccctcaacttcaccaaaacccagcacaaccaatgttttcacttctgctgtagaccaaactattaccccagagctcccagaagagaaggacaagactgacagcctaagggaaccataagaagttgccctgatcattcagacattttgggaaaaagatgtggccatgccttggatataattttaggctattagcttcctcaatactagtatcagttctttggaatacatgaaatatcttgactcttctcctaaatttgtttttacttatacatgttattaaactctttaaatatgtcatagaaaataatacaatcatgtaatgagtcttgtcttacaaaattatatgtctcttcaaatatcctatcattgtataatatggaatataataacacagaataaagctagtatcattaaatcaattggataattgcattagtaaatgatgcctctgcaaaatggtagtacccatgaagatatgtatattgtcattggatgtatgatgagtgttgtgattggaactgatgaagtaaaataagtatctagatttga

SEQ ID NO: 346926 - DNA, 699 bp, Homo sapiens
ggagaagggaaaaggaactttgagcccttgtggccagttcacaacaaaagtctgttacgccatggtttgtagcctgttattcagcaggaaaaaatcttggaaaaacaagcatcttgttctgggaatgtcagggagaaggaaaacaattcaaaatccaatcagtgtctttgagcgaaacacagattcttttattctgctagtttggacaacagttcctcatgcagattttacagagctagaggttgtcggaatcatgagaaagtctaggaaaagcctgaatcacacaagcttataagatttggggccgctgcaggattgtggagcttcaccaagggagaggatgggagggcggagtgatatatgaaatggaaaactgcattctggcaaaggatgtgcctgctctgaaattctcatagcaggatgacacttgaaacctttgtttctacttttccttaaagtgcatgaggccacacaattgttccagtcactcttactgtataaaaatcattccacaacttagaggtataaactacaattcatctattttgttcccagttttgagggtcaggaactgggtgaggcagtgctgagcagctctcattcgcagtctctcatgcagttacattcagatgtccactgaggctgcagtaatctaaaggcttgccaggctagatgtccaaggtggagcaaatcatatag

SEQ ID NO: 346927 - DNA, 433 bp, Homo sapiens
gaaagggaaagcctaaagaggaagacacatgaaagaacaaagtaatgttttccaagtagtcccttgaggggtaaacatgagctgttgtggaaagaaacaggacttctcggggagaaaaaacctgggttgaattctgattccaccattttgttgtcctgtatccttgagaaagtatgtaatcccttttcacttttgtctccatttcaatatagaacactaatgaaaacaactttttttgatcagatccagtactctcttttgtaaaatgattcagtacctctaagttactgtgcaagtataaggtcttataatcattattttgataatagctaccaagaataaggaaagaaaatctacatagccaagtcactagaaaggctgcatttgccaaggtcatacttagaacactgggaaatgttcatatgtgacatct

SEQ ID NO: 346928 - DNA, 881 bp, Homo sapiens
tgtgtgtatcatatatacatctgcacatataaactgtgtgtatcatatataatacatctgcacttataaactgtatcatatatatctgcacatataaactgtatcatatataatatatctgcacatataaactatcatatataatacatctgcacatataaactgtatcatatataactgcacatataaactgtcatatatatctgcacatataaactgtcatatatatgcacatataaactatcatatataatacatctgcacatataaactgtgtatcatatataatacatctgcacatataaactatcatatataatacatctgcacatataaactgtatcatatataatacatctgcacatataaactgtgtatcatatataatacatctgcacttataaactgtgtcatatatctgcacatataaactatcatataatacatctgcatatataaactatcatatatacatctgcacatataaactatatcatatatctgcacatataaactgtgtgtgtatcatatataatctgcacatataaattgtgtataatacatctgcacatataaactgtatcatatataatacatctgcacatataaactatcatatctgcacatataaactatcatatctgcacatataaactatcatatatctgcacatataaactgtatcatatataatacatctgcacatataaactgtatcataatacatctgcacatataaactgtcatgtatatctgcacatataaactgtatcatatatatttgcacatataaactgtgtgtatcatataatacatctgcacatataaactatcatatataatacatctgcacatagaaactgtgtatcatatatctgcac

SEQ ID NO: 346929 - DNA, 407 bp, Homo sapiens
tagggcttgggattagccattgccatagaatggagtgaataacagagaagagaaactgtgactaatttaagagtgataatcatacaattgcaatttggagaagattgacctgaaagaactgcagaggaagcatgctctttgtgtaagaaatccttaaattccacacaaaatctatatagtcttcctggacatgatgcataaggaaatcctaagactgcatgccgagtttaaccaattaaactggaataaactggaatgaatttgcatttgggaagtaaaacactatccaaggggcataagaacagctgggctcctactgaaggagacacatatggtgttcattgtggggttttgcttcttattccctttgagtaagaataaaatgatcttattttttgctcttcaaa

SEQ ID NO: 346930 - DNA, 419 bp, Homo sapiens
attcaatttcacattattccaaggcacataacagacttggatacaatcatgaaacgttcacacctgaaaaataatctctgtagaacttgttttcaatgattttcaggtcagagacccctttgaaaatctgcaaaactatggaagtttatttcagaaaacaaaacaaaaaaaaaaaaaaaaaaccttaacattttagggatttcaggttctaaagaagatttttatagcaaatgtcacaggcgtttgaatgacagtaactccattttgaataggggctggataaaacgaggctaagatctgctgggttgcattcccaggaagttaggcattcttagccacagtatgagataggaggttggcacaagatacaggtcgcaaagaccgtgctgataaaacaggatgtgataaagaagccagcc

SEQ ID NO: 346931 - DNA, 199 bp, Homo sapiens
ggggtggagtgtagacagagaagcatgatttgtagcttttatacagtgcaatcagggaagaaaggcactgcatcggaagggtgctaaaagccaaagtctatgtgtgttccatagtaagctggggataggttagtctggcggaaagagctctaggacatttgattcaatttcaatatctcctgttcaccaagtaattacc

SEQ ID NO: 346932 - DNA, 313 bp, Homo sapiens
tggcctcagtgctagaaatctgtattacctgagcaaatgtttaggaattctctttgcttttgaatacgttgaaagaaaggaattctttctccaatttgttcagctctcctcctagttaaaaagaaactaccatatttgaccccaagaaagagttaaatgtgaactcatctgagttttcagaaaaggaaaggttgaaagctcacacattaattattactgctgctattctcttccgccccccagaatttgtcagtggaattttggtccctaaatgtataggcatgtttgggttagggtaggacataccccacct

SEQ ID NO: 346933 - DNA, 577 bp, Homo sapiens
acatccttgccatggcatggaagcttggtggaagctggtgtctttccccagatcccctgtcgcctgttaggtgagcatccctgtcctgcactgggcttagtgtccccacgggttaagctgcgctgtcctgcacgggggcgtcaggaggagtctctttatcagtgaggatgagaaaagagacctgggatccgaggtgcggcagagggaatgtagctaacagtttgtgataaaagactcaaacccatgcaccttttttctcttgctgacccccttccgttcccactgcgttcctccttccttgccttccccctcccctgtctcttgggctccgctgggcctcgctctgctccaggtgtccctgtgctgtctccctctgaggatgctcagtggagcagggaacactggaggctgtgttagctgtcagcccttctgtgtccatcttccaaaactacgtgcccttcggtgggaggttttatcatctttagaagtcagtgatggtgcagttcatgttgcttgggggtgtggagataacacatgagtagccgaccatgtttacctggaagttctgagaattaaa

SEQ ID NO: 346934 - DNA, 197 bp, Homo sapiens
tgtactctccttgaaaaacacacattccaggtgaacgtaaccatctgccgtcttaatgctccctcccaggtacttgagtgtaactggagaaaattgtacaacctggcatactgttttcacttcatgaccttatatgtcaaatggggtctcaatactaaccagaaattctctttctcaattaagctcacttcctgata

SEQ ID NO: 346935 - DNA, 527 bp, Homo sapiens
tatgtacaaaaacattttaattgaaatacctgtataaaaaaatatgatctccagacatctcacttttgaactgaaagaacccccatctgcgatgcctgcacacacacacacacacacaaaatcacaccattttcatgcctgtcaatccccaccccaccacaaggcaggaagggggtggtgcctgctggggcctagagggggatgcttggggaaacagagaaggggagatccagggcctccccgccttccttcttcctttttatatacaatttgttattgtcaaataaaagtaggaaatattcaataggcttcttcttcactgctcagaggggaataggaatgagtgaggaagggagcacagcatggataaaggtttggaagctggaaaccatgaagagagagcagactgtgattggttcatggttagtttatgattgattagatgatgagcctgaagatggcaggatcctggtcctgcttggtttgatcagggcagggacagattgcatagttggatgtgggggagg

SEQ ID NO: 346936 - DNA, 2067 bp, Homo sapiens
tgggagccgctgctggtcccggccttgcggcctgcgggggaggctgcccggaggaggcagcggcggcggcagcgcgtcctcggtccccaggaccacggcttctttcctgccagatctatccatctggccatccatccgtgggggtctgcaatggccacctttagccgccaggaatttttccagcagctactgcaaggctgtctcctgcctactgcccagcagggccttgaccagatctggctgctccttgccatctgcctcgcctgccgcctcctctggaggctcgggttgccatcctacctgaagcatgcaagcaccgtggcaggcgggttcttcagcctctaccacttcttccagctgcacatggtttgggtcgtgctgctcagcctcctgtgctacctcgtgctgttcctctgccgacattcctcccatcgaggcgtcttcctatccgtcaccatcctcatctacctactcatgggtgagatgcacatggtagacaccgtgacatggcacaagatgcgaggggcacagatgattgtggccatgaaggcagtgtctctgggcttcgacctggaccggggcgaggtgggtacggtgccctcgccagtggagttcatgggctacctctacttcgtgggcaccatcgtcttcgggccctggatatccttccacagctacctacaagctgtccaaggccgcccactgagctgccggtggctgcagaaggtggcccggagcctggcactggccctgctgtgccttgtgctgtccacttgcgtgggcccctacctcttcccgtacttcatccccctcaacggtgaccgcctccttcgaaagcgcaagaggtggctgcgagcctacgagagtgctgtctccttccacttcagcaactattttgtgggctttctttccgaggccacggccacgttggcgggggctggctttaccgaggagaaggatcacctggaatgggacctgacggtgtccaagccactgaatgtggagctgcctcggtcaatggtggaagttgtcacaagctggaacctgcccatgtcttattggctaaataactatgttttcaagaatgctctccgcctggggaccttctcggctgtgctggtcacctatgcagccagcgccctcctacatggcttcagtttccacctggctgcggtcctgctgtccctggcttttatcacttacgtggagcatgtcctccggaagcgcctggctcggatcctcagtgcctgtgtcttgtcaaagcggtgcccgccagactgttcgcaccagcatcgcttgggcctgggggtgcgagccttaaacttgctctttggagctctggccatcttccacctggcctacctgggctccctgtttgatgtcgatgtggatgacaccacagaggagcagggctacggcatggcatacactgtccacaagtggtcagagctcagctgggccagtcactgggtcacttttggatgctggatcttctaccgtctcataggctgaggcacatctgtggaccctcataaccctcttaagacccctctcagggtgccactgatgggggatgagggaaggccctctctctactccttgaccccctccatccttgacccccaacacctcaacacacacacacacacacacacacaaaatcacaccattttcatgcctgtcaatccccaccccaccacaaggcaggaagggggtggtgcctgctggggcctagagggggatgcttggggaaacagagaaggggagatccagggcctccccgccttccttcttcctttttatatacaatttgttattgtcaaataaaagtaggaaatattcaataggcttcttcttcactgctcagaggggaataggaatgagtgaggaagggagcacagcatggataaaggtttggaagctggaaaccatgaagagagagcagactgtgattggttcatggttagtttatgattgattagatgatgagcctgaagatggcaggatcctggtcctgcttggtttgatcagggcagggacagattgcatagttggatgtgggggagg

SEQ ID NO: 346937 - DNA, 2427 bp, Homo sapiens
tgggagccgctgctggtcccggccttgcggcctgcgggggaggctgcccggaggaggcagcggcggcggcagcgcgtcctcggtccccaggaccacggcttctttcctgccagagcgactctaccttggaaaccagggattccccttcccgtcgcccgccccatttgatatatgggcctgaaatgtatgccatcccatcaccatcggactggactgttcacagcactggagagacagaggtccttcattcactccaggtcacaggctgtgcgtgtgcatgccgaacacccacatgcacacagttggtggctcagtctgatgtacctgacttctcacgccttcccccagtcctccagtaccgtgcctctacatgggctgggcagccccaaactgaaatgtgagtgccagagtgcatcctttaagcgaggtctgccccacggacacccgctccctctgtgtccctgctttgacagatctatccatctggccatccatccgtgggggtctgcaatggccacctttagccgccaggaatttttccagcagctactgcaaggctgtctcctgcctactgcccagcagggccttgaccagatctggctgctccttgccatctgcctcgcctgccgcctcctctggaggctcgggttgccatcctacctgaagcatgcaagcaccgtggcaggcgggttcttcagcctctaccacttcttccagctgcacatggtttgggtcgtgctgctcagcctcctgtgctacctcgtgctgttcctctgccgacattcctcccatcgaggcgtcttcctatccgtcaccatcctcatctacctactcatgggtgagatgcacatggtagacaccgtgacatggcacaagatgcgaggggcacagatgattgtggccatgaaggcagtgtctctgggcttcgacctggaccggggcgaggtgggtacggtgccctcgccagtggagttcatgggctacctctacttcgtgggcaccatcgtcttcgggccctggatatccttccacagctacctacaagctgtccaaggccgcccactgagctgccggtggctgcagaaggtggcccggagcctggcactggccctgctgtgccttgtgctgtccacttgcgtgggcccctacctcttcccgtacttcatccccctcaacggtgaccgcctccttcgaaagcgcaagaggtggctgcgagcctacgagagtgctgtctccttccacttcagcaactattttgtgggctttctttccgaggccacggccacgttggcgggggctggctttaccgaggagaaggatcacctggaatgggacctgacggtgtccaagccactgaatgtggagctgcctcggtcaatggtggaagttgtcacaagctggaacctgcccatgtcttattggctaaataactatgttttcaagaatgctctccgcctggggaccttctcggctgtgctggtcacctatgcagccagcgccctcctacatggcttcagtttccacctggctgcggtcctgctgtccctggcttttatcacttacgtggagcatgtcctccggaagcgcctggctcggatcctcagtgcctgtgtcttgtcaaagcggtgcccgccagactgttcgcaccagcatcgcttgggcctgggggtgcgagccttaaacttgctctttggagctctggccatcttccacctggcctacctgggctccctgtttgatgtcgatgtggatgacaccacagaggagcagggctacggcatggcatacactgtccacaagtggtcagagctcagctgggccagtcactgggtcacttttggatgctggatcttctaccgtctcataggctgaggcacatctgtggaccctcataaccctcttaagacccctctcagggtgccactgatgggggatgagggaaggccctctctctactccttgaccccctccatccttgacccccaacacctcaacacacacacacacacacacacacaaaatcacaccattttcatgcctgtcaatccccaccccaccacaaggcaggaagggggtggtgcctgctggggcctagagggggatgcttggggaaacagagaaggggagatccagggcctccccgccttccttcttcctttttatatacaatttgttattgtcaaataaaagtaggaaatattcaataggcttcttcttcactgctcagaggggaataggaatgagtgaggaagggagcacagcatggataaaggtttggaagctggaaaccatgaagagagagcagactgtgattggttcatggttagtttatgattgattagatgatgagcctgaagatggcaggatcctggtcctgcttggtttgatcagggcagggacagattgcatagttggatgtgggggagg

SEQ ID NO: 346938 - DNA, 1507 bp, Homo sapiens
tgggagccgctgctggtcccggccttgcggcctgcgggggaggctgcccggaggaggcagcggcggcggcagcgcgtcctcggtccccaggaccacggcttctttcctgccagatctatccatctggccatccatccgtgggggtctgcaatggccacctttagccgccaggaatttttccagcagctactgcaaggctgtctcctgcctactgcccagcagggccttgaccagatctggctgctccttgccatctgcctcgcctgccgcctcctctggaggctcgggttgccatcctacctgaagcatgcaagcaccgtggcaggcgggttcttcagcctctaccacttcttccagctgcacatggtttgggtcgtgctgctcagcctcctgtgctacctcgtgctgttcctctgccgacattcctcccatcgaggcgtcttcctatccgtcaccatcctcatctacctactcatgggtgagatgcacatggtagacaccgtgacatggcacaagatgcgaggggcacagatgattgtggccatgaaggcagtgtctctgggcttcgacctggaccggggcgaggtgggtacggtgccctcgccagtggagttcatgggctacctctacttcgtgggcaccatcgtcttcgggccctggatatccttccacagctacctacaagctgtccaaggccgcccactgagctgccggtggctgcagaaggtggcccggagcctggcactggccctgctgtgccttgtgctgtccacttgcgtgggcccctacctcttcccgtacttcatccccctcaacggtgaccgcctccttcgaaagcgcaagaggtggctgcgagcctacgagagtgctgtctccttccacttcagcaactattttgtgggctttctttccgaggccacggccacgttggcgggggctggctttaccgaggagaaggatcacctggaatgggacctgacggtgtccaagccactgaatgtggagctgcctcggtcaatggtggaagttgtcacaagctggaacctgcccatgtcttattggctaaataactatgttttcaagaatgctctccgcctggggaccttctcggctgtgctggtcacctatgcagccagcgccctcctacatggcttcagtttccacctggctgcggtcctgctgtccctggcttttatcacttacgtggagcatgtcctccggaagcgcctggctcggatcctcagtgcctgtgtcttgtcaaagcggtgcccgccagactgttcgcaccagcatcgcttggtgagggttcagcctgggcaaccttgtgcccaacactccctgtcaaaaatgttccttctatctctatcttgtatgtgtctcagggtgcccaccttcttcttttggtgcctgagccatccccataacctctcctctattcgctggcatccgtttccctaacaggcatttatcgagcatctgctgtatacacacctggcattcgtttccc

SEQ ID NO: 346939 - DNA, 388 bp, Homo sapiens
cccaggggagggaacggccaagacagaagtgtggcggtcagatgagttgagatcccaaatggatttgcatatctcttctgcccccagggacctgacggtgtccaagccactgaatgtggagctgcctcggtcaatggtggaagttgtcacaagctggaacctgcccatgtcttattggctaaataactgtgagtcaccaagtcaccactccagctgtgttggtaatccaggccctttcatacattcatacaacatttactgagcaccttctgtgtgctaggcacccaaaatccctacccttgtcgagctgcagttctcctgggggggcagatgataaatacgagaaaaaaaatacataatagctcaggtgttgataagtgctatggtt

SEQ ID NO: 346940 - DNA, 2111 bp, Homo sapiens
  misc_feature (54)..(54): n is a, c, g, or t
aaaaaaacttacgggcgtctaagaggtaagcgaaggcccctcggggggtggtgnaagaaatcggccgagggtccggcttgtgagaggctgcccggaggaggcagcggcggcggcagcgcgtcctcggtccccaggaccacggcttctttcctgccagatctatccatctggccatccatccgtgggggtctgcaatggccacctttagccgccaggaatttttccagcagctactgcaaggctgtctcctgcctactgcccagcagggccttgaccagatctggctgctccttgccatctgcctcgcctgccgcctcctctggaggctcgggttgccatcctacctgaagcatgcaagcaccgtggcaggcgggttcttcagcctctaccacttcttccagctgcacatggtttgggtcgtgctgctcagcctcctgtgctacctcgtgctgttcctctgccgacattcctcccatcgaggcgtcttcctatccgtcaccatcctcatctacctactcatgggtgagatgcacatggtagacaccgtgacatggcacaagatgcgaggggcacagatgattgtggccatgaaggcagtgtctctgggcttcgacctggaccggggcgaggtgggtacggtgccctcgccagtggagttcatgggctacctctacttcgtgggcaccatcgtcttcgggccctggatatccttccacagctacctacaagctgtccaaggccgcccactgagctgccggtggctgcagaaggtggcccggagcctggcactggccctgctgtgccttgtgctgtccacttgcgtgggcccctacctcttcccgtacttcatccccctcaacggtgaccgcctccttcgaaagcgcaagaggtggctgcgagcctacgagagtgctgtctccttccacttcagcaactattttgtgggctttctttccgaggccacggccacgttggcgggggctggctttaccgaggagaaggatcacctggaatgggacctgacggtgtccaagccactgaatgtggagctgcctcggtcaatggtggaagttgtcacaagctggaacctgcccatgtcttattggctaaataactatgttttcaagaatgctctccgcctggggaccttctcggctgtgctggtcacctatgcagccagcgccctcctacatggcttcagtttccacctggctgcggtcctgctgtccctggcttttatcacttacgtggagcatgtcctccggaagcgcctggctcggatcctcagtgcctgtgtcttgtcaaagcggtgcccgccagactgttcgcaccagcatcgcttgggcctgggggtgcgagccttaaacttgctctttggagctctggccatcttccacctggcctacctgggctccctgtttgatgtcgatgtggatgacaccacagaggagcagggctacggcatggcatacactgtccacaagtggtcagagctcagctgggccagtcactgggtcacttttggatgctggatcttctaccgtctcataggctgaggcacatctgtggaccctcataaccctcttaagacccctctcagggtgccactgatgggggatgagggaaggccctctctctactccttgaccccctccatccttgacccccaacacctcaacacacacacacacacacacacacaaaatcacaccattttcatgcctgtcaatccccaccccaccacaaggcaggaagggggtggtgcctgctggggcctagagggggatgcttggggaaacagagaaggggagatccagggcctccccgccttccttcttcctttttatatacaatttgttattgtcaaataaaagtaggaaatattcaataggcttcttcttcactgctcagaggggaataggaatgagtgaggaagggagcacagcatggataaaggtttggaagctggaaaccatgaagagagagcagactgtgattggttcatggttagtttatgattgattagatgatgagcctgaagatggcaggatcctggtcctgcttggtttgatcagggcagggacagattgcatagttggatgtgggggagg

SEQ ID NO: 346941 - DNA, 2100 bp, Homo sapiens
tgggagccgctgctggtcccggccttgcggcctgcgggggaggctgcccggaggaggcagcggcggcggcagcgcgtcctcggtccccaggaccacggcttctttcctgccagatctatccatctggccatccatccgtgggggtctgcaatggccacctttagccgccaggaatttttccagcagctactgcaaggctgtctcctgcctactgcccagcagggccttgaccagatctggctgctccttgccatctgcctcgcctgccgcctcctctggaggctcgggttgccatcctacctgaagcatgcaagcaccgtggcaggcgggttcttcagcctctaccacttcttccagctgcacatggtttgggtcgtgctgctcagcctcctgtgctacctcgtgctgttcctctgccgacattcctcccatcgaggcgtcttcctatccgtcaccatcctcatctacctactcatgggtgagatgcacatggtagacaccgtgacatggcacaagatgcgaggggcacagatgattgtggccatgaaggcagtgtctctgggcttcgacctggaccggggcgaggtgggtacggtgccctcgccagtggagttcatgggctacctctacttcgtgggcaccatcgtcttcgggccctggatatccttccacagctacctacaagctgtccaaggccgcccactgagctgccggtggctgcagaaggtggcccggagcctggcactggccctgctgtgccttgtgctgtccacttgcgtgggcccctacctcttcccgtacttcatccccctcaacggtgaccgcctccttcgaaagcgcaagcaagaaacgcaaagccaggggcaccatggtaagaggtggctgcgagcctacgagagtgctgtctccttccacttcagcaactattttgtgggctttctttccgaggccacggccacgttggcgggggctggctttaccgaggagaaggatcacctggaatgggacctgacggtgtccaagccactgaatgtggagctgcctcggtcaatggtggaagttgtcacaagctggaacctgcccatgtcttattggctaaataactatgttttcaagaatgctctccgcctggggaccttctcggctgtgctggtcacctatgcagccagcgccctcctacatggcttcagtttccacctggctgcggtcctgctgtccctggcttttatcacttacgtggagcatgtcctccggaagcgcctggctcggatcctcagtgcctgtgtcttgtcaaagcggtgcccgccagactgttcgcaccagcatcgcttgggcctgggggtgcgagccttaaacttgctctttggagctctggccatcttccacctggcctacctgggctccctgtttgatgtcgatgtggatgacaccacagaggagcagggctacggcatggcatacactgtccacaagtggtcagagctcagctgggccagtcactgggtcacttttggatgctggatcttctaccgtctcataggctgaggcacatctgtggaccctcataaccctcttaagacccctctcagggtgccactgatgggggatgagggaaggccctctctctactccttgaccccctccatccttgacccccaacacctcaacacacacacacacacacacacacaaaatcacaccattttcatgcctgtcaatccccaccccaccacaaggcaggaagggggtggtgcctgctggggcctagagggggatgcttggggaaacagagaaggggagatccagggcctccccgccttccttcttcctttttatatacaatttgttattgtcaaataaaagtaggaaatattcaataggcttcttcttcactgctcagaggggaataggaatgagtgaggaagggagcacagcatggataaaggtttggaagctggaaaccatgaagagagagcagactgtgattggttcatggttagtttatgattgattagatgatgagcctgaagatggcaggatcctggtcctgcttggtttgatcagggcagggacagattgcatagttggatgtgggggagg

SEQ ID NO: 346942 - DNA, 570 bp, Homo sapiens
  misc_feature (54)..(54): n is a, c, g, or t
  misc_feature (473)..(473): n is a, c, g, or t
  misc_feature (548)..(548): n is a, c, g, or t
aaaaaaacttacgggcgtctaagaggtaagcgaaggcccctcggggggtggtgnaagaaatcggccgagggtccggcttgtgagaggctgcccggaggaggcagcggcggcggcagcgcgtcctcggtccccaggaccacggcttctttcctgccagatctatccatctggccatccatccgtgggggtctgcaatggccacctttagccgccaggaatttttccagcagctactgcaaggctgtctcctgcctactgcccagcagggccttgaccagatctggctgctccttgccatctgcctcgcctgccgcctcctctggaggctcgctgcacatggtttgggtcgtgctgctcagcctcctgtgctacctcgtgctgttcctctgccgacattcctcccatcgaggcgtcttcctatccgtcaccatcctcatctacctactcatggggtgagatgcacatggtagacnacccgtgacatgcgcacaagcatgcgcaggggcacagactgattcgtggccatgacaggcagctgtcgtctggcngcttcgaccctggaccgggcgc

SEQ ID NO: 346943 - DNA, 216 bp, Homo sapiens
aaatggggcttccatttagagttaaaaaaaaaaacaaaagcaaaacaacaaaaaaaactcctttcataatagaaaaacctagctagtaaaataatttgcagtaatgagatctgtcttaaattttggtttgttcatttatttaattttatttaatgatttactcacataagtaaataaaaatgattttttgttgaatatatgtaaatcccaagttta

SEQ ID NO: 346944 - DNA, 657 bp, Homo sapiens
aaaaatcttataaatgtgaccagtatggaaagaactttagtcagagccaagatcttatcgttcattgtaaaactcactctggcgagactccctatgaattccacgaatggcctatgggctgcaaacagagctcagaccttcccagatatcagaaagtcccttcaggaaacaaaccctacaaatgtaaagaatgtggcaagggcttcaggtgcaactccttcctttataaccatcatggagtccacacaagggagatgccctacaaatgtgatgcatgtgggaaagggtttggatttaggtcacttctttgtattcatcagggagtacacacagggaaaagccctataaaagtgaagagtgtgggaagggctttgatcagagctccaaccttcttgtccatcagagagtccacgctggagagaagccctacaaatgcagtgagtgtggcaagtgctttagttcaagctccgttcttcaagtccactggaggtttcacacaggggagaaaccttataggtgtgatgagtgtggaaagggcttcagccaaagtacacaccttcacattcaccagagagtccacacaggggagaaaccatacaaatgcaatgtgtgtggaaaggattttgcgtatagctctgttcttcacactcatctgag

SEQ ID NO: 346945 - DNA, 430 bp, Homo sapiens
tacacttcacagagtgggagcaggctcaagcaagtggctcaagagtgctggttagagaattttctggggtttaaataccctctagaggtttcccattggttacttggtttacaccctatttaaatgaggtagtggtctgcagccagtctgattagttgctgggtgaccaatcagaggctgaagtgaagttacagagttacaccctatgcaaacatctgattggttgtggaaggtgaagtgaagttacaaagttgtaaccctgcgcaaagactaggcttgtgaccagtctgattggttgcaggaggggaccaagcagagactgaagtgaagttacaaagttatatccttatgcaagtgaagactaggccagtgaccagtctgattggttgcagtgggggaccaatctgaggaactttccatttttcacctg

SEQ ID NO: 346946 - DNA, 338 bp, Homo sapiens
tgacacagtgaagctctgtcaaaaaaaaaaaaaaaaaattgacatgaggcaattcatgaaagcagaaacgtaattgcttaatctgaaaaaatgtccaacctcattagcaaccaaacggccactttaaaaaatgcatatatgtgcatacacacatgtagaagtgtatatatgcacacacatatacatatatttacacactttttataaaaatatatacatttatgaaggtatgctaaacatattgaaaggatgcagttttagtctacagccataccaccttgaatgtaccccatcttgtctgaaaagatgcagttttgccttccaaatttgcagacttt

SEQ ID NO: 346947 - DNA, 2437 bp, Homo sapiens
agggaatgtagggagggaggtggaagcactaggaggaggggaggggtggagagaaaagaggggagggatggggggaggggaaacaggagcgaggtgtctccctagctcgctgcctctggcaagtggagtttttaaaaagctccagcagatcatgtcatgacgacttcgctgctcctgcatccacgctggccggagagccttatgtacgtctatgaggacagcgcggcggagagcggcatcggcggcggcggcggaggaggaggcggcggcacgggcggagcggggggtggctgcagcggagcgagccccggcaaagccccgagcatggatggtctgggcagcagctgcccggccagccactgccgcgacctgcttccgcaccccgtgctgggccgcccgccggctcccctgggcgcccctcagggcgccgtctatacggacatcccggccccggaggcggcgcgccagtgtgccccgccgcccgcaccccccacctcgtccagcgccaccctgggctacggctaccccttcgggggcagctactacggctgccgcctgtcgcacaacgtgaacctgcagcagaagccttgcgcctaccacccgggcgataaatacccggagccgtcgggcgccctgcccggtgacgacctgtcctctagggccaaggagttcgccttctaccccagcttcgccagctcctaccaggcgatgcccggctacctggacgtgtcggtggtgcccgggatcagcgggcacccggagccgcgtcacgacgccctcatccccgtcgaaggctaccagcactgggctctctccaatggctgggacagtcaggtgtactgctccaaggagcagtcgcagtccgcccacctctggaagtctcccttcccagacgtggttcccctgcagcccgaggtgagcagctaccggcgcgggcgcaagaaacgcgtgccctacactaaggtgcagctgaaggagctagagaaggaatacgcggctagcaagttcatcaccaaagagaagcgccggcgcatctccgccaccacgaacctctctgagcgccaggtaaccatctggttccagaaccggcgggtcaaagagaagaaggtggtcagcaaatcgaaagcgcctcatctccactccacctgaccacccacccgatgcttgccccatctatttatgtctccgctttgtaccataaccgaacccacggaaagacgctgcgcgggtgcagaagagtatttaatgttaaggaaagagaagaaccgcgccgcccggaggcagagaggctccatggccgtgctgctgggccatccccaactccctatcccatccccagcctccacccccatccagatgggactcacgtggcttcaacagctttggaaatgggtcccgagtgggccgtgcgaggaaggctgtcgacctctactcctccttgcgctcaccttgccagaaagtctggtggcagcgcagagcccaatcattccaaccaaagcagggttggggaatcccgaatggccccaattcttgcctcatcctatgaccaggcttttagaggaccttccctaagggcgcagcttcggagcaggatctgtccagctcatactttccttcgctgtccctcccgcactccttaggcaagatttcccagtaaagattttctgtgcgtattttaaaagtcgtgttaatactcatgataattattagggacctggcagcgtgattggagtatggatgtttccgtaaaagctggaattccgtaaaagcattgacgcagcccctacactccatcccaaccaagaaactgcatttcctggggccaggtgggagctgcctttgccccactgcctcccctgttctgctctctcagtcaacatgtggaaatccaaggaggacaaagactccagccacgctgctaaatagggctcctctctcctctctctctctctaggtggtaaggttggggattagtccaggtacagaagcagaacttttttctaaggataaacatctcttccaaggggatggagagtgggtccctcaacaaagtccctgtccagtcacctttccatcagggcactagcccaggaatgactcctcacactttcacctttactgatttccagaggaaagctagaggatctagttcaagaggcaagaagatctggccctcaattagctaaatgtagatgctgcctaacagttccctcctcaaaggccaccttggtgctgtgggggccccttgcctcttcccttcccactggtgcattacaaaacagtgttcttttgaaatgttcatcaggaataggcttttttaaaaaatgttgtgtatctgtatatagtattgtgatgtctgaatgacaatgtactgaatgcaaaaaggaaaaaaacccacaaacatgtttttaaaataaaatatctttttttgccttga

SEQ ID NO: 346948 - DNA, 2391 bp, Homo sapiens
agggaatgtagggagggaggtggaagcactaggaggaggggaggggtggagagaaaagaggggagggatggggggaggggaaacaggagcgaggtgtctccctagctcgctgcctctggcaagtggagtttttaaaaagctccagcagatcatgtcatgacgacttcgctgctcctgcatccacgctggccggagagccttatgtacgtctatgaggacagcgcggcggagagcggcatcggcggcggcggcggaggaggaggcggcggcacgggcggagcggggggtggctgcagcggagcgagccccggcaaagccccgagcatggatggtctgggcagcagctgcccggccagccactgccgcgacctgcttccgcaccccgtgctgggccgcccgccggctcccctgggcgcccctcagggcgccgtctatacggacatcccggccccggaggcggcgcgccagtgtgccccgccgcccgcaccccccacctcgtccagcgccaccctgggctacggctaccccttcgggggcagctactacggctgccgcctgtcgcacaacgtgaacctgcagcagaagccttgcgcctaccacccgggcgataaatacccggagccgtcgggcgccctgcccggtgacgacctgtcctctagggccaaggagttcgccttctaccccagcttcgccagctcctaccaggcgatgcccggctacctggacgtgtcggtggtgcccgggatcagcgggcacccggagccgcgtcacgacgccctcatccccgtcgaaggctaccagcactgggctctctccaatggctgggacagtcaggtgtactgctccaaggagcagtcgcagtccgcccacctctggaagtctcccttcccagacgtggttcccctgcagcccgaggtgagcagctaccggcgcgggcgcaagaaacgcgtgccctacactaaggtgcagctgaaggagctagagaaggaatacgcggctagcaagttcatcaccaaagagaagcgccggcgcatctccgccaccacgaacctctctgagcgccaggtaaccatctggttccagaaccggcgggtcaaagagaagaaggtggtcagcaaatcgaaagcgcctcatctccactccacctgaccacccacccgatgcttgccccatctatttatgtctccgctttgtaccataaccgaacccacggaaagacgctgcgcgggtgcagaagaagaggctccatggccgtgctgctgggccatccccaactccctatcccatccccagcctccacccccatccagatgggactcacgtggcttcaacagctttggaaatgggtcccgagtgggccgtgcgaggaaggctgtcgacctctactcctccttgcgctcaccttgccagaaagtctggtggcagcgcagagcccaatcattccaaccaaagcagggttggggaatcccgaatggccccaattcttgcctcatcctatgaccaggcttttagaggaccttccctaagggcgcagcttcggagcaggatctgtccagctcatactttccttcgctgtccctcccgcactccttaggcaagatttcccagtaaagattttctgtgcgtattttaaaagtcgtgttaatactcatgataattattagggacctggcagcgtgattggagtatggatgtttccgtaaaagctggaattccgtaaaagcattgacgcagcccctacactccatcccaaccaagaaactgcatttcctggggccaggtgggagctgcctttgccccactgcctcccctgttctgctctctcagtcaacatgtggaaatccaaggaggacaaagactccagccacgctgctaaatagggctcctctctcctctctctctctctaggtggtaaggttggggattagtccaggtacagaagcagaacttttttctaaggataaacatctcttccaaggggatggagagtgggtccctcaacaaagtccctgtccagtcacctttccatcagggcactagcccaggaatgactcctcacactttcacctttactgatttccagaggaaagctagaggatctagttcaagaggcaagaagatctggccctcaattagctaaatgtagatgctgcctaacagttccctcctcaaaggccaccttggtgctgtgggggccccttgcctcttcccttcccactggtgcattacaaaacagtgttcttttgaaatgttcatcaggaataggcttttttaaaaaatgttgtgtatctgtatatagtattgtgatgtctgaatgacaatgtactgaatgcaaaaaggaaaaaaacccacaaacatgtttttaaaataaaatatctttttttgccttga

SEQ ID NO: 346949 - DNA, 2690 bp, Homo sapiens
agcgggttcggctgaggaagggagcgcacgccggcggcgcggaggccggctctgcgcttcgggccgccccctccccccaccccgctcacacccggcacttacttcggctgtctccgctgccctccagcggagacgcagctcctcaggcgcccggcggtatttgttgggtcggcggcgtcagggattcgcagtggcctgtggtcggcgtcgtccggccactggtgcgcccccgcggcaggcagagctcacgctcctgtcccccggctggtccggggtctgggcgccgcgtcgacggcggctccgcaggacgcgcagaccgggccgcagcccatgccccgagcggactgcattatgaggcacctgccttacttctgccggggtcaagtggtgcggggcttcggccgcggctccaagcagctgggcatccccacagctaattttcctgagcaagtggtagataatcttccagctgatatatccactggtatttactatggttgggccagtgttggaagtggagatgtccataagatggtggtgagcataggatggaacccatattacaagaatacgaagaagtctatggaaacacatatcatgcataccttcaaagaggacttctatggggaaatcctcaatgtggccattgttggctacctgagaccagaaaagaactttgattctttagagtcacttatttcagcaattcaaggtgatattgaagaagctaagaaacgactagagttaccagaacatttgaaaatcaaagaagacaatttcttccaggtttctaaaagcaaaataatgaatggccactgatgaaaaattgtattatttattcattcactgttttctagtgtttctgtgtttattactgttcagcatcatcttggttatatactgaaaatcaaacactttactacagttgtgaattagtttaaaccgtacaatgttgttatcatatcatgcttcaactattaaattaagcccatcatatcatagcactaaaaagattgagttaaaaataagatttaaaaaatatatattgattaaaatgtaccactagaaaggtattacatgtgtataagtatgggtaaaaaggcaagtcactagtttgagatgaaaactaaaattttcatggtaaaatgccagcatgtatgtacttgtgtagtgtgtacttctaaacagagaaggcttataaaagtaaatgcattaaggccaagtgcagtggctcacaccggtaatcccagcactttgggaggccgaggtgggaggattgcttgagctcatgagttcaagaccagcctgggcaacatagcgagactccatctctataaataaaaaaaaaggaaatgcattaaatagaaggttgatagtttatcataaacctgcggggaagaaactcagactttctatttttgatattttgtgcattaatacattacaaacatgaagatgtttgtaaagttttgttttagtcattttctttgcagtcacatcattgtaccaccttcattattgtatagagctgcttcaattctgagtcctctggacttcccctgcctatctgtttgttgttgttgttgaagacagtaaaataagtgttttcaaatctatatgtctcctttttgttggataatgtttcttctttttaatggtaaatattcttgttcttcaacatttttctttggttcttttttccttttttaggaaaaacaaaacaacagacttcatccttaggttttctcaagatttaagtgaacacatttacacatatcaatttcttaaagaacacaaaatgtttcctccctagcaaaactatttaagagccaattaaactatgaaatagttataaaattatttttaatatttaaggccttgaaattatattccaaggcaaatctaaatgggtgtagttgtatatgcacgatgtaatttaatgctaaagagtacttacagcttgagggaaaagcataaagttttagttaaatagccttcatactgtggatttttcctcctactaactaatatgtgggaaattaagattacagatgctttgggccccctcaaacagtacattgctacagttcactgtagcaacagatttggtggtgatggggggatagaggtagaagcagatagaaggtaattttaaagttaatttattatgaatcattttcccctaatctgcataaatgaattagaactgattttaataaaaatattctgtgtaaaaagtactcagaaaaacatctaaagctgttggagaagagggactcatataaatagttggattgcgttttgctttttatttctttataaaaatatgtcaaaaacagtttttaattttagaaatcttatacttgaaagaaacctcaattatcagtggctttatgaagtaaagttaaaaacaaacataggaaatgtgaaaatatttgtgtttgttttgtctgactaacttgctgctaaatgctatctttaggtgtgtgaaagttctttgatatgttattgtccttttacatcttgttaaatagccattgcttttgagaatcagatagtgtgttgtttaggggttaattgtgtctatatctttcaaaaacttttatattatgtattataagaagttacagtagtaccattttgattagtctgaatgttttcaggccttgaaataaattttgactaagtga

SEQ ID NO: 346950 - DNA, 3042 bp, Homo sapiens
agcgggttcggctgaggaagggagcgcacgccggcggcgcggaggccggctctgcgcttcgggccgccccctccccccaccccgctcacacccggcacttacttcggctgtctccgctgccctccagcggagacgcagctcctcaggcgcccggcggtatttgttgggtcggcggcgtcagggattcgcagtggcctgtggtcggcgtcgtccggccactggtgcgcccccgcggcaggcagagctcacgctcctgtcccccggctggtccggggtctgggcgccgcgtcgacggcggctccgcaggacgcgcagaccgggccgcagcccatgccccgagcggactgcattatgaggcacctgccttacttctgccggggtcaagtggtgcggggcttcggccgcggctccaagcagctgggcatccccacagctaattttcctgagcaagtggtagataatcttccagctgatatatccactggtatttactatggttgggccagtgttggaagtggagatgtccataagatggtggtgagcataggatggaacccatattacaagaatacgaagaagtctatggaaacacatatcatgcataccttcaaagaggacttctatggggaaatcctcaatgtggccattgttggctacctgagaccagaaaagaactttgattctttagagtcacttatttcagcaattcaaggtgatattgaagaagctaagaaacgactagagttaccagaacatttgaaaatcaaagaagacaatttcttccaggtttctaaaagcaaaataatgaatggccactgatgaaaaattgtattatttattcattcactgttttctagtgtttctgtgtttattactgttcagcatcatcttggttatatactgaaaatcaaacactttactacagttgtgaattagtttaaaccgtacaatgttgttatcatatcatgcttcaactattaaattaagcccatcatatcatagcactaaaaagattgagttaaaaataagatttaaaaaatatatattgattaaaatgtaccactagaaaggtattacatgtgtataagtatgggtaaaaaggcaagtcactagtttgagatgaaaactaaaattttcatggtaaaatgccagcatgtatgtacttgtgtagtgtgtacttctaaacagagaaggcttataaaagtaaatgcattaaggccaagtgcagtggctcacaccggtaatcccagcactttgggaggccgaggtgggaggattgcttgagctcatgagttcaagaccagcctgggcaacatagcgagactccatctctataaataaaaaaaaaggaaatgcattaaatagaaggttgatagtttatcataaacctgcggggaagaaactcagactttctatttttgatattttgtgcattaatacattacaaacatgaagatgtttgtaaagttttgttttagtcattttctttgcagtcacatcattgtaccaccttcattattgtatagagctgcttcaattctgagtcctctggacttcccctgcctatctgtttgttgttgttgttgaagacagtaaaataagtgttttcaaatctatatgtctcctttttgttggataatgtttcttctttttaatggtaaatattcttgttcttcaacatttttctttggttcttttttccttttttaggaaaaacaaaacaacagacttcatccttaggttttctcaagatttaagtgaacacatttacacatatcaatttcttaaagaacacaaaatgtttcctccctagcaaaactatttaagagccaattaaactatgaaatagttataaaattatttttaatatttaaggccttgaaattatattccaaggcaaatctaaatgggtgtagttgtatatgcacgatgtaatttaatgctaaagagtacttacagcttgagggaaaagcataaagttttagttaaatagccttcatactgtggatttttcctcctactaactaatatgtgggaaattaagattacagatgctttgggccccctcaaacagtacattgctacagttcactgtagcaacagatttggtggtgatggggggatagaggtagaagcagatagaaggtaattttaaagttaatttattatgaatcattttcccctaatctgcataaatgaattagaactgattttaataaaaatattctgtgtaaaaagtactcagaaaaacatctaaagctgttggagaagagggactcatataaatagttggattgcgttttgctttttatttctttataaaaatatgtcaaaaacagtttttaattttagaaatcttatacttgaaagaaacctcaattatcagtggctttatgaagtaaagttaaaaacaaacataggaaatgtgaaaatatttgtgtttgttttgtctgactaacttgctgctaaatgctatctttaggtgtgtgaaagttctttgatatgttattgtccttttacatcttgttaaatagccattgcttttgagaatcagatagtgtgttgtttaggggttaattgtgtctatatctttcaaaaacttttatattatgtattataagaagttacagtagtaccattttgattagtctgaatgttttcaggccttgaaataaattttgactaagtgaaaaaaaaaaaaaaaaaaaaaaaaaaaaaaaaaaaaaaaaaaaggaggaaaaaaaaaaaaaaaaacaaaagaggagagaaaaatgcaacaaaagaaaaacacacccacatgacagcatcaaccacacaaaggggcggccccaaccacaagcaaggcattcccaatcaaaacaatccaaagcacggggaatgccacgaaccaaataccccgagaacgcagagaaaaaaaccacaaaccaccaagtatagtcaatagaaaaaaaacacacaaggagcagaaccaacaaacggacaccacagagacacccaaaaacaacgcacaggaaaacacgagaaggaacgatcaaaaaaaaa

SEQ ID NO: 346951 - DNA, 3017 bp, Homo sapiens
agcgggttcggctgaggaagggagcgcacgccggcggcgcggaggccggctctgcgcttcgggccgccccctccccccaccccgctcacacccggcacttacttcggctgtctccgctgccctccagcggagacgcagctcctcaggcgcccggcggtatttgttgggtcggcggcgtcagggattcgcagtggcctgtggtcggcgtcgtccggccactggtgcgcccccgcggcaggcagagctcacgctcctgtcccccggctggtccggggtctgggcgccgcgtcgacggcggctccgcaggacgcgcagaccgggccgcagcccatgccccgagcggactgcattatgaggcacctgccttacttctgccggggtcaagtggtgcggggcttcggccgcggctccaagcagctgggcatccccacagctaattttcctgagcaagtggtagataatcttccagctgatatatccactggtatttactatggttgggccagtgttggaagtggagatgtccataagatggtggtgagcataggatggaacccatattacaagaatacgaagaagtctatggaaacacatatcatgcataccttcaaagaggacttctatggggaaatcctcaatgtggccattgttggctacctgagaccagaaaagaactttgattctttagagtcacttatttcagcaattcaaggtgatattgaagaagctaagaaacgactagagttaccagaacatttgaaaatcaaagaagacaatttcttccaggtttctaaaagcaaaataatgaatggccactgatgaaaaattgtattatttattcattcactgttttctagtgtttctgtgtttattactgttcagcatcatcttggttatatactgaaaatcaaacactttactacagttgtgaattagtttaaaccgtacaatgttgttatcatatcatgcttcaactattaaattaagcccatcatatcatagcactaaaaagattgagttaaaaataagatttaaaaaatatatattgattaaaatgtaccactagaaaggtattacatgtgtataagtatgggtaaaaaggcaagtcactagtttgagatgaaaactaaaattttcatggtaaaatgccagcatgtatgtacttgtgtagtgtgtacttctaaacagagaaggcttataaaagtaaatgcattaaggccaagtgcagtggctcacaccggtaatcccagcactttgggaggccgaggtgggaggattgcttgagctcatgagttcaagaccagcctgggcaacatagcgagactccatctctataaataaaaaaaaaggaaatgcattaaatagaaggttgatagtttatcataaacctgcggggaagaaactcagactttctatttttgatattttgtgcattaatacattacaaacatgaagatgtttgtaaagttttgttttagtcattttctttgcagtcacatcattgtaccaccttcattattgtatagagctgcttcaattctgagtcctctggacttcccctgcctatctgtttgttgttgttgttgaagacagtaaaataagtgttttcaaatctatatgtctcctttttgttggataatgtttcttctttttaatggtaaatattcttgttcttcaacatttttctttggttcttttttccttttttaggaaaaacaaaacaacagacttcatccttaggttttctcaagatttaagtgaacacatttacacatatcaatttcttaaagaacacaaaatgtttcctccctagcaaaactatttaagagccaattaaactatgaaatagttataaaattatttttaatatttaaggccttgaaattatattccaaggcaaatctaaatgggtgtagttgtatatgcacgatgtaatttaatgctaaagagtacttacagcttgagggaaaagcataaagttttagttaaatagccttcatactgtggatttttcctcctactaactaatatgtgggaaattaagattacagatgctttgggccccctcaaacagtacattgctacagttcactgtagcaacagatttggtggtgatggggggatagaggtagaagcagatagaaggtaattttaaagttaatttattatgaatcattttcccctaatctgcataaatgaattagaactgattttaataaaaatattctgtgtaaaaagtactcagaaaaacatctaaagctgttggagaagagggactcatataaatagttggattgcgttttgctttttatttctttataaaaatatgtcaaaaacagtttttaattttagaaatcttatacttgaaagaaacctcaattatcagtggctttatgaagtaaagttaaaaacaaacataggaaatgtgaaaatatttgtgtttgttttgtctgactaacttgctgctaaatgctatctttaggtgtgtgaaagttctttgatatgttattgtccttttacatcttgttaaatagccattgcttttgagaatcagatagtgtgttgtttaggggttaattgtgtctatatctttcaaaaacttttatattatgtattataagaagttacagtagtaccattttgattagtctgaatgttttcaggccttgaaataaattttgactaagtgaaacaaaaacaccacaaacacaacaacaaaaaacaaaacaaaagaaacaaataccacactaaaaaaaacagcaaacaaaaaagacagaagaacacagatgccaaacgcgaacaaccaggagagagacaggagagagatgaagaaagagtaataggcgagctagtgcagtcgaagggagagacgagccgagaggagcacgaagaagcgagaagaagtagaaaggaaagaggagcgcaggcgagaggagaagggagtcaaatagataaggagagagaggggagaacagagacaagcacgggagaggaaacggagataggaaataaagaag

SEQ ID NO: 346952 - DNA, 2430 bp, Homo sapiens
atgtactgttccatctggaagtcaagattggtgccacctaagtgggttcctgctgcaaggaacttaaggacatcctcctccttcatttgcaggacatcaagggctccggacattgtgaaagtttccctttaagttacgacgggaatccagaacaacgccgtatgggcccctctctaattttcctgagcaagtggtagataatcttccagctgatatatccactggtatttactatggttgggccagtgttggaagtggagatgtccataagatggtggtgagcataggatggaacccatattacaagaatacgaagaagtctatggaaacacatatcatgcataccttcaaagaggacttctatggggaaatcctcaatgtggccattgttggctacctgagaccagaaaagaactttgattctttagagtcacttatttcagcaattcaaggtgatattgaagaagctaagaaacgactagagttaccagaacatttgaaaatcaaagaagacaatttcttccaggtttctaaaagcaaaataatgaatggccactgatgaaaaattgtattatttattcattcactgttttctagtgtttctgtgtttattactgttcagcatcatcttggttatatactgaaaatcaaacactttactacagttgtgaattagtttaaaccgtacaatgttgttatcatatcatgcttcaactattaaattaagcccatcatatcatagcactaaaaagattgagttaaaaataagatttaaaaaatatatattgattaaaatgtaccactagaaaggtattacatgtgtataagtatgggtaaaaaggcaagtcactagtttgagatgaaaactaaaattttcatggtaaaatgccagcatgtatgtacttgtgtagtgtgtacttctaaacagagaaggcttataaaagtaaatgcattaaggccaagtgcagtggctcacaccggtaatcccagcactttgggaggccgaggtgggaggattgcttgagctcatgagttcaagaccagcctgggcaacatagcgagactccatctctataaataaaaaaaaaggaaatgcattaaatagaaggttgatagtttatcataaacctgcggggaagaaactcagactttctatttttgatattttgtgcattaatacattacaaacatgaagatgtttgtaaagttttgttttagtcattttctttgcagtcacatcattgtaccaccttcattattgtatagagctgcttcaattctgagtcctctggacttcccctgcctatctgtttgttgttgttgttgaagacagtaaaataagtgttttcaaatctatatgtctcctttttgttggataatgtttcttctttttaatggtaaatattcttgttcttcaacatttttctttggttcttttttccttttttaggaaaaacaaaacaacagacttcatccttaggttttctcaagatttaagtgaacacatttacacatatcaatttcttaaagaacacaaaatgtttcctccctagcaaaactatttaagagccaattaaactatgaaatagttataaaattatttttaatatttaaggccttgaaattatattccaaggcaaatctaaatgggtgtagttgtatatgcacgatgtaatttaatgctaaagagtacttacagcttgagggaaaagcataaagttttagttaaatagccttcatactgtggatttttcctcctactaactaatatgtgggaaattaagattacagatgctttgggccccctcaaacagtacattgctacagttcactgtagcaacagatttggtggtgatggggggatagaggtagaagcagatagaaggtaattttaaagttaatttattatgaatcattttcccctaatctgcataaatgaattagaactgattttaataaaaatattctgtgtaaaaagtactcagaaaaacatctaaagctgttggagaagagggactcatataaatagttggattgcgttttgctttttatttctttataaaaatatgtcaaaaacagtttttaattttagaaatcttatacttgaaagaaacctcaattatcagtggctttatgaagtaaagttaaaaacaaacataggaaatgtgaaaatatttgtgtttgttttgtctgactaacttgctgctaaatgctatctttaggtgtgtgaaagttctttgatatgttattgtccttttacatcttgttaaatagccattgcttttgagaatcagatagtgtgttgtttaggggttaattgtgtctatatctttcaaaaacttttatattatgtattataagaagttacagtagtaccattttgattagtctgaatgttttcaggccttgaaataaattttgactaagtga

SEQ ID NO: 346953 - DNA, 2538 bp, Homo sapiens
agcgggttcggctgaggaagggagcgcacgccggcggcgcggaggccggctctgcgcttcgggccgccccctccccccaccccgctcacacccggcacttacttcggctgtctccgctgccctccagcggagacgcagctcctcaggcgcccggcggtatttgttgggtcggcggcgtcagggattcgcagtggcctgtggtcggcgtcgtccggccactggtgcgcccccgcggcaggcagagctcacgctcctgtcccccggctggtccggggtctgggcgccgcgtcgacggcggctccgcaggacgcgcagaccgggccgcagcccatgccccgagcggactgcattatgaggcacctgccttacttctgccggggtcaagtggtgcggggcttcggccgcggctccaagcagctgggcatccccacaggaaacacatatcatgcataccttcaaagaggacttctatggggaaatcctcaatgtggccattgttggctacctgagaccagaaaagaactttgattctttagagtcacttatttcagcaattcaaggtgatattgaagaagctaagaaacgactagagttaccagaacatttgaaaatcaaagaagacaatttcttccaggtttctaaaagcaaaataatgaatggccactgatgaaaaattgtattatttattcattcactgttttctagtgtttctgtgtttattactgttcagcatcatcttggttatatactgaaaatcaaacactttactacagttgtgaattagtttaaaccgtacaatgttgttatcatatcatgcttcaactattaaattaagcccatcatatcatagcactaaaaagattgagttaaaaataagatttaaaaaatatatattgattaaaatgtaccactagaaaggtattacatgtgtataagtatgggtaaaaaggcaagtcactagtttgagatgaaaactaaaattttcatggtaaaatgccagcatgtatgtacttgtgtagtgtgtacttctaaacagagaaggcttataaaagtaaatgcattaaggccaagtgcagtggctcacaccggtaatcccagcactttgggaggccgaggtgggaggattgcttgagctcatgagttcaagaccagcctgggcaacatagcgagactccatctctataaataaaaaaaaaggaaatgcattaaatagaaggttgatagtttatcataaacctgcggggaagaaactcagactttctatttttgatattttgtgcattaatacattacaaacatgaagatgtttgtaaagttttgttttagtcattttctttgcagtcacatcattgtaccaccttcattattgtatagagctgcttcaattctgagtcctctggacttcccctgcctatctgtttgttgttgttgttgaagacagtaaaataagtgttttcaaatctatatgtctcctttttgttggataatgtttcttctttttaatggtaaatattcttgttcttcaacatttttctttggttcttttttccttttttaggaaaaacaaaacaacagacttcatccttaggttttctcaagatttaagtgaacacatttacacatatcaatttcttaaagaacacaaaatgtttcctccctagcaaaactatttaagagccaattaaactatgaaatagttataaaattatttttaatatttaaggccttgaaattatattccaaggcaaatctaaatgggtgtagttgtatatgcacgatgtaatttaatgctaaagagtacttacagcttgagggaaaagcataaagttttagttaaatagccttcatactgtggatttttcctcctactaactaatatgtgggaaattaagattacagatgctttgggccccctcaaacagtacattgctacagttcactgtagcaacagatttggtggtgatggggggatagaggtagaagcagatagaaggtaattttaaagttaatttattatgaatcattttcccctaatctgcataaatgaattagaactgattttaataaaaatattctgtgtaaaaagtactcagaaaaacatctaaagctgttggagaagagggactcatataaatagttggattgcgttttgctttttatttctttataaaaatatgtcaaaaacagtttttaattttagaaatcttatacttgaaagaaacctcaattatcagtggctttatgaagtaaagttaaaaacaaacataggaaatgtgaaaatatttgtgtttgttttgtctgactaacttgctgctaaatgctatctttaggtgtgtgaaagttctttgatatgttattgtccttttacatcttgttaaatagccattgcttttgagaatcagatagtgtgttgtttaggggttaattgtgtctatatctttcaaaaacttttatattatgtattataagaagttacagtagtaccattttgattagtctgaatgttttcaggccttgaaataaattttgactaagtga

SEQ ID NO: 346954 - DNA, 1577 bp, Homo sapiens
caggacagctgtcgtgagtgttccatgctcgtttccttctggatacatcagcaactcactctgctatgatcctgcaatacatctcatgttagaattagagacatctggagtgcagtggctcacaccggtaatcccagcactttgggaggccgaggtgggaggattgcttgagctcatgagttcaagaccagcctgggcaacatagcgagactccatctctataaataaaaaaaaaggaaatgcattaaatagaaggttgatagtttatcataaacctgcggggaagaaactcagactttctatttttgatattttgtgcattaatacattacaaacatgaagatgtttgtaaagttttgttttagtcattttctttgcagtcacatcattgtaccaccttcattattgtatagagctgcttcaattctgagtcctctggacttcccctgcctatctgtttgttgttgttgttgaagacagtaaaataagtgttttcaaatctatatgtctcctttttgttggataatgtttcttctttttaatggtaaatattcttgttcttcaacatttttctttggttcttttttccttttttaggaaaaacaaaacaacagacttcatccttaggttttctcaagatttaagtgaacacatttacacatatcaatttcttaaagaacacaaaatgtttcctccctagcaaaactatttaagagccaattaaactatgaaatagttataaaattatttttaatatttaaggccttgaaattatattccaaggcaaatctaaatgggtgtagttgtatatgcacgatgtaatttaatgctaaagagtacttacagcttgagggaaaagcataaagttttagttaaatagccttcatactgtggatttttcctcctactaactaatatgtgggaaattaagattacagatgctttgggccccctcaaacagtacattgctacagttcactgtagcaacagatttggtggtgatggggggatagaggtagaagcagatagaaggtaattttaaagttaatttattatgaatcattttcccctaatctgcataaatgaattagaactgattttaataaaaatattctgtgtaaaaagtactcagaaaaacatctaaagctgttggagaagagggactcatataaatagttggattgcgttttgctttttatttctttataaaaatatgtcaaaaacagtttttaattttagaaatcttatacttgaaagaaacctcaattatcagtggctttatgaagtaaagttaaaaacaaacataggaaatgtgaaaatatttgtgtttgttttgtctgactaacttgctgctaaatgctatctttaggtgtgtgaaagttctttgatatgttattgtccttttacatcttgttaaatagccattgcttttgagaatcagatagtgtgttgtttaggggttaattgtgtctatatctttcaaaaacttttatattatgtattataagaagttacagtagtaccattttgattagtctgaatgttttcaggccttgaaataaattttgactaagtga

SEQ ID NO: 346955 - DNA, 540 bp, Homo sapiens
  misc_feature (37)..(37): n is a, c, g, or t
cggtggggatttatggctggcggaaacgatgcctgtntttctttgtcctgctcctcatgattttaataaaaatattctgtgtaaaaagtactcagaaaaacatctaaagctgttggagaagagggactcatataaatagttggattgcgttttgctttttatttctttataaaaatatgtcaaaaacagtttttaattttagaaatcttatacttgaaagaaacctcaattatcagtggctttatgaagtaaagttaaaaacaaacataggaaatgtgaaaatatttgtgtttgttttgtctgactaacttgctgctaaatgctatctttaggtgtgtgaaagttctttgatatgttattgtccttttacatcttgttaaatagccattgcttttgagaatcagatagtgtgttgtttaggggttaattgtgtctatatctttcaaaaacttttatattatgtattataagaagttacagtagtaccattttgattagtctgaatgttttcaggccttgaaataaattttgactaagtga

SEQ ID NO: 346956 - DNA, 1700 bp, Homo sapiens
agcgggttcggctgaggaagggagcgcacgccggcggcgcggaggccggctctgcgcttcgggccgccccctccccccaccccgctcacacccggcacttacttcggctgtctccgctgccctccagcggagacgcagctcctcaggcgcccggcggtatttgttgggtcggcggcgtcagggattcgcagtggcctgtggtcggcgtcgtccggccactggtgcgcccccgcggcaggcagagctcacgctcctgtcccccggctggtccggggtctgggcgccgcgtcgacggcggctccgcaggacgcgcagaccgggccgcagcccatgccccgagcggactgcattatgaggcacctgccttacttctgccggggtcaagtggtgcggggcttcggccgcggctccaagcagctgggcatccccacagctaattttcctgagcaagtggtagataatcttccagctgatatatccactggtatttactatggttgggccagtgttggaagtggagatgtccataagatggtggtgagcataggatggaacccatattacaagaatacgaagaagtctatggaaacacatatcatgcataccttcaaagaggacttctatggggaaatcctcaatgtggccattgttggctacctgagaccagaaaagaactttgattctttagagtcacttatttcagcaattcaaggtgatattgaagaagctaagaaacgactagagttaccagaacatttgaaaatcaaagaagacaatttcttccaggtttctaaaagcaaaataatgaatggccactgatgaaaaattgtattatttattcattcactgttttctagtgtttctgtgtttattactgttcagcatcatcttggttatatactgaaaatcaaacactttactacagttgtgaattagtttaaaccgtacaatgttgttatcatatcatgcttcaactattaaattaagcccatcatatcatagcactaaaaagattgagttaaaaataagatttaaaaaatatatattgattaaaatgtaccactagaaaggtattacatgtgtataagtatgggtaaaaaggcaagtcactagtttgagatgaaaactaaaattttcatggtaaaatgccagcatgtatgtacttgtgtagtgtgtacttctaaacagagaaggcttataaaagtaaatgcattaaggccatgggattacaggcgtgagccactgcgcccggccacattcagttcttatcaaagaaataacccagacttaatcttgaatgatacgattatgcccaatattaagtaaaaaatataagaaaaggttatcttaaatagatcttaggcaaaataccagctgatgaaggcatctgatgccttcatctgttcagtcatctccaaaaacagtaaaaataaccactttttgttgggcaatatgaaatttttaaaggagtagaataccaaatgatagaaacagactgcctgaattgagaattttgatttcttaaagtgtgtttctttctaaattgctgttccttaatttgattaatttaattcatgtattatgattaaatctgaggcagatgagcttacaagtattgaaataattactaattaatcacaaatgtgaagttatgcatgatgtaaaaaatacaaacattctaattaaaggctttgcaacac

SEQ ID NO: 346957 - DNA, 2636 bp, Homo sapiens
agcgggttcggctgaggaagggagcgcacgccggcggcgcggaggccggctctgcgcttcgggccgccccctccccccaccccgctcacacccggcacttacttcggctgtctccgctgccctccagcggagacgcagctcctcaggcgcccggcggtatttgttgggtcggcggcgtcagggattcgcagtggcctgtggtcggcgtcgtccggccactggtgcgcccccgcggcaggcagagctcacgctcctgtcccccggctggtccggggtctgggcgccgcgtcgacggcggctccgcaggacgcgcagaccgggccgcagcccatgccccgagcggactgcattatgaggcacctgccttacttctgccggggtcaagtggtgcggggcttcggccgcggctccaagcagctgggcatccccacagctaattttcctgagcaagtggtagataatcttccagctgatatatccactggtatttactatggttgggccagtgttggaagtggagatgtccataagatggtggtgagcataggatggaacccatattacaagaatacgaagaagtctatggaaacacatatcatgcataccttcaaagaggacttctatggggaaatcctcaatgtggccattgttggctacctgagaccagaaaagaactttgattctttagagtcacttatttcagcaattcaaggtgatattgaagaagctaagaaacgactagagttaccagaacatttgaaaatcaaagaagacaatttcttccaggtttctaaaagcaaaataatgaatggccactgatgaaaaattgtattatttattcattcactgttttctagtgtttctgtgtttattactgttcagcatcatcttggttatatactgaaaatcaaacactttactacagttgtgaattagtttaaaccgtacaatgttgttatcatatcatgcttcaactattaaattaagcccatcatatcatagcactaaaaagattgagttaaaaataagatttaaaaaatatatattgattaaaatgtaccactagaaaggtattacatgtgtataagtatgggtaaaaaggcaagtcactagtttgagatgaaaactaaaattttcatggtaaaatgccagcatgtatgtacttgtgtagtgtgtacttctaaacagagaaggcttataaaagtaaatgcattaaggccaagtgcagtggctcacaccggtaatcccagcactttgggaggccgaggtgggaggattgcttgagctcatgagttcaagaccagcctgggcaacatagcgagactccatctctataaataaaaaaaaaggaaatgcattaaatagaaggttgatagtttatcataaacctgcggggaagaaactcagactttctatttttgatattttgtgcattaatacattacaaacatgaagatgtttgtaaagttttgttttagtcattttctttgcagtcacatcattgtaccaccttcattattgtatagagctgcttcaattctgagtcctctggacttcccctgcctatctgtttgttgttgttgttgaagacagttttttaatggtaaatattcttgttcttcaacatttttctttggttcttttttccttttttaggaaaaacaaaacaacagacttcatccttaggttttctcaagatttaagtgaacacatttacacatatcaatttcttaaagaacacaaaatgtttcctccctagcaaaactatttaagagccaattaaactatgaaatagttataaaattatttttaatatttaaggccttgaaattatattccaaggcaaatctaaatgggtgtagttgtatatgcacgatgtaatttaatgctaaagagtacttacagcttgagggaaaagcataaagttttagttaaatagccttcatactgtggatttttcctcctactaactaatatgtgggaaattaagattacagatgctttgggccccctcaaacagtacattgctacagttcactgtagcaacagatttggtggtgatggggggatagaggtagaagcagatagaaggtaattttaaagttaatttattatgaatcattttcccctaatctgcataaatgaattagaactgattttaataaaaatattctgtgtaaaaagtactcagaaaaacatctaaagctgttggagaagagggactcatataaatagttggattgcgttttgctttttatttctttataaaaatatgtcaaaaacagtttttaattttagaaatcttatacttgaaagaaacctcaattatcagtggctttatgaagtaaagttaaaaacaaacataggaaatgtgaaaatatttgtgtttgttttgtctgactaacttgctgctaaatgctatctttaggtgtgtgaaagttctttgatatgttattgtccttttacatcttgttaaatagccattgcttttgagaatcagatagtgtgttgtttaggggttaattgtgtctatatctttcaaaaacttttatattatgtattataagaagttacagtagtaccattttgattagtctgaatgttttcaggccttgaaataaattttgactaagtga

SEQ ID NO: 346958 - DNA, 2636 bp, Homo sapiens
agcgggttcggctgaggaagggagcgcacgccggcggcgcggaggccggctctgcgcttcgggccgccccctccccccaccccgctcacacccggcacttacttcggctgtctccgctgccctccagcggagacgcagctcctcaggcgcccggcggtatttgttgggtcggcggcgtcagggattcgcagtggcctgtggtcggcgtcgtccggccactggtgcgcccccgcggcaggcagagctcacgctcctgtcccccggctggtccggggtctgggcgccgcgtcgacggcggctccgcaggacgcgcagaccgggccgcagcccatgccccgagcggactgcattatgaggcacctgccttacttctgccggggtcaagtggtgcggggcttcggccgcggctccaagcagctgggcatccccacagctaattttcctgagcaagtggtagataatcttccagctgatatatccactggtatttactatggttgggccagtgttggaagtggagatgtccataagatggtggtgagcataggatggaacccatattacaagaatacgaagaagtctatggaaacacatatcatgcataccttcaaagaggacttctatggggaaatcctcaatgtggccattgttggctacctgagaccagaaaaagctaagaaacgactagagttaccagaacatttgaaaatcaaagaagacaatttcttccaggtttctaaaagcaaaataatgaatggccactgatgaaaaattgtattatttattcattcactgttttctagtgtttctgtgtttattactgttcagcatcatcttggttatatactgaaaatcaaacactttactacagttgtgaattagtttaaaccgtacaatgttgttatcatatcatgcttcaactattaaattaagcccatcatatcatagcactaaaaagattgagttaaaaataagatttaaaaaatatatattgattaaaatgtaccactagaaaggtattacatgtgtataagtatgggtaaaaaggcaagtcactagtttgagatgaaaactaaaattttcatggtaaaatgccagcatgtatgtacttgtgtagtgtgtacttctaaacagagaaggcttataaaagtaaatgcattaaggccaagtgcagtggctcacaccggtaatcccagcactttgggaggccgaggtgggaggattgcttgagctcatgagttcaagaccagcctgggcaacatagcgagactccatctctataaataaaaaaaaaggaaatgcattaaatagaaggttgatagtttatcataaacctgcggggaagaaactcagactttctatttttgatattttgtgcattaatacattacaaacatgaagatgtttgtaaagttttgttttagtcattttctttgcagtcacatcattgtaccaccttcattattgtatagagctgcttcaattctgagtcctctggacttcccctgcctatctgtttgttgttgttgttgaagacagtaaaataagtgttttcaaatctatatgtctcctttttgttggataatgtttcttctttttaatggtaaatattcttgttcttcaacatttttctttggttcttttttccttttttaggaaaaacaaaacaacagacttcatccttaggttttctcaagatttaagtgaacacatttacacatatcaatttcttaaagaacacaaaatgtttcctccctagcaaaactatttaagagccaattaaactatgaaatagttataaaattatttttaatatttaaggccttgaaattatattccaaggcaaatctaaatgggtgtagttgtatatgcacgatgtaatttaatgctaaagagtacttacagcttgagggaaaagcataaagttttagttaaatagccttcatactgtggatttttcctcctactaactaatatgtgggaaattaagattacagatgctttgggccccctcaaacagtacattgctacagttcactgtagcaacagatttggtggtgatggggggatagaggtagaagcagatagaaggtaattttaaagttaatttattatgaatcattttcccctaatctgcataaatgaattagaactgattttaataaaaatattctgtgtaaaaagtactcagaaaaacatctaaagctgttggagaagagggactcatataaatagttggattgcgttttgctttttatttctttataaaaatatgtcaaaaacagtttttaattttagaaatcttatacttgaaagaaacctcaattatcagtggctttatgaagtaaagttaaaaacaaacataggaaatgtgaaaatatttgtgtttgttttgtctgactaacttgctgctaaatgctatctttaggtgtgtgaaagttctttgatatgttattgtccttttacatcttgttaaatagccattgcttttgagaatcagatagtgtgttgtttaggggttaattgtgtctatatctttcaaaaacttttatattatgtattataagaagttacagtagtaccattttgattagtctgaatgttttcaggccttgaaataaattttgactaagtga

SEQ ID NO: 346959 - DNA, 1652 bp, Homo sapiens
agcgggttcggctgaggaagggagcgcacgccggcggcgcggaggccggctctgcgcttcgggccgccccctccccccaccccgctcacacccggcacttacttcggctgtctccgctgccctccagcggagacgcagctcctcaggcgcccggcggtatttgttgggtcggcggcgtcagggattcgcagtggcctgtggtcggcgtcgtccggccactggtgcgcccccgcggcaggcagagctcacgctcctgtcccccggctggtccggggtctgggcgccgcgtcgacggcggctccgcaggacgcgcagaccgggccgcagcccatgccccgagcggactgcattatgaggcacctgccttacttctgccggggtcaagtggtgcggggcttcggccgcggctccaagcagctgggcatccccacagctaattttcctgagcaagtggtagataatcttccagctgatatatccactggtatttactatggttgggccagtgttggaagtggagatgtccataagatggtggtgagcataggatggaacccatattacaagaatacgaagaagtctatggaaacacatatcatgcataccttcaaagaggacttctatggggaaatcctcaatgtggccattgttggctacctgagaccagaaaagaactttgattctttagagtcacttatttcagcaattcaaggtgatattgaagaagctaagaaacgactagagttaccagaacatttgaaaatcaaagaagacaatttcttccaggtttctaaaagcaaaataatgaatggccactgatgaaaaattgtattatttattcattcactgttttctagtgtttctgtgtttattactgttcagcatcatcttggttatatactgaaaatcaaacactttactacagttgtgaattagtttaaaccgtacaatgttgttatcatatcatgcttcaactattaaattaagcccatcatatcatagcactaaaaagattgagttaaaaataagatttaaaaaatatatattgattaaaatgtaccactagaaaggtattacatgtgtataagtatgggtaaaaaggcaagtcactagtttgagatgaaaactaaaattttcatggtaaaatgccagcatgtatgtacttgtgtagtgtgtacttctaaacagagaaggcttataaaagtaaatgcattaaggccaagtgcagtggctcacaccggtaatcccagcactttgggaggccgaggtgggaggattgcttgagctcatgagttcaagaccagcctgggcaacatagcgagactccatctctataaataaaaaaaaaggaaatgcattaaatagaaggttgatagtttatcataaacctgcggggaagaaactcagactttctatttttgatattttgtgcattaatacattacaaacatgaagatgtttgtaaagttttgttttagtcattttctttgcagtcacatcattgtaccaccttcattattgtatagagctgcttcaattctgagtcctctggacttcccctgagcacatccctaccctgtaggtccatcgggggcagagtcgttggagtttgaataggaagaggaggaggagaaggggagtgagcggccgct

SEQ ID NO: 346960 - DNA, 2019 bp, Homo sapiens
ccccagatatgtgagttacatgagatggcacagtgataaagccccatttagtgaccttgcctccttctccttgccaactttgaaagtgcctccgtgtccagactttgaacttgcctgccagccttcagcatcaggaaaggccaagtcctgggtgtgagtgttcctgtgtaacaagaactgggctcaacggtccagctgtttctatggagctttggggttccttgagatgaatgaacatatcattttatcatccaaaggatctcactggactgttcaacttccagccaaattcaaggagcttgcgggaacatttgatataacaaatgtgttgtcattgttggcaacatacaagataaccaagaagctggagtctgttctgtgttgatttgactaccatgagaaacacaggggaaacctgatgaggagaaggataagactgcgtaaggagaaatcctcataggagctataaagcaggctgctgatctcagcagttgatatggtggttgtgcctctgctggctactgggtgtgctgtccccatgttcccgctgtgatttggcagaaacacaataggcttctccttgtgtgatctcagcttcaagcaggtgaaactgctgtgcagagggagttgccccttcccagtaaaagagttgcagcctgttaaacaatgtggtctaatttagtgtctctcccttggcaaatgtaagttttctaagttggccaacttgtctcttacagccagtggctgtggtctacagaattgtttcatataaaatacgggtagagtggtagagtttcaaaactttcgtcatagatatctgggacctttctcaggatctgtgttcacacagccaatagatttggaatcaggcctaagagtacacatggagggtaaatattaaagtgcgtattatgtacatctagaatccatgtgacttgcagcctacctgtaatttctatccattgagcatgcatggatatacccaatagtacacacaaaataaatgtttacttaagagccattctatccttttgtgactgaaatggtttattgtaaatctgcctaaagattttttgcatattatatatgtgaattttggttgtaagttcataacttacccaagggtatagactcataactcttttaaaacagtgcttagtacaatatcctgccatctctgtaaaaacgctaattgataaccgagtcatttacatgttttcgaacacagaatagctcttttctcagcatcattattgctctttcagcatctgttaggacagtctgaatactttctgtttcaaggcactgataaaaccgcaacaaaaacatgtaagaaataaaatagaaatgctttatatattttagtttaaatttatgtatcacctcattgtgacttattttttccattataccattagtcagatttgaataacgaggttttgaaaggataaaaccttttctccaatgacaggattatataattgctattggcaatgtagcctggtgcttcatgagacctatgctaaatgttactggagagttcttgaagccagggataccatatcaggaactattcaggatctatgatattttctgaggtaactgggtaatagaatatcaaattgctgctatctcggacctattgttaaaggatgatgctttgcctatgtaataggatatatcctaagtggggatgtgtatatttcaggaactttaattcacaagtatatattgatatctgatgtgtgtatagtacatctgttggttatgtacattttaatttacatgttgtgtagaacatagatgagaactctgggaaaacttgggaatggcaaccaaccaaaatcatttttaatcatttattagaaatttctcaatattgtgtctttttcttttgaaactctaaacacttcagaaaaaaacactatcagtgtagttcatgttagtataattatagatttacatatatttgaatagttaatttgctttgttttacacgtagcccactgcctcattata

SEQ ID NO: 346961 - DNA, 296 bp, Homo sapiens
gcatgagccacctcacccggctgaatttatggatttaaaggaggtcactgcattgtaaatcaagtgttgagtgacagtggtacgcataacagtgaacctcctcatctaagctctatatcaggggtcagcaaattatggcccctggtttgctgaccctttacagtttcctatagcctgcaaactaggaatactatttacatctttaaagggctttagaaaagtaaaactaatattttgtgacacatcaaaattatatgaaatttgcattttagtgtccattaataaaattttcttgg

SEQ ID NO: 346962 - DNA, 585 bp, Homo sapiens
gcagcttcatcgtttacatgtatatcactcatattgtgaagaatatatcaaatagtcgtaataaaaatatttttgaagagtagagggagaaaagtgttattttatttcatttcttactacacataataagcactaaataaatataaaatacaaatgccctcgtcaatttttttgtttatcttgaaaaataaacttttttctcatattgcaaatgataagctagttataataagaataccagatcaaatattctgaaatagatttccactaaaggatacttgattccttcatcattgccagatatttaaacactacctactggctccaaatttctcctcttcaagataaaagaaatgaatgtgaatcaccagctttcaggatagtgcttaaaataaaacagattcctattaaaacaattacaataagaaaacactatgtagtatagtataaagtaagttaaaatgacattttaatgttttaacattttaataactcatatctactttataaaatatcatagtatatgctatctgaaggaggaaccaatgttaaatagtataagtctgttagacataattagattta

SEQ ID NO: 346963 - DNA, 607 bp, Homo sapiens
tgtagggtccaccactgatcgcctaaaatctgaacgtgtatgcggccggggaggcaggcaatggagggaggcgacagaccagggcgtcaaggctggtccacttttgtctcgggccggctggtacctggagctgagcaccttgacacagcgagacctccccctggacgtctctccatctcctgcctggtctgcgcgctgcacctgccacagttacaacttgggcaaatgtgcagtcaccgcgtcgttaggtgaatgacactcactcttcttctcgggggttctcacgccttgactctctggcgtcatcgccctggctgctgagtcctcgcaggtggccactggccaccctccctgtctgcatccccactccggctctcacagctggtatcacctagggtgagtcatcagctgtacctcagtctccccatccaaagggcttgctgggatccgtgtcctgacctggctgtactggggaacgggtggctgttctccatcttgtcccaggccattgccccctctcctgcatttgtggcccttcctccaacgccccctcctctccgtgacagcaaggctctggggaaggtcagcctgggtgggcctgtctcca

SEQ ID NO: 346964 - DNA, 356 bp, Homo sapiens
gaaatatatatacatatatatattccaacctgatatatatatatatatcaggttctttattattttgttcctcttccatcctggctatatctgccagatagaagaagaagtctaccattaaccaggacaccaggcagtcattaaaacactgtgccaccatctgctccacccagtttttttttttttttttttttttttttttgagacagggtcttgctttgttgcctaggctgttgtgcagtggcatgatcttggctcactgcagccttgacctcctgggctcaacagatcctcccacctcagcctcccaagtagctgggactacaggcgcatgtcaccttgtctggctaattttt

SEQ ID NO: 346965 - DNA, 590 bp, Homo sapiens
caagaccctatctctgcaaaaaaaagaaaaaaaaaatagttgggcctggtggcacatgcctttggtttcagtgccttgggaagctgaggtaggaggattgcttgagcccaagagtttgaggctgtagtgagctgtgatcatacactccagcctgggcaacacagcaataccctgtcgtttaaagaaattaaaaagaaaaaatacaaaaactcctaagaaaaagttaaatcacttcatatatgttattttctccaaattattgagaggtagaatttttatccctgtttgttggctaaaacagaccaaaatacaggaagtaacttatctagtgccttttctcaccagaattctcacctccagccagagtcttgtgtttttaccctgaaccaagccacctctgaaagaaagttaaacaggctttgagaagatatttttccttggattttagatccttgtagcatttctgaaaagagagttaactctgcatatgaacattcagaagcttttggagaccttcaaggtcatcagcacctgacactgggagaaagggtgggttagggttggttctgtccaatctacacaatatctaa

SEQ ID NO: 346966 - DNA, 303 bp, Homo sapiens
cggggtttcactgtgttagccaggatggtctcgatctcctgacctcatgatctgcccaccttggcctcccaaagtgctaggattacaggcgtgagccaccgcgcccagcctatgtgatgcaattctgatgtcaactccctgatgttacctcaaatgccacaggttaaggccaccagcccccactaggctgccctcgctttagacacacctgcaggcttgggtgtcctcagaccacatgtacttctcaccaactggctgcaaatttggaggttcccaccatgccctcaagttcgataactcact

SEQ ID NO: 346967 - DNA, 516 bp, Homo sapiens
cagctgtttgggaagaggctgtgattcggccttgtttgagggccgatactctgaatgggtgaggcttggaatcctccctttggaacaaagaaacataatgattttgctgaaggtagaattgggggactaggcagagtggcctcctgccctccctggggtggttctgtcttttgcaaaggtggctgcatccttaggggaaggtgaggggagaagcagggagcatggagagaagtggctttcgattttctctctccttttggggagttcctccttatgtggctggtctggtgcatagtgtgatgtattcctgtacgcaacgttgccctgacagccagtccaagctgagtctagagctggcaaggtgagctcccagtagtaagagggtgtgggcggcaagccacccaggcaccgaggcaagagacagaggacacgagctgttccagtataataaaatataaaacaagaatagttataccagatatagatcttagatatgattatatatgaatatcatta

SEQ ID NO: 346968 - DNA, 383 bp, Homo sapiens
cctgtgtgtacatagggaaaatctgacaagacaggctctaaactattaacaaggatttcctttaatgggtgggattctttctttacacattctcacattatttgaatacatttctatcagcaagtattagttttatcattttaaacaaaagataaaaataggaagaaatactttttaaatgaacaagtagctggcattacaatcaagtcattggcgtatgagatttataaaggcctggccttagaccagccttctctaattaatcattcccctgtctcccaccactgatcagagacttttccctgatatgtcttattctcctgtccatctgctttcaagcatggatactcctggatgagctcttctttctatgattactgcac

SEQ ID NO: 346969 - DNA, 322 bp, Homo sapiens
ttggggtcttgctctgttgcccaggttggagtgtataggtgcaatcatagatcactgcagcctcaaactcctggcctcaaacaatcctccctcctcagcctcctaagtagctggtgttacaagcatgagccacagcattttctacctgtgaaatgagacagaatctcactctattgctccggttgaagtgcagtggctgcttacaggggcgatcacggtgcactgcagcctcgaagtcatggcctcaatcagtccccctgcctccactcatggatctgccttaaaaatcgcctattaaaaatctaatcattcagagtcgaaa

SEQ ID NO: 346970 - DNA, 344 bp, Homo sapiens
aggttccatcaaagtgataaacttcaacccctccaggccccgggaatggctgggtataatactgcaaatgagacataggaagtatacaggaagttctcttcaaacttcggactccgagcagtggctgggcttccagagtcaagctctagcagagcactccccaccaacaatctctagagacagaatctcactctattgctccggttgaagtgcagtggctgcttacaggggcgatcacggtgcactgcagcctcgaagtcatggcctcaatcagtccccctgcctccactcatggatctgccttaaaaatcgcctattaaaaatctaatcattcagagtcgaaa

SEQ ID NO: 346971 - DNA, 2479 bp, Homo sapiens
gactcaccctgggccgggggtgaggcttggactgtttctttttccaaaagaggagctcaaaagagaaagttcatctagaaatctcaaagccatgtctcaggatgaactagagtatgcccttacagggatcagtgtcattcaaggatgtgactgtggacttcacccaggaggagtggcagcaactagaccctgctcagaaggcgctttacagggatgtgatgttggaaaactattgccacttcgtatctgtggggtttcacatggctaagcctgatatgatccgcaagttggaacaaggagaagagctatggacacagagaatttttccaagttacagctacctagaagaagatgggaaaactgaagatgtcttagtgaagttcaaagaataccaagacaggcattctagacccctcatattcatcaaccacaaaaaactaattaaggagagaagtaatatttatggtaaaacatttactctaggcaagaaccgtattacaatactatgtgaatataaacctgatggaaaagttttgaaaaatatttcagaactagtcattagaaatataagccccataaaagagaagtttggtgacagtactggatgggagaaatcactcctcaataccaagcatgagaaaattcatcctgcagtgaatctccataaacaaacagaaagagttctcagtggtaaacaggagcttattcagcatcagaaggttcaagctccagagcaaccatttgaccataatgaatgtgaaaaatccttcctgatgaaaggaatgctatttacacatactagagctcacagaggagaaagaacctttgaatacaataaagatggaattgccttcatagaaaagtcaagcctcagtgtccatccaagtaatcttatggaaaagaagccctctgcctacaacaaatatgggaaattcctctgcagaaagcctgtttttattatgcctcagagacctcaaacagaagagaaaccctttcactgtccttactgtgggaataactttagaaggaagtcatacctcattgaacatcagcgaattcacacaggtgaaaaaccttatgtttgcaatcaatgtggaaaggccttccgtcagaagacagccctcacccttcatgagaaaacacatatagaggggaaaccctttatttgtatcgattgtgggaagtccttccgccagaaggccaccctcactagacatcacaaaacacatacgggggagaaagcctatgaatgtcctcagtgtggaagtgcctttaggaagaagtcatacctcattgatcaccagagaactcacacaggagagaaaccgtatcagtgtaatgagtgtgggaaggcatttatccagaagacaaccctcactgttcatcagagaactcacacaggagagaaaccctatatttgcaatgaatgtgggaagtccttctgccaaaagacaaccctcactctccaccagagaattcacacgggggaaaaaccctatatttgtaatgaatgtgggaagtccttccgccagaaggcaatcctcactgttcatcacagaatacatacaggagaaaaatccaatgggtgtcctcagtgtgggaaagccttcagtaggaaatcaaacctcattcgccatcagaaaactcacacaggcgagaaaccatatgaatgtaaacagtgtgggaagttcttcagttgtaagtcaaacctcattgtccatcagaaaactcacaaggtagaaaccacgggaattcagtaagtaatgtggctttttttgtaaaaaaatgttaagtcatagtaaaccctgtagatgatgttgcttgcaagcgtaatatccaacagtttaaggtactataccacatggtaacctactgtttgccagcctgtaaaacacacacacacacacacacacacacacaaatattattagacaaattagatgacaaaaatcattaagaagtccaaactttttttttattactagcttcagcagacaaaaacttcctctgtcaaggtgttataaacatttaaaatcacattttccatttccatacatatctttttgttcatcagtaataactagttggccaactgactgtggtccatggactacacagtgagtagaggttctttaaaagaaggaggtatgaactgtatttctcattgcaaatacaaaataaaaattagttgttacctcctcacagttgaccatgattctgacttctaacattacaaattagtttttactattataaacctttctataaattggattatatatcatgtattctttcatatacagcttattaccttcatcatgtccgtgagtctaatcattagtacgtgtggcagaagtttatttatttttatccagtatagaattcaattatatgattatatcacaatttatccattctgctgttgatggacttttacattgtttacagcttagggtcataataaatcatgcttctgaga

SEQ ID NO: 346972 - DNA, 479 bp, Homo sapiens
tatgtttagcatgagattataagtaaatacaaatggatgtattttcagagagaattttatgcaatataaaacataaataaggaaactagtctgaccagtaaacattgtcagtactaggtctccaatatctagttctcacacatttccgatcacttcaggatgaactagagtatgcccttacagggatcagtgtcattcaaggatgtgactgtggacttcacccaggaggagtggcagcaactagaccctgctcagaaggcgctttacagggatgtgatgttggaaaactattgccacttcgtatctgtggggtttcacatggctaagcctgatatgatccgcaagttggaacaaggagaagagctatggacacagagaatttttccaagttacagctacctaggtgagtctataaatgaagtctagtgaacattaaatgtcaagtagttgaagcctttgaatgtttttagggatctatt

SEQ ID NO: 346973 - DNA, 408 bp, Homo sapiens
tttgtattttccccagatctctttcagtttattataatgctggagcaataattaaatgttccttagcgtttcctatgtcctacacctcactgaaaacatgtcggcagagaaagcaaatgttcatcatttctcaatataaaacagatcctgccagggatcatgccaaacctgaccaaccatgacagtcaaatcaatgtatgttttggtttaaatttttatttttgcctttgctttagcaacttgattctggtatttgtttttccctgtggcttatcattttatggcatgacagttcctgaaattgacaaggcttcctgcttacctttgtaatgcatatgtgtgacaatataaactataagagaaaatgacattttgactcaataaatatttgctttatgtccattacat

SEQ ID NO: 346974 - DNA, 647 bp, Homo sapiens
ggcaaagacaacaagcattgatggcaataagtgtactgatggccccgcggttggctgttaatttcaaggcgggttgaaggaagaagtatggagttaaagactgcagcgtgaactgaggagtcccggacaggccgcttgctgcagaggatccagtccagatcccaggagagcccctctgccccttcggacctcgtctcccatctacaaaacgtgaagattggcccagttggcgtgtctctacaaaaaggtgcatataccactgaagctgctttgtttgcttttgtgtgtcggattgaacttttctttcatgaatcacggttaggaaaggcttctcttgttttctgctaataaaaagacagcttgggccaggcgtggtggctcacactgtaatcccagcactttgggaggccgaggcaggcggatcacctgaggccaggagttcgagaccagcctgaccaacgtggggaaaccctgtttccactaaaaatacaaaattagctggcatggtggcatgcacctgtaatcccagctatttgggaaactgaggcaggagaatcacttgagcccaggaggcagagggtcactgagccgagatcatcccattgcactccagcctggactaaaagagtgaaactatgtctcaaagg

SEQ ID NO: 346975 - DNA, 2680 bp, Homo sapiens
ggcaaagacaacaagcattgatggcaataagtgtactgatggccccgcggttggctgttaatttcaaggcgggttgaaggaagaagtatggagttaaagactgcagcgtgaactgaggagtcccggacaggccgcttgctgcagaggatccagtccagatcccaggagagcccctctgccccttcggacctcgtctcccatctacaaaacgtgaagattggcccagttggcgtgtctctacaaaaaggtgcatataccactgccccgctgcaggctgatctgagaaagcctctggcccagggcagataccgccatggccttcctgatgcacctgctggtctgcgtcttcggaatgggctcctgggtgaccatcaatgggctctgggtagagctgcccctgctggtgatggagctgcccgagggctggtacctgccctcctacctcacggtggtcatccagctggccaacatcgggcccctcctggtcaccctgctccatcacttccggcccagctgcctttccgaagtgcccatcatcttcaccctgctgggcgtgggaaccgtcacctgcatcatctttgccttcctctggaatatgacctcctgggtgctggacggccaccacagcatcgctttcttggtcctcaccttcttcctggccctggtggactgcacctcttcagtgaccttcctgccgttcatgagccggctgcccacctactacctcaccaccttctttgtgggtgaaggactcagcggcctcttgcccgccctggtggctcttgcccagggctccggtctcactacctgcgtcaatgtcactgagatatcagacagcgtaccaagccctgtacccacgagggagactgacatcgcacagggagttcccagagctttggtgtccgccctccccggaatggaagcacccttgtcccacctggagagccgctaccttcccgcccacttctcacccctggtcttcttcctcctcctatccatcatgatggcctgctgcctcgtggcgttctttgtcctccagcgtcaacccaggtgctgggaggcttccgtggaagacctcctcaatgaccaggtcaccctccactccatccggctgcgggaagagaatgacttgggccctgcaggcatggtggacagcagccagggccaggggtatctagaggagaaagcagccccctgctgcccggcgcacctggccttcgtctataccctggtggccttcgtcaacgcgctcaccaacggcatgctgccctctgtgcagacctactcctgcctgtcctatgggccagttgcctaccacctggctgccaccctcagcattgtggccaaccctcttgcctcgttggtctccatgttcctgcctaacaggtctctgctgttcctgggggtcctctccgtgcttgggacctgctttgggggctacaacatggccatggcggtgatgagcccctgccccctcttgcagggccactggggtggggaagtcctcattgtggcctcgtgggtgcttttcagcggctgcctcagctacgtcaaggtgatgctgggcgtggtcctgcgcgacctcagccgcagcgccctcttgtggtgcggggcggcggtgcagctgggctcgctgctcggagcgctgctcatgttccctctggtcaacgtgctgcggctcttctcgtccgcggacttctgcaatctgcactgtccagcctaggcaggccgccgaccccgcccccatcgctcacggacggaactggggtccagagaggccaggtcacagagcaaggggcaggaacagagagacagagcctgagtaattgaatcatgaacgcaagtgcccactggggactgtggggaagatggcacctggaaatgcaaggtgcggctctatccccaactctgtgtcacactacctgtgacgaccagctcagatctcctttgctttgactctcaagagaggactgatttgcagcatctagctggaggcaggcccaagggtgttagaagggaaacagctgggacagccggctgtcccttcaggctgtgtgaccttgggaaagtcatttggcttctctgtgcctgtttcttcatgcatgcagtggggattccagtaagtaccaactacctcacaggcatggcacggaggcaaaaggaaaaagcagcccgcatcaagcaagccctcctgggccacctgctgatctgacagtccatcgtagtaacaagagtggcagtctgcacaacctagaagtggccagaagggttgagacacgcccctgccctctctcctttgcccctcagtctcacagaggggcttctacaagacaagcagataacgatagaatcttgggcatcttggctttcggattctcagtgtggagggacgtagtaccccacacaccccttcctgtcatccttcctggcccataaagcccactagttggagagtaagtaccctcctggaagcagggagagatgatttgctggtggggctggggaaggcccatccctgagcctctgaaagtgaactccccgaccaggttggggaccagacatgcagagcccctggaagtattctctcaaatggaggcaacagaggtgattgttattttgttttagtttctgtttttcatttttttaaataaaggcattccctgcttttaaaaaaaaaaat

SEQ ID NO: 346976 - DNA, 533 bp, Homo sapiens
aggccaaggtgggaggatcacttgagcccaggagtttgggatgagaccagcctgggcaacatagggagaccctgtctctacaaaataaaaaaattagccaggcatggtggtcccagttacttcgggggttgaactgggaggatcgcctgagtctgggaggttgaggctgtagtgagctatgtattactgtacttcagcccccgcaacagaacaagaccctggaccctgtctcaaaaaacaaacaaacaaacaaaaagttcaatggtgaaatgttagaagctttcaatttctgattaggaatcagacagggatgcccagaatcattatttccactcatcattgttctgcaggtcctagctggtgcattaaaacaagaaataagagatacaagaatcagaagaggagaaaccaaactgtcattgttttcagatgatatggttgtacctataaaacaccaaaacttttatagacaaattaagaattaataagctagcttaccaacttgctcaatcaataaacaaaaattcaattgc

SEQ ID NO: 346977 - DNA, 2213 bp, Homo sapiens
ttgcagcctctcttccgcccggcggccacaccggtcaggcccggcgcgggctgcgctctccagctgtggctatggccccagccccgagatgaggagggagagaactaggggcccgcaggcctgggaatttccgtcccccaccaagtccggatgctcactccaaagtctcagcaggcccctgagggagggagctgtcagccagggaaaaccgagaacaccatcaccatgacaaccagtcaccagcctcaggacagatacaaagctgtctggcttatcttcttcatgctgggtctgggaacgctgctcccgtggaattttttcatgacggccactcagtatttcacaaaccgcctggacatgtcccagaatgtgtccttggtcactgctgaactgagcaaggacgcccaggcgtcagccgcccctgcagcacccttgcctgagcggaactctctcagtgccatcttcaacaatgtcatgaccctatgtgccatgctgcccctgctgttattcacctacctcaactccttcctgcatcagaggatcccccagtccgtacggatcctgggcagcctggtggccatcctgctggtgtttctgatcactgccatcctggtgaaggtgcagctggatgctctgcccttctttgtcatcaccatgatcaagatcgtgctcattaattcatttggtgccatcctgcagggcagcctgtttggtctggctggccttctgcctgccagctacacggcccccatcatgagtggccagggcctagcaggcttctttgcctccgtggccatgatctgcgctattgccagtggctcggagctatcagaaagtgccttcggctactttatcacagcctgtgctgttatcattttgaccatcatctgttacctgggcctgccccgcctggaattctaccgctactaccagcagctcaagcttgaaggacccggggagcaggagaccaagttggacctcattagcaaaggagaggagccaagagcaggcaaagaggaatctggagtttcagtctccaactctcagcccaccaatgaaagccactctatcaaagccatcctgaaaaatatctcagtcctggctttctctgtctgcttcatcttcactatcaccattgggatgtttccagccgtgactgttgaggtcaagtccagcatcgcaggcagcagcacctgggaacgttacttcattcctgtgtcctgtttcttgactttcaatatctttgactggttgggccggagcctcacagctgtattcatgtggcctgggaaggacagccgctggctgccaagcctggtgctggcccggctggtgtttgtgccactgctgctgctgtgcaacattaagccccgccgctacctgactgtggtcttcgagcacgatgcctggttcatcttcttcatggctgcctttgccttctccaacggctacctcgccagcctctgcatgtgcttcgggcccaagaaagtgaagccagctgaggcagagaccgcaggagccatcatggccttcttcctgtgtctgggtctggcactgggggctgttttctccttcctgttccgggcaattgtgtgacaaaggatggacagaaggactgcctgcctccctccctgtctgcctcctgccccttccttctgccaggggtgatcctgagtggtctggcggttttttcttctaactgacttctgctttccacggcgtgtgctgggcccggatctccaggccctggggagggagcctctggacggacagtggggacattgtgggtttggggctcagagtcgagggacggggtgtagcctcggcatttgcttgagtttctccactcttggctctgactgatccctgcttgtgcaggccagtggaggctcttgggcttggagaacacgtgtgtctctgtgtatgtgtctgtgtgtctgcgtccgtgtctgtcagactgtctgcctgtcctggggtggctaggagctgggtctgaccgttgtatggtttgacctgatatactccattctcccctgcgcctcctcctctgtgttctctccatgtccccctcccaactccccatgcccagttcttacccatcatgcaccctgtacagttgccacgttactgccttttttaaaaatatatttgacagaaaccaggtgccttcagaggctctctgatttaaataaacctttcttgtttttttctcc

SEQ ID NO: 346978 - DNA, 2090 bp, Homo sapiens
ctgcagcgagagcgcgcggatctcagcgcgggagcagtgcttctgcggcaggcccctgagggagggagctgtcagccagggaaaaccgagaacaccatcaccatgacaaccagtcaccagcctcaggacagatacaaagctgtctggcttatcttcttcatgctgggtctgggaacgctgctcccgtggaattttttcatgacggccactcagtatttcacaaaccgcctggacatgtcccagaatgtgtccttggtcactgctgaactgagcaaggacgcccaggcgtcagccgcccctgcagcacccttgcctgagcggaactctctcagtgccatcttcaacaatgtcatgaccctatgtgccatgctgcccctgctgttattcacctacctcaactccttcctgcatcagaggatcccccagtccgtacggatcctgggcagcctggtggccatcctgctggtgtttctgatcactgccatcctggtgaaggtgcagctggatgctctgcccttctttgtcatcaccatgatcaagatcgtgctcattaattcatttggtgccatcctgcagggcagcctgtttggtctggctggccttctgcctgccagctacacggcccccatcatgagtggccagggcctagcaggcttctttgcctccgtggccatgatctgcgctattgccagtggctcggagctatcagaaagtgccttcggctactttatcacagcctgtgctgttatcattttgaccatcatctgttacctgggcctgccccgcctggaattctaccgctactaccagcagctcaagcttgaaggacccggggagcaggagaccaagttggacctcattagcaaaggagaggagccaagagcaggcaaagaggaatctggagtttcagtctccaactctcagcccaccaatgaaagccactctatcaaagccatcctgaaaaatatctcagtcctggctttctctgtctgcttcatcttcactatcaccattgggatgtttccagccgtgactgttgaggtcaagtccagcatcgcaggcagcagcacctgggaacgttacttcattcctgtgtcctgtttcttgactttcaatatctttgactggttgggccggagcctcacagctgtattcatgtggcctgggaaggacagccgctggctgccaagcctggtgctggcccggctggtgtttgtgccactgctgctgctgtgcaacattaagccccgccgctacctgactgtggtcttcgagcacgatgcctggttcatcttcttcatggctgcctttgccttctccaacggctacctcgccagcctctgcatgtgcttcgggcccaagaaagtgaagccagctgaggcagagaccgcaggagccatcatggccttcttcctgtgtctgggtctggcactgggggctgttttctccttcctgttccgggcaattgtgtgacaaaggatggacagaaggactgcctgcctccctccctgtctgcctcctgccccttccttctgccaggggtgatcctgagtggtctggcggttttttcttctaactgacttctgctttccacggcgtgtgctgggcccggatctccaggccctggggagggagcctctggacggacagtggggacattgtgggtttggggctcagagtcgagggacggggtgtagcctcggcatttgcttgagtttctccactcttggctctgactgatccctgcttgtgcaggccagtggaggctcttgggcttggagaacacgtgtgtctctgtgtatgtgtctgtgtgtctgcgtccgtgtctgtcagactgtctgcctgtcctggggtggctaggagctgggtctgaccgttgtatggtttgacctgatatactccattctcccctgcgcctcctcctctgtgttctctccatgtccccctcccaactccccatgcccagttcttacccatcatgcaccctgtacagttgccacgttactgccttttttaaaaatatatttgacagaaaccaggtgccttcagaggctctctgatttaaataaacctttcttgtttttttctcc

SEQ ID NO: 346979 - DNA, 312 bp, Homo sapiens
gaggaagacagagagaaaggaggatgtaaagtagagaattaaaaagaacagagcggagaggggagaaagaatgagaaatcgggaggcgaaggagagagagaaggggagagggagagagaaggaatggagagagcgaagaccggaagaaggaggcccgagcgaagggaagaccaactccccatgcccagttcttacccatcatgcaccctgtacagttgccacgttactgccttttttaaaaatatatttgacagaaaccaggtgccttcagaggctctctgatttaaataaacctttcttgtttttttctcc

SEQ ID NO: 346980 - DNA, 2041 bp, Homo sapiens
ctgcagcgagagcgcgcggatctcagcgcgggagcagtgcttctgcggcaggcccctgagggagggagctgtcagccagggaaaaccgagaacaccatcaccatgacaaccagtcaccagcctcaggacagatacaaagctgtctggcttatcttcttcatgctgggtctgggaacgctgctcccgtggaattttttcatgacggccactcagtatttcacaaaccgcctggacatgtcccagaatgtgtccttggtcactgctgaactgagcaaggacgcccaggcgtcagccgcccctgcagcacccttgcctgagcggaactctctcagtgccatcttcaacaatgtcatgaccctatgtgccatgctgcccctgctgttattcacctacctcaactccttcctgcatcagaggatcccccagtccgtacggatcctgggcagcctggtggccatcctgctggtgtttctgatcactgccatcctggtgaaggtgcagctggatgctctgcccttctttgtcatcaccatgatcaagatcgtgctcattaattcatttggtgccatcctgcagggcagcctgtttggtctggctggccttctgcctgccagctacacggcccccatcatgagtggccagggcctagcaggcttctttgcctccgtggccatgatctgcgctattgccagtggctcggagctatcagaaagtgccttcggctactttatcacagcctgtgctgttatcattttgaccatcatctgttacctgggcctgccccgcctggaattctaccgctactaccagcagctcaagcttgaaggacccggggagcaggagaccaagttggacctcattagcaaaggagaggagccaagagcaggcaaagaggaatctggagtttcagtctccaactctcagcccaccaatgaaagccactctatcaaagccatcctgaaaaatggatgtttccagccgtgactgttgaggtcaagtccagcatcgcaggcagcagcacctgggaacgttacttcattcctgtgtcctgtttcttgactttcaatatctttgactggttgggccggagcctcacagctgtattcatgtggcctgggaaggacagccgctggctgccaagcctggtgctggcccggctggtgtttgtgccactgctgctgctgtgcaacattaagccccgccgctacctgactgtggtcttcgagcacgatgcctggttcatcttcttcatggctgcctttgccttctccaacggctacctcgccagcctctgcatgtgcttcgggcccaagaaagtgaagccagctgaggcagagaccgcaggagccatcatggccttcttcctgtgtctgggtctggcactgggggctgttttctccttcctgttccgggcaattgtgtgacaaaggatggacagaaggactgcctgcctccctccctgtctgcctcctgccccttccttctgccaggggtgatcctgagtggtctggcggttttttcttctaactgacttctgctttccacggcgtgtgctgggcccggatctccaggccctggggagggagcctctggacggacagtggggacattgtgggtttggggctcagagtcgagggacggggtgtagcctcggcatttgcttgagtttctccactcttggctctgactgatccctgcttgtgcaggccagtggaggctcttgggcttggagaacacgtgtgtctctgtgtatgtgtctgtgtgtctgcgtccgtgtctgtcagactgtctgcctgtcctggggtggctaggagctgggtctgaccgttgtatggtttgacctgatatactccattctcccctgcgcctcctcctctgtgttctctccatgtccccctcccaactccccatgcccagttcttacccatcatgcaccctgtacagttgccacgttactgccttttttaaaaatatatttgacagaaaccaggtgccttcagaggctctctgatttaaataaacctttcttgtttttttctcc

SEQ ID NO: 346981 - DNA, 2197 bp, Homo sapiens
ctgcagcgagagcgcgcggatctcagcgcgggagcagtgcttctgcggcaggagcccgtggacaaggcccactgcctgagcctgaactaggagcacctcctagggactgcccaggcttgctctgctctgacccttctgctggccagtctgggcacctggcccctgagggagggagctgtcagccagggaaaaccgagaacaccatcaccatgacaaccagtcaccagcctcaggacagatacaaagctgtctggcttatcttcttcatgctgggtctgggaacgctgctcccgtggaattttttcatgacggccactcagtatttcacaaaccgcctggacatgtcccagaatgtgtccttggtcactgctgaactgagcaaggacgcccaggcgtcagccgcccctgcagcacccttgcctgagcggaactctctcagtgccatcttcaacaatgtcatgaccctatgtgccatgctgcccctgctgttattcacctacctcaactccttcctgcatcagaggatcccccagtccgtacggatcctgggcagcctggtggccatcctgctggtgtttctgatcactgccatcctggtgaaggtgcagctggatgctctgcccttctttgtcatcaccatgatcaagatcgtgctcattaattcatttggtgccatcctgcagggcagcctgtttggtctggctggccttctgcctgccagctacacggcccccatcatgagtggccagggcctagcaggcttctttgcctccgtggccatgatctgcgctattgccagtggctcggagctatcagaaagtgccttcggctactttatcacagcctgtgctgttatcattttgaccatcatctgttacctgggcctgccccgcctggaattctaccgctactaccagcagctcaagcttgaaggacccggggagcaggagaccaagttggacctcattagcaaaggagaggagccaagagcaggcaaagaggaatctggagtttcagtctccaactctcagcccaccaatgaaagccactctatcaaagccatcctgaaaaatatctcagtcctggctttctctgtctgcttcatcttcactatcaccattgggatgtttccagccgtgactgttgaggtcaagtccagcatcgcaggcagcagcacctgggaacgttacttcattcctgtgtcctgtttcttgactttcaatatctttgactggttgggccggagcctcacagctgtattcatgtggcctgggaaggacagccgctggctgccaagcctggtgctggcccggctggtgtttgtgccactgctgctgctgtgcaacattaagccccgccgctacctgactgtggtcttcgagcacgatgcctggttcatcttcttcatggctgcctttgccttctccaacggctacctcgccagcctctgcatgtgcttcgggcccaagaaagtgaagccagctgaggcagagaccgcaggagccatcatggccttcttcctgtgtctgggtctggcactgggggctgttttctccttcctgttccgggcaattgtgtgacaaaggatggacagaaggactgcctgcctccctccctgtctgcctcctgccccttccttctgccaggggtgatcctgagtggtctggcggttttttcttctaactgacttctgctttccacggcgtgtgctgggcccggatctccaggccctggggagggagcctctggacggacagtggggacattgtgggtttggggctcagagtcgagggacggggtgtagcctcggcatttgcttgagtttctccactcttggctctgactgatccctgcttgtgcaggccagtggaggctcttgggcttggagaacacgtgtgtctctgtgtatgtgtctgtgtgtctgcgtccgtgtctgtcagactgtctgcctgtcctggggtggctaggagctgggtctgaccgttgtatggtttgacctgatatactccattctcccctgcgcctcctcctctgtgttctctccatgtccccctcccaactccccatgcccagttcttacccatcatgcaccctgtacagttgccacgttactgccttttttaaaaatatatttgacagaaaccaggtgccttcagaggctctctgatttaaataaacctttcttgtttttttctcc

SEQ ID NO: 346982 - DNA, 2005 bp, Homo sapiens
ctgcagcgagagcgcgcggatctcagcgcgggagcagtgcttctgcggcaggcccctgagggagggagctgtcagccagggaaaaccgagaacaccatcaccatgacaaccagtcaccagcctcaggacagatacaaagctgtctggcttatcttcttcatgctgggtctgggaacgctgctcccgtggaattttttcatgacggccactcagtatttcacaaaccgcctggacatgtcccagaatgtgtccttggtcactgctgaactgagcaaggacgcccaggcgtcagccgcccctgcagcacccttgcctgagcggaactctctcagtgccatcttcaacaatgtcatgaccctatgtgccatgctgcccctgctgttattcacctacctcaactccttcctgcatcagaggatcccccagtccgtacggatcctgggcagcctggtggccatcctgctggtgtttctgatcactgccatcctggtgaaggtgcagctggatgctctgcccttctttgtcatcaccatgatcaagatcgtgctcattaattcatttggtgccatcctgcagggcagcctgtttggtctggctggccttctgcctgccagctacacggcccccatcatgagtggccagggcctagcaggcttctttgcctccgtggccatgatctgcgctattgccagtggctcggagctatcagaaagtgccttcggctactttatcacagcctgtgctgttatcattttgaccatcatctgttacctgggcctgccccgcctggaattctaccgctactaccagcagctcaagcttgaaggacccggggagcaggagaccaagttggacctcattagcaaagtttcagtctccaactctcagcccaccaatgaaagccactctatcaaagccatcctgaaaaatggatgtttccagccgtgactgttgaggtcaagtccagcatcgcaggcagcagcacctgggaacgttacttcattcctgtgtcctgtttcttgactttcaatatctttgactggttgggccggagcctcacagctgtattcatgtggcctgggaaggacagccgctggctgccaagcctggtgctggcccggctggtgtttgtgccactgctgctgctgtgcaacattaagccccgccgctacctgactgtggtcttcgagcacgatgcctggttcatcttcttcatggctgcctttgccttctccaacggctacctcgccagcctctgcatgtgcttcgggcccaagaaagtgaagccagctgaggcagagaccgcaggagccatcatggccttcttcctgtgtctgggtctggcactgggggctgttttctccttcctgttccgggcaattgtgtgacaaaggatggacagaaggactgcctgcctccctccctgtctgcctcctgccccttccttctgccaggggtgatcctgagtggtctggcggttttttcttctaactgacttctgctttccacggcgtgtgctgggcccggatctccaggccctggggagggagcctctggacggacagtggggacattgtgggtttggggctcagagtcgagggacggggtgtagcctcggcatttgcttgagtttctccactcttggctctgactgatccctgcttgtgcaggccagtggaggctcttgggcttggagaacacgtgtgtctctgtgtatgtgtctgtgtgtctgcgtccgtgtctgtcagactgtctgcctgtcctggggtggctaggagctgggtctgaccgttgtatggtttgacctgatatactccattctcccctgcgcctcctcctctgtgttctctccatgtccccctcccaactccccatgcccagttcttacccatcatgcaccctgtacagttgccacgttactgccttttttaaaaatatatttgacagaaaccaggtgccttcagaggctctctgatttaaataaacctttcttgtttttttctcc

SEQ ID NO: 346983 - DNA, 2467 bp, Homo sapiens
ctgcagcgagagcgcgcggatctcagcgcgggagcagtgcttctgcggcaggcccctgagggagggagctgtcagccagggaaaaccgagaacaccatcaccatgacaaccagtcaccagcctcaggacagatacaaagctgtctggcttatcttcttcatgctgggtctgggaacgctgctcccgtggaattttttcatgacggccactcagtatttcacaaaccgcctggacatgtcccagaatgtgtccttggtcactgctgaactgagcaaggacgcccaggcgtcagccgcccctgcagcacccttgcctgagcggaactctctcagtgccatcttcaacaatgtcatgaccctatgtgccatgctgcccctgctgttattcacctacctcaactccttcctgcatcagaggatcccccagtccgtacggatcctgggcagcctggtggccatcctgctggtgtttctgatcactgccatcctggtgaaggtgcagctggatgctctgcccttctttgtcatcaccatgatcaagatcgtgctcattaattcatttggtgccatcctgcagggcagcctgtttggtctggctggccttctgcctgccagctacacggcccccatcatgagtggccagggcctagcaggcttctttgcctccgtggccatgatctgcgctattgccagtggctcggagctatcagaaagtgccttcggctactttatcacagcctgtgctgttatcattttgaccatcatctgttacctgggcctgccccgcctggaattctaccgctactaccagcagctcaagcttgaaggacccggggagcaggagaccaagttggacctcattagcaaaggagaggagccaagagcaggcaaagaggaatctggagtttcagtctccaactctcagcccaccaatgaaagccactctatcaaagccatcctgaaaaatatctcagtcctggctttctctgtctgcttcatcttcactatcaccattgggatgtttccagccgtgactgttgaggtcaagtccagcatcgcaggcagcagcacctgggaacgttacttcattcctgtgtcctgtttcttgactttcaatatctttgactggttgggccggagcctcacagctgtattcatgtgggtaagtggaggaagagggccccaggcccctgtgggaagtaagagtccagcctggacccagagagggaacccaagaaagtatggtagtaaggggaccatttgttttaaagtcgaggcataatttatgtatagttaagtacaagtcttaagtgtacaacttaatgaatatatgtatatacacatacctgcccagatcgagatgtagaatatttccagcactccagaaggctccaccatgcccctttcaagagtaaccccctaaggagaaccaggctttgaggtttcagttcagatcctgaggggccccagatggatccttgggggcctggctgtgccctggggtggcggcctgggctgaggcctgcctggtgcccacagcctgggaaggacagccgctggctgccaagcctggtgctggcccggctggtgtttgtgccactgctgctgctgtgcaacattaagccccgccgctacctgactgtggtcttcgagcacgatgcctggttcatcttcttcatggctgcctttgccttctccaacggctacctcgccagcctctgcatgtgcttcgggcccaagaaagtgaagccagctgaggcagagaccgcaggagccatcatggccttcttcctgtgtctgggtctggcactgggggctgttttctccttcctgttccgggcaattgtgtgacaaaggatggacagaaggactgcctgcctccctccctgtctgcctcctgccccttccttctgccaggggtgatcctgagtggtctggcggttttttcttctaactgacttctgctttccacggcgtgtgctgggcccggatctccaggccctggggagggagcctctggacggacagtggggacattgtgggtttggggctcagagtcgagggacggggtgtagcctcggcatttgcttgagtttctccactcttggctctgactgatccctgcttgtgcaggccagtggaggctcttgggcttggagaacacgtgtgtctctgtgtatgtgtctgtgtgtctgcgtccgtgtctgtcagactgtctgcctgtcctggggtggctaggagctgggtctgaccgttgtatggtttgacctgatatactccattctcccctgcgcctcctcctctgtgttctctccatgtccccctcccaactccccatgcccagttcttacccatcatgcaccctgtacagttgccacgttactgccttttttaaaaatatatttgacagaaaccaggtgccttcagaggctctctgatttaaataaacctttcttgtttttttctcc

SEQ ID NO: 346984 - DNA, 2512 bp, Homo sapiens
ttgcagcctctcttccgcccggcggccacaccggtcaggcccggcgcgggctgcgctctccagctgtggctatggccccagccccgagatgaggagggagagaactaggggcccgcaggcctgggaatttccgtcccccaccaagtccggatgctcactccaaagtctcagcaggcccctgagggagggagctgtcagccagggaaaaccgagaacaccatcaccatgacaaccagtcaccagcctcaggacagatacaaagctgtctggcttatcttcttcatgctgggtctgggaacgctgctcccgtggaattttttcatgacggccactcagtatttcacaaaccgcctggacatgtcccagaatgtgtccttggtcactgctgaactgagcaaggacgcccaggcgtcagccgcccctgcagcacccttgcctgagcggaactctctcagtgccatcttcaacaatgtcatgaccctatgtgccatgctgcccctgctgttattcacctacctcaactccttcctgcatcagaggatcccccagtccgtacggatcctgggcagcctggtggccatcctgctggtgtttctgatcactgccatcctggtgaaggtgcagctggatgctctgcccttctttgtcatcaccatgatcaagatcgtgctcattaattgtaagctgggccaggagggggcctatgggaggaggcatgcccaactacccccactcttttttcagacccagcgttagccagagagaagcccagcctccgcctggagggagtggatgctgtgagcagctgggattcagaggcctgagtgggcctggaccaggctgggagggggcagagagaagggcagctcagcctcaaggctcaccaagagtaaagtaggaatgacagggatctgtcttcttgggcacccccaaccaccagccctagctcccctgctcatgcccgccctgtttccccagcatttggtgccatcctgcagggcagcctgtttggtctggctggccttctgcctgccagctacacggcccccatcatgagtggccagggcctagcaggcttctttgcctccgtggccatgatctgcgctattgccagtggctcggagctatcagaaagtgccttcggctactttatcacagcctgtgctgttatcattttgaccatcatctgttacctgggcctgccccgcctggaattctaccgctactaccagcagctcaagcttgaaggacccggggagcaggagaccaagttggacctcattagcaaaggagaggagccaagagcaggcaaagaggaatctggagtttcagtctccaactctcagcccaccaatgaaagccactctatcaaagccatcctgaaaaatatctcagtcctggctttctctgtctgcttcatcttcactatcaccattgggatgtttccagccgtgactgttgaggtcaagtccagcatcgcaggcagcagcacctgggaacgttacttcattcctgtgtcctgtttcttgactttcaatatctttgactggttgggccggagcctcacagctgtattcatgtggcctgggaaggacagccgctggctgccaagcctggtgctggcccggctggtgtttgtgccactgctgctgctgtgcaacattaagccccgccgctacctgactgtggtcttcgagcacgatgcctggttcatcttcttcatggctgcctttgccttctccaacggctacctcgccagcctctgcatgtgcttcgggcccaagaaagtgaagccagctgaggcagagaccgcaggagccatcatggccttcttcctgtgtctgggtctggcactgggggctgttttctccttcctgttccgggcaattgtgtgacaaaggatggacagaaggactgcctgcctccctccctgtctgcctcctgccccttccttctgccaggggtgatcctgagtggtctggcggttttttcttctaactgacttctgctttccacggcgtgtgctgggcccggatctccaggccctggggagggagcctctggacggacagtggggacattgtgggtttggggctcagagtcgagggacggggtgtagcctcggcatttgcttgagtttctccactcttggctctgactgatccctgcttgtgcaggccagtggaggctcttgggcttggagaacacgtgtgtctctgtgtatgtgtctgtgtgtctgcgtccgtgtctgtcagactgtctgcctgtcctggggtggctaggagctgggtctgaccgttgtatggtttgacctgatatactccattctcccctgcgcctcctcctctgtgttctctccatgtccccctcccaactccccatgcccagttcttacccatcatgcaccctgtacagttgccacgttactgccttttttaaaaatatatttgacagaaaccaggtgccttcagaggctctctgatttaaataaacctttcttgtttttttctcc

SEQ ID NO: 346985 - DNA, 1591 bp, Homo sapiens
aaattaaggctagtacgaggctggtgtaaatcggccgagggatcgcgctcattaattcatttggtgccatcctgcagggcagcctgtttggtctggctggccttctgcctgccagctacacggcccccatcatgagtggccagggcctagcaggcttctttgcctccgtggccatgatctgcgctattgccagtggctcggagctatcagaaagtgccttcggctactttatcacagcctgtgctgttatcattttgaccatcatctgttacctgggcctgccccgcctggaattctaccgctactaccagcagctcaagcttgaaggacccggggagcaggagaccaagttggacctcattagcaaaggagaggagccaagagcaggcaaagaggaatctggagtttcagtctccaactctcagcccaccaatgaaagccactctatcaaagccatcctgaaaaatatctcagtcctggctttctctgtctgcttcatcttcactatcaccattgggatgtttccagccgtgactgttgaggtcaagtccagcatcgcaggcagcagcacctgggaacgttacttcattcctgtgtcctgtttcttgactttcaatatctttgactggttgggccggagcctcacagctgtattcatgtggcctgggaaggacagccgctggctgccaagcctggtgctggcccggctggtgtttgtgccactgctgctgctgtgcaacattaagccccgccgctacctgactgtggtcttcgagcacgatgcctggttcatcttcttcatggctgcctttgccttctccaacggctacctcgccagcctctgcatgtgcttcgggcccaagaaagtgaagccagctgaggcagagaccgcaggagccatcatggccttcttcctgtgtctgggtctggcactgggggctgttttctccttcctgttccgggcaattgtgtgacaaaggatggacagaaggactgcctgcctccctccctgtctgcctcctgccccttccttctgccaggggtgatcctgagtggtctggcggttttttcttctaactgacttctgctttccacggcgtgtgctgggcccggatctccaggccctggggagggagcctctggacggacagtggggacattgtgggtttggggctcagagtcgagggacggggtgtagcctcggcatttgcttgagtttctccactcttggctctgactgatccctgcttgtgcaggccagtggaggctcttgggcttggagaacacgtgtgtctctgtgtatgtgtctgtgtgtctgcgtccgtgtctgtcagactgtctgcctgtcctggggtggctaggagctgggtctgaccgttgtatggtttgacctgatatactccattctcccctgcgcctcctcctctgtgttctctccatgtccccctcccaactccccatgcccagttcttacccatcatgcaccctgtacagttgccacgttactgccttttttaaaaatatatttgacagaaaccaggtgccttcagaggctctctgatttaaataaacctttcttgtttttttctcc

SEQ ID NO: 346986 - DNA, 2029 bp, Homo sapiens
ctgcagcgagagcgcgcggatctcagcgcgggagcagtgcttctgcggcaggcccctgagggagggagctgtcagccagggaaaaccgagaacaccatcaccatgacaaccagtcaccagcctcaggacagatacaaagctgtctggcttatcttcttcatgctgggtctgggaacgctgctcccgtggaattttttcatgacggccactcagtatttcacaaaccgcctggacatgtcccagaatgtgtccttggtcactgctgaactgagcaaggacgcccaggcgtcagccgcccctgcagcacccttgcctgagcggaactctctcagtgccatcttcaacaatgtcatgaccctatgtgccatgctgcccctgctgttattcacctacctcaactccttcctgcatcagaggatcccccagtccgtacggatcctgggcagcctggtggccatcctgctggtgtttctgatcactgccatcctggtgaaggtgcagctggatgctctgcccttctttgtcatcaccatgatcaagatcgtgctcattaattcatttggtgccatcctgcagggcagcctgtttggtctggctggccttctgcctgccagctacacggcccccatcatgagtggccagggcctagcaggcttctttgcctccgtggccatgatctgcgctattgccagtggctcggagctatcagaaagtgccttcggctactttatcacagcctgtgctgttatcattttgaccatcatctgttacctgggcctgccccgcctggaattctaccgctactaccagcagctcaagcttgaaggacccggggagcaggagaccaagttggacctcattagcaaaggagaggagccaagagcaggcaaagaggaatctggagtttcagtctccaactctcagcccaccaatgaaagccactctatcaaagccatcctgaaaaatatctcagtcctggctttctctgtctgcttcatcttcactatcaccattgggatgtttccagccgtgactgttgaggtcaagtccagcatcgcaggcagcagcacctgggaacgttacttcattcctgtgtcctgtttcttgactttcaatatctttgactggttgggccggagcctcacagctgtattcatgtggcctgggaaggacagccgctggctgccaagcctggtgctggcccggctggtgtttgtgccactgctgctgctgtgcaacattaagccccgccgctacctgactgtggtcttcgagcacgatgcctggttcatcttcttcatggctgcctttgccttctccaacggctacctcgccagcctctgcatgtgcttcgggcccaagaaagtgaagccagctgaggcagagaccgcaggagccatcatggccttcttcctgtgtctgggtctggcactgggggctgttttctccttcctgttccgggcaattgtgtgacaaaggatggacagaaggactgcctgcctccctccctgtctgcctcctgccccttccttctgccaggggtgatcctgagtggtctggcggttttttcttctaactgacttctgctttccacggcgtgtgctgggcccggatctccaggccctggggagggagcctctggacggacagtggggacattgtgggtttggggctcagagtcgagggacggggtgtagcctcggcatttgcttgagtttctccactcttggctctgactgatccctgcttgtgcaggccagtggaggctcttgggcttggagaacacgtgtgtctctgtgtatgtgtctgtgtgtctgcgtccgtgtctgtcagactgtctgcctgtcctggggtggctaggagctgggtctgaccgttgtatggtttgacctgatatactccattctcccctgcgcctcctcctctgtgttctctccatgtccccctcccaactccccatgcccagttcttacccatcatgcaccctgtacatgcaaactaatctgaaccatctagtagctggttccct

SEQ ID NO: 346987 - DNA, 785 bp, Homo sapiens
ggtgctctgcggatcttaccgactagccgacagctctgcatgtgtttcgggcccatgaaagtgaagccagctgaggcagagaccgcaggagccatcatggccttcttcctgtgtctgggtctggcactgggggctgttttctccttcctgttccgggcaattgtgtgacaaaggatggacagaaggactgcctgcctccctccctgtctgcctcctgccccttccttctgccaggggtgatcctgagtggtctggcggttttttcttctaactgacttctgctttccacggcgtgtgctgggcccggatctccaggccctggggagggagcctctggacggacagtggggacattgtgggtttggggctcagagtcgagggacggggtgtagcctcggcatttgcttgagtttctccactcttggctctgactgatccctgcttgtgcaggccagtggaggctcttgggcttggagaacacgtgtgtctctgtgtatgtgtctgtgtgtctgcgtccgtgtctgtcagactgtctgcctgtcctggggtggctaggagctgggtctgaccgttgtatggtttgacctgatatactccattctcccctgcgcctcctcctctgtgttctctccatgtccccctcccaactccccatgcccagttcttacccatcatgcaccctgtacagttgccacgttactgccttttttaaaaatatatttgacagaaaccaggtgccttcagaggctctctgatttaaataaacctttcttgtttttttctcc

SEQ ID NO: 346988 - DNA, 1544 bp, Homo sapiens
ctgcagcgagagcgcgcggatctcagcgcgggagcagtgcttctgcggcaggcccctgagggagggagctgtcagccagggaaaaccgagaacaccatcaccatgacaaccagtcaccagcctcaggacagatacaaagctgtctggcttatcttcttcatgctgggtctgggaacgctgctcccgtggaattttttcatgacggccactcagtatttcacaaaccgcctggacatgtcccagaatgtgtccttggtcactgctgaactgagcaaggacgcccaggcgtcagccgcccctgcagcacccttgcctgagcggaactctctcagtgccatcttcaacaatgtcatgaccctatgtgccatgctgcccctgctgttattcacctacctcaactccttcctgcatcagaggatcccccagtccgtacggatcctgggcagcctggtggccatcctgctggtgtttctgatcactgccatcctggtgaaggtgcagctggatgctctgcccttctttgtcatcaccatgatcaagatcgtgctcattaattcatttggtgccatcctgcagggcagcctgtttggtctggctggccttctgcctgccagctacacggcccccatcatgagtggccagggcctagcaggcttctttgcctccgtggccatgatctgcgctattgccagtggctcggagctatcagaaagtgccttcggctactttatcacagcctgtgctgttatcattttgaccatcatctgttacctgggcctgccccgcctggaattctaccgctactaccagcagctcaagcttgaaggacccggggagcaggagaccaagttggacctcattagcaaaggagaggagccaagagcaggcaaagaggaatctggagtttcagtctccaactctcagcccaccaatgaaagccactctatcaaagccatcctgaaaaatatctcagtcctggctttctctgtctgcttcatcttcactatcaccattgggatgtttccagccgtgactgttgaggtcaagtccagcatcgcaggcagcagcacctgggaacgttacttcattcctgtgtcctgtttcttgactttcaatatctttgactggttgggccggagcctcacagctgtattcatgtggcctgggaaggacagccgctggctgccaagcctggtgctggcccggctggtgtttgtgccactgctgctgctgtgcaacattaagccccgccgctacctgactgtggtcttcgagcacgatgcctggttcatcttcttcatggctgcctttgccttctccaacggctacctcgccagcctctgcatgtgcttcgggcccaagtcctagctggtgcattaaaacaagaaataagagatacaagaatcagaagaggagaaaccaaactgtcattgttttcagatgatatggttgtacctataaaacaccaaaacttttatagacaaattaagaattaataagctagcttaccaacttgctcaatcaataaacaaaaattcaattgc

SEQ ID NO: 346989 - DNA, 424 bp, Homo sapiens
gagcaagcacgtgcggtttcctgcggctcacctgctcacatgctgcctggggtggggacttgtgtgtccctgtggctgtgagtttgtgtgcacctctggcccgtgtgtgctcacgtcagtagctttgtctgtgtatgtgtctgtgtgtctgcgtccgtgtctgtcagactgtctgcctgtcctggggtggctaggagctgggtctgaccgttgtatggtttgacctgatatactccattctcccctgcgcctcctcctctgtgttctctccatgtccccctcccaactccccatgcccagttcttacccatcatgcaccctgtacagttgccacgttactgccttttttaaaaatatatttgacagaaaccaggtgccttcagaggctctctgatttaaataaacctttcttgtttttttctcc

SEQ ID NO: 346990 - DNA, 425 bp, Homo sapiens
aatgcctgaggtgtttggactaaaggcagtgggaagcaatttcagattcttgagtgaggagtaacatgacctgaggctcctgggagaggccaggcccccgggtcttgagttgtagggatttggaggcgaggtctgggttagggttagagtacggctgggactggttaaggaggcgtctactttcaagtaatcccagccgttttggggaatgtttatgttgtcttctgttgctctgtcttccccacaacttggagatttcttccatcccgcaggagaggagccaagagcaggcaaagaggaatctggagtttcagtctccaactctcagcccaccaatgaaagccactctatcaaagccatcctgaaaaatatgtacgtaggggaggttatcctatcttctaccccttgtcctctttctctcctcc

SEQ ID NO: 346991 - DNA, 826 bp, Homo sapiens
gcgccaagcttacttgggtggaggtggagacaggtttgcaggaaggagtgaaagacaaccccaccatacacgttccctcaaggaggagaagccaggttggggttaggcagccaggatgggttgatcaacagaatgaggttcgacagtcaagttgctccaccccacccctccttccacccagaggctctgggctggggtacagccattctgaggtagccttgcccttccttccccgcttagggaaagtgaagccagctgaggcagagaccgcaggagccatcatggccttcttcctgtgtctgggtctggcactgggggctgttttctccttcctgttccgggcaattgtgtgacaaaggatggacagaaggactgcctgcctccctccctgtctgcctcctgccccttccttctgccaggggtgatcctgagtggtctggcggttttttcttctaactgacttctgctttccacggcgtgtgctgggcccggatctccaggccctggggagggagcctctggacggacagtggggacattgtgggtttggggctcagagtcgagggacggggtgtagcctcggcatttgcttgagtttctccactcttggctctgactgatccctgcttgtgcaggccagtggaggctcttgggcttggagaacacgtgtgtctctgtgtatgtgtctgtgtgtctgcgtccgtgtctgtcagactgtctgcctgtcctggggtggctaggagctgggtctgaccgttgtatggtttgacctgatatactccattctcccctgcgcctcctcctctgtgttctctccatgtccccc

SEQ ID NO: 346992 - DNA, 2209 bp, Homo sapiens
taggctagtacgaggctggttgtaattggccgaggcagcgcgggagcagtgcttctgcggcaggagcccgtggacaaggcccactgcctgagcctgaactaggagcacctcctagggactgcccaggcttgctctgctctgacccttctgctggccagtctgggcacctggcccctgagggagggagctgtcagccagggaaaaccgagaacaccatcaccatgacaaccagtcaccagcctcaggacagatacaaagctgtctggcttatcttcttcatgctgggtctgggaacgctgctcccgtggaattttttcatgacggccactcagtatttcacaaaccgcctggacatgtcccagaatgtgtccttggtcactgctgaactgagcaaggacgcccaggcgtcagccgcccctgcagcacccttgcctgagcggaactctctcagtgccatcttcaacaatgtcatgaccctatgtgccatgctgcccctgctgttattcacctacctcaactccttcctgcatcagaggatcccccagtccgtacggatcctgggcagcctggtggccatcctgctggtgtttctgatcactgccatcctggtgaaggtgcagctggatgctctgcccttctttgtcatcaccatgatcaagatcgtgctcattaattcatttggtgccatcctgcagggcagcctgtttggtctggctggccttctgcctgccagctacacggcccccatcatgagtggccagggcctagcaggcttctttgcctccgtggccatgatctgcgctattgccagtggctcggagctatcagaaagtgccttcggctactttatcacagcctgtgctgttatcattttgaccatcatctgttacctgggcctgccccgcctggaattctaccgctactaccagcagctcaagcttgaaggacccggggagcaggagaccaagttggacctcattagcaaaggagaggagccaagagcaggcaaagaggaatctggagtttcagtctccaactctcagcccaccaatgaaagccactctatcaaagccatcctgaaaaatatctcagtcctggctttctctgtctgcttcatcttcactatcaccattgggatgtttccagccgtgactgttgaggtcaagtccagcatcgcaggcagcagcacctgggaacgttacttcattcctgtgtcctgtttcttgactttcaatatctttgactggttgggccggagcctcacagctgtattcatgtggcctgggaaggacagccgctggctgccaagcctggtgctggcccggctggtgtttgtgccactgctgctgctgtgcaacattaagccccgccgctacctgactgtggtcttcgagcacgatgcctggttcatcttcttcatggctgcctttgccttctccaacggctacctcgccagcctctgcatgtgcttcgggcccaagaaagtgaagccagctgaggcagagaccgcaggagccatcatggccttcttcctgtgtctgggtctggcactgggggctgttttctccttcctgttccgggcaattgtgtgacaaaggatggacagaaggactgcctgcctccctccctgtctgcctcctgccccttccttctgccaggggtgatcctgagtggtctggcggttttttcttctaactgacttctgctttccacggcgtgtgctgggcccggatctccaggccctggggagggagcctctggacggacagtggggacattgtgggtttggggctcagagtcgagggacggggtgtagcctcggcatttgcttgagtttctccactcttggctctgactgatccctgcttgtgcaggccagtggaggctcttgggcttggagaacacgtgtgtctctgtgtatgtgtctgtgtgtctgcgtccgtgtctgtcagactgtctgcctgtcctggggtggctaggagctgggtctgaccgttgtatggtttgacctgatatactccattctcccctgcgcctcctcctctgtgttctctccatgtccccctcccaactccccatgcccagttcttacccatcatgcaccctgtacagttgccacgttactgccttttttaaaaatatatttgacagaaaccaggtgccttcagaggctctctgatttaaataaacctttcttgtttttttctcc

SEQ ID NO: 346993 - DNA, 2285 bp, Homo sapiens
ctgcagcgagagcgcgcggatctcagcgcgggagcagtgcttctgcggcaggcttctcagaatggggccccatgaagcctgagggactctctcctgataacaccctgtgccacctttttcattctggatccgcacccaggagcccgtggacaaggcccactgcctgagcctgaactaggagcacctcctagggactgcccaggcttgctctgctctgacccttctgctggccagtctgggcacctggcccctgagggagggagctgtcagccagggaaaaccgagaacaccatcaccatgacaaccagtcaccagcctcaggacagatacaaagctgtctggcttatcttcttcatgctgggtctgggaacgctgctcccgtggaattttttcatgacggccactcagtatttcacaaaccgcctggacatgtcccagaatgtgtccttggtcactgctgaactgagcaaggacgcccaggcgtcagccgcccctgcagcacccttgcctgagcggaactctctcagtgccatcttcaacaatgtcatgaccctatgtgccatgctgcccctgctgttattcacctacctcaactccttcctgcatcagaggatcccccagtccgtacggatcctgggcagcctggtggccatcctgctggtgtttctgatcactgccatcctggtgaaggtgcagctggatgctctgcccttctttgtcatcaccatgatcaagatcgtgctcattaattcatttggtgccatcctgcagggcagcctgtttggtctggctggccttctgcctgccagctacacggcccccatcatgagtggccagggcctagcaggcttctttgcctccgtggccatgatctgcgctattgccagtggctcggagctatcagaaagtgccttcggctactttatcacagcctgtgctgttatcattttgaccatcatctgttacctgggcctgccccgcctggaattctaccgctactaccagcagctcaagcttgaaggacccggggagcaggagaccaagttggacctcattagcaaaggagaggagccaagagcaggcaaagaggaatctggagtttcagtctccaactctcagcccaccaatgaaagccactctatcaaagccatcctgaaaaatatctcagtcctggctttctctgtctgcttcatcttcactatcaccattgggatgtttccagccgtgactgttgaggtcaagtccagcatcgcaggcagcagcacctgggaacgttacttcattcctgtgtcctgtttcttgactttcaatatctttgactggttgggccggagcctcacagctgtattcatgtggcctgggaaggacagccgctggctgccaagcctggtgctggcccggctggtgtttgtgccactgctgctgctgtgcaacattaagccccgccgctacctgactgtggtcttcgagcacgatgcctggttcatcttcttcatggctgcctttgccttctccaacggctacctcgccagcctctgcatgtgcttcgggcccaagaaagtgaagccagctgaggcagagaccgcaggagccatcatggccttcttcctgtgtctgggtctggcactgggggctgttttctccttcctgttccgggcaattgtgtgacaaaggatggacagaaggactgcctgcctccctccctgtctgcctcctgccccttccttctgccaggggtgatcctgagtggtctggcggttttttcttctaactgacttctgctttccacggcgtgtgctgggcccggatctccaggccctggggagggagcctctggacggacagtggggacattgtgggtttggggctcagagtcgagggacggggtgtagcctcggcatttgcttgagtttctccactcttggctctgactgatccctgcttgtgcaggccagtggaggctcttgggcttggagaacacgtgtgtctctgtgtatgtgtctgtgtgtctgcgtccgtgtctgtcagactgtctgcctgtcctggggtggctaggagctgggtctgaccgttgtatggtttgacctgatatactccattctcccctgcgcctcctcctctgtgttctctccatgtccccctcccaactccccatgcccagttcttacccatcatgcaccctgtacagttgccacgttactgccttttttaaaaatatatttgacagaaaccaggtgccttcagaggctctctgatttaaataaacctttcttgtttttttctcc

SEQ ID NO: 346994 - DNA, 2309 bp, Homo sapiens
ccgcgcagcacgtggcgcgcacgggcgcagggagcctgaggaccctgcggggaccgggacccaagctgggcggggcggcctggctcccgggcctaaaacaggctgcggtcacgttgacctccgcaaggggcaggcgagtggacgggtgatccccatcgatctggagcccgtggacaaggcccactgcctgagcctgaactaggagcacctcctagggactgcccaggcttgctctgctctgacccttctgctggccagtctgggcacctggcccctgagggagggagctgtcagccagggaaaaccgagaacaccatcaccatgacaaccagtcaccagcctcaggacagatacaaagctgtctggcttatcttcttcatgctgggtctgggaacgctgctcccgtggaattttttcatgacggccactcagtatttcacaaaccgcctggacatgtcccagaatgtgtccttggtcactgctgaactgagcaaggacgcccaggcgtcagccgcccctgcagcacccttgcctgagcggaactctctcagtgccatcttcaacaatgtcatgaccctatgtgccatgctgcccctgctgttattcacctacctcaactccttcctgcatcagaggatcccccagtccgtacggatcctgggcagcctggtggccatcctgctggtgtttctgatcactgccatcctggtgaaggtgcagctggatgctctgcccttctttgtcatcaccatgatcaagatcgtgctcattaattcatttggtgccatcctgcagggcagcctgtttggtctggctggccttctgcctgccagctacacggcccccatcatgagtggccagggcctagcaggcttctttgcctccgtggccatgatctgcgctattgccagtggctcggagctatcagaaagtgccttcggctactttatcacagcctgtgctgttatcattttgaccatcatctgttacctgggcctgccccgcctggaattctaccgctactaccagcagctcaagcttgaaggacccggggagcaggagaccaagttggacctcattagcaaaggagaggagccaagagcaggcaaagaggaatctggagtttcagtctccaactctcagcccaccaatgaaagccactctatcaaagccatcctgaaaaatatctcagtcctggctttctctgtctgcttcatcttcactatcaccattgggatgtttccagccgtgactgttgaggtcaagtccagcatcgcaggcagcagcacctgggaacgttacttcattcctgtgtcctgtttcttgactttcaatatctttgactggttgggccggagcctcacagctgtattcatgtggcctgggaaggacagccgctggctgccaagcctggtgctggcccggctggtgtttgtgccactgctgctgctgtgcaacattaagccccgccgctacctgactgtggtcttcgagcacgatgcctggttcatcttcttcatggctgcctttgccttctccaacggctacctcgccagcctctgcatgtgcttcgggcccaagaaagtgaagccagctgaggcagagaccgcaggagccatcatggccttcttcctgtgtctgggtctggcactgggggctgttttctccttcctgttccgggcaattgtgtgacaaaggatggacagaaggactgcctgcctccctccctgtctgcctcctgccccttccttctgccaggggtgatcctgagtggtctggcggttttttcttctaactgacttctgctttccacggcgtgtgctgggcccggatctccaggccctggggagggagcctctggacggacagtggggacattgtgggtttggggctcagagtcgagggacggggtgtagcctcggcatttgcttgagtttctccactcttggctctgactgatccctgcttgtgcaggccagtggaggctcttgggcttggagaacacgtgtgtctctgtgtatgtgtctgtgtgtctgcgtccgtgtctgtcagactgtctgcctgtcctggggtggctaggagctgggtctgaccgttgtatggtttgacctgatatactccattctcccctgcgcctcctcctctgtgttctctccatgtccccctcccaactccccatgcccagttcttacccatcatgcaccctgtacagttgccacgttactgccttttttaaaaatatatttgacagaaaccaggtgccttcagaggctctctgatttaaataaacctttcttgtttttttctcc

SEQ ID NO: 346995 - DNA, 2202 bp, Homo sapiens
ccgcgcagcacgtggcgcgcacgggcgcagggagcctgaggaccctgcggggaccgggacccaagctgggcggggcggcctggctcccgggcctaaaacaggctgcggtcacgttgacctccgcaaggggcaggcgagtggacgggtgatccccatcgatctggcccctgagggagggagctgtcagccagggaaaaccgagaacaccatcaccatgacaaccagtcaccagcctcaggacagatacaaagctgtctggcttatcttcttcatgctgggtctgggaacgctgctcccgtggaattttttcatgacggccactcagtatttcacaaaccgcctggacatgtcccagaatgtgtccttggtcactgctgaactgagcaaggacgcccaggcgtcagccgcccctgcagcacccttgcctgagcggaactctctcagtgccatcttcaacaatgtcatgaccctatgtgccatgctgcccctgctgttattcacctacctcaactccttcctgcatcagaggatcccccagtccgtacggatcctgggcagcctggtggccatcctgctggtgtttctgatcactgccatcctggtgaaggtgcagctggatgctctgcccttctttgtcatcaccatgatcaagatcgtgctcattaattcatttggtgccatcctgcagggcagcctgtttggtctggctggccttctgcctgccagctacacggcccccatcatgagtggccagggcctagcaggcttctttgcctccgtggccatgatctgcgctattgccagtggctcggagctatcagaaagtgccttcggctactttatcacagcctgtgctgttatcattttgaccatcatctgttacctgggcctgccccgcctggaattctaccgctactaccagcagctcaagcttgaaggacccggggagcaggagaccaagttggacctcattagcaaaggagaggagccaagagcaggcaaagaggaatctggagtttcagtctccaactctcagcccaccaatgaaagccactctatcaaagccatcctgaaaaatatctcagtcctggctttctctgtctgcttcatcttcactatcaccattgggatgtttccagccgtgactgttgaggtcaagtccagcatcgcaggcagcagcacctgggaacgttacttcattcctgtgtcctgtttcttgactttcaatatctttgactggttgggccggagcctcacagctgtattcatgtggcctgggaaggacagccgctggctgccaagcctggtgctggcccggctggtgtttgtgccactgctgctgctgtgcaacattaagccccgccgctacctgactgtggtcttcgagcacgatgcctggttcatcttcttcatggctgcctttgccttctccaacggctacctcgccagcctctgcatgtgcttcgggcccaagaaagtgaagccagctgaggcagagaccgcaggagccatcatggccttcttcctgtgtctgggtctggcactgggggctgttttctccttcctgttccgggcaattgtgtgacaaaggatggacagaaggactgcctgcctccctccctgtctgcctcctgccccttccttctgccaggggtgatcctgagtggtctggcggttttttcttctaactgacttctgctttccacggcgtgtgctgggcccggatctccaggccctggggagggagcctctggacggacagtggggacattgtgggtttggggctcagagtcgagggacggggtgtagcctcggcatttgcttgagtttctccactcttggctctgactgatccctgcttgtgcaggccagtggaggctcttgggcttggagaacacgtgtgtctctgtgtatgtgtctgtgtgtctgcgtccgtgtctgtcagactgtctgcctgtcctggggtggctaggagctgggtctgaccgttgtatggtttgacctgatatactccattctcccctgcgcctcctcctctgtgttctctccatgtccccctcccaactccccatgcccagttcttacccatcatgcaccctgtacagttgccacgttactgccttttttaaaaatatatttgacagaaaccaggtgccttcagaggctctctgatttaaataaacctttcttgtttttttctcc

SEQ ID NO: 346996 - DNA, 3134 bp, Homo sapiens
ctgcagcgagagcgcgcggatctcagcgcgggagcagtgcttctgcggcaggcccctgagggagggagctgtcagccagggaaaaccgagaacaccatcaccatgacaaccagtcaccagcctcaggacagatacaaagctgtctggcttatcttcttcatgctgggtctgggaacgctgctcccgtggaattttttcatgacggccactcagtatttcacaaaccgcctggacatgtcccagaatgtgtccttggtcactgctgaactgagcaaggacgcccaggcgtcagccgcccctgcagcacccttgcctgagcggaactctctcagtgccatcttcaacaatgtcatgaccctatgtgccatgctgcccctgctgttattcacctacctcaactccttcctgcatcagaggatcccccagtccgtacggatcctgggcagcctggtggccatcctgctggtgtttctgatcactgccatcctggtgaaggtgcagctggatgctctgcccttctttgtcatcaccatgatcaagatcgtgctcattaattcatttggtgccatcctgcagggcagcctgtttggtctggctggccttctgcctgccagctacacggcccccatcatgagtggccagggcctagcaggcttctttgcctccgtggccatgatctgcgctattgccagtggctcggagctatcagaaagtgccttcggctactttatcacagcctgtgctgttatcattttgaccatcatctgttacctgggcctgccccgcctggaattctaccgctactaccagcagctcaagcttgaaggacccggggagcaggagaccaagttggacctcattagcaaaggagaggagccaagagcaggcaaagaggaatctggagtttcagtctccaactctcagcccaccaatgaaagccactctatcaaagccatcctgaaaaatatctcagtcctggctttctctgtctgcttcatcttcactatcaccattgggatgtttccagccgtgactgttgaggtcaagtccagcatcgcaggcagcagcacctgggaacgttacttcattcctgtgtcctgtttcttgactttcaatatctttgactggttgggccggagcctcacagctgtattcatgtggcctgggaaggacagccgctggctgccaagcctggtgctggcccggctggtgtttgtgccactgctgctgctgtgcaacattaagccccgccgctacctgactgtggtcttcgagcacgatgcctggttcatcttcttcatggctgcctttgccttctccaacggctacctcgccagcctctgcatgtgcttcgggcccaagaaagtgaagccagctgaggcagagaccgcaggagccatcatggccttcttcctgtgtctgggtctggcactgggggctgttttctccttcctgttccgggcaattgtgtgacaaaggatggacagaaggactgcctgcctccctccctgtctgcctcctgccccttccttctgccaggggtgatcctgagtggtctggcggttttttcttctaactgacttctgctttccacggcgtgtgctgggcccggatctccaggccctggggagggagcctctggacggacagtggggacattgtgggtttggggctcagagtcgagggacggggtgtagcctcggcatttgcttgagtttctccactcttggctctgactgatccctgcttgtgcaggccagtggaggctcttgggcttggagaacacgtgtgtctctgtgtatgtgtctgtgtgtctgcgtccgtgtctgtcagactgtctgcctgtcctggggtggctaggagctgggtctgaccgttgtatggtttgacctgatatactccattctcccctgcgcctcctcctctgtgttctctccatgtccccctcccaactccccatgcccagttcttacccatcatgcaccctgtacagttgccacgttactgccttttttaaaaatatatttgacagaaaccaggtgccttcagaggctctctgatttaaataaacctttcttgtttttttctccatggctccctgtgtcctccagccgtggcttcatgccctggagtgggtagagggctggcagcctgagtctgggagatgagcatgacccagctgggccctggccaggactggacctgggtccaagggggaggaggggggagtagtcctcttggcctcagaggggctgcaatgccccctgctggggccacaggggagggacaggcctggaaccagaacaccaagactgttagccaagactaagaacgggtttttctttgctgcttcattctttctttcataggacagaggatggagatagctccccatctttcctttgtcttcactgccagcccctccactctgtccccagccccagcaatgaactctgcaaaactggccagctcctggcatactcccataccaccaggcaggaagaggccgaggcctgagggttctcccctacctggcacccagccttaacaccaaagctcagcctgccagacttcctggggaacaagggccctgtgtgtctgcacagtgaaaccaacccttcccttctcaacacaaactctggcctagggaggggtgggttgttatggaactatgagtgtctcagtggagaaggccctaccactgggacccccatctcaagaatgacctgactggaagtgagaccagagctctggccacagtgcagcacccctgcaatctgcattccttaccctcccacaagtctcagactcctcccagaaagcagaagacattcctgaattctcagcgcaggctgctcactcagccctggccagcagatggctacagagttggcacctttgtcagcgcttcctttctcactggagtttaatttaattgagaacttcaggcctcattaagggctgttagcgcatttttaaggctctttgatgagctctgaagccctaatggggtagctaagtataccagggcactgggaactgaagttcatgtgctattaatcatttgtcagaccagagtatttatctgcggtgctggaaaacaaggtattccttttggatcaggctcaaaagct

SEQ ID NO: 346997 - DNA, 2171 bp, Homo sapiens
ctgcagcgagagcgcgcggatctcagcgcgggagcagtgcttctgcggcaggcccctgagggagggagctgtcagccagggaaaaccgagaacaccatcaccatgacaaccagtcaccagcctcaggacagatacaaagctgtctggcttatcttcttcatgctgggtctgggaacgctgctcccgtggaattttttcatgacggccactcagtatttcacaaaccgcctggacatgtcccagaatgtgtccttggtcactgctgaactgagcaaggacgcccaggcgtcagccgcccctgcagcacccttgcctgagcggaactctctcagtgccatcttcaacaatgtcatgaccctatgtgccatgctgcccctgctgttattcacctacctcaactccttcctgcatcagaggatcccccagtccgtacggatcctgggcagcctggtggccatcctgctggtgtttctgatcactgccatcctggtgaaggtgcagctggatgctctgcccttctttgtcatcaccatgatcaagatcgtgctcattaattcatttggtgccatcctgcagggcagcctgtttggtctggctggccttctgcctgccagctacacggcccccatcatgagtggccagggcctagcaggcttctttgcctccgtggccatgatctgcgctattgccagtggctcggagctatcagaaagtgccttcggctactttatcacagcctgtgctgttatcattttgaccatcatctgttacctgggcctgccccgcctggaattctaccgctactaccagcagctcaagcttgaaggacccggggagcaggagaccaagttggacctcattagcaaaggagaggagccaagagcaggcaaagaggaatctggagtttcagtctccaactctcagcccaccaatgaaagccactctatcaaagccatcctgaaaaatatctcagtcctggctttctctgtctgcttcatcttcactatcaccattgggatgtttccagccgtgactgttgaggtcaagtccagcatcgcaggcagcagcacctgggaacgttacttcattcctgtgtcctgtttcttgactttcaatatctttgactggttgggccggagcctcacagctgtattcatgtggcctgggaaggacagccgctggctgccaagcctggtgctggcccggctggtgtttgtgccactgctgctgctgtgcaacattaagccccgccgctacctgactgtggtcttcgagcacgatgcctggttcatcttcttcatggctgcctttgccttctccaacggctacctcgccagcctctgcatgtgcttcgggcccaagaaagtgaagccagctgaggcagagaccgcaggagccatcatggccttcttcctgtgtctgggtctggcactgggggctgttttctccttcctgttccgggcaattgtgtgacaaaggatggacagaaggactgcctgcctccctccctgtctgcctcctgccccttccttctgccaggggtgatcctgagtggtctggcggttttttcttctaactgacttctgctttccacggcgtgtgctgggcccggatctccaggccctggggagggagcctctggacggacagtggggacattgtgggtttggggctcagagtcgagggacggggtgtagcctcggcatttgcttgagtttctccactcttggctctgactgatccctgcttgtgcaggccagtggaggctcttgggcttggagaacacgtgtgtctctgtgtatgtgtctgtgtgtctgcgtccgtgtctgtcagactgtctgcctgtcctggggtggctaggagctgggtctgaccgttgtatggtttgacctgatatactccattctcccctgcgcctcctcctctgtgttctctccatgtccccctcccaactccccatgcccagttcttacccatcatgcaccctgtacagttgccacgttactgccttttttaaaaatatatttgacagaaaccaggtgccttcagaggctctctgatttaaataaacctttcttgtttttttctcctccctccaatggcaaccaaacaacacagtagcgaatgatacacagattgcttacccaaatcatagtacaacaagagggggg

SEQ ID NO: 346998 - DNA, 2431 bp, Homo sapiens
ctgcagcgagagcgcgcggatctcagcgcgggagcagtgcttctgcggcaggcccctgagggagggagctgtcagccagggaaaaccgagaacaccatcaccatgacaaccagtcaccagcctcaggacagatacaaagctgtctggcttatcttcttcatgctgggtctgggaacgctgctcccgtggaattttttcatgacggccactcagtatttcacaaaccgcctggacatgtcccagaatgtgtccttggtcactgctgaactgagcaaggacgcccaggcgtcagccgcccctgcagcacccttgcctgagcggaactctctcagtgccatcttcaacaatgtcatgaccctatgtgccatgctgcccctgctgttattcacctacctcaactccttcctgcatcagaggatcccccagtccgtacggatcctgggcagcctggtggccatcctgctggtgtttctgatcactgccatcctggtgaaggtgcagctggatgctctgcccttctttgtcatcaccatgatcaagatcgtgctcattaattcatttggtgccatcctgcagggcagcctgtttggtctggctggccttctgcctgccagctacacggcccccatcatgagtggccagggcctagcaggcttctttgcctccgtggccatgatctgcgctattgccagtggctcggagctatcagaaagtgccttcggctactttatcacagcctgtgctgttatcattttgaccatcatctgttacctgggcctgccccgcctggaattctaccgctactaccagcagctcaagcttgaaggacccggggagcaggagaccaagttggacctcattagcaaaggagaggagccaagagcaggcaaagaggaatctggagtttcagtctccaactctcagcccaccaatgaaagccactctatcaaagccatcctgaaaaatatctcagtcctggctttctctgtctgcttcatcttcactatcaccattgggatgtttccagccgtgactgttgaggtcaagtccagcatcgcaggcagcagcacctgggaacgttacttcattcctgtgtcctgtttcttgactttcaatatctttgactggttgggccggagcctcacagctgtattcatgtggcctgggaaggacagccgctggctgccaagcctggtgctggcccggctggtgtttgtgccactgctgctgctgtgcaacattaagccccgccgctacctgactgtggtcttcgagcacgatgcctggttcatcttcttcatggctgcctttgccttctccaacggctacctcgccagcctctgcatgtgcttcgggcccaagaaagtgaagccagctgaggcagagaccgcaggagccatcatggccttcttcctgtgtctgggtctggcactgggggctgttttctccttcctgttccgggcaattgtgtgacaaaggatggacagaaggactgcctgcctccctccctgtctgcctcctgccccttccttctgccaggggtgatcctgagtggtctggcggttttttcttctaactgacttctgctttccacggcgtgtgctgggcccggatctccaggccctggggagggagcctctggacggacagtggggacattgtgggtttggggctcagagtcgagggacggggtgtagcctcggcatttgcttgagtttctccactcttggctctgactgatccctgcttgtgcaggccagtggaggctcttgggcttggagaacacgtgtgtctctgtgtatgtgtctgtgtgtctgcgtccgtgtctgtcagactgtctgcctgtcctggggtggctaggagctgggtctgaccgttgtatggtttgacctgatatactccattctcccctgcgcctcctcctctgtgttctctccatgtccccctcccaactccccatgcccagttcttacccatcatgcaccctgtacagttgccacgttactgccttttttaaaaatatatttgacagaaaccaggaaaaaaaaaaaaaaaaaaaaaaaaaaaaaaaaaaaaaaaaaaaaaaaaaaaaaaaaaaaaaaggggggggggggcacaaaaaatcccccgggggggggccatgggcgacccacgtttgtttggttgaaaaagggggggtccataagggggggggttattttaaaagagagcacgagggcgcgggattaaaaacagggatggggtggaggggaaaaaggtgagcggggaatattgtggggaagagaacccatctgtgcgggggggtgcaaacatgggggaacattccacggaggaattgaacggtcgagggaaataaaaattcgagaggtctttgggtgtaaccaacgtgtaatgtgtggtagaaaagagtgggtgggggttgtgtgacata

SEQ ID NO: 346999 - DNA, 2428 bp, Homo sapiens
ttgcagcctctcttccgcccggcggccacaccggtcaggcccggcgcgggctgcgctctccagctgtggctatggccccagccccgagatgaggagggagagaactaggggcccgcaggcctgggaatttccgtcccccaccaagtccggatgctcactccaaagtctcagcaggcccctgagggagggagctgtcagccagggaaaaccgagaacaccatcaccatgacaaccagtcaccagcctcaggacagatacaaagctgtctggcttatcttcttcatgctgggtctgggaacgctgctcccgtggaattttttcatgacggccactcagtatttcacaaaccgcctggacatgtcccagaatgtgtccttggtcactgctgaactgagcaaggacgcccaggcgtcagccgcccctgcagcacccttgcctgagcggaactctctcagtgccatcttcaacaatgtcatgaccctatgtgccatgctgcccctgctgttattcacctacctcaactccttcctgcatcagaggatcccccagtccgtacggatcctgggcagcctggtggccatcctgctggtgtttctgatcactgccatcctggtgaaggtgcagctggatgctctgcccttctttgtcatcaccatgatcaagatcgtgctcattaattgtaagctgggccaggagggggcctatgggaggaggcatgcccaactacccccactcttttttcagacccagcgttagccagagagaagcccagcctccgcctggagggagtggatgctgtgagcagctgggattcagaggcctgagtgggcctggaccaggctgggagggggcagagagaagggcagctcagcctcaaggctcaccaagagtaaacatttggtgccatcctgcagggcagcctgtttggtctggctggccttctgcctgccagctacacggcccccatcatgagtggccagggcctagcaggcttctttgcctccgtggccatgatctgcgctattgccagtggctcggagctatcagaaagtgccttcggctactttatcacagcctgtgctgttatcattttgaccatcatctgttacctgggcctgccccgcctggaattctaccgctactaccagcagctcaagcttgaaggacccggggagcaggagaccaagttggacctcattagcaaaggagaggagccaagagcaggcaaagaggaatctggagtttcagtctccaactctcagcccaccaatgaaagccactctatcaaagccatcctgaaaaatatctcagtcctggctttctctgtctgcttcatcttcactatcaccattgggatgtttccagccgtgactgttgaggtcaagtccagcatcgcaggcagcagcacctgggaacgttacttcattcctgtgtcctgtttcttgactttcaatatctttgactggttgggccggagcctcacagctgtattcatgtggcctgggaaggacagccgctggctgccaagcctggtgctggcccggctggtgtttgtgccactgctgctgctgtgcaacattaagccccgccgctacctgactgtggtcttcgagcacgatgcctggttcatcttcttcatggctgcctttgccttctccaacggctacctcgccagcctctgcatgtgcttcgggcccaagaaagtgaagccagctgaggcagagaccgcaggagccatcatggccttcttcctgtgtctgggtctggcactgggggctgttttctccttcctgttccgggcaattgtgtgacaaaggatggacagaaggactgcctgcctccctccctgtctgcctcctgccccttccttctgccaggggtgatcctgagtggtctggcggttttttcttctaactgacttctgctttccacggcgtgtgctgggcccggatctccaggccctggggagggagcctctggacggacagtggggacattgtgggtttggggctcagagtcgagggacggggtgtagcctcggcatttgcttgagtttctccactcttggctctgactgatccctgcttgtgcaggccagtggaggctcttgggcttggagaacacgtgtgtctctgtgtatgtgtctgtgtgtctgcgtccgtgtctgtcagactgtctgcctgtcctggggtggctaggagctgggtctgaccgttgtatggtttgacctgatatactccattctcccctgcgcctcctcctctgtgttctctccatgtccccctcccaactccccatgcccagttcttacccatcatgcaccctgtacagttgccacgttactgccttttttaaaaatatatttgacagaaaccaggtgccttcagaggctctctgatttaaataaacctttcttgtttttttctcc

SEQ ID NO: 347000 - DNA, 2037 bp, Homo sapiens
ctgcagcgagagcgcgcggatctcagcgcgggagcagtgcttctgcggcaggcccctgagggagggagctgtcagccagggaaaaccgagaacaccatcaccatgacaaccagtcaccagcctcaggacagatacaaagctgtctggcttatcttcttcatgctgggtctgggaacgctgctcccgtggaattttttcatgacggccactcagtatttcacaaaccgcctggacatgtcccagaatgtgtccttggtcactgctgaactgagcaaggacgcccaggcgtcagccgcccctgcagcacccttgcctgagcggaactctctcagtgccatcttcaacaatgtcatgaccctatgtgccatgctgcccctgctgttattcacctacctcaactccttcctgcatcagaggatcccccagtccgtacggatcctgggcagcctggtggccatcctgctggtgtttctgatcactgccatcctggtgaaggtgcagctggatgctctgcccttctttgtcatcaccatgatcaagatcgtgctcattaattcatttggtgccatcctgcagggcagcctgtttggtctggctggccttctgcctgccagctacacggcccccatcatgagtggccagggcctagcaggcttctttgcctccgtggccatgatctgcgctattgccagtggctcggagctatcagaaagtgccttcggctactttatcacagcctgtgctgttatcattttgaccatcatctgttacctgggcctgccccgcctggaattctaccgctactaccagcagctcaagcttgaaggacccggggagcaggagaccaagttggacctcattagcaaaggagaggagccaagagcaggcaaagaggaatctggagtttcagtctccaactctcagcccaccaatgaaagccactctatcaaagccatcctgaaaaatatctcagtcctggctttctctgtctgcttcatcttcactatcaccattgggatgtttccagccgtgactgttgaggtcaagtccagcatcgcaggcagcagcacctgggaacgttacttcattcctgtgtcctgtttcttgactttcaatatctttgactggttgggccggagcctcacagctgtattcatgtggcctgggaaggacagccgctggctgccaagcctggtgctggcccggctggtgtttgtgccactgctgctgctgtgcaacattaagccccgccgctacctgactgtggtcttcgagcacgatgcctggttcatcttcttcatggctgcctttgccttctccaacggctacctcgccagcctctgcatgtgcttcgggcccaagaaagtgaagccagctgaggcagagaccgcaggagccatcatggccttcttcctgtgtctgggtctggcactgggggctgttttctccttcctgttccgggcaattgtgtgacaaaggatggacagaaggactgcctgcctccctccctgtctgcctcctgccccttccttctgccaggggtgatcctgagtggtctggcggttttttcttctaactgacttctgctttccacggcgtgtgctgggcccggatctccaggccctggggagggagcctctggacggacagtggggacattgtgggtttggggctcagagtcgagggacggggtgtagcctcggcatttgcttgagtttctccactcttggctctgactgatccctgcttgtgcaggccagtggaggctcttgggcttggagaacacgtgtgtctctgtgtatgtgtctgtgtgtctgcgtccgtgtctgtcagactgtctgcctgtcctggggtggctaggagctgggtctgaccgttgtatggtttgacctgatatactccattctcccctgcgcctcctcctctgtgttctctccatgtccccctcccaactccccatgcccagttcttacccatcatgcaccctgtacagttgccacgttactgcctttttaatattgcagggtgggggggcgg

SEQ ID NO: 347001 - DNA, 1925 bp, Homo sapiens
ctgcagcgagagcgcgcggatctcagcgcgggagcagtgcttctgcggcaggcccctgagggagggagctgtcagccagggaaaaccgagaacaccatcaccatgacaaccagtcaccagcctcaggacagatacaaagctgtctggcttatcttcttcatgctgggtctgggaacgctgctcccgtggaattttttcatgacggccactcagtatttcacaaaccgcctggacatgtcccagaatgtgtccttggtcactgctgaactgagcaaggacgcccaggcgtcagccgcccctgcagcacccttgcctgagcggaactctctcagtgccatcttcaacaatgtcatgaccctatgtgccatgctgcccctgctgttattcacctacctcaactccttcctgcatcagaggatcccccagtccgtacggatcctgggcagcctggtggccatcctgctggtgtttctgatcactgccatcctggtgaaggtgcagctggatgctctgcccttctttgtcatcaccatgatcaagatcgtgctcattaattcatttggtgccatcctgcagggcagcctgtttggtctggctggccttctgcctgccagctacacggcccccatcatgagtggccagggcctagcaggcttctttgcctccgtggccatgatctgcgctattgccagtggctcggagctatcagaaagtgccttcggctactttatcacagcctgtgctgttatcattttgaccatcatctgttacctgggcctgccccgcctggaattctaccgctactaccagcagctcaagcttgaaggacccggggagcaggagaccaagttggacctcattagcaaaggagaggagccaagagcaggcaaagaggaatctggagtttcagtctccaactctcagcccaccaatgaaagccactctatcaaagccatcctgaaaaatatctcagtcctggctttctctgtctgcttcatcttcactatcaccattgggatgtttccagccgtgactgttgaggtcaagtccagcatcgcaggcagcagcacctgggaacgttacttcattcctgtgtcctgtttcttgactttcaatatctttgactggttgggccggagcctcacagctgtattcatgtggcctgggaaggacagccgctggctgccaagcctggtgctggcccggctggtgtttgtgccactgctgctgctgtgcaacattaagccccgccgctacctgactgtggtcttcgagcacgatgcctggttcatcttcttcatggctgcctttgccttctccaacggctacctcgccagcctctgcatgtgcttcgggcccaagaaagtgaagccagctgaggcagagaccgcaggagccatcatggccttcttcctgtgtctgggtctggcactgggggctgttttctccttcctgttccgggcaattgtgtgacaaaggatggacagaaggactgcctgcctccctccctgtctgcctcctgccccttccttctgccaggggtgatcctgagtggtctggcggttttttcttctaactgacttctgctttccacggcgtgtgctgggcccggatctccaggccctggggagggagcctctggacggacagtggggacattgtgggtttggggctcagagtcgagggacggggtgtagcctcggcatttgcttgagtttctccactcttggctctgactgatccctgcttgtgcaggccagtggaggctcttgggcttggagaacacgtgtgtctctgtgtatgtgtctgtgtgtctgcgtccgtgtctgtcagactgtctgcctgtcctggggtgtgctgtccacctcctctgtgctgtccacctcctcctcctctgtgctgtcccctcccctctgtgctgtcca

SEQ ID NO: 347002 - DNA, 699 bp, Homo sapiens
  misc_feature (30)..(30): n is a, c, g, or t
cacgcgtcgcccacgcgtcgcccacgcgtncctaagcaagtaattcttaaagatcttacagaaacgcagagtcaatcaggtttataaaggaaggctgaggggagagaggaggcctgggggcctggacgaagaggcctaggacctgaagagactccagcgagtctcgggaagcccaggggacctgtcaccatctgggcacttcccaggctcaatgctcagccagagtttgctggtggacctcaggattcgaagtgtgcaacagacggagtgcgcttgctgttcagggcggccccgtgcaggagcaccagctcaccctcaggcatctcggactggagggccagcagaaggtcagcaacttactcttaaaacgattgtttcggatcatattgatctctttcctttttccttttgtcctttcactgtatgacttgaatcagttttgattctatttgtaagtgtttcttgtcgtgaggcacctgccatgtctgttgcgttttcctcggcagcgtgtagggcttcagcttcctgggttttcacccttcctgcaggcactgtggggtcctgagggccagtgggtccatttcacctcttgctgcatgatggtcagtagctgatctgttatggcattcacttccagattaattttccgtgtttgaagtatgtgcatatgtgctttacagaataaaacatctgaattta

SEQ ID NO: 347003 - DNA, 445 bp, Homo sapiens
  misc_feature (18)..(18): n is a, c, g, or t
cccccccccccaaaaaanccccccccccccccaaaaaaagggggtttcttttccaaccctcaagggattttgggattggagggccagcagaaggtcagcaacttactcttaaaacgattgtttcggatcatattgatctctttcctttttccttttgtcctttcactgtatgacttgaatcagttttgattctatttgtaagtgtttcttgtcgtgaggcacctgccatgtctgttgcgttttcctcggcagcgtgtagggcttcagcttcctgggttttcacccttcctgcaggcactgtggggtcctgagggccagtgggtccatttcacctcttgctgcatgatggtcagtagctgatctgttatggcattcacttccagattaattttccgtgtttgaagtatgtgcatatgtgctttacagaataaaacatctgaattta

SEQ ID NO: 347004 - DNA, 411 bp, Homo sapiens
agctccacttgccgtgagtacggctgggctgcttcagctgtaaattctcaggatggctcacttcacatttctttatagaattatctctactcggacctatctaaaggattatttaatttgtctaaaggattatttaatttggaattctaaagatagaacttctgcatataaaatcagaaagttagtgccccctcgaggcagtaaaagcacctggctgttgttggacattcataggctgtctttcccgcaggagtagaagcagcaagttacagaaaagaggctcactgtggccgggtgccgtggctcaggcctgcgatcccagcactgtggaaggctgaggtgggaggatcacttgagccccggagttcaagaccagcctggacaacatatagggagaccctgtctctattt

SEQ ID NO: 347005 - DNA, 353 bp, Homo sapiens
ctgtttgttcatatgtaaaaggggaacagctgcacttcttcagtcatgttcatgggagagtagtaaattttaagtgaaataatacatataaaagatgtttgaaaatggctagacagctgtgcagaaatgctggggataattcacccagcccgagcttttcatctctgatctgcccgaggtctggtttggcatctccaggccatgtactggaaagtggccacttccttcgctgcttcgtggctctgagttgagtaggactcatggtcagggtcaggactgctcttcttcctcagatcccacaaaggcaggtgcctgggctgatagatgattcctgtgtgggtttgatttcagga

SEQ ID NO: 347006 - DNA, 4252 bp, Homo sapiens
  misc_feature (30)..(30): n is a, c, g, or t
cacgcgtcgcccacgcgtcgcccacgcgtnccgcggttgccggagcccgaactgaggcggcggcgggagcccggttggcgtctggtcttcgcgtcggccccgcggagccagacgctgcccccggcgcggggagaagatggtgcctagcggcctcgggcccgccacgcgccgccacgagtgagcccagcgcgaccgcgggcgtccgccgagcagctggcccggctgggcccggggcgcgcagctgcccgccggggcggggtggagctgatcagaataatgttcagcatcaaccccctggagaacctgaaggtgtacatcagcagtcggcctcccctggtggtcttcatgatcagcgtaagcgccatggccatagctttcctgaccctgggctacttcttcaaaatcaaggagattaaatccccagaaatggcagaggattggaatacttttctgctacggttcaatgatttggacttgtgtgtatcagagaatgaaaccctcaagcatctcacaaacgacaccacaactccggaaagtacaatgaccagcgggcaggcccgagcttccacccagtccccccaggccctggaggactcgggcccggtgaatatctcagtctcaatcaccctaaccctggacccactgaaacccttcggagggtattcccgcaacgtcacccatctgtactcaaccatcttagggcatcagattggactttcaggcagggaagcccacgaggagataaacatcaccttcaccctgcctacagcgtggagctcagatgactgcgccctccacggtcactgtgagcaggtggtattcacagcctgcatgaccctcacggccagccctggggtgttccccgtcactgtacagccaccgcactgtgttcctgacacgtacagcaacgccacgctctggtacaagatcttcacaactgccagagatgccaacacaaaatacgcccaagattacaatcctttctggtgttataagggggccattggaaaagtctatcatgctttaaatcccaagcttacagtgattgttccagatgatgaccgttcattaataaatttgcatctcatgcacaccagttacttcctctttgtgatggtgataacaatgttttgctatgctgttatcaagggcagacctagcaaattgcgtcagagcaatcctgaattttgtcccgagaaggtggctttggctgaagcctaattccacagctccttgttttttgagagagactgagagaaccataatccttgcctgctgaacccagcctgggcctggatgctctgtgaatacattatcttgcgatgttgggttattccagccaaagacatttcaagtgcctgtaactgatttgtacatatttataaaaatctattcagaaattggtccaataatgcacgtgctttgccctgggtacagccagagcccttcaaccccaccttggacttgaggacctacctgatgggacgtttccacgtgtctctagagaaggattcctggatctagctggtcacgacgatgttttcaccaaggtcacaggagcattgcgtcgctgatggggttgaagtttggtttggttcttgtttcagcccaatatgtagagaacatttgaaacagtctgcacctttgatacggtattgcatttccaaagccaccaatccattttgtggattttatgtgtctgtggcttaataatcatagtaacaacaataatacctttttctccattttgcttgcaggaaacataccttaagttttttttgttttgtttttgtttttttgttttttgttttcctttatgaagaaaaaataaaatagtcacattttaatactactctagttaggacagacttgtgcttttatcctgactaaaaagttaaatatttaagtcacatacatggtaaagatctaagtttcattttccacatggatgaccaggaacctggtcttgttggagctggcataggaggttctactgtcttgtcgtccactcttgtccctcccttctgttatcaaagttaaagcgcctcttcactcaaaagggcttcaaaatgtaaatggctctagagttagagtgactgtttgctcttctgctttctggaatgcagatgacagtatggaaagaaagaataatgattctatctaataggaaaggatttcttctttcttttttaaagagtgggtggattttctcccttttgttttgcttttattttcatgctactaacatatcttcagaaggaaatggcaactagtagatcagtaaaattacgaaaacgatgcctgcaaaatttgaaggaatgcaattctgatttgccatttatcagggaaaactgaaagcatttttcttataactttttttctttttctttttttttggaggggggaggcagggtcttgctctgtccctcaggctggagcttagctcagtgcagcctccaactcctgggctcaagcaatcctcccactttagcctcctgagtagctgggactacaggcgtgtgccagcgcgcctggctaattttaaaatttttttgtagagacagagtctccctctgttgcccaggctggtctggaactcctagcttcaaatgatcctctcacctcggcctcccaaaatcctgggattccaggcgtcagccactgctctcggccctcttacaccattttgtttgattgtctagtccctgtttctttttctttctaatccttattcatttaagcaaaaccatacattatcttttccagtcctttcttgtattcttactgtttttttaaaataactttttgccttaatagctcattgtcactaataacttctgtgttctcccaggcagtgttataacagaagggcaatgaaaacattggacatgaccatgagtgcttcctttccttaactctctaggtttgtagtctgttttaaattaggattagttcctgcattctgaaatacattggcctagaacattttatcccaggcatttttgaatagaaaacagttgcgtgcttttattgaagattgttaaaataatcaccatagtaacttgatatgttagtatttttctttttccttttagtatgtttcaagtgcagtaatcgtacttgtctatccagtttctatgtatgatacgagttgcttacacgatgcatggctaacttgttaatttagttttctccttagagactttgagacccttaagagacaagattgagaaagagccatgtggcttggctctagaaacgtcattatcattaggaccatcagattttagattaagctgctattgaattaataaaatcccaatgaagcagagttatagggatagatttatagctggcagagtggtatcaaaggagaaaaacagtgaaaaagccaatttcactggttcgttcaatccagcttgttgctaatattagttacccttgttttaatgacagagagtggctggaatctgtagctaggggaggggcaacactgttagatgtgaggaaaggaagtgccaaaaatgcctggacagatggcttgtcccaaggccaggacacacactttaaaatccaacattcacctaagcaagtaattcttaaagatcttacagaaacgcagagtcaatcaggtttataaaggaaggctgaggggagagaggaggcctgggggcctggacgaagaggcctaggacctgaagagactccagcgagtctcgggaagcccaggggacctgtcaccatctgggcacttcccaggctcaatgctcagccagagtttgctggtggacctcaggattcgaagtgtgcaacagacggagtgcgcttgctgttcagggcggccccgtgcaggagcaccagctcaccctcaggcatctcggactggagggccagcagaaggtcagcaacttactcttaaaacgattgtttcggatcatattgatctctttcctttttccttttgtcctttcactgtatgacttgaatcagttttgattctatttgtaagtgtttcttgtcgtgaggcacctgccatgtctgttgcgttttcctcggcagcgtgtagggcttcagcttcctgggttttcacccttcctgcaggcactgtggggtcctgagggccagtgggtccatttcacctcttgctgcatgatggtcagtagctgatctgttatggcattcacttccagattaattttccgtgtttgaagtatgtgcatatgtgctttacagaataaaacatctgaattta

SEQ ID NO: 347007 - DNA, 4682 bp, Homo sapiens
  misc_feature (30)..(30): n is a, c, g, or t
  misc_feature (4261)..(4261): n is a, c, g, or t
  misc_feature (4266)..(4266): n is a, c, g, or t
cacgcgtcgcccacgcgtcgcccacgcgtnccgcggttgccggagcccgaactgaggcggcggcgggagcccggttggcgtctggtcttcgcgtcggccccgcggagccagacgctgcccccggcgcggggagaagatggtgcctagcggcctcgggcccgccacgcgccgccacgagtgagcccagcgcgaccgcgggcgtccgccgagcagctggcccggctgggcccggggcgcgcagctgcccgccggggcggggtggagctgatcagaataatgttcagcatcaaccccctggagaacctgaaggtgtacatcagcagtcggcctcccctggtggtcttcatgatcagcgtaagcgccatggccatagctttcctgaccctgggctacttcttcaaaatcaaggagattaaatccccagaaatggcagaggattggaatacttttctgctacggttcaatgatttggacttgtgtgtatcagagaatgaaaccctcaagcatctcacaaacgacaccacaactccggaaagtacaatgaccagcgggcaggcccgagcttccacccagtccccccaggccctggaggactcgggcccggtgaatatctcagtctcaatcaccctaaccctggacccactgaaacccttcggagggtattcccgcaacgtcacccatctgtactcaaccatcttagggcatcagattggactttcaggcagggaagcccacgaggagataaacatcaccttcaccctgcctacagcgtggagctcagatgactgcgccctccacggtcactgtgagcaggtggtattcacagcctgcatgaccctcacggccagccctggggtgttccccgtcactgtacagccaccgcactgtgttcctgacacgtacagcaacgccacgctctggtacaagatcttcacaactgccagagatgccaacacaaaatacgcccaagattacaatcctttctggtgttataagggggccattggaaaagtctatcatgctttaaatcccaagcttacagtgattgttccagatgatgaccgttcattaataaatttgcatctcatgcacaccagttacttcctctttgtgatggtgataacaatgttttgctatgctgttatcaagggcagacctagcaaattgcgtcagagcaatcctgaattttgtcccgagaaggtggctttggctgaagcctaattccacagctccttgttttttgagagagactgagagaaccataatccttgcctgctgaacccagcctgggcctggatgctctgtgaatacattatcttgcgatgttgggttattccagccaaagacatttcaagtgcctgtaactgatttgtacatatttataaaaatctattcagaaattggtccaataatgcacgtgctttgccctgggtacagccagagcccttcaaccccaccttggacttgaggacctacctgatgggacgtttccacgtgtctctagagaaggattcctggatctagctggtcacgacgatgttttcaccaaggtcacaggagcattgcgtcgctgatggggttgaagtttggtttggttcttgtttcagcccaatatgtagagaacatttgaaacagtctgcacctttgatacggtattgcatttccaaagccaccaatccattttgtggattttatgtgtctgtggcttaataatcatagtaacaacaataatacctttttctccattttgcttgcaggaaacataccttaagttttttttgttttgtttttgtttttttgttttttgttttcctttatgaagaaaaaataaaatagtcacattttaatactactctagttaggacagacttgtgcttttatcctgactaaaaagttaaatatttaagtcacatacatggtaaagatctaagtttcattttccacatggatgaccaggaacctggtcttgttggagctggcataggaggttctactgtcttgtcgtccactcttgtccctcccttctgttatcaaagttaaagcgcctcttcactcaaaagggcttcaaaatgtaaatggctctagagttagagtgactgtttgctcttctgctttctggaatgcagatgacagtatggaaagaaagaataatgattctatctaataggaaaggatttcttctttcttttttaaagagtgggtggattttctcccttttgttttgcttttattttcatgctactaacatatcttcagaaggaaatggcaactagtagatcagtaaaattacgaaaacgatgcctgcaaaatttgaaggaatgcaattctgatttgccatttatcagggaaaactgaaagcatttttcttataactttttttctttttctttttttttggaggggggaggcagggtcttgctctgtccctcaggctggagcttagctcagtgcagcctccaactcctgggctcaagcaatcctcccactttagcctcctgagtagctgggactacaggcgtgtgccagcgcgcctggctaattttaaaatttttttgtagagacagagtctccctctgttgcccaggctggtctggaactcctagcttcaaatgatcctctcacctcggcctcccaaaatcctgggattccaggcgtcagccactgctctcggccctcttacaccattttgtttgattgtctagtccctgtttctttttctttctaatccttattcatttaagcaaaaccatacattatcttttccagtcctttcttgtattcttactgtttttttaaaataactttttgccttaatagctcattgtcactaataacttctgtgttctcccaggcagtgttataacagaagggcaatgaaaacattggacatgaccatgagtgcttcctttccttaactctctaggtttgtagtctgttttaaattaggattagttcctgcattctgaaatacattggcctagaacattttatcccaggcatttttgaatagaaaacagttgcgtgcttttattgaagattgttaaaataatcaccatagtaacttgatatgttagtatttttctttttccttttagtatgtttcaagtgcagtaatcgtacttgtctatccagtttctatgtatgatacgagttgcttacacgatgcatggctaacttgttaatttagttttctccttagagactttgagacccttaagagacaagattgagaaagagccatgtggcttggctctagaaacgtcattatcattaggaccatcagattttagattaagctgctattgaattaataaaatcccaatgaagcagagttatagggatagatttatagctggcagagtggtatcaaaggagaaaaacagtgaaaaagccaatttcactggttcgttcaatccagcttgttgctaatattagttacccttgttttaatgacagagagtggctggaatctgtagctaggggaggggcaacactgttagatgtgaggaaaggaagtgccaaaaatgcctggacagatggcttgtcccaaggccaggacacacactttaaaatccaacattcacctaagcaagtaattcttaaagatcttacagaaacgcagagtcaatcaggtttataaaggaaggctgaggggagagaggaggcctgggggcctggacgaagaggcctaggacctgaagagactccagcgagtctcgggaagcccaggggacctgtcaccatctgggcacttcccaggctcaatgctcagccagagtttgctggtggacctcaggattcgaagtgtgcaacagacggagtgcgcttgctgttcagggcggccccgtgcaggagcaccagctcaccctcaggcatctcggactggagggccagcagaaggtcagcaacttactcttaaaacgattgtttcggatcatattgatctctttcctttttccttttgtcctttcactgtatgacttgaatcagttttgattctatttgtaagtgtttcttgtcgtgaggcacctgccatgtctgttgcgttttcctcggcagcgtgtagggcttcagcttcctgggttttcacccttcctgcaggcactgtggggtcctgagggccagtgggtccatttcacctcttgctgcatgatggtcagtagctgatctgttatggcattcacttccagattaattttccgtgtttgaagtatgtgcatatgtgctttacagaataaaacatctgaatttaaaaaaaaanaaaanaaaaaaaaaaaaaaaaaaaaaaaaaatttgtgggcgcgcgcgcgccgagcgcccccagaagaaagctcttcataacaaccactcgcgcgtgggggcgggcgcggggcgcccattatggagtataggtgggacaccgtcggggccatagagcgggtgtccccaggggagaaacaccgcggggaaacagagaaaaaaagggcggcgggggatctctctccctccccccatatataaaaaaaagagcgccgcgggggggaaaaacgaggaaaggccgtttcttgctgaaacacaatcgcgacaagaggggaggtctcccgaggggggcaacaacatcgagggggccatcaatctacacgcggggggggagcccacgagaggggagagccctccgaatatctacaaaataataaggcccg

SEQ ID NO: 347008 - DNA, 4065 bp, Homo sapiens
ctctggcccttacgcgctgctagcccttacgcgcctgctggaccttacgcgcagctgcccgccggggcggggtggagctgatcagaataatgttcagcatcaaccccctggagaacctgaaggtgtacatcagcagtcggcctcccctggtggtcttcatgatcagcgtaagcgccatggccatagctttcctgaccctgggctacttcttcaaaatcaaggagattaaatccccagaaatggcagaggattggaatacttttctgctacggttcaatgatttggacttgtgtgtatcagagaatgaaaccctcaagcatctcacaaacgacaccacaactccggaaagtacaatgaccagcgggcaggcccgagcttccacccagtccccccaggccctggaggactcgggcccggtgaatatctcagtctcaatcaccctaaccctggacccactgaaacccttcggagggtattcccgcaacgtcacccatctgtactcaaccatcttagggcatcagattggactttcaggcagggaagcccacgaggagataaacatcaccttcaccctgcctacagcgtggagctcagatgactgcgccctccacggtcactgtgagcaggtggtattcacagcctgcatgaccctcacggccagccctggggtgttccccgtcactgtacagccaccgcactgtgttcctgacacgtacagcaacgccacgctctggtacaagatcttcacaactgccagagatgccaacacaaaatacgcccaagattacaatcctttctggtgttataagggggccattggaaaagtctatcatgctttaaatcccaagcttacagtgattgttccagatgatgaccgttcattaataaatttgcatctcatgcacaccagttacttcctctttgtgatggtgataacaatgttttgctatgctgttatcaagggcagacctagcaaattgcgtcagagcaatcctgaattttgtcccgagaaggtggctttggctgaagcctaattccacagctccttgttttttgagagagactgagagaaccataatccttgcctgctgaacccagcctgggcctggatgctctgtgaatacattatcttgcgatgttgggttattccagccaaagacatttcaagtgcctgtaactgatttgtacatatttataaaaatctattcagaaattggtccaataatgcacgtgctttgccctgggtacagccagagcccttcaaccccaccttggacttgaggacctacctgatgggacgtttccacgtgtctctagagaaggattcctggatctagctggtcacgacgatgttttcaccaaggtcacaggagcattgcgtcgctgatggggttgaagtttggtttggttcttgtttcagcccaatatgtagagaacatttgaaacagtctgcacctttgatacggtattgcatttccaaagccaccaatccattttgtggattttatgtgtctgtggcttaataatcatagtaacaacaataatacctttttctccattttgcttgcaggaaacataccttaagttttttttgttttgtttttgtttttttgttttttgttttcctttatgaagaaaaaataaaatagtcacattttaatactactctagttaggacagacttgtgcttttatcctgactaaaaagttaaatatttaagtcacatacatggtaaagatctaagtttcattttccacatggatgaccaggaacctggtcttgttggagctggcataggaggttctactgtcttgtcgtccactcttgtccctcccttctgttatcaaagttaaagcgcctcttcactcaaaagggcttcaaaatgtaaatggctctagagttagagtgactgtttgctcttctgctttctggaatgcagatgacagtatggaaagaaagaataatgattctatctaataggaaaggatttcttctttcttttttaaagagtgggtggattttctcccttttgttttgcttttattttcatgctactaacatatcttcagaaggaaatggcaactagtagatcagtaaaattacgaaaacgatgcctgcaaaatttgaaggaatgcaattctgatttgccatttatcagggaaaactgaaagcatttttcttataactttttttctttttctttttttttggaggggggaggcagggtcttgctctgtccctcaggctggagcttagctcagtgcagcctccaactcctgggctcaagcaatcctcccactttagcctcctgagtagctgggactacaggcgtgtgccagcgcgcctggctaattttaaaatttttttgtagagacagagtctccctctgttgcccaggctggtctggaactcctagcttcaaatgatcctctcacctcggcctcccaaaatcctgggattccaggcgtcagccactgctctcggccctcttacaccattttgtttgattgtctagtccctgtttctttttctttctaatccttattcatttaagcaaaaccatacattatcttttccagtcctttcttgtattcttactgtttttttaaaataactttttgccttaatagctcattgtcactaataacttctgtgttctcccaggcagtgttataacagaagggcaatgaaaacattggacatgaccatgagtgcttcctttccttaactctctaggtttgtagtctgttttaaattaggattagttcctgcattctgaaatacattggcctagaacattttatcccaggcatttttgaatagaaaacagttgcgtgcttttattgaagattgttaaaataatcaccatagtaacttgatatgttagtatttttctttttccttttagtatgtttcaagtgcagtaatcgtacttgtctatccagtttctatgtatgatacgagttgcttacacgatgcatggctaacttgttaatttagttttctccttagagactttgagacccttaagagacaagattgagaaagagccatgtggcttggctctagaaacgtcattatcattaggaccatcagattttagattaagctgctattgaattaataaaatcccaatgaagcagagttatagggatagatttatagctggcagagtggtatcaaaggagaaaaacagtgaaaaagccaatttcactggttcgttcaatccagcttgttgctaatattagttacccttgttttaatgacagagagtggctggaatctgtagctaggggaggggcaacactgttagatgtgaggaaaggaagtgccaaaaatgcctggacagatggcttgtcccaaggccaggacacacactttaaaatccaacattcacctaagcaagtaattcttaaagatcttacagaaacgcagagtcaatcaggtttataaaggaaggctgaggggagagaggaggcctgggggcctggacgaagaggcctaggacctgaagagactccagcgagtctcgggaagcccaggggacctgtcaccatctgggcacttcccaggctcaatgctcagccagagtttgctggtggacctcaggattcgaagtgtgcaacagacggagtgcgcttgctgttcagggcggccccgtgcaggagcaccagctcaccctcaggcatctcggactggagggccagcagaaggtcagcaacttactcttaaaacgattgtttcggatcatattgatctctttcctttttccttttgtcctttcactgtatgacttgaatcagttttgattctatttgtaagtgtttcttgtcgtgaggcacctgccatgtctgttgcgttttcctcggcagcgtgtagggcttcagcttcctgggttttcacccttcctgcaggcactgtggggtcctgagggccagtgggtccatttcacctcttgctgcatgatggtcagtagctgatctgttatggcattcacttccagattaattttccgtgtttgaagtatgtgcatatgtgctttacagaataaaacatctgaattta

SEQ ID NO: 347009 - DNA, 1852 bp, Homo sapiens
  misc_feature (30)..(30): n is a, c, g, or t
cacgcgtcgcccacgcgtcgcccacgcgtnccgcggttgccggagcccgaactgaggcggcggcgggagcccggttggcgtctggtcttcgcgtcggccccgcggagccagacgctgcccccggcgcggggagaagatggtgcctagcggcctcgggcccgccacgcgccgccacgagtgagcccagcgcgaccgcgggcgtccgccgagcagctggcccggctgggcccggggcgcgcagctgcccgccggggcggggtggagctgatcagaataatgttcagcatcaaccccctggagaacctgaaggtgtacatcagcagtcggcctcccctggtggtcttcatgatcagcgtaagcgccatggccatagctttcctgaccctgggctacttcttcaaaatcaaggagattaaatccccagaaatggcagaggattggaatacttttctgctacggttcaatgatttggacttgtgtgtatcagagaatgaaaccctcaagcatctcacaaacgacaccacaactccggaaagtacaatgaccagcgggcaggcccgagcttccacccagtccccccaggccctggaggactcgggcccggtgaatatctcagtctcaatcaccctaaccctggacccactgaaacccttcggagggtattcccgcaacgtcacccatctgtactcaaccatcttagggcatcagattggactttcaggcagggaagcccacgaggagataaacatcaccttcaccctgcctacagcgtggagctcagatgactgcgccctccacggtcactgtgagcaggtggtattcacagcctgcatgaccctcacggccagccctggggtgttccccgtcactgtacagccaccgcactgtgttcctgacacgtacagcaacgccacgctctggtacaagatcttcacaactgccagagatgccaacacaaaatacgcccaagattacaatcctttctggtgttataagggggccattggaaaagtctatcatgctttaaatcccaagcttacagtgattgttccagatgatgaccgttcattaataaatttgcatctcatgcacaccagttacttcctctttgtgatggtgataacaatgttttgctatgctgttatcaagggcagacctagcaaattgcgtcagagcaatcctgaattttgtcccgagaaggtggctttggctgaagcctaattccacagctccttgttttttgagagagactgagagaaccataatccttgcctgctgaacccagcctgggcctggatgctctgtgaatacattatcttgcgatgttgggttattccagccaaagacatttcaagtgcctgtaactgatttgtacatatttataaaaatctattcagaaattggtccaataatgcacgtgctttgccctgggtacagccagagcccttcaaccccaccttggacttgaggacctacctgatgggacgtttccacgtgtctctagagaaggattcctggatctagctggtcacgacgatgttttcaccaaggtcacaggagcattgcgtcgctgatggggttgaagtttggtttggttcttgtttcagcccaatatgtagagaacatttgaaacagtctgcacctttgatacggtattgcatttccaaagccaccaatccattttgtggattttatgtgtctgtggcttaataatcatagtaacaacaataatacctttttctccattttgcttgcaggaaacataccttaagttttttttgttttgtttttgtttttttgttttttgttttcctttatgaagaaaaaataaaatagtcacattttaatacta

SEQ ID NO: 347010 - DNA, 3093 bp, Homo sapiens
ggctgctgcggtgttctagaggacccccagtgtctgagaaggtggctttggctgaagcctaattccacagctccttgttttttgagagagactgagagaaccataatccttgcctgctgaacccagcctgggcctggatgctctgtgaatacattatcttgcgatgttgggttattccagccaaagacatttcaagtgcctgtaactgatttgtacatatttataaaaatctattcagaaattggtccaataatgcacgtgctttgccctgggtacagccagagcccttcaaccccaccttggacttgaggacctacctgatgggacgtttccacgtgtctctagagaaggattcctggatctagctggtcacgacgatgttttcaccaaggtcacaggagcattgcgtcgctgatggggttgaagtttggtttggttcttgtttcagcccaatatgtagagaacatttgaaacagtctgcacctttgatacggtattgcatttccaaagccaccaatccattttgtggattttatgtgtctgtggcttaataatcatagtaacaacaataatacctttttctccattttgcttgcaggaaacataccttaagttttttttgttttgtttttgtttttttgttttttgttttcctttatgaagaaaaaataaaatagtcacattttaatactactctagttaggacagacttgtgcttttatcctgactaaaaagttaaatatttaagtcacatacatggtaaagatctaagtttcattttccacatggatgaccaggaacctggtcttgttggagctggcataggaggttctactgtcttgtcgtccactcttgtccctcccttctgttatcaaagttaaagcgcctcttcactcaaaagggcttcaaaatgtaaatggctctagagttagagtgactgtttgctcttctgctttctggaatgcagatgacagtatggaaagaaagaataatgattctatctaataggaaaggatttcttctttcttttttaaagagtgggtggattttctcccttttgttttgcttttattttcatgctactaacatatcttcagaaggaaatggcaactagtagatcagtaaaattacgaaaacgatgcctgcaaaatttgaaggaatgcaattctgatttgccatttatcagggaaaactgaaagcatttttcttataactttttttctttttctttttttttggaggggggaggcagggtcttgctctgtccctcaggctggagcttagctcagtgcagcctccaactcctgggctcaagcaatcctcccactttagcctcctgagtagctgggactacaggcgtgtgccagcgcgcctggctaattttaaaatttttttgtagagacagagtctccctctgttgcccaggctggtctggaactcctagcttcaaatgatcctctcacctcggcctcccaaaatcctgggattccaggcgtcagccactgctctcggccctcttacaccattttgtttgattgtctagtccctgtttctttttctttctaatccttattcatttaagcaaaaccatacattatcttttccagtcctttcttgtattcttactgtttttttaaaataactttttgccttaatagctcattgtcactaataacttctgtgttctcccaggcagtgttataacagaagggcaatgaaaacattggacatgaccatgagtgcttcctttccttaactctctaggtttgtagtctgttttaaattaggattagttcctgcattctgaaatacattggcctagaacattttatcccaggcatttttgaatagaaaacagttgcgtgcttttattgaagattgttaaaataatcaccatagtaacttgatatgttagtatttttctttttccttttagtatgtttcaagtgcagtaatcgtacttgtctatccagtttctatgtatgatacgagttgcttacacgatgcatggctaacttgttaatttagttttctccttagagactttgagacccttaagagacaagattgagaaagagccatgtggcttggctctagaaacgtcattatcattaggaccatcagattttagattaagctgctattgaattaataaaatcccaatgaagcagagttatagggatagatttatagctggcagagtggtatcaaaggagaaaaacagtgaaaaagccaatttcactggttcgttcaatccagcttgttgctaatattagttacccttgttttaatgacagagagtggctggaatctgtagctaggggaggggcaacactgttagatgtgaggaaaggaagtgccaaaaatgcctggacagatggcttgtcccaaggccaggacacacactttaaaatccaacattcacctaagcaagtaattcttaaagatcttacagaaacgcagagtcaatcaggtttataaaggaaggctgaggggagagaggaggcctgggggcctggacgaagaggcctaggacctgaagagactccagcgagtctcgggaagcccaggggacctgtcaccatctgggcacttcccaggctcaatgctcagccagagtttgctggtggacctcaggattcgaagtgtgcaacagacggagtgcgcttgctgttcagggcggccccgtgcaggagcaccagctcaccctcaggcatctcggactggagggccagcagaaggtcagcaacttactcttaaaacgattgtttcggatcatattgatctctttcctttttccttttgtcctttcactgtatgacttgaatcagttttgattctatttgtaagtgtttcttgtcgtgaggcacctgccatgtctgttgcgttttcctcggcagcgtgtagggcttcagcttcctgggttttcacccttcctgcaggcactgtggggtcctgagggccagtgggtccatttcacctcttgctgcatgatggtcagtagctgatctgttatggcattcacttccagattaattttccgtgtttgaagtatgtgcatatgtgctttacagaataaaacatctgaattta

SEQ ID NO: 347011 - DNA, 3165 bp, Homo sapiens
agcgctgatctatacagcatgtagggaaatcccacatcaatggaaccatcacacagatgcctttctggaaccccaacctagcgctgagcaatcctgaatttggtcccgagaaggtggctttggctgaagcctaattccacagctccttgttttttgagagagactgagagaaccataatccttgcctgctgaacccagcctgggcctggatgctctgtgaatacattatcttgcgatgttgggttattccagccaaagacatttcaagtgcctgtaactgatttgtacatatttataaaaatctattcagaaattggtccaataatgcacgtgctttgccctgggtacagccagagcccttcaaccccaccttggacttgaggacctacctgatgggacgtttccacgtgtctctagagaaggattcctggatctagctggtcacgacgatgttttcaccaaggtcacaggagcattgcgtcgctgatggggttgaagtttggtttggttcttgtttcagcccaatatgtagagaacatttgaaacagtctgcacctttgatacggtattgcatttccaaagccaccaatccattttgtggattttatgtgtctgtggcttaataatcatagtaacaacaataatacctttttctccattttgcttgcaggaaacataccttaagttttttttgttttgtttttgtttttttgttttttgttttcctttatgaagaaaaaataaaatagtcacattttaatactactctagttaggacagacttgtgcttttatcctgactaaaaagttaaatatttaagtcacatacatggtaaagatctaagtttcattttccacatggatgaccaggaacctggtcttgttggagctggcataggaggttctactgtcttgtcgtccactcttgtccctcccttctgttatcaaagttaaagcgcctcttcactcaaaagggcttcaaaatgtaaatggctctagagttagagtgactgtttgctcttctgctttctggaatgcagatgacagtatggaaagaaagaataatgattctatctaataggaaaggatttcttctttcttttttaaagagtgggtggattttctcccttttgttttgcttttattttcatgctactaacatatcttcagaaggaaatggcaactagtagatcagtaaaattacgaaaacgatgcctgcaaaatttgaaggaatgcaattctgatttgccatttatcagggaaaactgaaagcatttttcttataactttttttctttttctttttttttggaggggggaggcagggtcttgctctgtccctcaggctggagcttagctcagtgcagcctccaactcctgggctcaagcaatcctcccactttagcctcctgagtagctgggactacaggcgtgtgccagcgcgcctggctaattttaaaatttttttgtagagacagagtctccctctgttgcccaggctggtctggaactcctagcttcaaatgatcctctcacctcggcctcccaaaatcctgggattccaggcgtcagccactgctctcggccctcttacaccattttgtttgattgtctagtccctgtttctttttctttctaatccttattcatttaagcaaaaccatacattatcttttccagtcctttcttgtattcttactgtttttttaaaataactttttgccttaatagctcattgtcactaataacttctgtgttctcccaggcagtgttataacagaagggcaatgaaaacattggacatgaccatgagtgcttcctttccttaactctctaggtttgtagtctgttttaaattaggattagttcctgcattctgaaatacattggcctagaacattttatcccaggcatttttgaatagaaaacagttgcgtgcttttattgaagattgttaaaataatcaccatagtaacttgatatgttagtatttttctttttccttttagtatgtttcaagtgcagtaatcgtacttgtctatccagtttctatgtatgatacgagttgcttacacgatgcatggctaacttgttaatttagttttctccttagagactttgagacccttaagagacaagattgagaaagagccatgtggcttggctctagaaacgtcattatcattaggaccatcagattttagattaagctgctattgaattaataaaatcccaatgaagcagagttatagggatagatttatagctggcagagtggtatcaaaggagaaaaacagtgaaaaagccaatttcactggttcgttcaatccagcttgttgctaatattagttacccttgttttaatgacagagagtggctggaatctgtagctaggggaggggcaacactgttagatgtgaggaaaggaagtgccaaaaatgcctggacagatggcttgtcccaaggccaggacacacactttaaaatccaacattcacctaagcaagtaattcttaaagatcttacagaaacgcagagtcaatcaggtttataaaggaaggctgaggggagagaggaggcctgggggcctggacgaagaggcctaggacctgaagagactccagcgagtctcgggaagcccaggggacctgtcaccatctgggcacttcccaggctcaatgctcagccagagtttgctggtggacctcaggattcgaagtgtgcaacagacggagtgcgcttgctgttcagggcggccccgtgcaggagcaccagctcaccctcaggcatctcggactggagggccagcagaaggtcagcaacttactcttaaaacgattgtttcggatcatattgatctctttcctttttccttttgtcctttcactgtatgacttgaatcagttttgattctatttgtaagtgtttcttgtcgtgaggcacctgccatgtctgttgcgttttcctcggcagcgtgtagggcttcagcttcctgggttttcacccttcctgcaggcactgtggggtcctgagggccagtgggtccatttcacctcttgctgcatgatggtcagtagctgatctgttatggcattcacttccagattaattttccgtgtttgaagtatgtgcatatgtgctttacagaataaaacatctgaattta

SEQ ID NO: 347012 - DNA, 3105 bp, Homo sapiens
gcagtatatcaggactgtggttatatctgtttcgtgagtagtaacatgatgtgtgcagtgatacctgtttccatgagtctgtaatgctggatgcgaggatagactgagagaaccataatccttgcctgctgaacccagcctgggcctggatgctctgtgaatacattatcttgcgatgttgggttattccagccaaagacatttcaagtgcctgtaactgatttgtacatatttataaaaatctattcagaaattggtccaataatgcacgtgctttgccctgggtacagccagagcccttcaaccccaccttggacttgaggacctacctgatgggacgtttccacgtgtctctagagaaggattcctggatctagctggtcacgacgatgttttcaccaaggtcacaggagcattgcgtcgctgatggggttgaagtttggtttggttcttgtttcagcccaatatgtagagaacatttgaaacagtctgcacctttgatacggtattgcatttccaaagccaccaatccattttgtggattttatgtgtctgtggcttaataatcatagtaacaacaataatacctttttctccattttgcttgcaggaaacataccttaagttttttttgttttgtttttgtttttttgttttttgttttcctttatgaagaaaaaataaaatagtcacattttaatactactctagttaggacagacttgtgcttttatcctgactaaaaagttaaatatttaagtcacatacatggtaaagatctaagtttcattttccacatggatgaccaggaacctggtcttgttggagctggcataggaggttctactgtcttgtcgtccactcttgtccctcccttctgttatcaaagttaaagcgcctcttcactcaaaagggcttcaaaatgtaaatggctctagagttagagtgactgtttgctcttctgctttctggaatgcagatgacagtatggaaagaaagaataatgattctatctaataggaaaggatttcttctttcttttttaaagagtgggtggattttctcccttttgttttgcttttattttcatgctactaacatatcttcagaaggaaatggcaactagtagatcagtaaaattacgaaaacgatgcctgcaaaatttgaaggaatgcaattctgatttgccatttatcagggaaaactgaaagcatttttcttataactttttttctttttctttttttttggaggggggaggcagggtcttgctctgtccctcaggctggagcttagctcagtgcagcctccaactcctgggctcaagcaatcctcccactttagcctcctgagtagctgggactacaggcgtgtgccagcgcgcctggctaattttaaaatttttttgtagagacagagtctccctctgttgcccaggctggtctggaactcctagcttcaaatgatcctctcacctcggcctcccaaaatcctgggattccaggcgtcagccactgctctcggccctcttacaccattttgtttgattgtctagtccctgtttctttttctttctaatccttattcatttaagcaaaaccatacattatcttttccagtcctttcttgtattcttactgtttttttaaaataactttttgccttaatagctcattgtcactaataacttctgtgttctcccaggcagtgttataacagaagggcaatgaaaacattggacatgaccatgagtgcttcctttccttaactctctaggtttgtagtctgttttaaattaggattagttcctgcattctgaaatacattggcctagaacattttatcccaggcatttttgaatagaaaacagttgcgtgcttttattgaagattgttaaaataatcaccatagtaacttgatatgttagtatttttctttttccttttagtatgtttcaagtgcagtaatcgtacttgtctatccagtttctatgtatgatacgagttgcttacacgatgcatggctaacttgttaatttagttttctccttagagactttgagacccttaagagacaagattgagaaagagccatgtggcttggctctagaaacgtcattatcattaggaccatcagattttagattaagctgctattgaattaataaaatcccaatgaagcagagttatagggatagatttatagctggcagagtggtatcaaaggagaaaaacagtgaaaaagccaatttcactggttcgttcaatccagcttgttgctaatattagttacccttgttttaatgacagagagtggctggaatctgtagctaggggaggggcaacactgttagatgtgaggaaaggaagtgccaaaaatgcctggacagatggcttgtcccaaggccaggacacacactttaaaatccaacattcacctaagcaagtaattcttaaagatcttacagaaacgcagagtcaatcaggtttataaaggaaggctgaggggagagaggaggcctgggggcctggacgaagaggcctaggacctgaagagactccagcgagtctcgggaagcccaggggacctgtcaccatctgggcacttcccaggctcaatgctcagccagagtttgctggtggacctcaggattcgaagtgtgcaacagacggagtgcgcttgctgttcagggcggccccgtgcaggagcaccagctcaccctcaggcatctcggactggagggccagcagaaggtcagcaacttactcttaaaacgattgtttcggatcatattgatctctttcctttttccttttgtcctttcactgtatgacttgaatcagttttgattctatttgtaagtgtttcttgtcgtgaggcacctgccatgtctgttgcgttttcctcggcagcgtgtagggcttcagcttcctgggttttcacccttcctgcaggcactgtggggtcctgagggccagtgggtccatttcacctcttgctgcatgatggtcagtagctgatctgttatggcattcacttccagattaattttccgtgtttgaagtatgtgcatatgtgctttacagaataaaacatctgaattta

SEQ ID NO: 347013 - DNA, 1668 bp, Homo sapiens
  misc_feature (30)..(30): n is a, c, g, or t
cacgcgtcgcccacgcgtcgcccacgcgtnccgcggttgccggagcccgaactgaggcggcggcgggagcccggttggcgtctggtcttcgcgtcggccccgcggagccagacgctgcccccggcgcggggagaagatggtgcctagcggcctcgggcccgccacgcgccgccacgagtgagcccagcgcgaccgcgggcgtccgccgagcagctggcccggctgggcccggggcgcgcagctgcccgccggggcggggtggagctgatcagaataatgttcagcatcaaccccctggagaacctgaaggtgtacatcagcagtcggcctcccctggtggtcttcatgatcagcgtaagcgccatggccatagctttcctgaccctgggctacttcttcaaaatcaaggagattaaatccccagaaatggcagaggattggaatacttttctgctacggttcaatgatttggacttgtgtgtatcagagaatgaaaccctcaagcatctcacaaacgacaccacaactccggaaagtacaatgaccagcgggcaggcccgagcttccacccagtccccccaggccctggaggactcgggcccggtgaatatctcagtctcaatcaccctaaccctggacccactgaaacccttcggagggtattcccgcaacgtcacccatctgtactcaaccatcttagggcatcagattggactttcaggcagggaagcccacgaggagataaacatcaccttcaccctgcctacagcgtggagctcagatgactgcgccctccacggtcactgtgagcaggtggtattcacagcctgcatgaccctcacggccagccctggggtgttccccgtcactgtgatgaccgttcattaataaatttgcatctcatgcacaccagttacttcctctttgtgatggtgataacaatgttttgctatgctgttatcaagggcagacctagcaaattgcgtcagagcaatcctgaattttgtcccgagaaggtggctttggctgaagcctaattccacagctccttgttttttgagagagactgagagaaccataatccttgcctgctgaacccagcctgggcctggatgctctgtgaatacattatcttgcgatgttgggttattccagccaaagacatttcaagtgcctgtaactgatttgtacatatttataaaaatctattcagaaattggtccaataatgcacgtgctttgccctgggtacagccagagcccttcaaccccaccttggacttgaggacctacctgatgggacgtttccacgtgtctctagagaaggattcctggatctagctggtcacgacgatgttttcaccaaggtcacaggagcattgcgtcgctgatggggttgaagtttggtttggttcttgtttcagcccaatatgtagagaacatttgaaacagtctgcacctttgatacggtattgcatttccaaagccaccaatccattttgtggattttatgtgtctgtggcttaataatcatagtaacaacaataatacctttttctccattttgcttgcaggaaacataccttaagttttttttgttttgtttttgtttttttgttttttgttttcctttatgaagaaaaaataaaatagtcacattttaatacta

SEQ ID NO: 347014 - DNA, 1764 bp, Homo sapiens
ccctcgagtcgacggtatagataagcttgattctgatgtttgactggctaattttaaaatttttttgtagagacagagtctccctctgttgcccaggctggtctggaactcctagcttcaaatgatcctctcacctcggcctcccaaaatcctgggattccaggcgtcagccactgctctcggccctcttacaccattttgtttgattgtctagtccctgtttctttttctttctaatccttattcatttaagcaaaaccatacattatcttttccagtcctttcttgtattcttactgtttttttaaaataactttttgccttaatagctcattgtcactaataacttctgtgttctcccaggcagtgttataacagaagggcaatgaaaacattggacatgaccatgagtgcttcctttccttaactctctaggtttgtagtctgttttaaattaggattagttcctgcattctgaaatacattggcctagaacattttatcccaggcatttttgaatagaaaacagttgcgtgcttttattgaagattgttaaaataatcaccatagtaacttgatatgttagtatttttctttttccttttagtatgtttcaagtgcagtaatcgtacttgtctatccagtttctatgtatgatacgagttgcttacacgatgcatggctaacttgttaatttagttttctccttagagactttgagacccttaagagacaagattgagaaagagccatgtggcttggctctagaaacgtcattatcattaggaccatcagattttagattaagctgctattgaattaataaaatcccaatgaagcagagttatagggatagatttatagctggcagagtggtatcaaaggagaaaaacagtgaaaaagccaatttcactggttcgttcaatccagcttgttgctaatattagttacccttgttttaatgacagagagtggctggaatctgtagctaggggaggggcaacactgttagatgtgaggaaaggaagtgccaaaaatgcctggacagatggcttgtcccaaggccaggacacacactttaaaatccaacattcacctaagcaagtaattcttaaagatcttacagaaacgcagagtcaatcaggtttataaaggaaggctgaggggagagaggaggcctgggggcctggacgaagaggcctaggacctgaagagactccagcgagtctcgggaagcccaggggacctgtcaccatctgggcacttcccaggctcaatgctcagccagagtttgctggtggacctcaggattcgaagtgtgcaacagacggagtgcgcttgctgttcagggcggccccgtgcaggagcaccagctcaccctcaggcatctcggactggagggccagcagaaggtcagcaacttactcttaaaacgattgtttcggatcatattgatctctttcctttttccttttgtcctttcactgtatgacttgaatcagttttgattctatttgtaagtgtttcttgtcgtgaggcacctgccatgtctgttgcgttttcctcggcagcgtgtagggcttcagcttcctgggttttcacccttcctgcaggcactgtggggtcctgagggccagtgggtccatttcacctcttgctgcatgatggtcagtagctgatctgttatggcattcacttccagattaattttccgtgtttgaagtatgtgcatatgtgctttacagaataaaacatctgaattta

SEQ ID NO: 347015 - DNA, 1323 bp, Homo sapiens
gactctatgaggatcgcccccagttcctgcattctgaaatacattggcctagaacattttatcccaggcatttttgaatagaaaacagttgcgtgcttttattgaagattgttaaaataatcaccatagtaacttgatatgttagtatttttctttttccttttagtatgtttcaagtgcagtaatcgtacttgtctatccagtttctatgtatgatacgagttgcttacacgatgcatggctaacttgttaatttagttttctccttagagactttgagacccttaagagacaagattgagaaagagccatgtggcttggctctagaaacgtcattatcattaggaccatcagattttagattaagctgctattgaattaataaaatcccaatgaagcagagttatagggatagatttatagctggcagagtggtatcaaaggagaaaaacagtgaaaaagccaatttcactggttcgttcaatccagcttgttgctaatattagttacccttgttttaatgacagagagtggctggaatctgtagctaggggaggggcaacactgttagatgtgaggaaaggaagtgccaaaaatgcctggacagatggcttgtcccaaggccaggacacacactttaaaatccaacattcacctaagcaagtaattcttaaagatcttacagaaacgcagagtcaatcaggtttataaaggaaggctgaggggagagaggaggcctgggggcctggacgaagaggcctaggacctgaagagactccagcgagtctcgggaagcccaggggacctgtcaccatctgggcacttcccaggctcaatgctcagccagagtttgctggtggacctcaggattcgaagtgtgcaacagacggagtgcgcttgctgttcagggcggccccgtgcaggagcaccagctcaccctcaggcatctcggactggagggccagcagaaggtcagcaacttactcttaaaacgattgtttcggatcatattgatctctttcctttttccttttgtcctttcactgtatgacttgaatcagttttgattctatttgtaagtgtttcttgtcgtgaggcacctgccatgtctgttgcgttttcctcggcagcgtgtagggcttcagcttcctgggttttcacccttcctgcaggcactgtggggtcctgagggccagtgggtccatttcacctcttgctgcatgatggtcagtagctgatctgttatggcattcacttccagattaattttccgtgtttgaagtatgtgcatatgtgctttacagaataaaacatctgaattta

SEQ ID NO: 347016 - DNA, 904 bp, Homo sapiens
gtctagaggatccctcactctagtcagaaaaacagtgaaaaagccaatttcactggttcgttcaatccagcttgttgctaatattagttacccttgttttaatgacagagagtggctggaatctgtagctaggggaggggcaacactgttagatgtgaggaaaggaagtgccaaaaatgcctggacagatggcttgtcccaaggccaggacacacactttaaaatccaacattcacctaagcaagtaattcttaaagatcttacagaaacgcagagtcaatcaggtttataaaggaaggctgaggggagagaggaggcctgggggcctggacgaagaggcctaggacctgaagagactccagcgagtctcgggaagcccaggggacctgtcaccatctgggcacttcccaggctcaatgctcagccagagtttgctggtggacctcaggattcgaagtgtgcaacagacggagtgcgcttgctgttcagggcggccccgtgcaggagcaccagctcaccctcaggcatctcggactggagggccagcagaaggtcagcaacttactcttaaaacgattgtttcggatcatattgatctctttcctttttccttttgtcctttcactgtatgacttgaatcagttttgattctatttgtaagtgtttcttgtcgtgaggcacctgccatgtctgttgcgttttcctcggcagcgtgtagggcttcagcttcctgggttttcacccttcctgcaggcactgtggggtcctgagggccagtgggtccatttcacctcttgctgcatgatggtcagtagctgatctgttatggcattcacttccagattaattttccgtgtttgaagtatgtgcatatgtgctttacagaataaaacatctgaattta

SEQ ID NO: 347017 - DNA, 1666 bp, Homo sapiens
  misc_feature (30)..(30): n is a, c, g, or t
cacgcgtcgcccacgcgtcgcccacgcgtnccgcggttgccggagcccgaactgaggcggcggcgggagcccggttggcgtctggtcttcgcgtcggccccgcggagccagacgctgcccccggcgcggggagaagatggtgcctagcggcctcgggcccgccacgcgccgccacgagtgagcccagcgcgaccgcgggcgtccgccgagcagctggcccggctgggcccggggcgcgcagctgcccgccggggcggggtggagctgatcagaataatgttcagcatcaaccccctggagaacctgaaggtgtacatcagcagtcggcctcccctggtggtcttcatgatcagcgtaagcgccatggccatagctttcctgaccctgggctacttcttcaaaatcaaggagattaaatccccagaaatggcagaggattggaatacttttctgctacggttcaatgatttggacttgtgtgtatcagagaatgaaaccctcaagcatctcacaaacgacaccacaactccggaaagtacaatgaccagcgggcaggcccgagcttccacccagtccccccaggccctggaggactcgggcccggtgaatatctcagtctcaatcaccctaaccctggacccactgaaacccttcggagggtattcccgcaacgtcacccatctgtactcaaccatcttagggcatcagattggactttcaggcagggaagcccacgaggagataaacatcaccttcaccctgcctacagcgtggagctcagatgactgcgccctccacggtcactgtgagcaggtggtattcacagcctgcatgaccctcacggccagccctggggtgttccccgtcactgtacagccaccgcactgtgttcctgacacgtacagcaacgccacgctctggtacaagatcttcacaactgccagagatgccaacacaaaatacgcccaagattacaatcctttctggtgttataagggggccattggaaaagtctatcatgctttaaatcccaagcttacagtgattgttccagatgatgaccgttcattaataaatttgcatctcatgcacaccagttacttcctctttgtgatggtgataacaatgttttgctatgctgttatcaagggcagacctagcaaattgcgtcagagcaatcctgaattttgtcccgagaaggtggctttggctgaagcctaattccacagctccttgttttttgagagagactgagagaaccataatccttgcctgctgaacccagcctgggcctggatgctctgtgaatacattatcttgcgatgttgggttattccagccaaagacatttcaagtgcctgtaactgatttgtacatatttataaaaatctattcagaaattggtccaataatgcacgtgctttgccctgggtacagccagagcccttcaaccccaccttggacttgaggacctacctgatgggacgtttccacgtgtctctagagaaggattcctggatctagctggtcacgacgatgttttcaccaaggtcacaggagcattgcgtcgctgatggggttgaagtgaatgccataacagatcagctactgaccatcatgcagcaagaggtgaaatggacccactggccctcaggaccccacagtg

SEQ ID NO: 347018 - DNA, 1578 bp, Homo sapiens
  misc_feature (30)..(30): n is a, c, g, or t
cacgcgtcgcccacgcgtcgcccacgcgtnccgcggttgccggagcccgaactgaggcggcggcgggagcccggttggcgtctggtcttcgcgtcggccccgcggagccagacgctgcccccggcgcggggagaagatggtgcctagcggcctcgggcccgccacgcgccgccacgagtgagcccagcgcgaccgcgggcgtccgccgagcagctggcccggctgggcccggggcgcgcagctgcccgccggggcggggtggagctgatcagaataatgttcagcatcaaccccctggagaacctgaaggtgtacatcagcagtcggcctcccctggtggtcttcatgatcagcgtaagcgccatggccatagctttcctgaccctgggctacttcttcaaaatcaaggagattaaatccccagaaatggcagaggattggaatacttttctgctacggttcaatgatttggacttgtgtgtatcagagaatgaaaccctcaagcatctcacaaacgacaccacaactccggaaagtacaatgaccagcgggcaggcccgagcttccacccagtccccccaggccctggaggactcgggcccggtgaatatctcagtctcaatcaccctaaccctggacccactgaaacccttcggagggtattcccgcaacgtcacccatctgtactcaaccatcttagggcatcagattggactttcaggcagggaagcccacgaggagataaacatcaccttcaccctgcctacagcgtggagctcagatgactgcgccctccacggtcactgtgagcaggtggtattcacagcctgcatgaccctcacggccagccctggggtgttccccgtcactgtacagccaccgcactgtgttcctgacacgtacagcaacgccacgctctggtacaagatcttcacaactgccagagatgccaacacaaaatacgcccaagattacaatcctttctggtgttataagggggccattggaaaagtctatcatgctttaaatcccaagcttacagtgattgttccagatgatgaccgttcattaataaatttgcatctcatgcacaccagttacttcctctttgtgatggtgataacaatgttttgctatgctgttatcaagggcagacctagcaaattgcgtcagagcaatcctgaattttgtcccgagaaggtggctttggctgaagcctaattccacagctccttgttttttgagagagactgagagaaccataatccttgcctgctgaacccagcctgggcctggatgctctgtgaatacattatcttgcgatgttgggttattccagccaaagacatttcaatgattctcctgcttcagcctcccgagtagctgggactacaggcgtgcaccaccatgcctggctaatttttgtatttttagtagagacagggtttcaccatgtgggtcaggctggtctcaaactcctgacctcaggtgatccgcctgcctcggcctcccaaagtgttgggattgcaggtgtgagtcacctcccctggccttgaagtagatttttaaaagcttgca

SEQ ID NO: 347019 - DNA, 760 bp, Homo sapiens
  misc_feature (30)..(30): n is a, c, g, or t
cacgcgtcgcccacgcgtcgcccacgcgtnccgcggttgccggagcccgaactgaggcggcggcgggagcccggttggcgtctggtcttcgcgtcggccccgcggagccagacgctgcccccggcgcggggagaagatggtgcctagcggcctcgggcccgccacgcgccgccacgagtgagcccagcgcgaccgcgggcgtccgccgagcagctggcccggctgggcccggggcgcgcagctgcccgccggggcggggtggagctgatcagaataatgttcagcatcaaccccctggagaacctgaaggtgtacatcagcagtcggcctcccctggtggtcttcatgatcagcgtaagcgccatggccatagctttcctgaccctgggctacttcttcaaaatcaaggagattaaatccccagaaatggcagaggattggaatacttttctgctacggttcaatgatttggacttgtgtgtatcagagaatgaaaccctcaagcatctcacaaacgacaccacaactccggaaagtacaatgaccagcgggcaggcccgagcttccacccagtccccccaggccctggaggactcgggcccggtgaatatctcagtctcaatcaccctaaccctggacccactgaaacccttcggagggtattcccgcaacgtcacccatctgtactcaaccatcttagggcatcagattggactttcaggcaaggggaaagccccaccgaagggaggatttaaaccat

SEQ ID NO: 347020 - DNA, 421 bp, Homo sapiens
  misc_feature (30)..(30): n is a, c, g, or t
cacgcgtcgcccacgcgtcgcccacgcgtnccgcggttgccggagcccgaactgaggcggcggcgggagcccggttggcgtctggtcttcgcgtcggccccgcggagccagacgctgcccccggcgcggggagaagatggtgcctagcggcctcgggcccgccacgcgccgccacgagtgagcccagcgcgaccgcgggcgtccgccgagcagctggcccggctgggcccggggcgcgcagctgcccgccggggcggggtggagctgatcagaataatgttcagcatcaaccccctggagaacctgaaggtgtacatcagcagtcggcctcccctggtggtcttcatgatcagcgtaagcgccatggccatagctttcctgaccctgggctacttcttcctacggttctgatttggcttgt

SEQ ID NO: 347021 - DNA, 801 bp, Homo sapiens
gcttcgtggctctgagttgagtaggactcatggtcagggtcaggactgctcttcttcctcagatcccacaaaggcaggtgcctgggctgatagatgattcctgtgtgggtttgatttcaggatttatttgtatcccagagaatgacaagtacgtggttcttgactttataaaaaaatgatttctctttcataggcagggaagcccacgaggagataaacatcaccttcaccctgcctacagcgtggagctcagatgactgcgccctccacggtcactgtgagcaggtggtattcacagcctgcatgaccctcacggccagccctggggtgttccccgtcactgtgtaagtgtacccggcacctgatgaacgtgcgtaacaagctccacttgccgtgagtacggctgggctgcttcagctgtaaattctcaggatggctcacttcacatttctttatagaattatctctactcggacctatctaaaggattatttaatttgtctaaaggattatttaatttggaattctaaagatagaacttctgcatataaaatcagaaagttagtgccccctcgaggcagtaaaagcacctggctgttgttggacattcataggctgtctttcccgcaggagtagaagcagcaagttacagaaaagaggctcactgtggccgggtgccgtggctcaggcctgcgatcccagcactgtggaaggctgaggtgggaggatcacttgagccccggagttcaagaccagcctggacaacatatagggagaccctgtctctatttaaaaaaaaga

SEQ ID NO: 347022 - DNA, 3337 bp, Homo sapiens
  misc_feature (30)..(30): n is a, c, g, or t
  misc_feature (3312)..(3313): n is a, c, g, or t
cacgcgtcgcccacgcgtcgcccacgcgtnccgcggttgccggagcccgaactgaggcggcggcgggagcccggttggcgtctggtcttcgcgtcggccccgcggagccagacgctgcccccggcgcggggagaagatggtgcctagcggcctcgggcccgccacgcgccgccacgagtgagcccagcgcgaccgcgggcgtccgccgagcagctggcccggctgggcccggggcgcgcagctgcccgccggggcggggtggagctgatcagaataatgttcagcatcaaccccctggagaacctgaaggtgtacatcagcagtcggcctcccctggtggtcttcatgatcagcgtaagcgccatggccatagctttcctgaccctgggctacttcttcaaaatcaaggagattaaatccccagaaatggcagaggattggaatacttttctgctacggttcaatgatttggacttgtgtgtatcagagaatgaaaccctcaagcatctcacaaacgacaccacaactccggaaagtacaatgaccagcgggcaggcccgagcttccacccagtccccccaggccctggaggactcgggcccggtgaatatctcagtctcaatcaccctaaccctggacccactgaaacccttcggagggtattcccgcaacgtcacccatctgtactcaaccatcttagggcatcagattggactttcaggcagggaagcccacgaggagataaacatcaccttcaccctgcctacagcgtggagctcagatgactgcgccctccacggtcactgtgagcaggtggtattcacagcctgcatgaccctcacggccagccctggggtgttccccgtcactgtacagccaccgcactgtgttcctgacacgtacagcaacgccacgctctggtacaagatcttcacaactgccagagatgccaacacaaaatacgcccaagattacaatcctttctggtgttataagggggccattggaaaagtctatcatgctttaaatcccaagcttacagtgattgttccagatgatgaccgttcattaataaatttgcatctcatgcacaccagttacttcctctttgtgatggtgataacaatgttttgctatgctgttatcaagggcagacctagcaaattgcgtcagagcaatcctgaattttgtcccgagaaggtggctttggctgaagcctaattccacagctccttgttttttgagagagactgagagaaccataatccttgcctgctgaacccagcctgggcctggatgctctgtgaatacattatcttgcgatgttgggttattccagccaaagacatttcaagtgcctgtaactgatttgtacatatttataaaaatctattcagaaattggtccaataatgcacgtgctttgccctgggtacagccagagcccttcaaccccaccttggacttgaggacctacctgatgggacgtttccacgtgtctctagagaaggattcctggatctagctggtcacgacgatgttttcaccaaggtcacaggagcattgcgtcgctgatggggttgaagtttggtttggttcttgtttcagcccaatatgtagagaacatttgaaacagtctgcacctttgatacggtattgcatttccaaagccaccaatccattttgtggattttatgtgtctgtggcttaataatcatagtaacaacaataatacctttttctccattttgcttgcaggaaacataccttaagttttttttgttttgtttttgtttttttgttttttgttttcctttatgaagaaaaaataaaatagtcacattttaatactactctagttaggacagacttgtgcttttatcctgactaaaaagttaaatatttaagtcacatacatggtaaagatctaagtttcattttccacatggatgaccaggaacctggtcttgttggagctggcataggaggttctactgtcttgtcgtccactcttgtccctcccttctgttatcaaagttaaagcgcctcttcactcaaaagggcttcaaaatgtaaatggctctagagttagagtgactgtttgctcttctgctttctggaatgcagatgacagtatggaaagaaagaataatgattctatctaataggaaaggatttcttctttcttttttaaagagtgggtggattttctcccttttgttttgcttttattttcatgctactaacatatcttcagaaggaaatggcaactagtagatcagtaaaattacgaaaacgatgcctgcaaaatttgaaggaatgcaattctgatttgccatttatcagggaaaactgaaagcatttttcttataactttttttctttttctttttttttggaggggggaggcagggtcttgctctgtccctcaggctggagcttagctcagtgcagcctccaactcctgggctcaagcaatcctcccactttagcctcctgagtagctgggactacaggcgtgtgccagcgcgcctggctaattttaaaatttttttgtagagacagagtctccctctgttgcccaggctggtctggaactcctagcttcaaatgatcctctcacctcggcctcccaaaatcctgggattccaggcgtcagccactgctctcggccctcttacaccattttgtttgattgtctagtccctgtttctttttctttctaatccttattcatttaagcaaaaccatacattatcttttccagtcctttcttgtattcttactgtttttttaaaataactttttgccttaatagctcattgtcactaataacttctgtgttctcccaggcagtgttataacagaagggcaatgaaaacattggacatgaccatgagtgcttcctttccttaactctctaggtttgtagtctgttttaaattaggattagttcctgcattctgaaatacattggcctagaacattttatcccaggcatttttgaatagaaaacagttgcgtgcttttattgaagattgttaaaataatcaccatagtaacttgatatgttagtatttttctttttccttttagtatgtttcaagtgcagtaatcgtacttgtctatccagtttctatgtatgatacgagttgcttacacgatgcatggctaacttgttaatttagttttctccttagagactttgagacccttaagagacaagattgagaaagagccatgtggcttggctctagaaacgtcattatcattaggaccatcagattttagattaagctgctattgaaacttnnaaactaggggtccggctcgatcta

SEQ ID NO: 347023 - DNA, 1383 bp, Homo sapiens
  misc_feature (30)..(30): n is a, c, g, or t
cacgcgtcgcccacgcgtcgcccacgcgtnccgcggttgccggagcccgaactgaggcggcggcgggagcccggttggcgtctggtcttcgcgtcggccccgcggagccagacgctgcccccggcgcggggagaagatggtgcctagcggcctcgggcccgccacgcgccgccacgagtgagcccagcgcgaccgcgggcgtccgccgagcagctggcccggctgggcccggggcgcgcagctgcccgccggggcggggtggagctgatcagaataatgttcagcatcaaccccctggagaacctgaaggtgtacatcagcagtcggcctcccctggtggtcttcatgatcagcgtaagcgccatggccatagctttcctgaccctgggctacttcttcaaaatcaaggagattaaatccccagaaatggcagaggattggaatacttttctgctacggttcaatgatttggacttgtgtgtatcagagaatgaaaccctcaagcatctcacaaacgacaccacaactccggaaagtacaatgaccagcgggcaggcccgagcttccacccagtccccccaggccctggaggactcgggcccggtgaatatctcagtctcaatcaccctaaccctggacccactgaaacccttcggagggtattcccgcaacgtcacccatctgtactcaaccatcttagggcatcagattggactttcaggcagggaagcccacgaggagataaacatcaccttcaccctgcctacagcgtggagctcagatgactgcgccctccacggtcactgtgagcaggtggtattcacagcctgcatgaccctcacggccagccctggggtgttccccgtcactgtacagccaccgcactgtgttcctgacacgtacagcaacgccacgctctggtacaagatcttcacaactgccagagatgccaacacaaaatacgcccaagattacaatcctttctggtgttataagggggccattggaaaagtctatcatgctttaaatcccaagcttacagtgattgttccagatgtaagtgagaaaaattgtgtgtgtgtgtgtgcgtgcatgcatatgcacatgtgtgcgcatgtgctgcaaccgttggtgtaggccctgctgacttccctgggtaagcgtatcctctgccactttagatttccaggtgagttaggacactaggcggagtggtggatgcttggaaaaacatgttacccattggttaagaaaaatctggtttttctcttcattttctctgttgttcagcagcagttatttcttgagcaactgcctaatccctggggggggttacaagggatccttctattaatattatcttagagggatgttcacagacgt

SEQ ID NO: 347024 - DNA, 721 bp, Homo sapiens
  misc_feature (30)..(30): n is a, c, g, or t
cacgcgtcgcccacgcgtcgcccacgcgtnccgcggttgccggagcccgaactgaggcggcggcgggagcccggttggcgtctggtcttcgcgtcggccccgcggagccagacgctgcccccggcgcggggagaagatggtgcctagcggcctcgggcccgccacgcgccgccacgagtgagcccagcgcgaccgcgggcgtccgccgagcagctggcccggctgggcccggggcgcgcagctgcccgccggggcggggtggagctgatcagaataatgttcagcatcaaccccctggagaacctgaaggtgtacatcagcagtcggcctcccctggtggtcttcatgatcagcgtaagcgccatggccatagctttcctgaccctgggctacttcttcaaaatcaaggagattaaatccccagaaatggcagaggattggaatacttttctgctacggttcaatgatttggacttgtgtgtatcagagaatgaaaccctcaagcatctcacaaacgacaccacaactccggaaagtacaatgaccagcgggcaggcccgagcttccacccagtccccccaggccctggaggactcgggcccggtgaatatctcagtctcaatcaccctaaccctggacccactgaaacccttcggagggtattcccgcaacgttacttaagcgacagcggggatacctcaagagacgaccagcagaatgc

SEQ ID NO: 347025 - DNA, 1233 bp, Homo sapiens
accacacatcttctattctgtctggggtttagcaaccatgtaattgttacatgaagtttcaaagtgtattgatgagttgtagctgattttgtttttctctttaaatatatgaacatttttaagaaattactaaacagaaaattttttcttagatgtattatatgcattaaacatagaaactgaaaaagaaattgtgttcctagtttattataactatttttcttttgctttgactcttcctgtgtgacttcattaactcatttcctcagggttttcaacacatcattttgatactggcagatgataacttacatgtgtagccctctttcaagtgttcgaaatgtgtattctttctaaatctaaagaaataattctgtaaaaatgttgatcttattatatgtattagtgctgatcttatacaaatttcattatctttcatctgatattcatatcaaaaattaatctcccattttgatagagatcctgcatgttagagattgaagaaacttgaatggccttataattttggaatcctaaactgtgttgtttagacattatgattatgtgtaactggagggtaggaagtcattaggaagcagttgtgggatatgcagagaccccatttgattgaaattttaggaacaaatttgtgtccgcagaataatcctttagttcaaatgagaaggatgcattagaattcaagttgcatattttagccaagtttagaataactgagcctagaaagtaactttcatatgatgtttttttctgtatgctttaggattaatttgtatcatttattgttccagtattaatgatactgttattgctatatattttaattggccaaaagctataccagataataattttggtgtttgttttgtcctgagtgggacatctgacatctagtaattgcaggagttaagatcttagaatggtttggcaagagactatagtgctgaagtaaatgctgtgttactttcttctatgttagtttttttccgaaagtattttcttttcacggtgttgatttctttttgcatattttagctcctaactgggcaactcaagattctggcttctactgaagaaccataaagaaaagatgaaaaaaaaaactatcaaagaaagatgaaataataaaactattatataaagggtgacttacattttggaaacaacatattacgtataaattttgaagaattggaataaaattgattcatttta

SEQ ID NO: 347026 - DNA, 1412 bp, Homo sapiens
tgtcggcgctaccaataaagttttagtgagcacagactcccttttctttggcaagatggcggagtacgacttgactactcgcatcgcgcactttttggatcggcatctagtctttccgcttcttgaatttctctctgtaaaggagatatataatgaaaaggaattattacaaggtaaattggaccttcttagtgataccaacatggtagactttgctatggatgtatacaaaaacctttattctgatgatattcctcatgctttgagagagaaaagaaccacagtggttgcacaactgaaacagcttcaggcagaaacagaaccaattgtgaagatgtttgaagatccagaaactacaaggcaaatgcagtcaaccagggatggtaggatgctctttgactacctggcggacaagcatggttttaggcaggaatatttagatacactctacagatatgcaaaattccagtacgaatgtgggaattactcaggagcagcagaatatctttatttttttagagtgctggttccagcaacagatagaaatgctttaagttcactctggggaaagctggcctctgaaatcttaatgcagaattgggatgcagccatggaagaccttacacggttaaaagagaccatagataataattctgtgagttctccacttcagtctcttcagcagagaacatggctcattcactggtctctgttggtttcttcaatcaccccaaaggtcgcgataatattattgacctcttcctttatcagccacaatatcttaatgcaattcagacaatgtgtccacacattcttcgctatttgactacagcagtcataacaaacaaggatgttcgaaaacgtcggcaggttctaaaagatctagttaaagttattcaacaggagtcttacacatataaagacccaattacagaatttgttgaatgtttatatgttaactttgactttgatggggctcagaaaaagctgagggaatgtgaatcagtgcttgtgaatgacttcttcttggtggcttgtcttgaggatttcattgaaaatgcccgtctcttcatatttgagactttctgtcgcatccaccagtgtatcagcattaacatgttggcagataaattgaacatgactccagaagaagctgaaaggtggattgtaaatttgattagaaatgcaagactggatgccaagattgattctaaattaggtcatgtggttatgggtaacaatgcagtctcaccctatcagcaagtgattgaaaagaccaaaagcctttcctttagaagccagatgttggccatgaatattgagaagaaacttaatcagaatagcaggtcagaggctcctaactgggcaactcaagattctggcttctactgaagaaccataaagaaaagatg

SEQ ID NO: 347027 - DNA, 892 bp, Homo sapiens
tgtcggcgctaccaataaagttttagtgagcacagactcccttttctttggcaagatggcggagtacgacttgactactcgcatcgcgcactttttggatcggcatctagtctttccgcttcttgaatttctctctgtaaaggagatatataatgaaaaggaattattacaaggtaaattggaccttcttagtgataccaacatggtagactttgctatggatgtatacaaaaacctttattctgatgatattcctcatgctttgagagagaaaagaaccacagtggttgcacaactgaaacagcttcaggcagaaacagaaccaattgtgaagatgtttgaagatccagaaactacaaggcaaatgcagtcaaccagggatggtaggatgctctttgactacctggcggacaagcatggttttaggcaggaatatttagatacactctacagatatgcaaaattccagtacgaatgtgggaattactcaggagcagcagaatatctttatttttttagagtgctggttccagcaacagatagaaatgctttaagttcactctggggaaagctggcctctgaaatcttaatgcagaattgggatgcagccatggaagaccttacacggttaaaagagaccatagataataattctgtgagttctccacttcagtctcttcagcagagaacatggctcattcactggtctctgttggtttcttcaatcacccaaggtgggagattttaggaactctcctatcaggcaattttatgccttgcacgggtcccttttggtttggtcagggtttacacagggtcgaaggcgggctcagatccctagtttcgggtccatagcctcagtggggttacggcgggcacggagagcaactgc

SEQ ID NO: 347028 - DNA, 393 bp, Homo sapiens
gtatgtcatgctttttacttacctgagaaactcagtcattaacattataggatcaatttccctgtgtttccttttagggtcatgtggttatgggtaacaatgcagtctcaccctatcagcaagtgattgaaaagaccaaaagcctttcctttagaagccagatgttggccatgaatattgagaagaaacttaatcagaatagcaggtcagaggctcctaactgggcaactcaagattctggcttctactgaagaaccataaagaaaagatgaaaaaaaaaactatcaaagaaagatgaaataataaaactattatataaagggtgacttacattttggaaacaacatattacgtataaattttgaagaattggaataaaattgattcatttta

SEQ ID NO: 347029 - DNA, 1111 bp, Homo sapiens
accacacatcttctattctgtctggggtttagcaaccatgtaattgttacatgaagtttcaaagtgtattgatgagttgtagctgattttgtttttctctttaaatatatgaacatttttaagaaattactaaacagaaaattttttcttagatgtattatatgcattaaacatagaaactgaaaaagaaattgtgttcctagtttattataactatttttcttttgctttgactcttcctgtgtgacttcattaactcatttcctcagggttttcaacacatcattttgatactggcagatgataacttacatgtgtagccctctttcaagtgttcgaaatgtgtattctttctaaatctaaagaaataattctgtaaaaatgttgatcttattatatgtattagtgctgatcttatacaaatttcattatctttcatctgatattcatatcaaaaattaatctcccattttgatagagatcctgcatgttagagattgaagaaacttgaatggccttataattttggaatcctaaactgtgttgtttagacattatgattatgtgtaactggagggtaggaagtcattaggaagcagttgtgggatatgcagagaccccatttgattgaaattttaggaacaaatttgtgtccgcagaataatcctttagttcaaatgagaaggatgcattagaattcaagttgcatattttagccaagtttagaataactgagcctagaaagtaactttcatatgatgtttttttctgtatgctttaggattaatttgtatcatttattgttccagtattaatgatactgttattgctatatattttaattggccaaaagctataccagataataattttggtgtttgttttgtcctgagtgggacatctgacatctagtaattgcaggagttaagatcttagaatggtttggcaagagactatagtgctgaagtaaatgctgtgttactttcttctatgttagtttttttccgaaagtattttcttttcacggtgttgatttctttttgcatattttagctcctaactgggcaactcaagattctggcttctactgaagaaccataaagaaaagatg

SEQ ID NO: 347030 - DNA, 282 bp, Homo sapiens
gcggccgcctactactactactactgctcgaattcaagcttctaacgatgtacggggacatgaatattgagaagaaacttaatcagaatagcaggtcagaggctcctaactgggcaactcaagattctggcttctactgaagaaccataaagaaaagatgaaaaaaaaaactatcaaagaaagatgaaataataaaactattatataaagggtgacttacattttggaaacaacatattacgtataaattttgaagaattggaataaaattgattcatttta

SEQ ID NO: 347031 - DNA, 1857 bp, Homo sapiens
tgtcggcgctaccaataaagttttagtgagcacagactcccttttctttggcaagatggcggagtacgacttgactactcgcatcgcgcactttttggatcggcatctagtctttccgcttcttgaatttctctctgtaaaggagatatataatgaaaaggaattattacaaggtaaattggaccttcttagtgataccaacatggtagactttgctatggatgtatacaaaaacctttattctgatgatattcctcatgctttgagagagaaaagaaccacagtggttgcacaactgaaacagcttcaggcagaaacagaaccaattgtgaagatgtttgaagatccagaaactacaaggcaaatgcagtcaaccagggatggtaggatgctctttgactacctggcggacaagcatggttttaggcaggaatatttagatacactctacagatatgcaaaattccagtacgaatgtgggaattactcaggagcagcagaatatctttatttttttagagtgctggttccagcaacagatagaaatgctttaagttcactctggggaaagctggcctctgaaatcttaatgcagaattgggatgcagccatggaagaccttacacggttaaaagagaccatagataataattctgtgagttctccacttcagtctcttcagcagagaacatggctcattcactggtctctgttggtttcttcaatcaccccaaaggtcgcgataatattattgacctcttcctttatcagccacaatatcttaatgcaattcagacaatgtgtccacacattcttcgctatttgactacagcagtcataacaaacaaggatgttcgaaaacgtcggcaggttctaaaagatctagttaaagttattcaacaggagtcttacacatataaagacccaattacagaatttgttgaatgtttatatgttaactttgactttgatggggctcagaaaaagctgagggaatgtgaatcagtgcttgtgaatgacttcttcttggtggcttgtcttgaggatttcattgaaaatgcccgtctcttcatatttgagactttctgtcgcatccaccagtgtatcagcattaacatgttggcagataaattgaacatgactccagaagaagctgaaaggtggattgtaaatttgattagaaatgcaagactggatgccaagattgattctaaattaggtcatgtggttatgggtaacaatgcagtctcaccctatcagcaagtgattgaaaagaccaaaagcctttcctttagaagccagatgttggccatgaatattgagaagaaacttaatcagaatagcaggtcagaggctcctaactgggcaactcaagattctggcttctactgaagaaccataaagaaaagatgaaaaaaaaaactatcaaagaaagatgaaataataaaactattatataaagggtgacttacattttggaaacaacatattacgtataaattttgaagaattggaataaaattgattcattttaaaaaaaaaaaaaaaaaaaaaaaggcggccgccgcgccggcgggcggcaaggctccgggccagcatgggggcttcgtggtgactgtcaagcaagagcgcggcgagggtccacgcgcgggcgagaaggggtcccacgaggaggagccggtgaagaaacgcggctggcccaagggcaagaagcggaagaagattctgccgaatgggcccaaggcaccggtcacgggctacgtgcgcttcctgaacgagcggcgcgagcagatccgcacgcgccacccggatctgccctttcccgagatcaccaagatgctgggcgccgagtgagca

SEQ ID NO: 347032 - DNA, 1854 bp, Homo sapiens
tgtcggcgctaccaataaagttttagtgagcacagactcccttttctttggcaagatggcggagtacgacttgactactcgcatcgcgcactttttggatcggcatctagtctttccgcttcttgaatttctctctgtaaaggagatatataatgaaaaggaattattacaaggtaaattggaccttcttagtgataccaacatggtagactttgctatggatgtatacaaaaacctttattctgatgatattcctcatgctttgagagagaaaagaaccacagtggttgcacaactgaaacagcttcaggcagaaacagaaccaattgtgaagatgtttgaagatccagaaactacaaggcaaatgcagtcaaccagggatggtaggatgctctttgactacctggcggacaagcatggttttaggcaggaatatttagatacactctacagatatgcaaaattccagtacgaatgtgggaattactcaggagcagcagaatatctttatttttttagagtgctggttccagcaacagatagaaatgctttaagttcactctggggaaagctggcctctgaaatcttaatgcagaattgggatgcagccatggaagaccttacacggttaaaagagaccatagataataattctgtgagttctccacttcagtctcttcagcagagaacatggctcattcactggtctctgttggtttcttcaatcaccccaaaggtcgcgataatattattgacctcttcctttatcagccacaatatcttaatgcaattcagacaatgtgtccacacattcttcgctatttgactacagcagtcataacaaacaaggatgttcgaaaacgtcggcaggttctaaaagatctagttaaagttattcaacaggagtcttacacatataaagacccaattacagaatttgttgaatgtttatatgttaactttgactttgatggggctcagaaaaagctgagggaatgtgaatcagtgcttgtgaatgacttcttcttggtggcttgtcttgaggatttcattgaaaatgcccgtctcttcatatttgagactttctgtcgcatccaccagtgtatcagcattaacatgttggcagataaattgaacatgactccagaagaagctgaaaggtggattgtaaatttgattagaaatgcaagactggatgccaagattgattctaaattaggtcatgtggttatgggtaacaatgcagtctcaccctatcagcaagtgattgaaaagaccaaaagcctttcctttagaagccagatgttggccatgaatattgagaagaaacttaatcagaatagcaggtcagaggctcctaactgggcaactcaagattctggcttctactgaagaaccataaagaaaagatgaaaaaaaaaactatcaaagaaagatgaaataataaaactattatataaagggtgacttacattttggaaacaacatattacgtataaattttgaagaattggaataaaattgattcattttaaaaaaaaaaaaaaaaaaaaaaaaaaaaaaaaacattttaaccaacattgcccaaattactttatacttaaacaaatttatgtcagcggcactctattctcagttaattagtccaatttcccttattgtggtcctatccaaatcactgcccatggttaacccctcttaactgggtaaccccggtttaacccacttaattgcctcgtactaattcctatttctcggctggcttaaaatgtaatggttcctaaccaattcgcctttataaacatgggtacatatttgatggtccattgtaaactgcacctttaaatattttgt

SEQ ID NO: 347033 - DNA, 1479 bp, Homo sapiens
  misc_feature (1441)..(1441): n is a, c, g, or t
  misc_feature (1453)..(1453): n is a, c, g, or t
  misc_feature (1455)..(1455): n is a, c, g, or t
  misc_feature (1458)..(1458): n is a, c, g, or t
  misc_feature (1461)..(1461): n is a, c, g, or t
  misc_feature (1469)..(1470): n is a, c, g, or t
tgtcggcgctaccaataaagttttagtgagcacagactcccttttctttggcaagatggcggagtacgacttgactactcgcatcgcgcactttttggatcggcatctagtctttccgcttcttgaatttctctctgtaaaggagatatataatgaaaaggaattattacaaggtaaattggaccttcttagtgataccaacatggtagactttgctatggatgtatacaaaaacctttattctgatgatattcctcatgctttgagagagaaaagaaccacagtggttgcacaactgaaacagcttcaggcagaaacagaaccaattgtgaagatgtttgaagatccagaaactacaaggcaaatgcagtcaaccagggatggtaggatgctctttgactacctggcggacaagcatggttttaggcaggaatatttagatacactctacagatatgcaaaattccagtacgaatgtgggaattactcaggagcagcagaatatctttatttttttagagtgctggttccagcaacagatagaaatgctttaagttcactctggggaaagctggcctctgaaatcttaatgcagaattgggatgcagccatggaagaccttacacggttaaaagagaccatagataataattctgtgagttctccacttcagtctcttcagcagagaacatggctcattcactggtctctgttggtttcttcaatcaccccaaaggtcgcgataatattattgacctcttcctttatcagccacaatatcttaatgcaattcagacaatgtgtccacacattcttcgctatttgactacagcagtcataacaaacaaggatgttcgaaaacgtcggcaggttctaaaagatctagttaaagttattcaacaggagtcttacacatataaagacccaattacagaatttgttgaatgtttatatgttaactttgactttgatggggctcagaaaaagctgagggaatgtgaatcagtgcttgtgaatgacttcttcttggtggcttgtcttgaggatttcattgaaaatgcccgtctcttcatatttgagactttctgtcgcatccaccagtgtatcagcattaacatgttggcagataaattgaacatgactccagaagaagctgaaaggtggattgtaaatttgattagaaatgcaagactggatgccaagattgattctaaattaggtcatgtggttatgggtaacaatgcagtctcaccctatcagcaagtgattgaaaagaccaaaagcctttcctttagaagccagatgttggccatgaatattgagaagaaacttaatcagaatagcaggtcagaggctcctaactgggcaactcaagattctggcttctactgaagaaccataaagaaaagatgaaaaaaaaaactatcaaagaaaaaaaaanaaaaaaaatttngnggngcncgggcccnnaaaagtttt

SEQ ID NO: 347034 - DNA, 1462 bp, Homo sapiens
  misc_feature (1363)..(1363): n is a, c, g, or t
tgtcggcgctaccaataaagttttagtgagcacagactcccttttctttggcaagatggcggagtacgacttgactactcgcatcgcgcactttttggatcggcatctagtctttccgcttcttgaatttctctctgtaaaggagatatataatgaaaaggaattattacaaggtaaattggaccttcttagtgataccaacatggtagactttgctatggatgtatacaaaaacctttattctgatgatattcctcatgctttgagagagaaaagaaccacagtggttgcacaactgaaacagcttcaggcagaaacagaaccaattgtgaagatgtttgaagatccagaaactacaaggcaaatgcagtcaaccagggatggtaggatgctctttgactacctggcggacaagcatggttttaggcaggaatatttagatacactctacagatatgcaaaattccagtacgaatgtgggaattactcaggagcagcagaatatctttatttttttagagtgctggttccagcaacagatagaaatgctttaagttcactctggggaaagctggcctctgaaatcttaatgcagaattgggatgcagccatggaagaccttacacggttaaaagagaccatagataataattctgtgagttctccacttcagtctcttcagcagagaacatggctcattcactggtctctgttggtttcttcaatcaccccaaaggtcgcgataatattattgacctcttcctttatcagccacaatatcttaatgcaattcagacaatgtgtccacacattcttcgctatttgactacagcagtcataacaaacaaggatgttcgaaaacgtcggcaggttctaaaagatctagttaaagttattcaacaggagtcttacacatataaagacccaattacagaatttgttgaatgtttatatgttaactttgactttgatggggctcagaaaaagctgagggaatgtgaatcagtgcttgtgaatgacttcttcttggtggcttgtcttgaggatttcattgaaaatgcccgtctcttcatatttgagactttctgtcgcatccaccagtgtatcagcattaacatgttggcagataaattgaacatgactccagaagaagctgaaaggtggattgtaaatttgattagaaatgcaagactggatgccaagattgattctaaattaggtcatgtggttatgggtaacaatgcagtctcaccctatcagcaagtgattgaaaagaccaaaagcctttcctttagaagccagatgttggccatgaatattgagaagaaacttaatcagaatagcaggtcagagctaactgggnactcagatctggttctatgagacataagaaagatgaacaaattcagaagatgaatataactatttaaggggctcctttggaccactttcgttattgaga

SEQ ID NO: 347035 - DNA, 1423 bp, Homo sapiens
tgtcggcgctaccaataaagttttagtgagcacagactcccttttctttggcaagatggcggagtacgacttgactactcgcatcgcgcactttttggatcggcatctagtctttccgcttcttgaatttctctctgtaaaggagatatataatgaaaaggaattattacaaggtaaattggaccttcttagtgataccaacatggtagactttgctatggatgtatacaaaaacctttattctgatgatattcctcatgctttgagagagaaaagaaccacagtggttgcacaactgaaacagcttcaggcagaaacagaaccaattgtgaagatgtttgaagatccagaaactacaaggcaaatgcagtcaaccagggatggtaggatgctctttgactacctggcggacaagcatggttttaggcaggaatatttagatacactctacagatatgcaaaattccagtacgaatgtgggaattactcaggagcagcagaatatctttatttttttagagtgctggttccagcaacagatagaaatgctttaagttcactctggggaaagctggcctctgaaatcttaatgcagaattgggatgcagccatggaagaccttacacggttaaaagagaccatagataataattctgtgagttctccacttcagtctcttcagcagagaacatggctcattcactggtctctgttggtttcttcaatcaccccaaaggtcgcgataatattattgacctcttcctttatcagccacaatatcttaatgcaattcagacaatgtgtccacacattcttcgctatttgactacagcagtcataacaaacaaggatgttcgaaaacgtcggcaggttctaaaagatctagttaaagttattcaacaggagtcttacacatataaagacccaattacagaatttgttgaatgtttatatgttaactttgactttgatggggctcagaaaaagctgagggaatgtgaatcagtgcttgtgaatgacttcttcttggtggcttgtcttgaggatttcattgaaaatgcccgtctcttcatatttgagactttctgtcgcatccaccagtgtatcagcattaacatgttggcagataaattgaacatgactccagaagaagctgaaaggtggattgtaaatttgattagaaatgcaagactggatgccaagattgattctaaattaggtcatgtggttatgggtaacaatgcagtctcaccctatcagcaagtgattgaaaagaccaaaagcctttcctttagaagccagatgttggccatgaatattgagaagaaacttaatcagaatagcaggtcagagcctaactggctactcaagattctggcttatatcgacagtcgggatcctctagatcatcacacgggcggct

SEQ ID NO: 347036 - DNA, 1542 bp, Homo sapiens
  misc_feature (1359)..(1359): n is a, c, g, or t
tgtcggcgctaccaataaagttttagtgagcacagactcccttttctttggcaagatggcggagtacgacttgactactcgcatcgcgcactttttggatcggcatctagtctttccgcttcttgaatttctctctgtaaaggagatatataatgaaaaggaattattacaaggtaaattggaccttcttagtgataccaacatggtagactttgctatggatgtatacaaaaacctttattctgatgatattcctcatgctttgagagagaaaagaaccacagtggttgcacaactgaaacagcttcaggcagaaacagaaccaattgtgaagatgtttgaagatccagaaactacaaggcaaatgcagtcaaccagggatggtaggatgctctttgactacctggcggacaagcatggttttaggcaggaatatttagatacactctacagatatgcaaaattccagtacgaatgtgggaattactcaggagcagcagaatatctttatttttttagagtgctggttccagcaacagatagaaatgctttaagttcactctggggaaagctggcctctgaaatcttaatgcagaattgggatgcagccatggaagaccttacacggttaaaagagaccatagataataattctgtgagttctccacttcagtctcttcagcagagaacatggctcattcactggtctctgttggtttcttcaatcaccccaaaggtcgcgataatattattgacctcttcctttatcagccacaatatcttaatgcaattcagacaatgtgtccacacattcttcgctatttgactacagcagtcataacaaacaaggatgttcgaaaacgtcggcaggttctaaaagatctagttaaagttattcaacaggagtcttacacatataaagacccaattacagaatttgttgaatgtttatatgttaactttgactttgatggggctcagaaaaagctgagggaatgtgaatcagtgcttgtgaatgacttcttcttggtggcttgtcttgaggatttcattgaaaatgcccgtctcttcatatttgagactttctgtcgcatccaccagtgtatcagcattaacatgttggcagataaattgaacatgactccagaagaagctgaaaggtggattgtaaatttgattagaaatgcaagactggatgccaagattgattctaaattaggtcatgtggttatgggtaacaatgcagtctcaccctatcagcaagtgattgaaaagaccaaaagcctttcctttagaagccagatgttggccatgaatattgagaagaaacttaatcagaatagcaggtcagagcctaantgggcactccaacattctgcattatactgaagaaccataaatgaaatatcaacagacagtccatcaaagaaagatccaattcttccactctcatatacaggggctcttactttttgcaaaccacataggccgcattgattttcaacaattgcaatagcattgtttcgttttcatataagaata

SEQ ID NO: 347037 - DNA, 1426 bp, Homo sapiens
tgtcggcgctaccaataaagttttagtgagcacagactcccttttctttggcaagatggcggagtacgacttgactactcgcatcgcgcactttttggatcggcatctagtctttccgcttcttgaatttctctctgtaaaggagatatataatgaaaaggaattattacaaggtaaattggaccttcttagtgataccaacatggtagactttgctatggatgtatacaaaaacctttattctgatgatattcctcatgctttgagagagaaaagaaccacagtggttgcacaactgaaacagcttcaggcagaaacagaaccaattgtgaagatgtttgaagatccagaaactacaaggcaaatgcagtcaaccagggatggtaggatgctctttgactacctggcggacaagcatggttttaggcaggaatatttagatacactctacagatatgcaaaattccagtacgaatgtgggaattactcaggagcagcagaatatctttatttttttagagtgctggttccagcaacagatagaaatgctttaagttcactctggggaaagctggcctctgaaatcttaatgcagaattgggatgcagccatggaagaccttacacggttaaaagagaccatagataataattctgtgagttctccacttcagtctcttcagcagagaacatggctcattcactggtctctgttggtttcttcaatcaccccaaaggtcgcgataatattattgacctcttcctttatcagccacaatatcttaatgcaattcagacaatgtgtccacacattcttcgctatttgactacagcagtcataacaaacaaggatgttcgaaaacgtcggcaggttctaaaagatctagttaaagttattcaacaggagtcttacacatataaagacccaattacagaatttgttgaatgtttatatgttaactttgactttgatggggctcagaaaaagctgagggaatgtgaatcagtgcttgtgaatgacttcttcttggtggcttgtcttgaggatttcattgaaaatgcccgtctcttcatatttgagactttctgtcgcatccaccagtgtatcagcattaacatgttggcagataaattgaacatgactccagaagaagctgaaaggtggattgtaaatttgattagaaatgcaagactggatgccaagattgattctaaattaggtcatgtggttatgggtaacaatgcagtctcaccctatcagcaagtgattgaaaagaccaaaagcctttcctttagaagccagatgttggccatgaatattgagaagaagccagaatcttgagttgcccagttaggacctgctgacctgctattctgatcaagtttgtcgagcggtttttcatttcgtagtagtagtaggcgcacgc

SEQ ID NO: 347038 - DNA, 1465 bp, Homo sapiens
tgtcggcgctaccaataaagttttagtgagcacagactcccttttctttggcaagatggcggagtacgacttgactactcgcatcgcgcactttttggatcggcatctagtctttccgcttcttgaatttctctctgtaaaggagatatataatgaaaaggaattattacaaggtaaattggaccttcttagtgataccaacatggtagactttgctatggatgtatacaaaaacctttattctgatgatattcctcatgctttgagagagaaaagaaccacagtggttgcacaactgaaacagcttcaggcagaaacagaaccaattgtgaagatgtttgaagatccagaaactacaaggcaaatgcagtcaaccagggatggtaggatgctctttgactacctggcggacaagcatggttttaggcaggaatatttagatacactctacagatatgcaaaattccagtacgaatgtgggaattactcaggagcagcagaatatctttatttttttagagtgctggttccagcaacagatagaaatgctttaagttcactctggggaaagctggcctctgaaatcttaatgcagaattgggatgcagccatggaagaccttacacggttaaaagagaccatagataataattctgtgagttctccacttcagtctcttcagcagagaacatggctcattcactggtctctgttggtttcttcaatcaccccaaaggtcgcgataatattattgacctcttcctttatcagccacaatatcttaatgcaattcagacaatgtgtccacacattcttcgctatttgactacagcagtcataacaaacaaggatgttcgaaaacgtcggcaggttctaaaagatctagttaaagttattcaacaggagtcttacacatataaagacccaattacagaatttgttgaatgtttatatgttaactttgactttgatggggctcagaaaaagctgagggaatgtgaatcagtgcttgtgaatgacttcttcttggtggcttgtcttgaggatttcattgaaaatgcccgtctcttcatatttgagactttctgtcgcatccaccagtgtatcagcattaacatgttggcagataaattgaacatgactccagaagaagctgaaaggtggattgtaaatttgattagaaatgcaagactggatgccaagattgattctaaattaggtcatgtggttatgggtaacaatgcagtctcaccctatcagcaagtgattgaaaagaccaaaagcgctcctaactgggcaactcaagattctggcttctactgaagaaccataaagaaaagatgaaaaaaaaaactatcaaagaaagatgaaataataaaactattatataaagggtgacttacattttggaaacaacatattacgtataaattttgaagaattggaataaaattgattcatttta

SEQ ID NO: 347039 - DNA, 1555 bp, Homo sapiens
tgtcggcgctaccaataaagttttagtgagcacagactcccttttctttggcaagatggcggagtacgacttgactactcgcatcgcgcactttttggatcggcatctagtctttccgcttcttgaatttctctctgtaaaggagatatataatgaaaaggaattattacaaggtaaattggaccttcttagtgataccaacatggtagactttgctatggatgtatacaaaaacctttattctgatgatattcctcatgctttgagagagaaaagaaccacagtggttgcacaactgaaacagcttcaggcagaaacagaaccaattgtgaagatgtttgaagatccagaaactacaaggcaaatgcagtcaaccagggatggtaggatgctctttgactacctggcggacaagcatggttttaggcaggaatatttagatacactctacagatatgcaaaattccagtacgaatgtgggaattactcaggagcagcagaatatctttatttttttagagtgctggttccagcaacagatagaaatgctttaagttcactctggggaaagctggcctctgaaatcttaatgcagaattgggatgcagccatggaagaccttacacggttaaaagagaccatagataataattctgtgagttctccacttcagtctcttcagcagagaacatggctcattcactggtctctgttggtttcttcaatcaccccaaaggtcgcgataatattattgacctcttcctttatcagccacaatatcttaatgcaattcagacaatgtgtccacacattcttcgctatttgactacagcagtcataacaaacaaggatgttcgaaaacgtcggcaggttctaaaagatctagttaaagttattcaacaggagtcttacacatataaagacccaattacagaatttgttgaatgtttatatgttaactttgactttgatggggctcagaaaaagctgagggaatgtgaatcagtgcttgtgaatgacttcttcttggtggcttgtcttgaggatttcattgaaaatgcccgtctcttcatatttgagactttctgtcgcatccaccagtgtatcagcattaacatgttggcagataaattgaacatgactccagaagaagctgaaaggtggattgtaaatttgattagaaatgcaagactggatgccaagattgattctaaattatttccctgtgtttccttttagggtcatgtggttatgggtaacaatgcagtctcaccctatcagcaagtgattgaaaagaccaaaagcctttcctttagaagccagatgttggccatgaatattgagaagaaacttaatcagaatagcaggtcagaggctcctaactgggcaactcaagattctggcttctactgaagaaccataaagaaaagatgaaaaaaaaaactatcaaagaaagatgaaataataaaactattatataaagggtgacttacattttggaaacaacatattacgtataaattttgaagaattggaataaaattgattcatttta

SEQ ID NO: 347040 - DNA, 1769 bp, Homo sapiens
tgtcggcgctaccaataaagttttagtgagcacagactcccttttctttggcaagatggcggagtacgacttgactactcgcatcgcgcactttttggatcggcatctagtctttccgcttcttgaatttctctctgtaaaggaggttgtttcagcaatgtggatggagaagcatataggagtttattactgattacctggatgtggagaagtgacagctatatgtgctttacaggaaagatggtgtgggttttatttatacacagccttgcctagaaagggtaagagatggtttgtagggacacataaaaaataaggtcatgtaaatcagaagtaggtgggaatgtctacagtaattctcttcattttaaaatttttagatatataatgaaaaggaattattacaaggtaaattggaccttcttagtgataccaacatggtagactttgctatggatgtatacaaaaacctttattctgatgatattcctcatgctttgagagagaaaagaaccacagtggttgcacaactgaaacagcttcaggcagaaacagaaccaattgtgaagatgtttgaagatccagaaactacaaggcaaatgcagtcaaccagggatggtaggatgctctttgactacctggcggacaagcatggttttaggcaggaatatttagatacactctacagatatgcaaaattccagtacgaatgtgggaattactcaggagcagcagaatatctttatttttttagagtgctggttccagcaacagatagaaatgctttaagttcactctggggaaagctggcctctgaaatcttaatgcagaattgggatgcagccatggaagaccttacacggttaaaagagaccatagataataattctgtgagttctccacttcagtctcttcagcagagaacatggctcattcactggtctctgttggtttcttcaatcaccccaaaggtcgcgataatattattgacctcttcctttatcagccacaatatcttaatgcaattcagacaatgtgtccacacattcttcgctatttgactacagcagtcataacaaacaaggatgttcgaaaacgtcggcaggttctaaaagatctagttaaagttattcaacaggagtcttacacatataaagacccaattacagaatttgttgaatgtttatatgttaactttgactttgatggggctcagaaaaagctgagggaatgtgaatcagtgcttgtgaatgacttcttcttggtggcttgtcttgaggatttcattgaaaatgcccgtctcttcatatttgagactttctgtcgcatccaccagtgtatcagcattaacatgttggcagataaattgaacatgactccagaagaagctgaaaggtggattgtaaatttgattagaaatgcaagactggatgccaagattgattctaaattaggtcatgtggttatgggtaacaatgcagtctcaccctatcagcaagtgattgaaaagaccaaaagcctttcctttagaagccagatgttggccatgaatattgagaagaaacttaatcagaatagcaggtcagaggctcctaactgggcaactcaagattctggcttctactgaagaaccataaagaaaagatgaaaaaaaaaactatcaaagaaagatgaaataataaaactattatataaagggtgacttacattttggaaacaacatattacgtataaattttgaagaattggaataaaattgattcatttta

SEQ ID NO: 347041 - DNA, 1705 bp, Homo sapiens
tgtcggcgctaccaataaagttttagtgagcacagactcccttttctttggcaagatggcggagtacgacttgactactcgcatcgcgcactttttggatcggcatctagtctttccgcttcttgaatttctctctgtaaaggagtagagacagggtttcaccgtgttagccaggatggtctcgatctcctgacctcgtgatccgcctgcctcggcctcccaaagtgctgggattacaggcgtgagccactgcgcctggcgacatccttaaaccttcatcttgacccctgttagtcactactcacaccccctaaagatatataatgaaaaggaattattacaaggtaaattggaccttcttagtgataccaacatggtagactttgctatggatgtatacaaaaacctttattctgatgatattcctcatgctttgagagagaaaagaaccacagtggttgcacaactgaaacagcttcaggcagaaacagaaccaattgtgaagatgtttgaagatccagaaactacaaggcaaatgcagtcaaccagggatggtaggatgctctttgactacctggcggacaagcatggttttaggcaggaatatttagatacactctacagatatgcaaaattccagtacgaatgtgggaattactcaggagcagcagaatatctttatttttttagagtgctggttccagcaacagatagaaatgctttaagttcactctggggaaagctggcctctgaaatcttaatgcagaattgggatgcagccatggaagaccttacacggttaaaagagaccatagataataattctgtgagttctccacttcagtctcttcagcagagaacatggctcattcactggtctctgttggtttcttcaatcaccccaaaggtcgcgataatattattgacctcttcctttatcagccacaatatcttaatgcaattcagacaatgtgtccacacattcttcgctatttgactacagcagtcataacaaacaaggatgttcgaaaacgtcggcaggttctaaaagatctagttaaagttattcaacaggagtcttacacatataaagacccaattacagaatttgttgaatgtttatatgttaactttgactttgatggggctcagaaaaagctgagggaatgtgaatcagtgcttgtgaatgacttcttcttggtggcttgtcttgaggatttcattgaaaatgcccgtctcttcatatttgagactttctgtcgcatccaccagtgtatcagcattaacatgttggcagataaattgaacatgactccagaagaagctgaaaggtggattgtaaatttgattagaaatgcaagactggatgccaagattgattctaaattaggtcatgtggttatgggtaacaatgcagtctcaccctatcagcaagtgattgaaaagaccaaaagcctttcctttagaagccagatgttggccatgaatattgagaagaaacttaatcagaatagcaggtcagaggctcctaactgggcaactcaagattctggcttctactgaagaaccataaagaaaagatgaaaaaaaaaactatcaaagaaagatgaaataataaaactattatataaagggtgacttacattttggaaacaacatattacgtataaattttgaagaattggaataaaattgattcatttta

SEQ ID NO: 347042 - DNA, 1557 bp, Homo sapiens
tgtcggcgctaccaataaagttttagtgagcacagactcccttttctttggcaagatggcggagtacgacttgactactcgcatcgcgcactttttggatcggcatctagtctttccgcttcttgaatttctctctgtaaaggagatatataatgaaaaggaattattacaaggtaaattggaccttcttagtgataccaacatggtagactttgctatggatgtatacaaaaacctttattctgatgatattcctcatgtgctcttctgcatttttaattagctttgagagagaaaagaaccacagtggttgcacaactgaaacagcttcaggcagaaacagaaccaattgtgaagatgtttgaagatccagaaactacaaggcaaatgcagtcaaccagggatggtaggatgctctttgactacctggcggacaagcatggttttaggcaggaatatttagatacactctacagatatgcaaaattccagtacgaatgtgggaattactcaggagcagcagaatatctttatttttttagagtgctggttccagcaacagatagaaatgctttaagttcactctggggaaagctggcctctgaaatcttaatgcagaattgggatgcagccatggaagaccttacacggttaaaagagaccatagataataattctgtgagttctccacttcagtctcttcagcagagaacatggctcattcactggtctctgttggtttcttcaatcaccccaaaggtcgcgataatattattgacctcttcctttatcagccacaatatcttaatgcaattcagacaatgtgtccacacattcttcgctatttgactacagcagtcataacaaacaaggatgttcgaaaacgtcggcaggttctaaaagatctagttaaagttattcaacaggagtcttacacatataaagacccaattacagaatttgttgaatgtttatatgttaactttgactttgatggggctcagaaaaagctgagggaatgtgaatcagtgcttgtgaatgacttcttcttggtggcttgtcttgaggatttcattgaaaatgcccgtctcttcatatttgagactttctgtcgcatccaccagtgtatcagcattaacatgttggcagataaattgaacatgactccagaagaagctgaaaggtggattgtaaatttgattagaaatgcaagactggatgccaagattgattctaaattaggtcatgtggttatgggtaacaatgcagtctcaccctatcagcaagtgattgaaaagaccaaaagcctttcctttagaagccagatgttggccatgaatattgagaagaaacttaatcagaatagcaggtcagaggctcctaactgggcaactcaagattctggcttctactgaagaaccataaagaaaagatgaaaaaaaaaactatcaaagaaagatgaaataataaaactattatataaagggtgacttacattttggaaacaacatattacgtataaattttgaagaattggaataaaattgattcatttta

SEQ ID NO: 347043 - DNA, 1609 bp, Homo sapiens
tgtcggcgctaccaataaagttttagtgagcacagactcccttttctttggcaagatggcggagtacgacttgactactcgcatcgcgcactttttggatcggcatctagtctttccgcttcttgaatttctctctgtaaaggagatatataatgaaaaggaattattacaaggtaaattggaccttcttagtgataccaacatggtagactttgctatggatgtatacaaaaacctttattctgatgatattcctcatgctttgagagagaaaagaaccacagtggttgcacaactgaaacagcttcaggcagaaacagaaccaattgtgaagatgtttgaagatccagaaactacaaggcaaatgcagtcaaccagggatggtaggatgctctttgactacctggcggacaagcatggttttaggcaggaatatttagatacactctacagatatgcaaaattccagtacgaatgtgggaattactcaggagcagcagaatatctttatttttttagagtgctggttccagcaacagatagaaatgctttaagttcactctggggaaagctggcctctgaaatcttaatgcagaattgggatgcagccatggaagaccttacacgggttcacaaccaggaaggaaccccaaatttaaacgggaaaaaaattttttaaacaaaaacctttttaaaaaaaacttttttcccctttggtttggaaggttctgtgagttctccacttcagtctcttcagcagagaacatggctcattcactggtctctgttggtttcttcaatcaccccaaaggtcgcgataatattattgacctcttcctttatcagccacaatatcttaatgcaattcagacaatgtgtccacacattcttcgctatttgactacagcagtcataacaaacaaggatgttcgaaaacgtcggcaggttctaaaagatctagttaaagttattcaacaggagtcttacacatataaagacccaattacagaatttgttgaatgtttatatgttaactttgactttgatggggctcagaaaaagctgagggaatgtgaatcagtgcttgtgaatgacttcttcttggtggcttgtcttgaggatttcattgaaaatgcccgtctcttcatatttgagactttctgtcgcatccaccagtgtatcagcattaacatgttggcagataaattgaacatgactccagaagaagctgaaaggtggattgtaaatttgattagaaatgcaagactggatgccaagattgattctaaattaggtcatgtggttatgggtaacaatgcagtctcaccctatcagcaagtgattgaaaagaccaaaagcctttcctttagaagccagatgttggccatgaatattgagaagaaacttaatcagaatagcaggtcagaggctcctaactgggcaactcaagattctggcttctactgaagaaccataaagaaaagatgaaaaaaaaaactatcaaagaaagatgaaataataaaactattatataaagggtgacttacattttggaaacaacatattacgtataaattttgaagaattggaataaaattgattcatttta

SEQ ID NO: 347044 - DNA, 1153 bp, Homo sapiens
tgtcggcgctaccaataaagttttagtgagcacagactcccttttctttggcaagatggcggagtacgacttgactactcgcatcgcgcactttttggatcggcatctagtctttccgcttcttgaatttctctctgtaaaggaggttccagcaacagatagaaatgctttaagttcactctggggaaagctggcctctgaaatcttaatgcagaattgggatgcagccatggaagaccttacacggttaaaagagaccatagataataattctgtgagttctccacttcagtctcttcagcagagaacatggctcattcactggtctctgttggtttcttcaatcaccccaaaggtcgcgataatattattgacctcttcctttatcagccacaatatcttaatgcaattcagacaatgtgtccacacattcttcgctatttgactacagcagtcataacaaacaaggatgttcgaaaacgtcggcaggttctaaaagatctagttaaagttattcaacaggagtcttacacatataaagacccaattacagaatttgttgaatgtttatatgttaactttgactttgatggggctcagaaaaagctgagggaatgtgaatcagtgcttgtgaatgacttcttcttggtggcttgtcttgaggatttcattgaaaatgcccgtctcttcatatttgagactttctgtcgcatccaccagtgtatcagcattaacatgttggcagataaattgaacatgactccagaagaagctgaaaggtggattgtaaatttgattagaaatgcaagactggatgccaagattgattctaaattaggtcatgtggttatgggtaacaatgcagtctcaccctatcagcaagtgattgaaaagaccaaaagcctttcctttagaagccagatgttggccatgaatattgagaagaaacttaatcagaatagcaggtcagaggctcctaactgggcaactcaagattctggcttctactgaagaaccataaagaaaagatgaaaaaaaaaactatcaaagaaagatgaaataataaaactattatataaagggtgacttacattttggaaacaacatattacgtataaattttgaagaattggaataaaattgattcatttta

SEQ ID NO: 347045 - DNA, 1195 bp, Homo sapiens
tgtcggcgctaccaataaagttttagtgagcacagactcccttttctttggcaagatggcggagtacgacttgactactcgcatcgcgcactttttggatcggcatctagtctttccgcttcttgaatttctctctgtaaaggagatatataatgaaaaggaattattacaaggtaaattggaccttcttagtgataccaacatggtagactttgctatggatgtatacaaaaacctttattctgatgatattcctcatgctttgagagagaaaagaaccacagtggttgcacaactgaaacagcttcaggcagaaacagaaccaattgtgaagatgtttgaagatccagaaactacaaggcaaatgcagtcaaccagggatggtaggatgctctttgactacctggcggacaagcatggttttaggcaggaatatttagatacactctacagatatgcaaaattccagtacgaatgtgggaattactcaggagcagcagaatatctttatttttttagagtgctggttccagcaacagatagaaatgctttaagttcactctggggaaagctggcctctgaaatcttaatgcagaattgggatgcagccatggaagaccttacacggttaaaagagaccatagataataattctgtgagttctccacttcagtctcttcagcagagaacatggctcattcactggtctctgttggtttcttcaatcaccccaaaggtcgcgataatattattgacctcttcctttatcagccacacatgttggcagataaattgaacatgactccagaagaagctgaaaggtggattgtaaatttgattagaaatgcaagactggatgccaagattgattctaaattaggtcatgtggttatgggtaacaatgcagtctcaccctatcagcaagtgattgaaaagaccaaaagcctttcctttagaagccagatgttggccatgaatattgagaagaaacttaatcagaatagcaggtcagaggctcctaactgggcaactcaagattctggcttctactgaagaaccataaagaaaagatgaaaaaaaaaactatcaaagaaagatgaaataataaaactattatataaagggtgacttacattttggaaacaacatattacgtataaattttgaagaattggaataaaattgattcatttta

SEQ ID NO: 347046 - DNA, 799 bp, Homo sapiens
tgtcggcgctaccaataaagttttagtgagcacagactcccttttctttggcaagatggcggagtacgacttgactactcgcatcgcgcactttttggatcggcatctagtctttccgcttcttgaatttctctctgtaaaggagatatataatgaaaaggaattattacaaggtaaattggaccttcttagtgataccaacatggtagactttgctatggatgtatacaaaaacctttattctgatgatattcctcatgctttgagagagaaaagaaccacagtggttgcacaactgaaacagcttcaggcagaaacagaaccaattgtgaagatgtttgaagatccagaaactacaaggcaaatgcagtcaaccagggatggtaggatgctctttgactacctggcggacaagcatggttttaggcaggaatatttagatacactctacagatatgcaaaattccagtacgaatgtgggaattactcaggagcagcagaatatctttatttttttagagtgctggttccagcaacagatagaaatgctttaagttcactctggggaaagctggcctctgaaatcttaatgcagaattgggatgcagccatggaagaccttacacggttaaaagagaccatagataataattctgtgagttctccacttcagtctcttcagcagagaacatggctcattcactggtctctgttggtttcttcaatcaccccaaaggtcgcgataatattattgacctcttcctttatcagccacagtaagttatttcactgtgtaatt

SEQ ID NO: 347047 - DNA, 1177 bp, Homo sapiens
  misc_feature (202)..(202): n is a, c, g, or t
  misc_feature (390)..(390): n is a, c, g, or t
  misc_feature (398)..(398): n is a, c, g, or t
gggccaacaatccacttcaccatgcccggcagatgaatttcagtggatccgggtgaaaccaacccatgtgcccaagggttggatcaagggcaatgccaatgacatcggcatggattatgattatgccctcctggaactcaaaaagcccccacaagagaaaatttatgaagattgggggtgagccctcctgctaagcagctgncagggggcagaattcacttctttggttatgacaatgaccgaccaggcaatttggtgtatcgcttctgtgacctcaaagacgagacctatgacttgctctaccagcaatgcgatgcccagccaggggccagcgggtctggggtctatgtgaggatgtggaagagacagcagcagaagtgggagcgaaanattattgncctcttcctttatcagccacaatatcttaatgcaattcagacaatgtgtccacacattcttcgctatttgactacagcagtcataacaaacaaggatgttcgaaaacgtcggcaggttctaaaagatctagttaaagttattcaacaggagtcttacacatataaagacccaattacagaatttgttgaatgtttatatgttaactttgactttgatggggctcagaaaaagctgagggaatgtgaatcagtgcttgtgaatgacttcttcttggtggcttgtcttgaggatttcattgaaaatgcccgtctcttcatatttgagactttctgtcgcatccaccagtgtatcagcattaacatgttggcagataaattgaacatgactccagaagaagctgaaaggtggattgtaaatttgattagaaatgcaagactggatgccaagattgattctaaattaggtcatgtggttatgggtaacaatgcagtctcaccctatcagcaagtgattgaaaagaccaaaagcctttcctttagaagccagatgttggccatgaatattgagaagaaacttaatcagaatagcaggtcagaggctcctaactgggcaactcaagattctggcttctactgaagaaccataaagaaaagatgaaaaaaaaaactatcaaagaaagatgaaataataaaactattatataaagggtgacttacattttggaaacaacatattacgtataaattttgaagaattggaataaaattgattcatttta

SEQ ID NO: 347048 - DNA, 3995 bp, Homo sapiens
tgtcggcgctaccaataaagttttagtgagcacagactcccttttctttggcaagatggcggagtacgacttgactactcgcatcgcgcactttttggatcggcatctagtctttccgcttcttgaatttctctctgtaaaggagatatataatgaaaaggaattattacaaggtaaattggaccttcttagtgataccaacatggtagactttgctatggatgtatacaaaaacctttattctgatgatattcctcatgctttgagagagaaaagaaccacagtggttgcacaactgaaacagcttcaggcagaaacagaaccaattgtgaagatgtttgaagatccagaaactacaaggcaaatgcagtcaaccagggatggtaggatgctctttgactacctggcggacaagcatggttttaggcaggaatatttagatacactctacagatatgcaaaattccagtacgaatgtgggaattactcaggagcagcagaatatctttatttttttagagtgctgatggagtcttgctatgttgcccaggctgatctcaaactcctggcctgaagtgatcctccctcctcagcctttcaatgctttgggatttacagccatgagcctctgcaccctgcctgtctaagatttctctagttaatcctagaagttggaaaaagaccttaaaacagagactttttgtcttccaaccttggaagagtttgtttctttttgcctttactttctggtgcttttttcttcacttgtagctccacatgttgcaaaataaagtctcatggctgctgtctgtggttattttctaggaaattaaaattttcattttgtggggagggagagattagtattactgattcaggtaatttctacacttaaattgcatagacaacttcactttttgaaactccaccatcctttaaagaaaaagattttctgtttatttccaactttgcttaagaaaaacaactttttttctttcttgcttccatttgtagatgaattcttaatttacagattagctgtggttcacttgcaagtgcattgaaggtaatcagtgatgctaaacttgtagtaacttatcaaaaaattccatcagttttactttgaatattacgagggatttaggagagcaaaagttgattactttggaaatgtaaacagcttaaacccggattgtaaaatcagaagcctggtatgattacaggtacatgaaaagagttggttatttatatcatttgttaatgctgggagtgaattttgagaatgaagatttagtgtcatgttaagagttccagcacagtaaatttattgttgctggtcagtgagtgaatgtgccattttgctaagacatggaaacttaaggtaactgctggaaatccagatattgaaactcttctagcatatccacccttgaaagcaggttagtatgaagagccaactgtaatgacatggagtttagccagagtagtacacatgaaccttttgaggattaaaaaacttgctacactgctacaaaaagcttttattctaacacatataacacattctagtgttaatagtattatatttatgtagtatggttttatattagtctgaaaatttctacaagtgacaggtttgtacttgtaggtttggtgaatttttatgtttatttttttaaaatatgacgatacaagttaattcccggtcttaaaaaaatttgagggttagttttaaacttttgcattgcccctaacaaatcttgtgctggaactcaaatgatattttgattaagtgattgaatactgtgatacaaacactaagttaatatgttttacatcaagaacagtcaacatagagttactggaaattctaaaaagttacattcaattcgttttaaaatttttgtcctgtctgagccacaaaacatttgtgttaggcgagagtttgttgcttcctgttggcatattggcaggctaacagtgccaagcttaaaagaatagatatctttttcttttgatttagatagccactaccacaagatctgtgtatttgtttgaagttttgttaatagcaaatctaaaaatcttgtttggatttgggatgagaaatgtcagtgttttactttttagttaattaattttattttttgcagtggcctttttttatttctaaatacttttctggtggttgattattcttttaaatctgtggttagggaaacataagctatgaaagagctattgtaactatgatctgagattagaatttgactctccaaatgacctattgtaggtcagtgttgtataaattaaagctgtgtgaccctagaatctgcccttaaaaaaaaaaagaaaagactcgtggattttagaatacattgagaattgttcaggtacactctgtttggtgtgaaacttctttgatttatactccaagaaatgtgttaattgaaataaaatgacgaagctggtttggtgggaatttttgaacacttttgctttaacagttattagcactattgattattttgttaaaattttccctcattgtggcctttgatctggctccataatataccccattcccttattcagcagctctttgaaataaaagtgattttagttcctaggactatttgttatacttttggagctgtctctttccctccctcaggatgtaaaatgtatttcctgtttgtatataccacttcatttaaaaatatttttccttgaggctcaagacagtatgagtaatgataatttttagaggcattaggatcttgattgaaattctggctctgttgtatcctgttgtgatgtcactgtaagaattgtgcatttaatattgatcttcaagcatagttttgcatattttaacatctgaaatcagaaagtgtctttactgggtttttggttttagaaacataaaataataatgtatgttaaaattgatggcatttttgactcgatgatatatttttatattcagatatcctttataagaattaaacattttatcctttgtaattagaacaattattttatggattttgataaaccagtttttaaattttcaatgaattttgaaacatttgtgtacttgtgtggctacattaagtcaagataaagaacatttctgtcacctcagaaagaccctttttgttcttttgtggccatactccacccatggtcctgggcatccattgacctgctttctgtccctgtagattagttttgcctgttctagaattttatgtatgtaagtggaatgatgtactatgtatgtttgtgtttggcttatttttaccagcaagtttttgaggttcatgttattgtgtgtatcagaagttagtttctatttattgctcagtagtatttcattctgtgaatttaccatggtctgtttaatatattcatctattgatgatgaacatttagattacttttagtttttgcctattaaaaataaagttagtatgaatatgcatgtacaagttgtattgtggatatactttgtgataataactagaaccaggagtggttcaaaatttaatttacacatctactccctgtgttatttgcctgctcttagtgtgccaaatgttatttagtacatttgaaaggatgaatctcagtatagactgagtttgtattgtggtccccaatgtttagatcatatatctgtatacctatctctgcgatgattttcatcatcatttcagtaactcagatttaccaagttcttattctgtatcaggtgataattgtaatccctgtatgtcttatgtcacttaaactatacaactgaggtgggttctatccccatgttgcagtgaggaagctaaagtacaaactagctgttaagtggtagagacagaattcttgattggatttctgatcctgcacatataatttaacttgtaattatgatatctcttgatatttatactattatgtaaaagtgcttctgtaaaaaattaaatttgaaatttcaa

SEQ ID NO: 347049 - DNA, 3491 bp, Homo sapiens
tgtcggcgctaccaataaagttttagtgagcacagactcccttttctttggcaagatggcggagtacgacttgactactcgcatcgcgcactttttggatcggcatctagtctttccgcttcttgaatttctctctgtaaaggagatatataatgaaaaggaattattacaaggtaaattggaccttcttagtgataccaacatggtagactttgctatggatgtatacaaaaacctttattctgatgatattcctcatgctttgagagagaaaagaaccacagtggttgcacaactgaaacagcttcaggcagaaacagaaccaattgtgaagatgtttgaagatccagaaactacaaggcaaatgcagtcaaccagggatggtaggatgctctttgactacctggcggacaagcatggttttaggcaggaatatttagatacactctacagatatgcaaaattccagtacgaatgtgggaattactcaggagcagcagaatatctttatttttttagagtgctgatggagtcttgctatgttgcccaggctgatctcaaactcctggcctgaagtgatcctccctcctcagcctttcaatgctttgggatttacagccatgagcctctgcaccctgcctgtctaagatttctctagttaatcctagaagttggaaaaagaccttaaaacagagactttttgtcttccaaccttggaagagtttgtttctttttgcctttactttctggtgcttttttcttcacttgtagctccacatgttgcaaaataaagtctcatggctgctgtctgtggttattttctaggaaattaaaattttcattttgtggggagggagagattagtattactgattcaggtaatttctacacttaaattgcatagacaacttcactttttgaaactccaccatcctttaaagaaaaagattttctgtttatttccaactttgcttaagaaaaacaactttttttctttcttgcttccatttgtagatgaattcttaatttacagattagctgtggttcacttgcaagtgcattgaaggtaatcagtgatgctaaacttgtagtaacttatcaaaaaattccatcagttttactttgaatattacgagggatttaggagagcaaaagttgattactttggaaatgtaaacagcttaaacccggattgtaaaatcagaagcctggtatgattacaggtacatgaaaagagttggttatttatatcatttgttaatgctgggagtgaattttgagaatgaagatttagtgtcatgttaagagttccagcacagtaaatttattgttgctggtcagtgagtgaatgtgccattttgctaagacatggaaacttaaggtaactgctggaaatccagatattgaaactcttctagcatatccacccttgaaagcaggttagtatgaagagccaactgtaatgacatggagtttagccagagtagtacacatgaaccttttgaggattaaaaaacttgctacactgctacaaaaagcttttattctaacacatataacacattctagtgttaatagtattatatttatgtagtatggttttatattagtctgaaaatttctacaagtgacaggtttgtacttgtaggtttggtgaatttttatgtttatttttttaaaatatgacgatacaagttaattcccggtcttaaaaaaatttgagggttagttttaaacttttgcattgcccctaacaaatcttgtgctggaactcaaatgatattttgattaagtgattgaatactgtgatacaaacactaagttaatatgttttacatcaagaacagtcaacatagagttactggaaattctaaaaagttacattcaattcgttttaaaatttttgtcctgtctgagccacaaaacatttgtgttaggcgagagtttgttgcttcctgttggcatattggcaggctaacagtgccaagcttaaaagaatagatatctttttcttttgatttagatagccactaccacaagatctgtgtatttgtttgaagttttgttaatagcaaatctaaaaatcttgtttggatttgggatgagaaatgtcagtgttttactttttagttaattaattttattttttgcagtggcctttttttatttctaaatacttttctggtggttgattattcttttaaatctgtggttagggaaacataagctatgaaagagctattgtaactatgatctgagattagaatttgactctccaaatgacctattgtaggtcagtgttgtataaattaaagctgtgtgaccctagaatctgcccttaaaaaaaaaaagaaaagactcgtggattttagaatacattgagaattgttcaggtacactctgtttggtgtgaaacttctttgatttatactccaagaaatgtgttaattgaaataaaatgacgaagctggtttggtgggaatttttgaacacttttgctttaacagttattagcactattgattattttgttaaaattttccctcattgtggcctttgatctggctccataatataccccattcccttattcagcagctctttgaaataaaagtgattttagttcctaggactatttgttatacttttggagctgtctctttccctccctcaggatgtaaaatgtatttcctgtttgtatataccacttcatttaaaaatatttttccttgaggctcaagacagtatgagtaatgataatttttagaggcattaggatcttgattgaaattctggctctgttgtatcctgttgtgatgtcactgtaagaattgtgcatttaatattgatcttcaagcatagttttgcatattttaacatctgaaatcagaaagtgtctttactgggtttttggttttagaaacataaaataataatgtatgttaaaattgatggcatttttgactcgatgatatatttttatattcagatatcctttataagaattaaacattttatcctttgtaattagaacaattattttatggattttgataaaccagtttttaaattttcaatgaattttgaaacatttgtgtacttgtgtggctacattaagtcaagataaagaacatttctgtcacctcagaaagaccctttttgttcttttgtggccatactccacccatggtcctgggcatccattgacctgctttctgtccctgtagattagttttgcctgttctagaattttatgtatgtaagtggaatgatgtactatgtatgtttgtgtttggcttatttttaccagcaagtttttgaggttcatgttattgtgtgtatcagaagttagtttctatttattgctcagtagtatttcattctgtgaatttaccatggtctgtttaatatattcatctattgatgatgaacatttagattacttttagtttttgcctattaaaaataaagttagtatgaatatgcatgta

SEQ ID NO: 347050 - DNA, 3937 bp, Homo sapiens
tgtcggcgctaccaataaagttttagtgagcacagactcccttttctttggcaagatggcggagtacgacttgactactcgcatcgcgcactttttggatcggcatctagtctttccgcttcttgaatttctctctgtaaaggagatatataatgaaaaggaattattacaaggtaaattggaccttcttagtgataccaacatggtagactttgctatggatgtatacaaaaacctttattctgatgatattcctcatgctttgagagagaaaagaaccacagtggttgcacaactgaaacagcttcaggcagaaacagaaccaattgtgaagatgtttgaagatccagaaactacaaggcaaatgcagtcaaccagggatggtaggatgctctttgactacctggcggacaagcatggttttaggcaggaatatttagatacactctacagatatgcaaaattccagtacgaatgtgggaattactcaggagcagcagaatatctttatttttttagagtgctgatggagtcttgctatgttgcccaggctgatctcaaactcctggcctgaagtgatcctccctcctcagcctttcaatgctttgggatttacagccatgagcctctgcaccctgcctgtctaagatttctctagttaatcctagaagttggatgcctttactttctggtgcttttttcttcacttgtagctccacatgttgcaaaataaagtctcatggctgctgtctgtggttattttctaggaaattaaaattttcattttgtggggagggagagattagtattactgattcaggtaatttctacacttaaattgcatagacaacttcactttttgaaactccaccatcctttaaagaaaaagattttctgtttatttccaactttgcttaagaaaaacaactttttttctttcttgcttccatttgtagatgaattcttaatttacagattagctgtggttcacttgcaagtgcattgaaggtaatcagtgatgctaaacttgtagtaacttatcaaaaaattccatcagttttactttgaatattacgagggatttaggagagcaaaagttgattactttggaaatgtaaacagcttaaacccggattgtaaaatcagaagcctggtatgattacaggtacatgaaaagagttggttatttatatcatttgttaatgctgggagtgaattttgagaatgaagatttagtgtcatgttaagagttccagcacagtaaatttattgttgctggtcagtgagtgaatgtgccattttgctaagacatggaaacttaaggtaactgctggaaatccagatattgaaactcttctagcatatccacccttgaaagcaggttagtatgaagagccaactgtaatgacatggagtttagccagagtagtacacatgaaccttttgaggattaaaaaacttgctacactgctacaaaaagcttttattctaacacatataacacattctagtgttaatagtattatatttatgtagtatggttttatattagtctgaaaatttctacaagtgacaggtttgtacttgtaggtttggtgaatttttatgtttatttttttaaaatatgacgatacaagttaattcccggtcttaaaaaaatttgagggttagttttaaacttttgcattgcccctaacaaatcttgtgctggaactcaaatgatattttgattaagtgattgaatactgtgatacaaacactaagttaatatgttttacatcaagaacagtcaacatagagttactggaaattctaaaaagttacattcaattcgttttaaaatttttgtcctgtctgagccacaaaacatttgtgttaggcgagagtttgttgcttcctgttggcatattggcaggctaacagtgccaagcttaaaagaatagatatctttttcttttgatttagatagccactaccacaagatctgtgtatttgtttgaagttttgttaatagcaaatctaaaaatcttgtttggatttgggatgagaaatgtcagtgttttactttttagttaattaattttattttttgcagtggcctttttttatttctaaatacttttctggtggttgattattcttttaaatctgtggttagggaaacataagctatgaaagagctattgtaactatgatctgagattagaatttgactctccaaatgacctattgtaggtcagtgttgtataaattaaagctgtgtgaccctagaatctgcccttaaaaaaaaaaagaaaagactcgtggattttagaatacattgagaattgttcaggtacactctgtttggtgtgaaacttctttgatttatactccaagaaatgtgttaattgaaataaaatgacgaagctggtttggtgggaatttttgaacacttttgctttaacagttattagcactattgattattttgttaaaattttccctcattgtggcctttgatctggctccataatataccccattcccttattcagcagctctttgaaataaaagtgattttagttcctaggactatttgttatacttttggagctgtctctttccctccctcaggatgtaaaatgtatttcctgtttgtatataccacttcatttaaaaatatttttccttgaggctcaagacagtatgagtaatgataatttttagaggcattaggatcttgattgaaattctggctctgttgtatcctgttgtgatgtcactgtaagaattgtgcatttaatattgatcttcaagcatagttttgcatattttaacatctgaaatcagaaagtgtctttactgggtttttggttttagaaacataaaataataatgtatgttaaaattgatggcatttttgactcgatgatatatttttatattcagatatcctttataagaattaaacattttatcctttgtaattagaacaattattttatggattttgataaaccagtttttaaattttcaatgaattttgaaacatttgtgtacttgtgtggctacattaagtcaagataaagaacatttctgtcacctcagaaagaccctttttgttcttttgtggccatactccacccatggtcctgggcatccattgacctgctttctgtccctgtagattagttttgcctgttctagaattttatgtatgtaagtggaatgatgtactatgtatgtttgtgtttggcttatttttaccagcaagtttttgaggttcatgttattgtgtgtatcagaagttagtttctatttattgctcagtagtatttcattctgtgaatttaccatggtctgtttaatatattcatctattgatgatgaacatttagattacttttagtttttgcctattaaaaataaagttagtatgaatatgcatgtacaagttgtattgtggatatactttgtgataataactagaaccaggagtggttcaaaatttaatttacacatctactccctgtgttatttgcctgctcttagtgtgccaaatgttatttagtacatttgaaaggatgaatctcagtatagactgagtttgtattgtggtccccaatgtttagatcatatatctgtatacctatctctgcgatgattttcatcatcatttcagtaactcagatttaccaagttcttattctgtatcaggtgataattgtaatccctgtatgtcttatgtcacttaaactatacaactgaggtgggttctatccccatgttgcagtgaggaagctaaagtacaaactagctgttaagtggtagagacagaattcttgattggatttctgatcctgcacatataatttaacttgtaattatgatatctcttgatatttatactattatgtaaaagtgcttctgtaaaaaattaaatttgaaatttcaa

SEQ ID NO: 347051 - DNA, 469 bp, Homo sapiens
gcggacactactactaaaaaaaacgcggccgtctgacgtatcagcattaacatgttggcagataaattgaacatgactccagaagaagctgaaaggtggattgtaaatttgattagaaatgcaagactggatgccaagattgattctaaattaggtcatgtggttatgggtaacaatgcagtctcaccctatcagcaagtgattgaaaagaccaaaagcctttcctttagaagccagatgttggccatgaatattgagaagaaacttaatcagaatagcaggtcagaggctcctaactgggcaactcaagattctggcttctactgaagaaccataaagaaaagatgaaaaaaaaaactatcaaagaaagatgaaataataaaactattatataaagggtgacttacattttggaaacaacatattacgtataaattttgaagaattggaataaaattgattcatttta

SEQ ID NO: 347052 - DNA, 709 bp, Homo sapiens
tccagcaacagatagaaatgctttaagttcactctggggaaagctggcctctgaaatcttaatgcagaattgggatgcagccatggaagaccttacacggttaaaagagaccatagataataatgtgagttcgactttttcacagttattctctgaaatatctgtgtatccttcacactttctgatgaggaaaatcactatgcattttgggaattaaaaaaaaaaattcatattagcttttgttgaccttacaaaaatcatagtggattagtggcttgactagtttgaatctccttgaatgaaattgtcagacttcttttggctcttagagaaaaaatgtagccttcatttctgttttacagctactgtgccctttttttctatgccagtcaaaatgacactatgctgttagtgccacctattattgaaagtcctatgcagaagacagttttcatctacaattatctaattaaaccacttactatgaaatgttcagtttaattcttgcttttaaaatgttttctgaaatgattataatttataacttctgtaagagtttataaattagagcgtcttcagtagacattattgaatctgtctctaagaacagggtaataatttggaatgtcgagggatcatgtagagagaaggcatagggggtcggacattgatcataatgacctccgtgcatgccttagaaggggctcat

SEQ ID NO: 347053 - DNA, 453 bp, Homo sapiens
gatgaatctcagtatagactgagtttgtattgtggtccccaatgtttagatcatatatctgtaaatatgtatacacatttacatatagataaatataaatttacgtatgtaaatgtatatgtaaatatatgtaaatctgtatacctatctctgcgatgattttcatcatcatttcagtaactcagatttaccaagttcttattctgtatcaggtgataattgtaatccctgtatgtcttatgtcacttaaactatacaactgaggtgggttctatccccatgttgcagtgaggaagctaaagtacaaactagctgttaagtggtagagacagaattcttgattggatttctgatcctgcacatataatttaacttgtaattatgatatctcttgatatttatactattatgtaaaagtgcttctgtaaaaaattaaatttgaaatttcaactt

SEQ ID NO: 347054 - DNA, 536 bp, Homo sapiens
  misc_feature (498)..(498): n is a, c, g, or t
  misc_feature (510)..(510): n is a, c, g, or t
  misc_feature (512)..(512): n is a, c, g, or t
  misc_feature (515)..(515): n is a, c, g, or t
  misc_feature (518)..(518): n is a, c, g, or t
  misc_feature (526)..(527): n is a, c, g, or t
gcggacactactactaaaaaaaacgcggccgtctgacgtatcagcattaacatgttggcagataaattgaacatgactccagaagaagctgaaaggtggattgtaaatttgattagaaatgcaagactggatgccaagattgattctaaattaggtcatgtggttatgggtaacaatgcagtctcaccctatcagcaagtgattgaaaagaccaaaagcctttcctttagaagccagatgttggccatgaatattgagaagaaacttaatcagaatagcaggtcagaggctcctaactgggcaactcaagattctggcttctactgaagaaccataaagaaaagatgaaaaaaaaaactatcaaagaaagatgaaataataaaactattatataaagggtgacttacattttggaaacaacatattacgtataaattttgaagaattggaataaaattgattcattttaaaaaaaaaaaaaaaaaaaaaaaaaaaaanaaaaaaaatttngnggngcncgggcccnnaaaagtttt

SEQ ID NO: 347055 - DNA, 1419 bp, Homo sapiens
tgtcggcgctaccaataaagttttagtgagcacagactcccttttctttggcaagatggcggagtacgacttgactactcgcatcgcgcactttttggatcggcatctagtctttccgcttcttgaatttctctctgtaaaggagctttgagagagaaaagaaccacagtggttgcacaactgaaacagcttcaggcagaaacagaaccaattgtgaagatgtttgaagatccagaaactacaaggcaaatgcagtcaaccagggatggtaggatgctctttgactacctggcggacaagcatggttttaggcaggaatatttagatacactctacagatatgcaaaattccagtacgaatgtgggaattactcaggagcagcagaatatctttatttttttagagtgctggttccagcaacagatagaaatgctttaagttcactctggggaaagctggcctctgaaatcttaatgcagaattgggatgcagccatggaagaccttacacggttaaaagagaccatagataataattctgtgagttctccacttcagtctcttcagcagagaacatggctcattcactggtctctgttggtttcttcaatcaccccaaaggtcgcgataatattattgacctcttcctttatcagccacaatatcttaatgcaattcagacaatgtgtccacacattcttcgctatttgactacagcagtcataacaaacaaggatgttcgaaaacgtcggcaggttctaaaagatctagttaaagttattcaacaggagtcttacacatataaagacccaattacagaatttgttgaatgtttatatgttaactttgactttgatggggctcagaaaaagctgagggaatgtgaatcagtgcttgtgaatgacttcttcttggtggcttgtcttgaggatttcattgaaaatgcccgtctcttcatatttgagactttctgtcgcatccaccagtgtatcagcattaacatgttggcagataaattgaacatgactccagaagaagctgaaaggtggattgtaaatttgattagaaatgcaagactggatgccaagattgattctaaattaggtcatgtggttatgggtaacaatgcagtctcaccctatcagcaagtgattgaaaagaccaaaagcctttcctttagaagccagatgttggccatgaatattgagaagaaacttaatcagaatagcaggtcagaggctcctaactgggcaactcaagattctggcttctactgaagaaccataaagaaaagatgaaaaaaaaaactatcaaagaaagatgaaataataaaactattatataaagggtgacttacattttggaaacaacatattacgtataaattttgaagaattggaataaaattgattcatttta

SEQ ID NO: 347056 - DNA, 1575 bp, Homo sapiens
gcctttgctgcggcaagatgggggagtacgaattgactactcgtatcgagcagtgggggatcggcatctaggtcttcccgcggtctctgaatggctcgtctgtaggaggagcactatataactggaaggaaggaattgtgacgaggtgatcatggaccctattctatagctgaataccaaagcagtggtgaccatgtgtgcgctactgcgtgtgttgtacgagaaacccgtgttatgtcgtgaatgatactgtcactcatggctttttgatggagtagaacaaatgaacccaccaagtggcttgcaacaatcgtggatagatcgatgttttacagtggagaataccgagaaccacatgggtgaatgagtgtgtgaagaatccagaaggctacaaggcaaatgcaggtcaatccacgtggatggtaggactgcgtctttgactacctggcggacaggcatggttttaggcaggaatatttagatacactctacagatatgcaaaattccagtacgaatgtgggaattactcaggagcagcagaatatctttatttttttagagtgctggttccagcaacagatagaaatgctttaagttcactctggggaaagctggcctctgaaatcttaatgcagaattgggatgcagccatggaagaccttacacggttaaaagagaccatagataataattctgtgagttctccacttcagtctcttcagcagagaacatggctcattcactggtctctgttggtttcttcaatcaccccaaaggtcgcgataatattattgacctcttcctttatcagccacaatatcttaatgcaattcagacaatgtgtccacacattcttcgctatttgactacagcagtcataacaaacaaggatgttcgaaaacgtcggcaggttctaaaagatctagttaaagttattcaacaggagtcttacacatataaagacccaattacagaatttgttgaatgtttatatgttaactttgactttgatggggctcagaaaaagctgagggaatgtgaatcagtgcttgtgaatgacttcttcttggtggcttgtcttgaggatttcattgaaaatgcccgtctcttcatatttgagactttctgtcgcatccaccagtgtatcagcattaacatgttggcagataaattgaacatgactccagaagaagctgaaaggtggattgtaaatttgattagaaatgcaagactggatgccaagattgattctaaattaggtcatgtggttatgggtaacaatgcagtctcaccctatcagcaagtgattgaaaagaccaaaagcctttcctttagaagccagatgttggccatgaatattgagaagaaacttaatcagaatagcaggtcagaggctcctaactgggcaactcaagattctggcttctactgaagaaccataaagaaaagatgaaaaaaaaaactatcaaagaaagatgaaataataaaactattatataaagggtgacttacattttggaaacaacatattacgtataaattttgaagaattggaataaaattgattcatttta

SEQ ID NO: 347057 - DNA, 1725 bp, Homo sapiens
  misc_feature (1632)..(1632): n is a, c, g, or t
tgtcggcgctaccaataaagttttagtgagcacagactcccttttctttggcaagatggcggagtacgacttgactactcgcatcgcgcactttttggatcggcatctagtctttccgcttcttgaatttctctctgtaaaggagatatataatgaaaaggaattattacaaggtaaattggaccttcttagtgataccaacatggtagactttgctatggatgtatacaaaaacctttattctgatgatattcctcatgctttgagagagaaaagaaccacagtggttgcacaactgaaacagcttcaggcagaaacagaaccaattgtgaagatgtttgaagatccagaaactacaaggcaaatgcagtcaaccagggatggtaggatgctctttgactacctggcggacaagcatggttttaggcaggaatatttagatacactctacagatatgcaaaattccagtacgaatgtgggaattactcaggagcagcagaatatctttatttttttagagtgctggttccagcaacagatagaaatgctttaagttcactctggggaaagctggcctctgaaatcttaatgcagaattgggatgcagccatggaagaccttacacggttaaaagagaccatagataataattctgtgagttctccacttcagtctcttcagcagagaacatggctcattcactggtctctgttggtttcttcaatcaccccaaaggtcgcgataatattattgacctcttcctttatcagccacaatatcttaatgcaattcagacaatgtgtccacacattcttcgctatttgactacagcagtcataacaaacaaggatgttcgaaaacgtcggcaggttctaaaagatctagttaaagttattcaacaggagtcttacacatataaagacccaattacagaatttgttgaatgtttatatgttaactttgactttgatggggctcagaaaaagctgagggaatgtgaatcagtgcttgtgaatgacttcttcttggtggcttgtcttgaggatttcattgaaaatgcccgtctcttcatatttgagactttctgtcgcatccaccagtgtatcagcattaacatgttggcagataaattgaacatgactccagaagaagctgaaaggtggattgtaaatttgattagaaatgcaagactggatgccaagattgattctaaattaggtcatgtggttatgggtaacaatgcagtctcaccctatcagcaagtgattgaaaagaccaaaagcctttcctttagaagccagatgttggccatgaatattgagaagaaacttaatcagaatagcaggtcagaggctcctaactgggcaactcaagattctggcttctactgaagaaccataaagaaaagatgaaaaaaaaaactatcaaagaaagatgaaataataaaactattatataaagggtgacttacattttggaaacaacatattacgtataaattttgaagaattggaataaaattgattcattttatcttgctgtcagttttcttgcatgtgcaagtttgtgttttttttttttttttttaaagaaattagggaacaacagttttattggtaatagtcccaaangggaaacaactaaaatatccttcaataggtacatggttaaaccactggcacatcattaccagttaaaccaggtggcacatcaatactcatgta

SEQ ID NO: 347058 - DNA, 1791 bp, Homo sapiens
tgtcggcgctaccaataaagttttagtgagcacagactcccttttctttggcaagatggcggagtacgacttgactactcgcatcgcgcactttttggatcggcatctagtctttccgcttcttgaatttctctctgtaaaggagatatataatgaaaaggaattattacaaggtaaattggaccttcttagtgataccaacatggtagactttgctatggatgtatacaaaaacctttattctgatgatattcctcatgctttgagagagaaaagaaccacagtggttgcacaactgaaacagcttcaggcagaaacagaaccaattgtgaagatgtttgaagatccagaaactacaaggcaaatgcagtcaaccagggatggtaggatgctctttgactacctggcggacaagcatggttttaggcaggaatatttagatacactctacagatatgcaaaattccagtacgaatgtgggaattactcaggagcagcagaatatctttatttttttagagtgctggttccagcaacagatagaaatgctttaagttcactctggggaaagctggcctctgaaatcttaatgcagaattgggatgcagccatggaagaccttacacggttaaaagagaccatagataataattctgtgagttctccacttcagtctcttcagcagagaacatggctcattcactggtctctgttggtttcttcaatcaccccaaaggtcgcgataatattattgacctcttcctttatcagccacaatatcttaatgcaattcagacaatgtgtccacacattcttcgctatttgactacagcagtcataacaaacaaggatgttcgaaaacgtcggcaggttctaaaagatctagttaaagttattcaacaggagtcttacacatataaagacccaattacagaatttgttgaatgtttatatgttaactttgactttgatggggctcagaaaaagctgagggaatgtgaatcagtgcttgtgaatgacttcttcttggtggcttgtcttgaggatttcattgaaaatgcccgtctcttcatatttgagactttctgtcgcatccaccagtgtatcagcattaacatgttggcagataaattgaacatgactccagaagaagctgaaaggtggattgtaaatttgattagaaatgcaagactggatgccaagattgattctaaattaggtcatgtggttatgggtaacaatgcagtctcaccctatcagcaagtgattgaaaagaccaaaagcctttcctttagaagccagatgttggccatgaatattgagaagaaacttaatcagaatagcaggtcagaggctcctaactgggcaactcaagattctggcttctactgaagaaccataaagaaaagatgaaaaaaaaaactatcaaagaaagatgaaataataaaactattatataaagggtgacttacattttggaaacaacatattacgtataaattttgaagaattggaataaaattgattcattttaaaaaaaaaaaaaaaaaaaaaaaactgtgtgtgtgggcgcgcgcgggggccccggaaaagttttgaaaaccatgcgttggggcccgggggccccagggggtaagggaacccgggccacaagggggtacccaagagaaaacccgggcacaggaaatagggcggggctttccaccgcaaataaaaaacgcacggggggcaacacgcagccgtttctgaacaacctccgaaggggctccgagaggcaacacaggggaccag

SEQ ID NO: 347059 - DNA, 1534 bp, Homo sapiens
tgtcggcgctaccaataaagttttagtgagcacagactcccttttctttggcaagatggcggagtacgacttgactactcgcatcgcgcactttttggatcggcatctagtctttccgcttcttgaatttctctctgtaaaggagatatataatgaaaaggaattattacaaggtaaattggaccttcttagtgataccaacatggtagactttgctatggatgtatacaaaaacctttattctgatgatattcctcatgctttgagagagaaaagaaccacagtggttgcacaactgaaacagcttcaggcagaaacagaaccaattgtgaagatgtttgaagatccagaaactacaaggcaaatgcagtcaaccagggatggtaggatgctctttgactacctggcggacaagcatggttttaggcaggaatatttagatacactctacagatatgcaaaattccagtacgaatgtgggaattactcaggagcagcagaatatctttatttttttagagtgctggttccagcaacagatagaaatgctttaagttcactctggggaaagctggcctctgaaatcttaatgcagaattgggatgcagccatggaagaccttacacggttaaaagagaccatagataataattctgtgagttctccacttcagtctcttcagcagagaacatggctcattcactggtctctgttggtttcttcaatcaccccaaaggtcgcgataatattattgacctcttcctttatcagccacaatatcttaatgcaattcagacaatgtgtccacacattcttcgctatttgactacagcagtcataacaaacaaggatgttcgaaaacgtcggcaggttctaaaagatctagttaaagttattcaacaggagtcttacacatataaagacccaattacagaatttgttgaatgtttatatgttaactttgactttgatggggctcagaaaaagctgagggaatgtgaatcagtgcttgtgaatgacttcttcttggtggcttgtcttgaggatttcattgaaaatgcccgtctcttcatatttgagactttctgtcgcatccaccagtgtatcagcattaacatgttggcagataaattgaacatgactccagaagaagctgaaaggtggattgtaaatttgattagaaatgcaagactggatgccaagattgattctaaattaggtcatgtggttatgggtaacaatgcagtctcaccctatcagcaagtgattgaaaagaccaaaagcctttcctttagaagccagatgttggccatgaatattgagaagaaacttaatcagaatagcaggtcagaggctcctaactgggcaactcaagattctggcttctactgaagaaccataaagaaaagatgaaaaaaaaaactatcaaagaaagatgaaataataaaactattatataaagggtgacttacattttggaaacaacatattacgtataaattttgaagaattggaataaaattgattcatttta

SEQ ID NO: 347060 - DNA, 716 bp, Homo sapiens
tgacatggcacaaaacaaacagcaataaagatgtagccataacacaaagaataaaaagaagggctgtgatgcatacacagttgggataaacataagtagacacacaaacaaaactaaaaataatcagaaaataagcagaatgtctctttaaattcagaaagagtcaattttgcagcataagaacaatgtcctctccatatacagaatcgattttatttcttcaccatgtgtatttctttatctttacttggagctacaaactaactccagcagaaatatttgcggccaataatggtgcatctattacacagcaagcattgtgtttgttacatttacatatcaaaatacctttatgacttatgaagcctccccagcatttacctaaacaaattggctgaatgaataaattcacctatgtcaattataaagagtaaaaggaacaataataaaggaaacttagcttacacaggtttctccaattaaaataacaaaatgggatgttctaactaaatgaaatataagttggtcggatgcagtggctcatgcctgtaatcccagctccttgggaggccaaggtgggtggaccaccaggtcaggagttcaaggccactctggccattatagtgaaacacagtctctactaaaaatacaaaaacattagctgggaatggtggcacatgcctgtagtcccagctacttaggaggctgaggcaaga

SEQ ID NO: 347061 - DNA, 1362 bp, Homo sapiens
gtcgggccatctcctttgtgaccaagaacttcttttccaaagccaatggaaacagaagcggggctcccaatgtggtggtggtgatggtggatggctggcccacggacaaagtggaggaggcttcaagacttgcgagagagtcaggaatcaacattttcttcatcaccattgaaggtgctgctgaaaatgagaagcagtatgtggtggagcccaactttgcaaacaaggccgtgtgcagaacaaacggcttctactcgctccacgtgcagagctggtttggcctccacaagaccctgcagcctctggtgaagcgggtctgcgacactgaccgcctggcctgcagcaagacctgcttgaactcggctgacattggcttcgtcatcgacggctccagcagtgtggggacgggcaacttccgcaccgtcctccagtttgtgaccaacctcaccaaagagtttgagatttccgacacggacacgcgcatcggggccgtgcagtacacctacgaacagcggctggagtttgggttcgacaagtacagcagcaagcctgacatcctcaacgccatcaagagggtgggctactggagtggtggcaccagcacgggggctgccatcaacttcgccctggagcagctcttcaagaagtccaagcccaacaagaggaagttaatgatcctcatcaccgacgggaggtcctacgacgacgtccggatcccagccatggctgcccatctgaagggagtgatcacctatgcgataggcgttgcctgggctgcccaagaggagctagaagtcattgccactcaccccgccagagaccactccttctttgtggacgagtttgacaacctccatcagtatgtccccaggatcatccagaacatttgtacagagttcaactcacagcctcggaactgaattcagagcaggcagagcaccagcaagtgctgctttactaactgacgtgttggaccaccccaccgcttaatggggcacgcacggtgcatcaagtcttgggcagggcatggagaaacaaatgtcttgttattattctttgccatcatgctttttcatattccaaaacttggagttacaaagatgatcacaaacgtatagaatgagccaaaaggctacatcatgttgagggtgctggagattttacattttgacaattgttttcaaaataaatgttcggaatacagtgcagcccttacgacaggcttacgtagagcttttgtgagatttttaagttgttatttctgattagaactctgtaaccctcagcaagtttcatttttgtcatgacaatgtaggaattgctgaattaaatgtttagaaggatgacaaaaaaaatttctga

SEQ ID NO: 347062 - DNA, 1026 bp, Homo sapiens
gttaatctatattgttatcagtacttcattcctttttactgctcattaatagtccattggatgaatatactacaatttgtttatccattcgcttgtacatttacatgcaagtctttgggtggacctatgtttttatctgggataaatagtgaaattgctggattgtatggtaactctgtaagaaaatggaaaacagtttccaagaggttccattttacattcactccagcagtgtctgagagttccacttgctctgaatccatgtcaacaattggtattgtccgtcttttaaattgtggccattcttacctgtgtgtcatatggtctgtctgtgcttttaatttgtgtctccttgattactgatgacattgagcatcttttcagatccttattggcccttcatatatatcttcttttataaagacaaaatcttctgcccatttttcattgagttgtcttgttactgacttgtaagagttcttcatatattctagttagaagtcctttgttggatatatatttgaatagtttctccaaatttatggcttatctgtttattttcttaatactattttgaggaacagagcttcatcttgttgaagtccagcttcttatgcttacactttttgtgtcctaagaaatcttcgcctaatcaagatcatggatattttctcctgttttattctaggcaatttgtagttttaatttttatctttcagcctgtaatcaatcaatctttgtgtatggtatgaggtaagggttcagggtttttgttttgttttgttttgtttttttgcatgtggatttacggttgtttcagtatcatttgttgaaagtatcccttctttttggttgtgtgggtccaggagctggaggaagacagggaggaaacctgtgggtgtggtggatgtattcattacactgtgatactttcatatgggcgggtatatatagcagaactcatcgaattgtccttttttttctttttctctgtggtccaggctggagtgcagtggcgctatctca

SEQ ID NO: 347063 - DNA, 518 bp, Homo sapiens
cgtactggaggatctaaccatttcaataagagaaaaaaacaaaaaaggagtaagagttataagtattggaaagaaaagagtaaactatccccatttgaagacaatataattgtctacagagaaaagtccaagagaaccaagaaactgttagaactaatgaaacttcagcaagattgcaagagaaacatcaatagtgttcttataaaccagtaatcaattacaacatgttattcagaatagcagtgaaagctctccaatacctaggcgtaatcttcatagagaaacattacaaaaatggagcagtgtttctacatttatagatacagacccagtgccccttctccccagatttattgattcagtatattttgaatcagtatccaaatgggttttttaatttgagttatacccaaaggaatataaattgttttattataaagaccaaatgggttttttcatgggaactcaaaaagttagtcttactatttctatggaaaagcaaagagccaagagtaaga

SEQ ID NO: 347064 - DNA, 991 bp, Homo sapiens
ttgagtacagtagtgctatcacagctcactgcagccttgaactcctgggctaaggatcctcctacctgagcctcctgagtagctgggactggtctccctctgttgtccaaggctggagtgtagtagtgctatcacagctgactgcagcctcaaccttccaggctgaagcgatcctcccatctcaacctcccacgtggctgagactacaggcgcttgccactatgcccaactaatatttggaattttcctatacgtggattccagaggggtgacagcgaaacgtgggaccatccagttgcaggaaaacgagcttaacacgcccactgattctacattatgctcctacctcccggcagcctctccaggcccagaactttctccagtcggcctccacagaccaagctcatgactcacaatggcctatttaggcccataccctacctcacggcagtctccgcagatgaggctactgcctcacaacagcctccacaggcacagctccatcgttacaatggcctctttagacccagctcctgcctcccagccttctctctaggccctgaactttctcaagtcgacgtcaccaggcccagctcatgcttcttggcagcctctccaggcccagctcttcctcccggcggcctctgcaggcccagactgtcatcaagtcggcctgtccagggccagctcctgcctcccggcgccctctgcaggcccaagtcgtcctcaagttggcctccccaggcccagctccagcctctcggcggcctctccgggtgcaaaagttcctcgagtcagcctctccaggcccagctcctcctgcctcccagtgcctctttcggcccagcccagctcatgcctctgggcggccttcccaggccccgcttttgacttttggcggcctctgcaggcctcgacaaggcccggcctcctgcctcccgaagcctgcacaggcccagcctctgcctcacagcagactctccacgcccag

SEQ ID NO: 347065 - DNA, 1148 bp, Homo sapiens
atttttgtgactttgtaagcttttcccatatcattaatagcttttcataaaagtaatttttattggctgtatcataggccatcgtatgtgtgtcctatgcttgagttaatcattcctgtactgttaaacatttgggaggaaaaatttgttgtaatgttataaggacagatatgtgatttcagtctttaaatatgtcaacttgctcttaagcatatctgcatttatattcttttgaattgcagtcttatgatcgccacatatctgaaggggtaaaggtacattgtgggaacttgcatctggcctttggcagtttgaaccatgagctctttcttaatattgcctgtaaatatatttgtcctactgcaagaaattgttagtcttaaataccagaatttttgtttagaaaaagaaactgagtagccactttaaaataaaatacaatgtgttctagtataccaaattgtatttttgtcttagaaatatccaaattgatacagatgtcaataacatctctgtgatgtgtatgtcaataaacatctcccagaatacacccattgccttagtgtaggtttaatctctggaagtcactctgccatacttagaattaatcattctcaactgtaaagagcacattcagctcagtgactaacatctcattcctaagacctcaataactactaaggaattaagatatgtgcctctgttcttagaagtcaggttcagttcagtcccacaaacactagggcttcactggagtctgggttcagggtaggtagcaagaatcataatcataattgccccttagaattctcttgctctgcactgtgtgtgtaactcctaagaaagatgactactctttatttcaggctaattagaaaaggcaacatatctgaggtgtaaataataaataggattttatgtctactaagtagggtaataacagtccttttctaccattgatttatcagcgtatatatcttatgacttcagagtatatgcagagaaatggcagtaggggatgagagaattttagtatccccgttatgaaaaatacattgaaaaaaatggagaaattgggaagaatcttagtgactaagggagagggagcagctagctacaaaaggatgcaagaaaaggaattaagaaat

SEQ ID NO: 347066 - DNA, 1119 bp, Homo sapiens
gtcctgatagaagttcaaaggatagctagagctgggagggggtgagggagtgaatcgggaatctactgtcgtttgctagatagagcagatggctgttcaacaatcacagcgaaggttggaggaagtgatcggtgagttcggggggactagtgtgtcgtttcccgcgctatatccactacagggtcccgtcaaatctgggatgtaggatgaggctatggagcatgactcggatactcgtggatgacgagcggagacagagtgagagcgaggggcaaggtcaagcgaagctcccctactccgtggatgcgctcacgtgagaaatctgagtagacgcgtatcgtcggtggtatatggtagcagaaggtctcgtaaaaacagtagaaaagggctacagttcttagcaggagagagagcgaggagttgtcaggaaagctgcaggttactttgagacagtcgtcccaaatgcattagaggaactgtaaaaatctgccacagaaggaacgatgatccatagtcagaaaagttactgcagcttaaacaggaaacccttcttgttcaggactgtcatagccacagtttgcaaaaagtgcagctattgattaatgcaatgtagtgtcaattagatgtacattcctgaggtcttttatctgttgtagctttgtctttttctttttcttttcattacatcaggtatattgccctgtaaattgtggtagtggtaccaggaataaaaaattaaggaatttttaacttttaaaaaatagagaagtcaggtatatctaagatttagaaagaaacttagcaaatgtgggttgcaggggtttcctgggggattaaaagtagggaagacactgtgaaaagaaatggaggaatagcgaagagtaagtaagaaaacagtagaatgaataagggagaaaagaccaagatacacaagagagagagaaggcgtgaccacaaacaaacggggagaggagaagagagaaggacaaaaaacaggagaacagagaaggtgaaaaaaaaaagagagcagagcaagacaagaaaagaacaagacacgaagaagaaaaacagggaacaaggagaaagaaaagacaagagcacacaccccagcgccccgcc

SEQ ID NO: 347067 - DNA, 508 bp, Homo sapiens
  misc_feature (5)..(5): n is a, c, g, or t
ccctngcctacgtcctggtaacctgtgctaccttctagatcttacttctactattttttttatttaaacagttccattgtcgtttctgaaaactacagtattctcagaagttgtagcagcagtaaaaaaaaaaaagttgttctataagtgattggggcagatttaactgattttgttaaaccaatttgtaagttactgcttctaatattacacttctaaaaagctgaatttatactcatgtcctaaaggagaatatgtggtaataaagtatatttgttaagtaactaattgaaataggcttggttttaagagttccagtatataataatcacaaattgaaacctgacagtatcttgggagttccagtaatgtcacaaattagtgaataagcatgccagtgtgcaagggtaatgtaaggattgttagcctatctaaatattcccaactaccggtcaactcacgtatgctctcgttctgattctctacgaccctgaaatgctctacccgt

SEQ ID NO: 347068 - DNA, 957 bp, Homo sapiens
atattgaactcgagttggaagaggcgagtccggtctcaaaatggaggtaaaaccgccgcccggtcgcccccagcccgactccggccgtcgccgtcgccgccggggggaggagggccatgatccaaaggaaccagagcagttgagaaaactgtttattggtggtctgagctttgaaactacagatgatagtttacgagaacattttgagaaatggggcacactcacagattgtgtggtaatgagagacccccaaacaaaacgttccaggggctttggttttgtgacttattcttgtgttgaagaggtggatgcagcaatgtgtgctcgaccacacaaggttgatgggcgtgtagtggaaccaaagagagctgtttctagagaggattctgtaaagcctggtgcccatctaacagtgaagaaaatttttgttggtggtattaaagaagatacagaagaatataatttgagagactactttgaaaagtatggcaagattgaaaccatagaagttatggaagacaggcagagtggaaaaaagagaggatttgcttttgtaacttttgatgatcatgatacagttgataaaattgttgttcagaaataccacataacctattcccccgagcaatttcaattacaatatatacaccaacaaacaatgttcaaccagtaactactactaatcaacgcccataatcatacaaagcccccgcaccaataggatcctcccgaatcaaccctgacccctctccttcataaattattcagcttcctacactattaaagtttaccacaaccaccaccccatcatactctttcacccacagcaccaatcctacctccatcgctaaccccactaaaacactcaccaagacctcaacccctgacccccatgcctcaggatactcctcaatagccatcgctgtagtatatccaaagacaaccatcattccccct

SEQ ID NO: 347069 - DNA, 781 bp, Homo sapiens
  misc_feature (2)..(2): n is a, c, g, or t
gnaccgctcccacttcagattggtaacaggtgatggtggatataatggatttggaggtgatggtggcaactatggcggtggtcctggttatagtagtagagggggctatggtggtggtggaccaggatatggaaaccaaggtggtggatatggtggaggtggaggatatgatggttacaatgaaggaggaaattttggcggtggtaactatggtggtggtgggaactataatgattttggaaattatagtggacaacagcaatcaaattatggacccatgaaagggggcagttttggtggaagaagctcgggcagtccctatggtggtggttatggatctggtggtggaagtggtggatatggtagcagaaggttctaaaaacagcagaaaaggcttctgtttttagcagtttagtatagcgttgagttttcatgcatgtttgatattatcttatttaagttgtctcattgccttagaggaatttatatatcttgttctattttactcattgatcctagttcagataagttattgcagcttatacaggaataccttattttgtttgggacttgttattgctacatgtttgctaatagttcatatatcgtgttatcgctattaatttcttattctctcttcatttcttgaggttatatctattctggttacatactcttactgtctgtttcttttatattactcattattctataatatccttgctatattcctcctacgttttaccctagttgtactatatattactctttctttttcact

SEQ ID NO: 347070 - DNA, 5150 bp, Homo sapiens
atcgtgcagaagatcaccttatcgtgcagaagatcacctcatcgtgcagaagatcaccttatcgtgcagaagatcacctcatcgtgcagaagatcacctttctaaacaagagatgcagtctgctggatcacagagaggtcgtggaggtggatctggcaattttatgggtcgcggagggaactttggaggtggtggaggtaattttggccgtggtggaaactttggtggaagaggaggctatggtggtggaggtggtggcagcagaggtagttatggaggaggtgatggtggatataatggatttggaggtgatggtggcaactatggcggtggtcctggttatagtagtagagggggctatggtggtggtggaccaggatatggaaaccaaggtggtggatatggtggaggtggaggatatgatggttacaatgaaggaggaaattttggcggtggtaactatggtggtggtgggaactataatgattttggaaattatagtggacaacagcaatcaaattatggacccatgaaagggggcagttttggtggaagaagctcgggcagtccctatggtggtggttatggatctggtggtggaagtggtggatatggtagcagaaggttctaaaaacagcagaaaagggctacagttcttagcaggagagagagcgaggagttgtcaggaaagctgcaggttactttgagacagtcgtcccaaatgcattagaggaactgtaaaaatctgccacagaaggaacgatgatccatagtcagaaaagttactgcagcttaaacaggaaacccttcttgttcaggactgtcatagccacagtttgcaaaaagtgcagctattgattaatgcaatgtagtgtcaattagatgtacattcctgaggtcttttatctgttgtagctttgtctttttctttttcttttcattacatcaggtatattgccctgtaaattgtggtagtggtaccaggaataaaaaattaaggaatttttaacttttcaatatttgtgtagttcagtttttctacattttagtacagaaactttaacaaaatgcagtttcgaaggtgtttccttgtgagttaacaagtaaagaagatcattgttaattactattttgtatgaattttgctaaagttaactgtaaagaaacacctgctgacttgcagtttaaggggaatctattctccccatttccaaaccatgatatgaatgggcgctgacatgtggagagaatagataatttgtgtgtttgcaatgtgtgttttagataaataggattgggtatttaaattagcatttgtgaatttaatagcattaagattaccttcaaatgaaaaaaaatctcaaaatttctatttggtttttgtgcattttcttttaaaatgtaatcatatgattttagtgtgttagacttgctgagtcctagctgtgtttagaacatctctattctacatttaccttggtcaaatttgaactgctgccataggttttgggtgtaaagaatgtttactgccctccatttaaattctgaaaagggatggtggatgttttccctctcctacgttagaaaccattcttaaaaacttttgaaaatatagaaccattaagcctgctatatctgagcaaattaatgggtaccttttttttcttatttaaagcacaagaggcccataaatcttgagttactttaaattcttttttttgatacaagttttcagagcaagagaataaaaatcatgtgttattaaacccctaactggctggcatgctttcctgtttgtattctatacattttgctggatgaaaccaaggatagttcaggtataattgtccaaaataacctaactgcagcagaaatgtagcacagttgcttagtacaggcttctcacttcctacagacctgaattcaaatttggatagtctgagttcttaaattcccaaagaacacactgttatttcttgtgtatatttcaacataaatcatgttgttaccaatttgtttggaaggccctggttgagaagagttttagttaataaggtcatatatacatatattaatataaaccaatgtctactgttttgctccagctagtgcttacagtttcattcgagccctgagtatgtgccctgctgttactctctttggtagttgaacgttgaattcaagtcttttgttttaagaagtactaagcaaacaagcaataaaaaggggaatggggtgtgctagtgtttgaatatgctctcttgttgctctaattctgtgcctctgtgcattaatatttggatgcatgcaatgccagcatggaaattggtcttcacatatactgcagttttccagaaacattcacaaaccaataaatgtaacagacattccatttgttaatgggcatatatgtgaaaagcagtgtagaaaataggctaatattagaaaatggttaagtcctaaataacttcaagtgtggttatataatggacactgtcaatgttcataacttaaacctgggtacctggtcaaaataatgcttgggaaacattaaaattgagctaaattgtctcaagttcttttattcatataaataaagtttaaaggaatgggggagattaacatttcctgttttatgtttgtgaaattgtttgacacaaccttgacagtatcctttaatggcatgaggttaattgtactgttaaccaactttctatgttctggaactagtattatagtgaaaacatttacagtaagttgatgtttacaacctataagcaggtgaaatctgtgtatgtgacctgtttataagttgtattagcttagctcttgtgaacagtgtggaaaagtaagccatgaggagagcgatttaaccacctttaaaggacctaagatgtgctttttaagcacagtgtggatcacagaaactcactaagacaggacttcagcagccttttgtgtttggacaagtcagcataaataaagaatgacaaggcagcagcaagagcttcaactacagagaagtgaaggcataagatactatgatgatagtgagcaactttccaaaagctagttaaatctgcttattacaactgaaatatcgaagaaagtctagcaggaaggagctcttcgccttttggaacatcaatgagagatagttgccacagtcactaggtctagcatttagacctgcaaggaagggcaataagcattaggtaaggcttgaatttgaattttttcactaattaaagagtaattttttgtaaagcaaggtaagagtaatctttttgatttgcaggttgaatgagaaccctacttgcctaaatgaggaatgtctttcctaccatctaaaatacgaaggtttctggctgggtaaggtttgtagttgacagtaaaacctgatgacaccatttgtttccctgcaagtctacattacatatttcacaactttgtccctctctagtaggcacattggaaaaattcttcaactgaaaactaccttggtaccatgtcctacacgttttaaaccttagttttaaaaattcccctgcgaaatagccataagtattcatatcaagtcagttgtgactccttgtgtatacaattcattttttgtgtcttcagggtaaactcaatttttggtaaagtggtttcagcttttgtgaaaaccgtttttgtgtgtaagcatgacacacaacagactcagtaagctgcccatcctcatactaggaaaacaccttcaaaggaacattaaaagttaccagggccaggcacagtggctcacgcctgtaatcccagcactttgggaggctgaggcagatggatcccaagtccaggaatttgagacgagcctgggcaacatagtgagagcctgtcaacaaaaaatagaaaaattagctgggcttggtgatacacatctgtagtcccagctatttgggaggctgccttgatatcaggcagtcgaggctgcagtgagctgactgccccactgtattccagcctgggtgaccccatctcaaagaagaaaagttaccagatgtcatgggtaaaggttggtcttcaagtggcctcataagttgtcttgcatttaaattcagggaattcattggaccaataggttacattttcgttccttttttgttttggttcatctgttaagcagtgggggcctaattactgctcctttgtaaaaacacattttcccaaagaacactgaattaccgttcaaactggttgttgatgggtaataagggctgtttttgctgccccaaaagggcttaacaatttaggcggatagtttacttaaaaaaaaaaatcctttggagacatactgaaaatgcaaactagtttctaaattatcaattccctacatgaagaagcagtttgccagagtttagtctcagaaaatgactggttggctctatttaaatcagaacccaatttctacgcgtgttgaataaggtaacagcctttgatgaatttccttcacaacatggttttagtgaagcaaacattttttttttaagggcattgttctttctagtttatttctttttatgaaataaaattattttatttaaacagttccattgtcgtttctgaaaactacagtattctcagaagttgtagcagcagtaaaaaaaaaaaagttgttctataagtgattggggcagatttaactgattttgttaaaccaatttgtaagttactgcttctaatattacacttctaaaaagctgaatttatactcatgtcctaaaggagaatatgtggtaataaagtatatttgttaagtaactaattgaaataggcttggttttaagagttccagtatataataatcacaaattgaaacctgacagtatcttgggagttccagtaatgtcacaaattagtgaataagcatgccagtgtgcaagggtaatgtaaggattgttagcctatctaaatattcaaaattactttaaaacttaagtatgttttctgatttttaagaattcagaagtgttctgtaatggattcagatgtttcatttgtagtataatgaaatgtttacagaaagataactttttcattaaaatatttttagaaatgaaaaaaaacaccaccccagcctacacccacacacaccaacacacacacccaccggc

SEQ ID NO: 347071 - DNA, 5196 bp, Homo sapiens
atcgtgcagaagatcaccttatcgtgcagaagatcacctcatcgtgcagaagatcaccttatcgtgcagaagatcacctcatcgtgcagaagatcacctttctaaacaagagatgcagtctgctggatcacagagaggtcgtggaggtggatctggcaattttatgggtcgcggagggaactttggaggtggtggaggtaattttggccgtggtggaaactttggtggaagaggaggctatggtggtggaggtggtggcagcagaggtagttatggaggaggtgatggtggatataatggatttggaggtgatggtggcaactatggcggtggtcctggttatagtagtagagggggctatggtggtggtggaccaggatatggaaaccaaggtggtggatatggtggaggtggaggatatgatggttacaatgaaggaggaaattttggcggtggtaactatggtggtggtgggaactataatgattttggaaattatagtggacaacagcaatcaaattatggacccatgaaagggggcagttttggtggaagaagctcgggcagtccctatggtggtggttatggatctggtggtggaagtggtggatatggtagcagaaggttctaaaaacagcagaaaagggctacagttcttagcaggagagagagcgaggagttgtcaggaaagctgcaggttactttgagacagtcgtcccaaatgcattagaggaactgtaaaaatctgccacagaaggaacgatgatccatagtcagaaaagttactgcagcttaaacaggaaacccttcttgttcaggactgtcatagccacagtttgcaaaaagtgcagctattgattaatgcaatgtagtgtcaattagatgtacattcctgaggtcttttatctgttgtagctttgtctttttctttttcttttcattacatcaggtatattgccctgtaaattgtggtagtggtaccaggaataaaaaattaaggaatttttaacttttcaatatttgtgtagttcagtttttctacattttagtacagaaactttaacaaaatgcagtttcgaaggtgtttccttgtgagttaacaagtaaagaagatcattgttaattactattttgtatgaattttgctaaagttaactgtaaagaaacacctgctgacttgcagtttaaggggaatctattctccccatttccaaaccatgatatgaatgggcgctgacatgtggagagaatagataatttgtgtgtttgcaatgtgtgttttagataaataggattgggtatttaaattagcatttgtgaatttaatagcattaagattaccttcaaatgaaaaaaaatctcaaaatttctatttggtttttgtgcattttcttttaaaatgtaatcatatgattttagtgtgttagacttgctgagtcctagctgtgtttagaacatctctattctacatttaccttggtcaaatttgaactgctgccataggttttgggtgtaaagaatgtttactgccctccatttaaattctgaaaagggatggtggatgttttccctctcctacgttagaaaccattcttaaaaacttttgaaaatatagaaccattaagcctgctatatctgagcaaattaatgggtaccttttttttcttatttaaagcacaagaggcccataaatcttgagttactttaaattcttttttttgatacaagttttcagagcaagagaataaaaatcatgtgttattaaacccctaactggctggcatgctttcctgtttgtattctatacattttgctggatgaaaccaaggatagttcaggtataattgtccaaaataacctaactgcagcagaaatgtagcacagttgcttagtacaggcttctcacttcctacagacctgaattcaaatttggatagtctgagttcttaaattcccaaagaacacactgttatttcttgtgtatatttcaacataaatcatgttgttaccaatttgtttggaaggccctggttgagaagagttttagttaataaggtcatatatacatatattaatataaaccaatgtctactgttttgctccagctagtgcttacagtttcattcgagccctgagtatgtgccctgctgttactctctttggtagttgaacgttgaattcaagtcttttgttttaagaagtactaagcaaacaagcaataaaaaggggaatggggtgtgctagtgtttgaatatgctctcttgttgctctaattctgtgcctctgtgcattaatatttggatgcatgcaatgccagcatggaaattggtcttcacatatactgcagttttccagaaacattcacaaaccaataaatgtaacagacattccatttgttaatgggcatatatgtgaaaagcagtgtagaaaataggctaatattagaaaatggttaagtcctaaataacttcaagtgtggttatataatggacactgtcaatgttcataacttaaacctgggtacctggtcaaaataatgcttgggaaacattaaaattgagctaaattgtctcaagttcttttattcatataaataaagtttaaaggaatgggggagattaacatttcctgttttatgtttgtgaaattgtttgacacaaccttgacagtatcctttaatggcatgaggttaattgtactgttaaccaactttctatgttctggaactagtattatagtgaaaacatttacagtaagttgatgtttacaacctataagcaggtgaaatctgtgtatgtgacctgtttataagttgtattagcttagctcttgtgaacagtgtggaaaagtaagccatgaggagagcgatttaaccacctttaaaggacctaagatgtgctttttaagcacagtgtggatcacagaaactcactaagacaggacttcagcagccttttgtgtttggacaagtcagcataaataaagaatgacaaggcagcagcaagagcttcaactacagagaagtgaaggcataagatactatgatgatagtgagcaactttccaaaagctagttaaatctgcttattacaactgaaatatcgaagaaagtctagcaggaaggagctcttcgccttttggaacatcaatgagagatagttgccacagtcactaggtctagcatttagacctgcaaggaagggcaataagcattaggtaaggcttgaatttgaattttttcactaattaaagagtaattttttgtaaagcaaggtaagagtaatctttttgatttgcaggttgaatgagaaccctacttgcctaaatgaggaatgtctttcctaccatctaaaatacgaaggtttctggctgggtaaggtttgtagttgacagtaaaacctgatgacaccatttgtttccctgcaagtctacattacatatttcacaactttgtccctctctagtaggcacattggaaaaattcttcaactgaaaactaccttggtaccatgtcctacacgttttaaaccttagttttaaaaattcccctgcgaaatagccataagtattcatatcaagtcagttgtgactccttgtgtatacaattcattttttgtgtcttcagggtaaactcaatttttggtaaagtggtttcagcttttgtgaaaaccgtttttgtgtgtaagcatgacacacaacagactcagtaagctgcccatcctcatactaggaaaacaccttcaaaggaacattaaaagttaccagggccaggcacagtggctcacgcctgtaatcccagcactttgggaggctgaggcagatggatcccaagtccaggaatttgagacgagcctgggcaacatagtgagagcctgtcaacaaaaaatagaaaaattagctgggcttggtgatacacatctgtagtcccagctatttgggaggctgccttgatatcaggcagtcgaggctgcagtgagctgactgccccactgtattccagcctgggtgaccccatctcaaagaagaaaagttaccagatgtcatgggtaaaggttggtcttcaagtggcctcataagttgtcttgcatttaaattcagggaattcattggaccaataggttacattttcgttccttttttgttttggttcatctgttaagcagtgggggcctaattactgctcctttgtaaaaacacattttcccaaagaacactgaattaccgttcaaactggttgttgatgggtaataagggctgtttttgctgccccaaaagggcttaacaatttaggcggatagtttacttaaaaaaaaaaatcctttggagacatactgaaaatgcaaactagtttctaaattatcaattccctacatgaagaagcagtttgccagagtttagtctcagaaaatgactggttggctctatttaaatcagaacccaatttctacgcgtgttgaataaggtaacagcctttgatgaatttccttcacaacatggttttagtgaagcaaacattttttttttaagggcattgttctttctagtttatttctttttatgaaataaaattattttatttaaacagttccattgtcgtttctgaaaactacagtattctcagaagttgtagcagcagtaaaaaaaaaaaagttgttctataagtgattggggcagatttaactgattttgttaaaccaatttgtaagttactgcttctaatattacacttctaaaaagctgaatttatactcatgtcctaaaggagaatatgtggtaataaagtatatttgttaagtaactaattgaaataggcttggttttaagagttccagtatataataatcacaaattgaaacctgacagtatcttgggagttccagtaatgtcacaaattagtgaataagcatgccagtgtgcaagggtaatgtaaggattgttagcctatctaaatattcaaaattactttaaaacttaagtatgttttctgatttttaagaattcagaagtgttctgtaatggattcagatgtttcatttgtagtataatgaaatgtttacagaaagataactttttcattaaaatatttttagaaatggtgtgtgttgttttgtcacttcacaatgttcatgtgacttaaacactataggtgaatattttgacttattttaccagtaagtaataaaacaacaggaaactt

SEQ ID NO: 347072 - DNA, 5699 bp, Homo sapiens
atcgtgcagaagatcaccttatcgtgcagaagatcacctcatcgtgcagaagatcaccttatcgtgcagaagatcacctcatcgtgcagaagatcacctttctaaacaagagatgcagtctgctggatcacagagaggtcgtggaggtggatctggcaattttatgggtcgcggagggaactttggaggtggtggaggtaattttggccgtggtggaaactttggtggaagaggaggctatggtggtggaggtggtggcagcagaggtagttatggaggaggtgatggtggatataatggatttggaggtgatggtggcaactatggcggtggtcctggttatagtagtagagggggctatggtggtggtggaccaggatatggaaaccaaggtggtggatatggtggaggtggaggatatgatggttacaatgaaggaggaaattttggcggtggtaactatggtggtggtgggaactataatgattttggaaattatagtggacaacagcaatcaaattatggacccatgaaagggggcagttttggtggaagaagctcgggcagtccctatggtggtggttatggatctggtggtggaagtggtggatatggtagcagaaggttctaaaaacagcagaaaagggctacagttcttagcaggagagagagcgaggagttgtcaggaaagctgcaggttactttgagacagtcgtcccaaatgcattagaggaactgtaaaaatctgccacagaaggaacgatgatccatagtcagaaaagttactgcagcttaaacaggaaacccttcttgttcaggactgtcatagccacagtttgcaaaaagtgcagctattgattaatgcaatgtagtgtcaattagatgtacattcctgaggtcttttatctgttgtagctttgtctttttctttttcttttcattacatcaggtatattgccctgtaaattgtggtagtggtaccaggaataaaaaattaaggaatttttaacttttcaatatttgtgtagttcagtttttctacattttagtacagaaactttaacaaaatgcagtttcgaaggtgtttccttgtgagttaacaagtaaagaagatcattgttaattactattttgtatgaattttgctaaagttaactgtaaagaaacacctgctgacttgcagtttaaggggaatctattctccccatttccaaaccatgatatgaatgggcgctgacatgtggagagaatagataatttgtgtgtttgcaatgtgtgttttagataaataggattgggtatttaaattagcatttgtgaatttaatagcattaagattaccttcaaatgaaaaaaaatctcaaaatttctatttggtttttgtgcattttcttttaaaatgtaatcatatgattttagtgtgttagacttgctgagtcctagctgtgtttagaacatctctattctacatttaccttggtcaaatttgaactgctgccataggttttgggtgtaaagaatgtttactgccctccatttaaattctgaaaagggatggtggatgttttccctctcctacgttagaaaccattcttaaaaacttttgaaaatatagaaccattaagcctgctatatctgagcaaattaatgggtaccttttttttcttatttaaagcacaagaggcccataaatcttgagttactttaaattcttttttttgatacaagttttcagagcaagagaataaaaatcatgtgttattaaacccctaactggctggcatgctttcctgtttgtattctatacattttgctggatgaaaccaaggatagttcaggtataattgtccaaaataacctaactgcagcagaaatgtagcacagttgcttagtacaggcttctcacttcctacagacctgaattcaaatttggatagtctgagttcttaaattcccaaagaacacactgttatttcttgtgtatatttcaacataaatcatgttgttaccaatttgtttggaaggccctggttgagaagagttttagttaataaggtcatatatacatatattaatataaaccaatgtctactgttttgctccagctagtgcttacagtttcattcgagccctgagtatgtgccctgctgttactctctttggtagttgaacgttgaattcaagtcttttgttttaagaagtactaagcaaacaagcaataaaaaggggaatggggtgtgctagtgtttgaatatgctctcttgttgctctaattctgtgcctctgtgcattaatatttggatgcatgcaatgccagcatggaaattggtcttcacatatactgcagttttccagaaacattcacaaaccaataaatgtaacagacattccatttgttaatgggcatatatgtgaaaagcagtgtagaaaataggctaatattagaaaatggttaagtcctaaataacttcaagtgtggttatataatggacactgtcaatgttcataacttaaacctgggtacctggtcaaaataatgcttgggaaacattaaaattgagctaaattgtctcaagttcttttattcatataaataaagtttaaaggaatgggggagattaacatttcctgttttatgtttgtgaaattgtttgacacaaccttgacagtatcctttaatggcatgaggttaattgtactgttaaccaactttctatgttctggaactagtattatagtgaaaacatttacagtaagttgatgtttacaacctataagcaggtgaaatctgtgtatgtgacctgtttataagttgtattagcttagctcttgtgaacagtgtggaaaagtaagccatgaggagagcgatttaaccacctttaaaggacctaagatgtgctttttaagcacagtgtggatcacagaaactcactaagacaggacttcagcagccttttgtgtttggacaagtcagcataaataaagaatgacaaggcagcagcaagagcttcaactacagagaagtgaaggcataagatactatgatgatagtgagcaactttccaaaagctagttaaatctgcttattacaactgaaatatcgaagaaagtctagcaggaaggagctcttcgccttttggaacatcaatgagagatagttgccacagtcactaggtctagcatttagacctgcaaggaagggcaataagcattaggtaaggcttgaatttgaattttttcactaattaaagagtaattttttgtaaagcaaggtaagagtaatctttttgatttgcaggttgaatgagaaccctacttgcctaaatgaggaatgtctttcctaccatctaaaatacgaaggtttctggctgggtaaggtttgtagttgacagtaaaacctgatgacaccatttgtttccctgcaagtctacattacatatttcacaactttgtccctctctagtaggcacattggaaaaattcttcaactgaaaactaccttggtaccatgtcctacacgttttaaaccttagttttaaaaattcccctgcgaaatagccataagtattcatatcaagtcagttgtgactccttgtgtatacaattcattttttgtgtcttcagggtaaactcaatttttggtaaagtggtttcagcttttgtgaaaaccgtttttgtgtgtaagcatgacacacaacagactcagtaagctgcccatcctcatactaggaaaacaccttcaaaggaacattaaaagttaccagggccaggcacagtggctcacgcctgtaatcccagcactttgggaggctgaggcagatggatcccaagtccaggaatttgagacgagcctgggcaacatagtgagagcctgtcaacaaaaaatagaaaaattagctgggcttggtgatacacatctgtagtcccagctatttgggaggctgccttgatatcaggcagtcgaggctgcagtgagctgactgccccactgtattccagcctgggtgaccccatctcaaagaagaaaagttaccagatgtcatgggtaaaggttggtcttcaagtggcctcataagttgtcttgcatttaaattcagggaattcattggaccaataggttacattttcgttccttttttgttttggttcatctgttaagcagtgggggcctaattactgctcctttgtaaaaacacattttcccaaagaacactgaattaccgttcaaactggttgttgatgggtaataagggctgtttttgctgccccaaaagggcttaacaatttaggcggatagtttacttaaaaaaaaaaatcctttggagacatactgaaaatgcaaactagtttctaaattatcaattccctacatgaagaagcagtttgccagagtttagtctcagaaaatgactggttggctctatttaaatcagaacccaatttctacgcgtgttgaataaggtaacagcctttgatgaatttccttcacaacatggttttagtgaagcaaacattttttttttaagggcattgttctttctagtttatttctttttatgaaataaaattattttatttaaacagttccattgtcgtttctgaaaactacagtattctcagaagttgtagcagcagtaaaaaaaaaaaagttgttctataagtgattggggcagatttaactgattttgttaaaccaatttgtaagttactgcttctaatattacacttctaaaaagctgaatttatactcatgtcctaaaggagaatatgtggtaataaagtatatttgttaagtaactaattgaaataggcttggttttaagagttccagtatataataatcacaaattgaaacctgacagtatcttgggagttccagtaatgtcacaaattagtgaataagcatgccagtgtgcaagggtaatgtaaggattgttagcctatctaaatattcaaaattactttaaaacttaagtatgttttctgatttttaagaattcagaagtgttctgtaatggattcagatgtttcatttgtagtataatgaaatgtttacagaaagataactttttcattaaaatatttttagaaatgaaaaaaaaaaaaaaaaaaaaaaaaaaaaaaaaaaaaaaaaaaaaggggggggggcgctacaaaaaagtatacaccctccaaggagggagcgccccaattatgcagcgcgagacaccccgagaggtatgtggtgaaaaaaaagggggcgcccgcaatatagaggagagcgcgccagaatataataagaacgcagcagcgaagcgggcgacggcgcggtatacacacagggtggcgagagacggggggagaacaagcggggaaaagcggtggggcactctgcggggagaaggagagacccactataaactcttcggggggggggggggggagaacacaatttgtttggggcacaaaaacctctactcccatggaaagggaaagagatatatttacaagcgccccctcataagagggggggaaatatcatattagtagacaacactcttgtacgagggggtgtggtaataaactcaagggtgcggtgcgtacacaaacacaccgcgcgagcaattatatccgcggtcggccactgcggtgtataaaaaaaaatttgttgggccgtcacacagaagcgggagatatttatagattcttaacgaagagaa

SEQ ID NO: 347073 - DNA, 5048 bp, Homo sapiens
atcgtgcagaagatcaccttatcgtgcagaagatcacctcatcgtgcagaagatcaccttatcgtgcagaagatcacctcatcgtgcagaagatcacctttctaaacaagagatgcagtctgctggatcacagagaggtcgtggaggtggatctggcaattttatgggtcgcggagggaactttggaggtggtggaggtaattttggccgtggtggaaactttggtggaagaggaggctatggtggtggaggtggtggcagcagaggtagttatggaggaggtgatggtggatataatggatttggaggtgatggtggcaactatggcggtggtcctggttatagtagtagagggggctatggtggtggtggaccaggatatggaaaccaaggtggtggatatggtggaggtggaggatatgatggttacaatgaaggaggaaattttggcggtggtaactatggtggtggtgggaactataatgattttggaaattatagtggacaacagcaatcaaattatggacccatgaaagggggcagttttggtggaagaagctcgggcagtccctatggtggtggttatggatctggtggtggaagtggtggatatggtagcagaaggttctaaaaacagcagaaaagggctacagttcttagcaggagagagagcgaggagttgtcaggaaagctgcaggttactttgagacagtcgtcccaaatgcattagaggaactgtaaaaatctgccacagaaggaacgatgatccatagtcagaaaagttactgcagcttaaacaggaaacccttcttgttcaggactgtcatagccacagtttgcaaaaagtgcagctattgattaatgcaatgtagtgtcaattagatgtacattcctgaggtcttttatctgttgtagctttgtctttttctttttcttttcattacatcaggtatattgccctgtaaattgtggtagtggtaccaggaataaaaaattaaggaatttttaacttttcaatatttgtgtagttcagtttttctacattttagtacagaaactttaacaaaatgcagtttcgaaggtgtttccttgtgagttaacaagtaaagaagatcattgttaattactattttgtatgaattttgctaaagttaactgtaaagaaacacctgctgacttgcagtttaaggggaatctattctccccatttccaaaccatgatatgaatgggcgctgacatgtggagagaatagataatttgtgtgtttgcaatgtgtgttttagataaataggattgggtatttaaattagcatttgtgaatttaatagcattaagattaccttcaaatgaaaaaaaatctcaaaatttctatttggtttttgtgcattttcttttaaaatgtaatcatatgattttagtgtgttagacttgctgagtcctagctgtgtttagaacatctctattctacatttaccttggtcaaatttgaactgctgccataggttttgggtgtaaagaatgtttactgccctccatttaaattctgaaaagggatggtggatgttttccctctcctacgttagaaaccattcttaaaaacttttgaaaatatagaaccattaagcctgctatatctgagcaaattaatgggtaccttttttttcttatttaaagcacaagaggcccataaatcttgagttactttaaattcttttttttgatacaagttttcagagcaagagaataaaaatcatgtgttattaaacccctaactggctggcatgctttcctgtttgtattctatacattttgctggatgaaaccaaggatagttcaggtataattgtccaaaataacctaactgcagcagaaatgtagcacagttgcttagtacaggcttctcacttcctacagacctgaattcaaatttggatagtctgagttcttaaattcccaaagaacacactgttatttcttgtgtatatttcaacataaatcatgttgttaccaatttgtttggaaggccctggttgagaagagttttagttaataaggtcatatatacatatattaatataaaccaatgtctactgttttgctccagctagtgcttacagtttcattcgagccctgagtatgtgccctgctgttactctctttggtagttgaacgttgaattcaagtcttttgttttaagaagtactaagcaaacaagcaataaaaaggggaatggggtgtgctagtgtttgaatatgctctcttgttgctctaattctgtgcctctgtgcattaatatttggatgcatgcaatgccagcatggaaattggtcttcacatatactgcagttttccagaaacattcacaaaccaataaatgtaacagacattccatttgttaatgggcatatatgtgaaaagcagtgtagaaaataggctaatattagaaaatggttaagtcctaaataacttcaagtgtggttatataatggacactgtcaatgttcataacttaaacctgggtacctggtcaaaataatgcttgggaaacattaaaattgagctaaattgtctcaagttcttttattcatataaataaagtttaaaggaatgggggagattaacatttcctgttttatgtttgtgaaattgtttgacacaaccttgacagtatcctttaatggcatgaggttaattgtactgttaaccaactttctatgttctggaactagtattatagtgaaaacatttacagtaagttgatgtttacaacctataagcaggtgaaatctgtgtatgtgacctgtttataagttgtattagcttagctcttgtgaacagtgtggaaaagtaagccatgaggagagcgatttaaccacctttaaaggacctaagatgtgctttttaagcacagtgtggatcacagaaactcactaagacaggacttcagcagccttttgtgtttggacaagtcagcataaataaagaatgacaaggcagcagcaagagcttcaactacagagaagtgaaggcataagatactatgatgatagtgagcaactttccaaaagctagttaaatctgcttattacaactgaaatatcgaagaaagtctagcaggaaggagctcttcgccttttggaacatcaatgagagatagttgccacagtcactaggtctagcatttagacctgcaaggaagggcaataagcattaggtaaggcttgaatttgaattttttcactaattaaagagtaattttttgtaaagcaaggtaagagtaatctttttgatttgcaggttgaatgagaaccctacttgcctaaatgaggaatgtctttcctaccatctaaaatacgaaggtttctggctgggtaaggtttgtagttgacagtaaaacctgatgacaccatttgtttccctgcaagtctacattacatatttcacaactttgtccctctctagtaggcacattggaaaaattcttcaactgaaaactaccttggtaccatgtcctacacgttttaaaccttagttttaaaaattcccctgcgaaatagccataagtattcatatcaagtcagttgtgactccttgtgtatacaattcattttttgtgtcttcagggtaaactcaatttttggtaaagtggtttcagcttttgtgaaaaccgtttttgtgtgtaagcatgacacacaacagactcagtaagctgcccatcctcatactaggaaaacaccttcaaaggaacattaaaagttaccagggccaggcacagtggctcacgcctgtaatcccagcactttgggaggctgaggcagatggatcccaagtccaggaatttgagacgagcctgggcaacatagtgagagcctgtcaacaaaaaatagaaaaattagctgggcttggtgatacacatctgtagtcccagctatttgggaggctgccttgatatcaggcagtcgaggctgcagtgagctgactgccccactgtattccagcctgggtgaccccatctcaaagaagaaaagttaccagatgtcatgggtaaaggttggtcttcaagtggcctcataagttgtcttgcatttaaattcagggaattcattggaccaataggttacattttcgttccttttttgttttggttcatctgttaagcagtgggggcctaattactgctcctttgtaaaaacacattttcccaaagaacactgaattaccgttcaaactggttgttgatgggtaataagggctgtttttgctgccccaaaagggcttaacaatttaggcggatagtttacttaaaaaaaaaaatcctttggagacatactgaaaatgcaaactagtttctaaattatcaattccctacatgaagaagcagtttgccagagtttagtctcagaaaatgactggttggctctatttaaatcagaacccaatttctacgcgtgttgaataagcaaacattttttttttaagggcattgttctttctagtttatttctttttatgaaataaaattattttatttaaacagttccattgtcgtttctgaaaactacagtattctcagaagttgtagcagcagtaaaaaaaaaaaagttgttctataagtgattggggcagatttaactgattttgttaaaccaatttgtaagttactgcttctaatattacacttctaaaaagctgaatttatactcatgtcctaaaggagaatatgtggtaataaagtatatttgttaagtaactaattgaaataggcttggttttaagagttccagtatataataatcacaaattgaaacctgacagtatcttgggagttccagtaatgtcacaaattagtgaataagcatgccagtgtgcaagggtaatgtaaggattgttagcctatctaaatattcaaaattactttaaaacttaagtatgttttctgatttttaagaattcagaagtgttctgtaatggattcagatgtttcatttgtagtataatgaaatgtttacagaaagataactttttcattaaaatatttttagaaatg

SEQ ID NO: 347074 - DNA, 4670 bp, Homo sapiens
  misc_feature (17)..(17): n is a, c, g, or t
agaggagtaacggtggntatgtctggcagtggtaactatggtggtggtgggaactataatgattttggaaattatagtggacaacagcaatcaaattatggacccatgaaagggggcagttttggtggaagaagctcgggcagtccctatggtggtggttatggatctggtggtggaagtggtggatatggtagcagaaggttctaaaaacagcagaaaagggctacagttcttagcaggagagagagcgaggagttgtcaggaaagctgcaggttactttgagacagtcgtcccaaatgcattagaggaactgtaaaaatctgccacagaaggaacgatgatccatagtcagaaaagttactgcagcttaaacaggaaacccttcttgttcaggactgtcatagccacagtttgcaaaaagtgcagctattgattaatgcaatgtagtgtcaattagatgtacattcctgaggtcttttatctgttgtagctttgtctttttctttttcttttcattacatcaggtatattgccctgtaaattgtggtagtggtaccaggaataaaaaattaaggaatttttaacttttcaatatttgtgtagttcagtttttctacattttagtacagaaactttaacaaaatgcagtttcgaaggtgtttccttgtgagttaacaagtaaagaagatcattgttaattactattttgtatgaattttgctaaagttaactgtaaagaaacacctgctgacttgcagtttaaggggaatctattctccccatttccaaaccatgatatgaatgggcgctgacatgtggagagaatagataatttgtgtgtttgcaatgtgtgttttagataaataggattgggtatttaaattagcatttgtgaatttaatagcattaagattaccttcaaatgaaaaaaaatctcaaaatttctatttggtttttgtgcattttcttttaaaatgtaatcatatgattttagtgtgttagacttgctgagtcctagctgtgtttagaacatctctattctacatttaccttggtcaaatttgaactgctgccataggttttgggtgtaaagaatgtttactgccctccatttaaattctgaaaagggatggtggatgttttccctctcctacgttagaaaccattcttaaaaacttttgaaaatatagaaccattaagcctgctatatctgagcaaattaatgggtaccttttttttcttatttaaagcacaagaggcccataaatcttgagttactttaaattcttttttttgatacaagttttcagagcaagagaataaaaatcatgtgttattaaacccctaactggctggcatgctttcctgtttgtattctatacattttgctggatgaaaccaaggatagttcaggtataattgtccaaaataacctaactgcagcagaaatgtagcacagttgcttagtacaggcttctcacttcctacagacctgaattcaaatttggatagtctgagttcttaaattcccaaagaacacactgttatttcttgtgtatatttcaacataaatcatgttgttaccaatttgtttggaaggccctggttgagaagagttttagttaataaggtcatatatacatatattaatataaaccaatgtctactgttttgctccagctagtgcttacagtttcattcgagccctgagtatgtgccctgctgttactctctttggtagttgaacgttgaattcaagtcttttgttttaagaagtactaagcaaacaagcaataaaaaggggaatggggtgtgctagtgtttgaatatgctctcttgttgctctaattctgtgcctctgtgcattaatatttggatgcatgcaatgccagcatggaaattggtcttcacatatactgcagttttccagaaacattcacaaaccaataaatgtaacagacattccatttgttaatgggcatatatgtgaaaagcagtgtagaaaataggctaatattagaaaatggttaagtcctaaataacttcaagtgtggttatataatggacactgtcaatgttcataacttaaacctgggtacctggtcaaaataatgcttgggaaacattaaaattgagctaaattgtctcaagttcttttattcatataaataaagtttaaaggaatgggggagattaacatttcctgttttatgtttgtgaaattgtttgacacaaccttgacagtatcctttaatggcatgaggttaattgtactgttaaccaactttctatgttctggaactagtattatagtgaaaacatttacagtaagttgatgtttacaacctataagcaggtgaaatctgtgtatgtgacctgtttataagttgtattagcttagctcttgtgaacagtgtggaaaagtaagccatgaggagagcgatttaaccacctttaaaggacctaagatgtgctttttaagcacagtgtggatcacagaaactcactaagacaggacttcagcagccttttgtgtttggacaagtcagcataaataaagaatgacaaggcagcagcaagagcttcaactacagagaagtgaaggcataagatactatgatgatagtgagcaactttccaaaagctagttaaatctgcttattacaactgaaatatcgaagaaagtctagcaggaaggagctcttcgccttttggaacatcaatgagagatagttgccacagtcactaggtctagcatttagacctgcaaggaagggcaataagcattaggtaaggcttgaatttgaattttttcactaattaaagagtaattttttgtaaagcaaggtaagagtaatctttttgatttgcaggttgaatgagaaccctacttgcctaaatgaggaatgtctttcctaccatctaaaatacgaaggtttctggctgggtaaggtttgtagttgacagtaaaacctgatgacaccatttgtttccctgcaagtctacattacatatttcacaactttgtccctctctagtaggcacattggaaaaattcttcaactgaaaactaccttggtaccatgtcctacacgttttaaaccttagttttaaaaattcccctgcgaaatagccataagtattcatatcaagtcagttgtgactccttgtgtatacaattcattttttgtgtcttcagggtaaactcaatttttggtaaagtggtttcagcttttgtgaaaaccgtttttgtgtgtaagcatgacacacaacagactcagtaagctgcccatcctcatactaggaaaacaccttcaaaggaacattaaaagttaccagggccaggcacagtggctcacgcctgtaatcccagcactttgggaggctgaggcagatggatcccaagtccaggaatttgagacgagcctgggcaacatagtgagagcctgtcaacaaaaaatagaaaaattagctgggcttggtgatacacatctgtagtcccagctatttgggaggctgccttgatatcaggcagtcgaggctgcagtgagctgactgccccactgtattccagcctgggtgaccccatctcaaagaagaaaagttaccagatgtcatgggtaaaggttggtcttcaagtggcctcataagttgtcttgcatttaaattcagggaattcattggaccaataggttacattttcgttccttttttgttttggttcatctgttaagcagtgggggcctaattactgctcctttgtaaaaacacattttcccaaagaacactgaattaccgttcaaactggttgttgatgggtaataagggctgtttttgctgccccaaaagggcttaacaatttaggcggatagtttacttaaaaaaaaaaatcctttggagacatactgaaaatgcaaactagtttctaaattatcaattccctacatgaagaagcagtttgccagagtttagtctcagaaaatgactggttggctctatttaaatcagaacccaatttctacgcgtgttgaataaggtaacagcctttgatgaatttccttcacaacatggttttagtgaagcaaacattttttttttaagggcattgttctttctagtttatttctttttatgaaataaaattattttatttaaacagttccattgtcgtttctgaaaactacagtattctcagaagttgtagcagcagtaaaaaaaaaaaagttgttctataagtgattggggcagatttaactgattttgttaaaccaatttgtaagttactgcttctaatattacacttctaaaaagctgaatttatactcatgtcctaaaggagaatatgtggtaataaagtatatttgttaagtaactaattgaaataggcttggttttaagagttccagtatataataatcacaaattgaaacctgacagtatcttgggagttccagtaatgtcacaaattagtgaataagcatgccagtgtgcaagggtaatgtaaggattgttagcctatctaaatattcaaaattactttaaaacttaagtatgttttctgatttttaagaattcagaagtgttctgtaatggattcagatgtttcatttgtagtataatgaaatgtttacagaaagataactttttcattaaaatatttttagaaatg

SEQ ID NO: 347075 - DNA, 5187 bp, Homo sapiens
atcgtgcagaagatcaccttatcgtgcagaagatcacctcatcgtgcagaagatcaccttatcgtgcagaagatcacctcatcgtgcagaagatcacctttctaaacaagagatgcagtctgctggatcacagagaggtcgtggaggtggatctggcaattttatgggtcgcggagggaactttggaggtggtggaggtaattttggccgtggtggaaactttggtggaagaggaggctatggtggtggaggtggtggcagcagaggtagttatggaggaggtgatggtggatataatggatttggaggtgatggtggcaactatggcggtggtcctggttatagtagtagagggggctatggtggtggtggaccaggatatggaaaccaaggtggtggatatggtggaggtggaggatatgatggttacaatgaaggaggaaattttggcggtggtaactatggtggtggtgggaactataatgattttggaaattatagtggacaacagcaatcaaattatggacccatgaaagggggcagttttggtggaagaagctcgggcagtccctatggtggtggttatggatctggtggtggaagtggtggatatggtagcagaaggttctaaaaacagcagaaaagggtaggtatctttaaatttttattatgatgataaaagaatatgtggaactgttcactgagtgtaataatttttttatcctgtattattcaacaggctacagttcttagcaggagagagagcgaggagttgtcaggaaagctgcaggttactttgagacagtcgtcccaaatgcattagaggaactgtaaaaatctgccacagaaggaacgatgatccatagtcagaaaagttactgcagcttaaacaggaaacccttcttgttcaggactgtcatagccacagtttgcaaaaagtgcagctattgattaatgcaatgtagtgtcaattagatgtacattcctgaggtcttttatctgttgtagctttgtctttttctttttcttttcattacatcaggtatattgccctgtaaattgtggtagtggtaccaggaataaaaaattaaggaatttttaacttttcaatatttgtgtagttcagtttttctacattttagtacagaaactttaacaaaatgcagtttcgaaggtgtttccttgtgagttaacaagtaaagaagatcattgttaattactattttgtatgaattttgctaaagttaactgtaaagaaacacctgctgacttgcagtttaaggggaatctattctccccatttccaaaccatgatatgaatgggcgctgacatgtggagagaatagataatttgtgtgtttgcaatgtgtgttttagataaataggattgggtatttaaattagcatttgtgaatttaatagcattaagattaccttcaaatgaaaaaaaatctcaaaatttctatttggtttttgtgcattttcttttaaaatgtaatcatatgattttagtgtgttagacttgctgagtcctagctgtgtttagaacatctctattctacatttaccttggtcaaatttgaactgctgccataggttttgggtgtaaagaatgtttactgccctccatttaaattctgaaaagggatggtggatgttttccctctcctacgttagaaaccattcttaaaaacttttgaaaatatagaaccattaagcctgctatatctgagcaaattaatgggtaccttttttttcttatttaaagcacaagaggcccataaatcttgagttactttaaattcttttttttgatacaagttttcagagcaagagaataaaaatcatgtgttattaaacccctaactggctggcatgctttcctgtttgtattctatacattttgctggatgaaaccaaggatagttcaggtataattgtccaaaataacctaactgcagcagaaatgtagcacagttgcttagtacaggcttctcacttcctacagacctgaattcaaatttggatagtctgagttcttaaattcccaaagaacacactgttatttcttgtgtatatttcaacataaatcatgttgttaccaatttgtttggaaggccctggttgagaagagttttagttaataaggtcatatatacatatattaatataaaccaatgtctactgttttgctccagctagtgcttacagtttcattcgagccctgagtatgtgccctgctgttactctctttggtagttgaacgttgaattcaagtcttttgttttaagaagtactaagcaaacaagcaataaaaaggggaatggggtgtgctagtgtttgaatatgctctcttgttgctctaattctgtgcctctgtgcattaatatttggatgcatgcaatgccagcatggaaattggtcttcacatatactgcagttttccagaaacattcacaaaccaataaatgtaacagacattccatttgttaatgggcatatatgtgaaaagcagtgtagaaaataggctaatattagaaaatggttaagtcctaaataacttcaagtgtggttatataatggacactgtcaatgttcataacttaaacctgggtacctggtcaaaataatgcttgggaaacattaaaattgagctaaattgtctcaagttcttttattcatataaataaagtttaaaggaatgggggagattaacatttcctgttttatgtttgtgaaattgtttgacacaaccttgacagtatcctttaatggcatgaggttaattgtactgttaaccaactttctatgttctggaactagtattatagtgaaaacatttacagtaagttgatgtttacaacctataagcaggtgaaatctgtgtatgtgacctgtttataagttgtattagcttagctcttgtgaacagtgtggaaaagtaagccatgaggagagcgatttaaccacctttaaaggacctaagatgtgctttttaagcacagtgtggatcacagaaactcactaagacaggacttcagcagccttttgtgtttggacaagtcagcataaataaagaatgacaaggcagcagcaagagcttcaactacagagaagtgaaggcataagatactatgatgatagtgagcaactttccaaaagctagttaaatctgcttattacaactgaaatatcgaagaaagtctagcaggaaggagctcttcgccttttggaacatcaatgagagatagttgccacagtcactaggtctagcatttagacctgcaaggaagggcaataagcattaggtaaggcttgaatttgaattttttcactaattaaagagtaattttttgtaaagcaaggtaagagtaatctttttgatttgcaggttgaatgagaaccctacttgcctaaatgaggaatgtctttcctaccatctaaaatacgaaggtttctggctgggtaaggtttgtagttgacagtaaaacctgatgacaccatttgtttccctgcaagtctacattacatatttcacaactttgtccctctctagtaggcacattggaaaaattcttcaactgaaaactaccttggtaccatgtcctacacgttttaaaccttagttttaaaaattcccctgcgaaatagccataagtattcatatcaagtcagttgtgactccttgtgtatacaattcattttttgtgtcttcagggtaaactcaatttttggtaaagtggtttcagcttttgtgaaaaccgtttttgtgtgtaagcatgacacacaacagactcagtaagctgcccatcctcatactaggaaaacaccttcaaaggaacattaaaagttaccagggccaggcacagtggctcacgcctgtaatcccagcactttgggaggctgaggcagatggatcccaagtccaggaatttgagacgagcctgggcaacatagtgagagcctgtcaacaaaaaatagaaaaattagctgggcttggtgatacacatctgtagtcccagctatttgggaggctgccttgatatcaggcagtcgaggctgcagtgagctgactgccccactgtattccagcctgggtgaccccatctcaaagaagaaaagttaccagatgtcatgggtaaaggttggtcttcaagtggcctcataagttgtcttgcatttaaattcagggaattcattggaccaataggttacattttcgttccttttttgttttggttcatctgttaagcagtgggggcctaattactgctcctttgtaaaaacacattttcccaaagaacactgaattaccgttcaaactggttgttgatgggtaataagggctgtttttgctgccccaaaagggcttaacaatttaggcggatagtttacttaaaaaaaaaaatcctttggagacatactgaaaatgcaaactagtttctaaattatcaattccctacatgaagaagcagtttgccagagtttagtctcagaaaatgactggttggctctatttaaatcagaacccaatttctacgcgtgttgaataaggtaacagcctttgatgaatttccttcacaacatggttttagtgaagcaaacattttttttttaagggcattgttctttctagtttatttctttttatgaaataaaattattttatttaaacagttccattgtcgtttctgaaaactacagtattctcagaagttgtagcagcagtaaaaaaaaaaaagttgttctataagtgattggggcagatttaactgattttgttaaaccaatttgtaagttactgcttctaatattacacttctaaaaagctgaatttatactcatgtcctaaaggagaatatgtggtaataaagtatatttgttaagtaactaattgaaataggcttggttttaagagttccagtatataataatcacaaattgaaacctgacagtatcttgggagttccagtaatgtcacaaattagtgaataagcatgccagtgtgcaagggtaatgtaaggattgttagcctatctaaatattcaaaattactttaaaacttaagtatgttttctgatttttaagaattcagaagtgttctgtaatggattcagatgtttcatttgtagtataatgaaatgtttacagaaagataactttttcattaaaatatttttagaaatg

SEQ ID NO: 347076 - DNA, 4616 bp, Homo sapiens
  misc_feature (17)..(17): n is a, c, g, or t
agaggagtaacggtggntatgtctggcagtggtaactatggtggtggtgggaactataatgattttggaaattatagtggacaacagcaatcaaattatggacccatgaaagggggcagttttggtggaagaagctcgggcagtccctatggtggtggttatggatctggtggtggaagtggtggatatggtagcagaaggttctaaaaacagcagaaaagggctacagttcttagcaggagagagagcgaggagttgtcaggaaagctgcaggttactttgagacagtcgtcccaaatgcattagaggaactgtaaaaatctgccacagaaggaacgatgatccatagtcagaaaagttactgcagcttaaacaggaaacccttcttgttcaggactgtcatagccacagtttgcaaaaagtgcagctattgattaatgcaatgtagtgtcaattagatgtacattcctgaggtcttttatctgttgtagctttgtctttttctttttcttttcattacatcaggtatattgccctgtaaattgtggtagtggtaccaggaataaaaaattaaggaatttttaacttttcaatatttgtgtagttcagtttttctacattttagtacagaaactttaacgttaattactattttgtatgaattttgctaaagttaactgtaaagaaacacctgctgacttgcagtttaaggggaatctattctccccatttccaaaccatgatatgaatgggcgctgacatgtggagagaatagataatttgtgtgtttgcaatgtgtgttttagataaataggattgggtatttaaattagcatttgtgaatttaatagcattaagattaccttcaaatgaaaaaaaatctcaaaatttctatttggtttttgtgcattttcttttaaaatgtaatcatatgattttagtgtgttagacttgctgagtcctagctgtgtttagaacatctctattctacatttaccttggtcaaatttgaactgctgccataggttttgggtgtaaagaatgtttactgccctccatttaaattctgaaaagggatggtggatgttttccctctcctacgttagaaaccattcttaaaaacttttgaaaatatagaaccattaagcctgctatatctgagcaaattaatgggtaccttttttttcttatttaaagcacaagaggcccataaatcttgagttactttaaattcttttttttgatacaagttttcagagcaagagaataaaaatcatgtgttattaaacccctaactggctggcatgctttcctgtttgtattctatacattttgctggatgaaaccaaggatagttcaggtataattgtccaaaataacctaactgcagcagaaatgtagcacagttgcttagtacaggcttctcacttcctacagacctgaattcaaatttggatagtctgagttcttaaattcccaaagaacacactgttatttcttgtgtatatttcaacataaatcatgttgttaccaatttgtttggaaggccctggttgagaagagttttagttaataaggtcatatatacatatattaatataaaccaatgtctactgttttgctccagctagtgcttacagtttcattcgagccctgagtatgtgccctgctgttactctctttggtagttgaacgttgaattcaagtcttttgttttaagaagtactaagcaaacaagcaataaaaaggggaatggggtgtgctagtgtttgaatatgctctcttgttgctctaattctgtgcctctgtgcattaatatttggatgcatgcaatgccagcatggaaattggtcttcacatatactgcagttttccagaaacattcacaaaccaataaatgtaacagacattccatttgttaatgggcatatatgtgaaaagcagtgtagaaaataggctaatattagaaaatggttaagtcctaaataacttcaagtgtggttatataatggacactgtcaatgttcataacttaaacctgggtacctggtcaaaataatgcttgggaaacattaaaattgagctaaattgtctcaagttcttttattcatataaataaagtttaaaggaatgggggagattaacatttcctgttttatgtttgtgaaattgtttgacacaaccttgacagtatcctttaatggcatgaggttaattgtactgttaaccaactttctatgttctggaactagtattatagtgaaaacatttacagtaagttgatgtttacaacctataagcaggtgaaatctgtgtatgtgacctgtttataagttgtattagcttagctcttgtgaacagtgtggaaaagtaagccatgaggagagcgatttaaccacctttaaaggacctaagatgtgctttttaagcacagtgtggatcacagaaactcactaagacaggacttcagcagccttttgtgtttggacaagtcagcataaataaagaatgacaaggcagcagcaagagcttcaactacagagaagtgaaggcataagatactatgatgatagtgagcaactttccaaaagctagttaaatctgcttattacaactgaaatatcgaagaaagtctagcaggaaggagctcttcgccttttggaacatcaatgagagatagttgccacagtcactaggtctagcatttagacctgcaaggaagggcaataagcattaggtaaggcttgaatttgaattttttcactaattaaagagtaattttttgtaaagcaaggtaagagtaatctttttgatttgcaggttgaatgagaaccctacttgcctaaatgaggaatgtctttcctaccatctaaaatacgaaggtttctggctgggtaaggtttgtagttgacagtaaaacctgatgacaccatttgtttccctgcaagtctacattacatatttcacaactttgtccctctctagtaggcacattggaaaaattcttcaactgaaaactaccttggtaccatgtcctacacgttttaaaccttagttttaaaaattcccctgcgaaatagccataagtattcatatcaagtcagttgtgactccttgtgtatacaattcattttttgtgtcttcagggtaaactcaatttttggtaaagtggtttcagcttttgtgaaaaccgtttttgtgtgtaagcatgacacacaacagactcagtaagctgcccatcctcatactaggaaaacaccttcaaaggaacattaaaagttaccagggccaggcacagtggctcacgcctgtaatcccagcactttgggaggctgaggcagatggatcccaagtccaggaatttgagacgagcctgggcaacatagtgagagcctgtcaacaaaaaatagaaaaattagctgggcttggtgatacacatctgtagtcccagctatttgggaggctgccttgatatcaggcagtcgaggctgcagtgagctgactgccccactgtattccagcctgggtgaccccatctcaaagaagaaaagttaccagatgtcatgggtaaaggttggtcttcaagtggcctcataagttgtcttgcatttaaattcagggaattcattggaccaataggttacattttcgttccttttttgttttggttcatctgttaagcagtgggggcctaattactgctcctttgtaaaaacacattttcccaaagaacactgaattaccgttcaaactggttgttgatgggtaataagggctgtttttgctgccccaaaagggcttaacaatttaggcggatagtttacttaaaaaaaaaaatcctttggagacatactgaaaatgcaaactagtttctaaattatcaattccctacatgaagaagcagtttgccagagtttagtctcagaaaatgactggttggctctatttaaatcagaacccaatttctacgcgtgttgaataaggtaacagcctttgatgaatttccttcacaacatggttttagtgaagcaaacattttttttttaagggcattgttctttctagtttatttctttttatgaaataaaattattttatttaaacagttccattgtcgtttctgaaaactacagtattctcagaagttgtagcagcagtaaaaaaaaaaaagttgttctataagtgattggggcagatttaactgattttgttaaaccaatttgtaagttactgcttctaatattacacttctaaaaagctgaatttatactcatgtcctaaaggagaatatgtggtaataaagtatatttgttaagtaactaattgaaataggcttggttttaagagttccagtatataataatcacaaattgaaacctgacagtatcttgggagttccagtaatgtcacaaattagtgaataagcatgccagtgtgcaagggtaatgtaaggattgttagcctatctaaatattcaaaattactttaaaacttaagtatgttttctgatttttaagaattcagaagtgttctgtaatggattcagatgtttcatttgtagtataatgaaatgtttacagaaagataactttttcattaaaatatttttagaaatg

SEQ ID NO: 347077 - DNA, 1772 bp, Homo sapiens
atcgtgcagaagatcaccttatcgtgcagaagatcacctcatcgtgcagaagatcaccttatcgtgcagaagatcacctcatcgtgcagaagatcacctttctaaacaagagatgcagtctgctggatcacagagaggtcgtggaggtggatctggcaattttatgggtcgcggagggaactttggaggtggtggaggtaattttggccgtggtggaaactttggtggaagaggaggctatggtggtggaggtggtggcagcagaggtagttatggaggaggtgatggtggatataatggatttggaggtgatggtggcaactatggcggtggtcctggttatagtagtagagggggctatggtggtggtggaccaggatatggaaaccaaggtggtggatatggtggaggtggaggatatgatggttacaatgaaggaggaaattttggcggtggtaactatggtggtggtgggaactataatgattttggaaattatagtggacaacagcaatcaaattatggacccatgaaagggggcagttttggtggaagaagctcgggcagtccctatggtggtggttatggatctggtggtggaagtggtggatatggtagcagaaggttctaaaaacagcagaaaagggctacagttcttagcaggagagagagcgaggagttgtcaggaaagctgcaggttactttgagacagtcgtcccaaatgcattagaggaactgtaaaaatctgccacagaaggaacgatgatccatagtcagaaaagttactgcagcttaaacaggaaacccttcttgttcaggactgtcatagccacagtttgcaaaaagtgcagctattgattaatgcaatgtagtgtcaattagatgtacattcctgaggtcttttatctgttgtagctttgtctttttctttttcttttcattacatcaggtatattgccctgtaaattgtggtagtggtaccaggaataaaaaattaaggaatttttaacttttcaatatttgtgtagttcagtttttctacattttagtacagaaactttaacaaaatgcagtttcgaaggtgtttccttgtgagttaacaagtaaagaagatcattgttaattactattttgtatgaattttgctaaagttaactgtaaagaaacacctgctgacttgcagtttaaggggaatctattctccccatttccaaaccatgatatgaatgggcgctgacatgtggagagaatagataatttgtgtgtttgcaatgtgtgttttagataaataggattgggtatttaaattagcatttgtgaatttaatagcattaagattaccttcaaatgaaaaaaaatctcaaaatttctatttggtttttgtgcattttcttttaaaatgtaatcatatgattttagtgtgttagacttgctgagtcctagctgtgtttagaacatctctattctacatttaccttggtcaaatttgaactgctgccataggttttgggtgtaaagaatgtttactgccctccatttaaattctgaaaagggatggtggatgttttccctctcctacgttagaaaccattcttaaaaacttttgaaaatatagaaccattaagcctgctatatctgagcaaattaatgggtaccttttttttcttatttaaagcacaagaggcccataaatcttgagttactttaaattcttttttttgatacaagttttcagagcaagagaataaaaatcatgtgttattaaaccccta

SEQ ID NO: 347078 - DNA, 2689 bp, Homo sapiens
ccacgcgtcggtgcttgggaaacattattttgaccaggtacccaggtttaagttatgaacattgacagtgtccattatataaccacacttgaagttatttaggacttaaacctgggtacctggtcaaaataatgcttgggaaacattaaaattgagctaaattgtctcaagttcttttattcatataaataaagtttaaaggaatgggggagattaacatttcctgttttatgtttgtgaaattgtttgacacaaccttgacagtatcctttaatggcatgaggttaattgtactgttaaccaactttctatgttctggaactagtattatagtgaaaacatttacagtaagttgatgtttacaacctataagcaggtgaaatctgtgtatgtgacctgtttataagttgtattagcttagctcttgtgaacagtgtggaaaagtaagccatgaggagagcgatttaaccacctttaaaggacctaagatgtgctttttaagcacagtgtggatcacagaaactcactaagacaggacttcagcagccttttgtgtttggacaagtcagcataaataaagaatgacaaggcagcagcaagagcttcaactacagagaagtgaaggcataagatactatgatgatagtgagcaactttccaaaagctagttaaatctgcttattacaactgaaatatcgaagaaagtctagcaggaaggagctcttcgccttttggaacatcaatgagagatagttgccacagtcactaggtctagcatttagacctgcaaggaagggcaataagcattaggtaaggcttgaatttgaattttttcactaattaaagagtaattttttgtaaagcaaggtaagagtaatctttttgatttgcaggttgaatgagaaccctacttgcctaaatgaggaatgtctttcctaccatctaaaatacgaaggtttctggctgggtaaggtttgtagttgacagtaaaacctgatgacaccatttgtttccctgcaagtctacattacatatttcacaactttgtccctctctagtaggcacattggaaaaattcttcaactgaaaactaccttggtaccatgtcctacacgttttaaaccttagttttaaaaattcccctgcgaaatagccataagtattcatatcaagtcagttgtgactccttgtgtatacaattcattttttgtgtcttcagggtaaactcaatttttggtaaagtggtttcagcttttgtgaaaaccgtttttgtgtgtaagcatgacacacaacagactcagtaagctgcccatcctcatactaggaaaacaccttcaaaggaacattaaaagttaccagggccaggcacagtggctcacgcctgtaatcccagcactttgggaggctgaggcagatggatcccaagtccaggaatttgagacgagcctgggcaacatagtgagagcctgtcaacaaaaaatagaaaaattagctgggcttggtgatacacatctgtagtcccagctatttgggaggctgccttgatatcaggcagtcgaggctgcagtgagctgactgccccactgtattccagcctgggtgaccccatctcaaagaagaaaagttaccagatgtcatgggtaaaggttggtcttcaagtggcctcataagttgtcttgcatttaaattcagggaattcattggaccaataggttacattttcgttccttttttgttttggttcatctgttaagcagtgggggcctaattactgctcctttgtaaaaacacattttcccaaagaacactgaattaccgttcaaactggttgttgatgggtaataagggctgtttttgctgccccaaaagggcttaacaatttaggcggatagtttacttaaaaaaaaaaatcctttggagacatactgaaaatgcaaactagtttctaaattatcaattccctacatgaagaagcagtttgccagagtttagtctcagaaaatgactggttggctctatttaaatcagaacccaatttctacgcgtgttgaataaggtaacagcctttgatgaatttccttcacaacatggttttagtgaagcaaacattttttttttaagggcattgttctttctagtttatttctttttatgaaataaaattattttatttaaacagttccattgtcgtttctgaaaactacagtattctcagaagttgtagcagcagtaaaaaaaaaaaagttgttctataagtgattggggcagatttaactgattttgttaaaccaatttgtaagttactgcttctaatattacacttctaaaaagctgaatttatactcatgtcctaaaggagaatatgtggtaataaagtatatttgttaagtaactaattgaaataggcttggttttaagagttccagtatataataatcacaaattgaaacctgacagtatcttgggagttccagtaatgtcacaaattagtgaataagcatgccagtgtgcaagggtaatgtaaggattgttagcctatctaaatattcaaaattactttaaaacttaagtatgttttctgatttttaagaattcagaagtgttctgtaatggattcagatgtttcatttgtagtataatgaaatgtttacagaaagataactttttcattaaaatatttttagaaatg

SEQ ID NO: 347079 - DNA, 2442 bp, Homo sapiens
atcgtgcagaagatcaccttatcgtgcagaagatcacctcatcgtgcagaagatcaccttatcgtgcagaagatcacctcatcgtgcagaagatcacctttctaaacaagagatgcagtctgctggatcacagagaggtcgtggaggtggatctggcaattttatgggtcgcggagggaactttggaggtggtggaggtaattttggccgtggtggaaactttggtggaagaggaggctatggtggtggaggtggtggcagcagaggtagttatggaggaggtgatggtggatataatggatttggaggtgatggtggcaactatggcggtggtcctggttatagtagtagagggggctatggtggtggtggaccaggatatggaaaccaaggtggtggatatggtggaggtggaggatatgatggttacaatgaaggaggaaattttggcggtggtaactatggtggtggtgggaactataatgattttggaaattatagtggacaacagcaatcaaattatggacccatgaaagggggcagttttggtggaagaagctcgggcagtccctatggtggtggttatggatctggtggtggaagtggtggatatggtagcagaaggttctaaaaacagcagaaaagggttgaatgagaaccctacttgcctaaatgaggaatgtctttcctaccatctaaaatacgaaggtttctggctgggtaaggtttgtagttgacagtaaaacctgatgacaccatttgtttccctgcaagtctacattacatatttcacaactttgtccctctctagtaggcacattggaaaaattcttcaactgaaaactaccttggtaccatgtcctacacgttttaaaccttagttttaaaaattcccctgcgaaatagccataagtattcatatcaagtcagttgtgactccttgtgtatacaattcattttttgtgtcttcagggtaaactcaatttttggtaaagtggtttcagcttttgtgaaaaccgtttttgtgtgtaagcatgacacacaacagactcagtaagctgcccatcctcatactaggaaaacaccttcaaaggaacattaaaagttaccagggccaggcacagtggctcacgcctgtaatcccagcactttgggaggctgaggcagatggatcccaagtccaggaatttgagacgagcctgggcaacatagtgagagcctgtcaacaaaaaatagaaaaattagctgggcttggtgatacacatctgtagtcccagctatttgggaggctgccttgatatcaggcagtcgaggctgcagtgagctgactgccccactgtattccagcctgggtgaccccatctcaaagaagaaaagttaccagatgtcatgggtaaaggttggtcttcaagtggcctcataagttgtcttgcatttaaattcagggaattcattggaccaataggttacattttcgttccttttttgttttggttcatctgttaagcagtgggggcctaattactgctcctttgtaaaaacacattttcccaaagaacactgaattaccgttcaaactggttgttgatgggtaataagggctgtttttgctgccccaaaagggcttaacaatttaggcggatagtttacttaaaaaaaaaaatcctttggagacatactgaaaatgcaaactagtttctaaattatcaattccctacatgaagaagcagtttgccagagtttagtctcagaaaatgactggttggctctatttaaatcagaacccaatttctacgcgtgttgaataaggtaacagcctttgatgaatttccttcacaacatggttttagtgaagcaaacattttttttttaagggcattgttctttctagtttatttctttttatgaaataaaattattttatttaaacagttccattgtcgtttctgaaaactacagtattctcagaagttgtagcagcagtaaaaaaaaaaaagttgttctataagtgattggggcagatttaactgattttgttaaaccaatttgtaagttactgcttctaatattacacttctaaaaagctgaatttatactcatgtcctaaaggagaatatgtggtaataaagtatatttgttaagtaactaattgaaataggcttggttttaagagttccagtatataataatcacaaattgaaacctgacagtatcttgggagttccagtaatgtcacaaattagtgaataagcatgccagtgtgcaagggtaatgtaaggattgttagcctatctaaatattcaaaattactttaaaacttaagtatgttttctgatttttaagaattcagaagtgttctgtaatggattcagatgtttcatttgtagtataatgaaatgtttacagaaagataactttttcattaaaatatttttagaaatg

SEQ ID NO: 347080 - DNA, 2006 bp, Homo sapiens
cggtgttgttggtgatggtgaatgttgatggcaaaagtggtgttgatggatactgatgatgtggtgataatagtggtcataatggtggtggtggtggtgccgaaagtggaggtggtagtgtttaatggtagtgacaatggtggtggttatggatctggtggtggaagtggtggatatggtagcagaaggttctaaaaacagcagaaaagggttgaatgagaaccctacttgcctaaatgaggaatgtctttcctaccatctaaaatacgaaggtttctggctgggtaaggtttgtagttgacagtaaaacctgatgacaccatttgtttccctgcaagtctacattacatatttcacaactttgtccctctctagtaggcacattggaaaaattcttcaactgaaaactaccttggtaccatgtcctacacgttttaaaccttagttttaaaaattcccctgcgaaatagccataagtattcatatcaagtcagttgtgactccttgtgtatacaattcattttttgtgtcttcagggtaaactcaatttttggtaaagtggtttcagcttttgtgaaaaccgtttttgtgtgtaagcatgacacacaacagactcagtaagctgcccatcctcatactaggaaaacaccttcaaaggaacattaaaagttaccagggccaggcacagtggctcacgcctgtaatcccagcactttgggaggctgaggcagatggatcccaagtccaggaatttgagacgagcctgggcaacatagtgagagcctgtcaacaaaaaatagaaaaattagctgggcttggtgatacacatctgtagtcccagctatttgggaggctgccttgatatcaggcagtcgaggctgcagtgagctgactgccccactgtattccagcctgggtgaccccatctcaaagaagaaaagttaccagatgtcatgggtaaaggttggtcttcaagtggcctcataagttgtcttgcatttaaattcagggaattcattggaccaataggttacattttcgttccttttttgttttggttcatctgttaagcagtgggggcctaattactgctcctttgtaaaaacacattttcccaaagaacactgaattaccgttcaaactggttgttgatgggtaataagggctgtttttgctgccccaaaagggcttaacaatttaggcggatagtttacttaaaaaaaaaaatcctttggagacatactgaaaatgcaaactagtttctaaattatcaattccctacatgaagaagcagtttgccagagtttagtctcagaaaatgactggttggctctatttaaatcagaacccaatttctacgcgtgttgaataaggtaacagcctttgatgaatttccttcacaacatggttttagtgaagcaaacattttttttttaagggcattgttctttctagtttatttctttttatgaaataaaattattttatttaaacagttccattgtcgtttctgaaaactacagtattctcagaagttgtagcagcagtaaaaaaaaaaaagttgttctataagtgattggggcagatttaactgattttgttaaaccaatttgtaagttactgcttctaatattacacttctaaaaagctgaatttatactcatgtcctaaaggagaatatgtggtaataaagtatatttgttaagtaactaattgaaataggcttggttttaagagttccagtatataataatcacaaattgaaacctgacagtatcttgggagttccagtaatgtcacaaattagtgaataagcatgccagtgtgcaagggtaatgtaaggattgttagcctatctaaatattcaaaattactttaaaacttaagtatgttttctgatttttaagaattcagaagtgttctgtaatggattcagatgtttcatttgtagtataatgaaatgtttacagaaagataactttttcattaaaatatttttagaaatg

SEQ ID NO: 347081 - DNA, 2384 bp, Homo sapiens
atcgtgcagaagatcaccttatcgtgcagaagatcacctcatcgtgcagaagatcaccttatcgtgcagaagatcacctcatcgtgcagaagatcacctttctaaacaagagatgcagtctgctggatcacagagaggtcgtggaggtggatctggcaattttatgggtcgcggagggaactttggaggtggtggaggtaattttggccgtggtggaaactttggtggaagaggaggctatggtggtggaggtggtggcagcagaggtagttatggaggaggtgatggtggatataatggatttggaggtgatggtggcaactatggcggtggtcctggttatagtagtagagggggctatggtggtggtggaccaggatatggaaaccaaggtggtggatatggtggaggtggaggatatgatggttacaatgaaggaggaaattttggcggtggtaactatggtggtggtgggaactataatgattttggaaattatagtggacaacagcaatcaaattatggacccatgaaagggggcagttttggtggaagaagctcgggcagtccctatggtggtggttatggatctggtggtggaagtggtggatatggtagcagaaggttctaaaaacagcagaaaagggttgaatgagaaccctacttgcctaaatgaggaatgtctttcctaccatctaaaatacgaaggtttctggctgggtaaggtttgtagttgacagtaaaacctgatgacaccatttgtttccctgcaagtctacattacatatttcacaactttgtccctacacgttttaaaccttagttttaaaaattcccctgcgaaatagccataagtattcatatcaagtcagttgtgactccttgtgtatacaattcattttttgtgtcttcagggtaaactcaatttttggtaaagtggtttcagcttttgtgaaaaccgtttttgtgtgtaagcatgacacacaacagactcagtaagctgcccatcctcatactaggaaaacaccttcaaaggaacattaaaagttaccagggccaggcacagtggctcacgcctgtaatcccagcactttgggaggctgaggcagatggatcccaagtccaggaatttgagacgagcctgggcaacatagtgagagcctgtcaacaaaaaatagaaaaattagctgggcttggtgatacacatctgtagtcccagctatttgggaggctgccttgatatcaggcagtcgaggctgcagtgagctgactgccccactgtattccagcctgggtgaccccatctcaaagaagaaaagttaccagatgtcatgggtaaaggttggtcttcaagtggcctcataagttgtcttgcatttaaattcagggaattcattggaccaataggttacattttcgttccttttttgttttggttcatctgttaagcagtgggggcctaattactgctcctttgtaaaaacacattttcccaaagaacactgaattaccgttcaaactggttgttgatgggtaataagggctgtttttgctgccccaaaagggcttaacaatttaggcggatagtttacttaaaaaaaaaaatcctttggagacatactgaaaatgcaaactagtttctaaattatcaattccctacatgaagaagcagtttgccagagtttagtctcagaaaatgactggttggctctatttaaatcagaacccaatttctacgcgtgttgaataaggtaacagcctttgatgaatttccttcacaacatggttttagtgaagcaaacattttttttttaagggcattgttctttctagtttatttctttttatgaaataaaattattttatttaaacagttccattgtcgtttctgaaaactacagtattctcagaagttgtagcagcagtaaaaaaaaaaaagttgttctataagtgattggggcagatttaactgattttgttaaaccaatttgtaagttactgcttctaatattacacttctaaaaagctgaatttatactcatgtcctaaaggagaatatgtggtaataaagtatatttgttaagtaactaattgaaataggcttggttttaagagttccagtatataataatcacaaattgaaacctgacagtatcttgggagttccagtaatgtcacaaattagtgaataagcatgccagtgtgcaagggtaatgtaaggattgttagcctatctaaatattcaaaattactttaaaacttaagtatgttttctgatttttaagaattcagaagtgttctgtaatggattcagatgtttcatttgtagtataatgaaatgtttacagaaagataactttttcattaaaatatttttagaaatg

SEQ ID NO: 347082 - DNA, 1679 bp, Homo sapiens
ctaacaccataaaaacccaacaagaaaacctaggccataccgttcaggacataggcacgggcacattcttcaactgaaaactaccttggtaccatgtcctacacgttttaaaccttagttttaaaaattcccctgcgaaatagccataagtattcatatcaagtcagttgtgactccttgtgtatacaattcattttttgtgtcttcagggtaaactcaatttttggtaaagtggtttcagcttttgtgaaaaccgtttttgtgtgtaagcatgacacacaacagactcagtaagctgcccatcctcatactaggaaaacaccttcaaaggaacattaaaagttaccagggccaggcacagtggctcacgcctgtaatcccagcactttgggaggctgaggcagatggatcccaagtccaggaatttgagacgagcctgggcaacatagtgagagcctgtcaacaaaaaatagaaaaattagctgggcttggtgatacacatctgtagtcccagctatttgggaggctgccttgatatcaggcagtcgaggctgcagtgagctgactgccccactgtattccagcctgggtgaccccatctcaaagaagaaaagttaccagatgtcatgggtaaaggttggtcttcaagtggcctcataagttgtcttgcatttaaattcagggaattcattggaccaataggttacattttcgttccttttttgttttggttcatctgttaagcagtgggggcctaattactgctcctttgtaaaaacacattttcccaaagaacactgaattaccgttcaaactggttgttgatgggtaataagggctgtttttgctgccccaaaagggcttaacaatttaggcggatagtttacttaaaaaaaaaaatcctttggagacatactgaaaatgcaaactagtttctaaattatcaattccctacatgaagaagcagtttgccagagtttagtctcagaaaatgactggttggctctatttaaatcagaacccaatttctacgcgtgttgaataaggtaacagcctttgatgaatttccttcacaacatggttttagtgaagcaaacattttttttttaagggcattgttctttctagtttatttctttttatgaaataaaattattttatttaaacagttccattgtcgtttctgaaaactacagtattctcagaagttgtagcagcagtaaaaaaaaaaaagttgttctataagtgattggggcagatttaactgattttgttaaaccaatttgtaagttactgcttctaatattacacttctaaaaagctgaatttatactcatgtcctaaaggagaatatgtggtaataaagtatatttgttaagtaactaattgaaataggcttggttttaagagttccagtatataataatcacaaattgaaacctgacagtatcttgggagttccagtaatgtcacaaattagtgaataagcatgccagtgtgcaagggtaatgtaaggattgttagcctatctaaatattcaaaattactttaaaacttaagtatgttttctgatttttaagaattcagaagtgttctgtaatggattcagatgtttcatttgtagtataatgaaatgtttacagaaagataactttttcattaaaatatttttagaaatg

SEQ ID NO: 347083 - DNA, 1014 bp, Homo sapiens
atcgtgcagaagatcaccttatcgtgcagaagatcacctcatcgtgcagaagatcaccttatcgtgcagaagatcacctcatcgtgcagaagatcacctttctaaacaagagatgcagtctgctggatcacagagaggtcgtggaggtggatctggcaattttatgggtcgcggagggaactttggaggtggtggaggtaattttggccgtggtggaaactttggtggaagaggaggctatggtggtggaggtggtggcagcagaggtagttatggaggaggtgatggtggatataatggatttggaggtgatggtggcaactatggcggtggtcctggttatagtagtagagggggctatggtggtggtggaccaggatatggaaaccaaggtggtggatatggtggaggtggaggatatgatggttacaatgaaggaggaaattttggcggtggtaactatggtggtggtgggaactataatgattttggaaattatagtggacaacagcaatcaaattatggacccatgaaagggggcagttttggtggaagaagctcgggcagtccctatggtggtggttatggatctggtggtggaagtggtggatatggtagcagaaggttctaaaaacagcagaaaagggctacagttcttagcaggagagagagcgaggagttgtcaggaaagctgcaggttactttgagacagtcgtcccaaatgcattagaggaactgtaaaaatctgccacagaaggaacgatgatccatagtcagaaaagttactgcagcttaaacaggaaacccttcttgttcaggactgtcatagccacagtttgcaaaaagtgcagctattgattaatgcaatgtagtgtcaattagatgtacattcctgaggtcttttatctgttgtagctttgtctttttctttttcttttcattacatcaggtatattgccctgtaaattgtggtagtggtaccaggaataaaaaattaaggaatttttaactttt

SEQ ID NO: 347084 - DNA, 1121 bp, Homo sapiens
atcgtgcagaagatcaccttatcgtgcagaagatcacctcatcgtgcagaagatcaccttatcgtgcagaagatcacctcatcgtgcagaagatcacctttctaaacaagagatgcagtctgctggatcacagagaggtcgtggaggtggatctggcaattttatgggtcgcggagggaactttggaggtggtggaggtaattttggccgtggtggaaactttggtggaagaggaggctatggtggtggaggtggtggcagcagaggtagttatggaggaggtgatggtggatataatggatttggaggtgatggtggcaactatggcggtggtcctggttatagtagtagagggggctatggtggtggtggaccaggatatggaaaccaaggtggtggatatggtggaggtggaggatatgatggttacaatgaaggaggaaattttggcggtggtaactatggtggtggtgggaactataatgattttggaaattatagtggacaacagcaatcaaattatggacccatgaaagggggcagttttggtggaagaagctcgggcagtccctatggtggtggttatggatctggtggtggaagtggtggatatggtagcagaaggttctaaaaacagcagaaaagggctacagttcttagcaggagagagagcgaggagttgtcaggaaagctgcaggttactttgagacagtcgtcccaaatgcattagaggaactgtaaaaatctgccacagaaggaacgatgatccatagtcagaaaagttactgcagcttaaacaggaaacccttcttgttcaggactgtcatagccacagtttgcaaaaagtgcagctattgattaatgcaatgtagtgtcaattagatgtacattcctgaggtcttttatctgttgtagctttgtctttttctttttcttttcatacgcccagtatttggccgggtaatgtggcatgtcccggcatacacataggatttaccttcacattggtcgtcggtccaacttagtccgaattacaagggtcgagggtccggagtccgtaacacggtccatgttatggaaggaccgcgggggaatccccccaggcggaaagagggaaaaag

SEQ ID NO: 347085 - DNA, 1139 bp, Homo sapiens
aagtggctgtgatacacagtagtccactaggagcctccttgattccgcccattagggccacagtggatttgttgccccactgtattccagcctgggtgaccccatctcaaagaagaaaagttaccagatgtcatgggtaaaggttggtcttcaagtggcctcataagttgtcttgcatttaaattcagggaattcattggaccaataggttacattttcgttccttttttgttttggttcatctgttaagcagtgggggcctaattactgctcctttgtaaaaacacattttcccaaagaacactgaattaccgttcaaactggttgttgatgggtaataagggctgtttttgctgccccaaaagggcttaacaatttaggcggatagtttacttaaaaaaaaaaatcctttggagacatactgaaaatgcaaactagtttctaaattatcaattccctacatgaagaagcagtttgccagagtttagtctcagaaaatgactggttggctctatttaaatcagaacccaatttctacgcgtgttgaataagcaaacattttttttttaagggcattgttctttctagtttatttctttttatgaaataaaattattttatttaaacagttccattgtcgtttctgaaaactacagtattctcagaagttgtagcagcagtaaaaaaaaaaaagttgttctataagtgattggggcagatttaactgattttgttaaaccaatttgtaagttactgcttctaatattacacttctaaaaagctgaatttatactcatgtcctaaaggagaatatgtggtaataaagtatatttgttaagtaactaattgaaataggcttggttttaagagttccagtatataataatcacaaattgaaacctgacagtatcttgggagttccagtaatgtcacaaattagtgaataagcatgccagtgtgcaagggtaatgtaaggattgttagcctatctaaatattcaaaattactttaaaacttaagtatgttttctgatttttaagaattcagaagtgttctgtaatggattcagatgtttcatttgtagtataatgaaatgtttacagaaagataactttttcattaaaatatttttagaaatg

SEQ ID NO: 347086 - DNA, 611 bp, Homo sapiens
cagcggggacaatcacttatagaacaaacattttttttttaagggcattgttctttctagtttatttctttttatgaaataaaattattttatttaaacagttccattgtcgtttctgaaaactacagtattctcagaagttgtagcagcagtaaaaaaaaaaaagttgttctataagtgattggggcagatttaactgattttgttaaaccaatttgtaagttactgcttctaatattacacttctaaaaagctgaatttatactcatgtcctaaaggagaatatgtggtaataaagtatatttgttaagtaactaattgaaataggcttggttttaagagttccagtatataataatcacaaattgaaacctgacagtatcttgggagttccagtaatgtcacaaattagtgaataagcatgccagtgtgcaagggtaatgtaaggattgttagcctatctaaatattcaaaattactttaaaacttaagtatgttttctgatttttaagaattcagaagtgttctgtaatggattcagatgtttcatttgtagtataatgaaatgtttacagaaagataactttttcattaaaatatttttagaaatg

SEQ ID NO: 347087 - DNA, 1191 bp, Homo sapiens
atcgtgcagaagatcaccttatcgtgcagaagatcacctcatcgtgcagaagatcaccttatcgtgcagaagatcacctcatcgtgcagaagatcacctttctaaacaagagatgcagtctgctggatcacagagaggtcgtggaggtggatctggcaattttatgggtcgcggagggaactttggaggtggtggaggtaattttggccgtggtggaaactttggtggaagaggaggctatggtggtggaggtggtggcagcagaggtagttatggaggaggtgatggtggatataatggatttggaggtgatggtggcaactatggcggtggtcctggttatagtagtagagggggctatggtggtggtggaccaggatatggaaaccaaggtggtggatatggtggaggtggaggatatgatggttacaatgaaggaggaaattttggcggtggtaactatggtggtggtgggaactataatgattttggaaattatagtggacaacagcaatcaaattatggacccatgaaagggggcagttttggtggaagaagctcgggcagtccctatggtggtggttatggatctggtggtggaagtggtggatatggtagcagaaggttctaaaaacagcagaaaagggctacagttcttagcaggagagagagcgaggagttgtcaggaaagctgcaggttactttgagacagtcgtcccaaatgcattagaggaactgtaaaaatctgccacagaaggaacgatgatccatagtcagaaaagttactgcagcttaaacaggaaacccttcttgttcaggactgtcatagccacagtttgcagtcttctatctgtagtagcttttgcttcttcctttctctttcattacattacggatatttgctctgtacatggtgttagtggtaccaacaattataatatttaaggactctttaacttctcaatatttctgtatctcaggtcttctgctttttatcctagatgcttaaccatatgcacgttctaacgtgttctctcttgtagttactctgttcttagtcccttgtaattcttatttcgctcattttctttagtctctatgttcctctcttctggacttctcttttagcgttgttctattcccccattcttataccctgtcttccatggttctcgcacttctctctgcccc

SEQ ID NO: 347088 - DNA, 931 bp, Homo sapiens
atcgtgcagaagatcaccttatcgtgcagaagatcacctcatcgtgcagaagatcaccttatcgtgcagaagatcacctcatcgtgcagaagatcacctttctaaacaagagatgcagtctgctggatcacagagaggtcgtggaggtggatctggcaattttatgggtcgcggagggaactttggaggtggtggaggtaattttggccgtggtggaaactttggtggaagaggaggctatggtggtggaggtggtggcagcagaggtagttatggaggaggtgatggtggatataatggatttggaggtgatggtggcaactatggcggtggtcctggttatagtagtagagggggctatggtggtggtggaccaggatatggaaaccaaggtggtggatatggtggaggtggaggatatgatggttacaatgaaggaggaaattttggcggtggtaactatggtggtggtgggaactataatgattttggaaattatagtggacaacagcaatcaaattatggacccatgaaagggggcagttttggtggaagaagctcgggcagtccctatggtggtggttatggatctggtggtggaagtggtggatatggtagcagaaggttctaaaaacagcagaaaagggctacagttcttagcaggagagagagcgaggagttgtcaggaaagctgcaggttactttgagacagtcgtcccaaatgcattagaggaactgtaaaaatctgccacagaaggaacgatgatccatagtcacggaacagtaccacacttgcaagcacggcagcttgactgtatcaggatctctcataatctcaccagttacaggaacgtgcacgctgagtgattaatccaattcacagtcaaagagtattccatgtcgtaaacctttttgcgggagatgaggtccg

SEQ ID NO: 347089 - DNA, 856 bp, Homo sapiens
atcgtgcagaagatcaccttatcgtgcagaagatcacctcatcgtgcagaagatcaccttatcgtgcagaagatcacctcatcgtgcagaagatcacctttctaaacaagagatgcagtctgctggatcacagagaggtcgtggaggtggatctggcaattttatgggtcgcggagggaactttggaggtggtggaggtaattttggccgtggtggaaactttggtggaagaggaggctatggtggtggaggtggtggcagcagaggtagttatggaggaggtgatggtggatataatggatttggaggtgatggtggcaactatggcggtggtcctggttatagtagtagagggggctatggtggtggtggaccaggatatggaaaccaaggtggtggatatggtggaggtggaggatatgatggttacaatgaaggaggaaattttggcggtggtaactatggtggtggtgggaactataatgattttggaaattatagtggacaacagcaatcaaattatggacccatgaaagggggcagttttggtggaagaagctcgggcagtccctatggtggtggttatggatctggtggtggaagtggtggatatggtagcagaaggttctaaaaacagcagaaaagggctacagttcttagcaggagagagagcgaggagttgtcaggaaagaggttatattaaggaagatcttgatccttgtcctcgtccaaaagacgtcagccttacacgcatattttctccaaaggcaggagcgaagacatagacgttgaaacagaaacagaaggatgaaggacgttttttccttcttagttatttatagttaaagctgtacag

SEQ ID NO: 347090 - DNA, 1046 bp, Homo sapiens
  misc_feature (1046)..(1046): n is a, c, g, or t
atcgtgcagaagatcaccttatcgtgcagaagatcacctcatcgtgcagaagatcaccttatcgtgcagaagatcacctcatcgtgcagaagatcacctttctaaacaagagatgcagtctgctggatcacagagaggtcgtggaggtggatctggcaattttatgggtcgcggagggaactttggaggtggtggaggtaattttggccgtggtggaaactttggtggaagaggaggctatggtggtggaggtggtggcagcagaggtagttatggaggaggtgatggtggatataatggatttggaggtgatggtggcaactatggcggtggtcctggttatagtagtagagggggctatggtggtggtggaccaggatatggaaaccaaggtggtggatatggtggaggtggaggatatgatggttacaatgaaggaggaaattttggcggtggtaactatggtggtggtgggaactataatgattttggaaattatagtggacaacagcaatcaaattatggacccatgaaagggggcagttttggtggaagaagctcgggcagtccctatggtggtggttatggatctggtggtggaagtggtggatatggtagcagaaggttgaaagctgcaggttactttgagacagtcgtcccaaatgcattagaggaactgtaaaaatctgccacagaaggaacgatgatccatagtcagaaaagttactgcagcttaaacaggaaacccttcttgttcaggactgtcatagccacagtttgcaaaaagtgcagctattgattaatgcaactctttgtccatttctcgagccttctacccgccgcacctctctcttcatctcttccttcttttcactcactctccttcctcttgtaccctctcctctcgtccctttcactcttcccttctcccctttttccctttgtccttttttgccacctcccccgtctcttccattttccttccttcaccctctcttcatcatgtcctctcccacgatcttatccttctctatttctctctcccn

SEQ ID NO: 347091 - DNA, 987 bp, Homo sapiens
atcgtgcagaagatcaccttatcgtgcagaagatcacctcatcgtgcagaagatcaccttatcgtgcagaagatcacctcatcgtgcagaagatcacctttctaaacaagagatgcagtctgctggatcacagagaggtcgtggaggtggatctggcaattttatgggtcgcggagggaactttggaggtggtggaggtaattttggccgtggtggaaactttggtggaagaggaggctatggtggtggaggtggtggcagcagaggtagttatggaggaggtgatggtggatataatggatttggaggtgatggtggcaactatggcggtggtcctggttatagtagtagagggggctatggtggtggtggaccaggatatggaaaccaaggtggtggatatggtggaggtggaggatatgatggttacaatgaaggaggaaattttggcggtgctatggtggtggtgggaactataatgatttctttcaagctcaaatctttcactggatgttttgaggggtaatgatgagactattggatttgaggatattcttaatgatccatcacaaagcgaagtcatgggagagccacacttgatggtggaatataaacttggtttactgtaatagtgtgctgttcatggaaaccgagggctgcatcttgtttatagtcatctttgtactgtaatttgatgtacacaacattaaaagtactgacacctgagaatttctgctcaagtagtatcagtgatcatttacacattggaggggtcttgggtttacagccatgtgacaatcaaaagcactaaagggcagatcatgttcaagctcttaattatattacaccgtagccttgtctttcaaaagttgttgctcctgactcttctccctgctcctcaggttcaattcaaccgttcctacgtttctgcacattagttgagtaagctcttagcttgcgcttaactcatgcgccctccgaaacacc

SEQ ID NO: 347092 - DNA, 123 bp, Homo sapiens
ttgtttcttgacttaatatattactttatttgtaggattctgtaaagcctggtgcccatctaacagtgaagaaaatttttgttggtggtattaaagaagatacagaagaatataatttgagag

SEQ ID NO: 347093 - DNA, 405 bp, Homo sapiens
caaaagtgcactcttctatatctacaaagagagctgtttctagagaggattctgtaaagcctggtgcccatctaacagtgaagaaaatttttgttggtggtattaaagaagatacagaagaatataatttgagagactactttgaaaagtatggcaagattgaaaccatagaagttatggaagacaggcagagtggaaaaaagagaggatttgcttttgtaacttttgatgatcatgatacagttgataaaattgttgttcagaaataccacactattaatgggcataattgtgaagtgaaaaaggccctttctaaacaagagatgcagtctgctggatcacagagaggtctggaggtggatctggcattttatggacacgaatgttcaggtaccgaaatcgaag

SEQ ID NO: 347094 - DNA, 5094 bp, Homo sapiens
atcgtgcagaagatcaccttatcgtgcagaagatcacctcatcgtgcagaagatcaccttatcgtgcagaagatcacctcatcgtgcagaagatcacctttctaaacaagagatgcagtctgctggatcacagagaggtcgtggaggtggatctggcaattttatgggtcgcggagggaactttggaggtggtggaggtaattttggccgtggtggaaactttggtggaagaggaggctatggtggtggaggtggtggcagcagaggtagttatggaggaggtgatggtggatataatggatttggaggtgatggtggcaactatggcggtggtcctggttatagtagtagagggggctatggtggtggtggaccaggatatggaaaccaaggtggtggatatggtggaggtggaggatatgatggttacaatgaaggaggaaattttggcggtggtaactatggtggtggtgggaactataatgattttggaaattatagtggacaacagcaatcaaattatggacccatgaaagggggcagttttggtggaagaagctcgggcagtccctatggtggtggttatggatctggtggtggaagtggtggatatggtagcagaaggttctaaaaacagcagaaaagggctacagttcttagcaggagagagagcgaggagttgtcaggaaagctgcaggttactttgagacagtcgtcccaaatgcattagaggaactgtaaaaatctgccacagaaggaacgatgatccatagtcagaaaagttactgcagcttaaacaggaaacccttcttgttcaggactgtcatagccacagtttgcaaaaagtgcagctattgattaatgcaatgtagtgtcaattagatgtacattcctgaggtcttttatctgttgtagctttgtctttttctttttcttttcattacatcaggtatattgccctgtaaattgtggtagtggtaccaggaataaaaaattaaggaatttttaacttttcaatatttgtgtagttcagtttttctacattttagtacagaaactttaacaaaatgcagtttcgaaggtgtttccttgtgagttaacaagtaaagaagatcattgttaattactattttgtatgaattttgctaaagttaactgtaaagaaacacctgctgacttgcagtttaaggggaatctattctccccatttccaaaccatgatatgaatgggcgctgacatgtggagagaatagataatttgtgtgtttgcaatgtgtgttttagataaataggattgggtatttaaattagcatttgtgaatttaatagcattaagattaccttcaaatgaaaaaaaatctcaaaatttctatttggtttttgtgcattttcttttaaaatgtaatcatatgattttagtgtgttagacttgctgagtcctagctgtgtttagaacatctctattctacatttaccttggtcaaatttgaactgctgccataggttttgggtgtaaagaatgtttactgccctccatttaaattctgaaaagggatggtggatgttttccctctcctacgttagaaaccattcttaaaaacttttgaaaatatagaaccattaagcctgctatatctgagcaaattaatgggtaccttttttttcttatttaaagcacaagaggcccataaatcttgagttactttaaattcttttttttgatacaagttttcagagcaagagaataaaaatcatgtgttattaaacccctaactggctggcatgctttcctgtttgtattctatacattttgctggatgaaaccaaggatagttcaggtataattgtccaaaataacctaactgcagcagaaatgtagcacagttgcttagtacaggcttctcacttcctacagacctgaattcaaatttggatagtctgagttcttaaattcccaaagaacacactgttatttcttgtgtatatttcaacataaatcatgttgttaccaatttgtttggaaggccctggttgagaagagttttagttaataaggtcatatatacatatattaatataaaccaatgtctactgttttgctccagctagtgcttacagtttcattcgagccctgagtatgtgccctgctgttactctctttggtagttgaacgttgaattcaagtcttttgttttaagaagtactaagcaaacaagcaataaaaaggggaatggggtgtgctagtgtttgaatatgctctcttgttgctctaattctgtgcctctgtgcattaatatttggatgcatgcaatgccagcatggaaattggtcttcacatatactgcagttttccagaaacattcacaaaccaataaatgtaacagacattccatttgttaatgggcatatatgtgaaaagcagtgtagaaaataggctaatattagaaaatggttaagtcctaaataacttcaagtgtggttatataatggacactgtcaatgttcataacttaaacctgggtacctggtcaaaataatgcttgggaaacattaaaattgagctaaattgtctcaagttcttttattcatataaataaagtttaaaggaatgggggagattaacatttcctgttttatgtttgtgaaattgtttgacacaaccttgacagtatcctttaatggcatgaggttaattgtactgttaaccaactttctatgttctggaactagtattatagtgaaaacatttacagtaagttgatgtttacaacctataagcaggtgaaatctgtgtatgtgacctgtttataagttgtattagcttagctcttgtgaacagtgtggaaaagtaagccatgaggagagcgatttaaccacctttaaaggacctaagatgtgctttttaagcacagtgtggatcacagaaactcactaagacaggacttcagcagccttttgtgtttggacaagtcagcataaataaagaatgacaaggcagcagcaagagcttcaactacagagaagtgaaggcataagatactatgatgatagtgagcaactttccaaaagctagttaaatctgcttattacaactgaaatatcgaagaaagtctagcaggaaggagctcttcgccttttggaacatcaatgagagatagttgccacagtcactaggtctagcatttagacctgcaaggaagggcaataagcattaggtaaggcttgaatttgaattttttcactaattaaagagtaattttttgtaaagcaaggtaagagtaatctttttgatttgcaggttgaatgagaaccctacttgcctaaatgaggaatgtctttcctaccatctaaaatacgaaggtttctggctgggtaaggtttgtagttgacagtaaaacctgatgacaccatttgtttccctgcaagtctacattacatatttcacaactttgtccctctctagtaggcacattggaaaaattcttcaactgaaaactaccttggtaccatgtcctacacgttttaaaccttagttttaaaaattcccctgcgaaatagccataagtattcatatcaagtcagttgtgactccttgtgtatacaattcattttttgtgtcttcagggtaaactcaatttttggtaaagtggtttcagcttttgtgaaaaccgtttttgtgtgtaagcatgacacacaacagactcagtaagctgcccatcctcatactaggaaaacaccttcaaaggaacattaaaagttaccagggccaggcacagtggctcacgcctgtaatcccagcactttgggaggctgaggcagatggatcccaagtccaggaatttgagacgagcctgggcaacatagtgagagcctgtcaacaaaaaatagaaaaattagctgggcttggtgatacacatctgtagtcccagctatttgggaggctgccttgatatcaggcagtcgaggctgcagtgagctgactgccccactgtattccagcctgggtgaccccatctcaaagaagaaaagttaccagatgtcatgggtaaaggttggtcttcaagtggcctcataagttgtcttgcatttaaattcagggaattcattggaccaataggttacattttcgttccttttttgttttggttcatctgttaagcagtgggggcctaattactgctcctttgtaaaaacacattttcccaaagaacactgaattaccgttcaaactggttgttgatgggtaataagggctgtttttgctgccccaaaagggcttaacaatttaggcggatagtttacttaaaaaaaaaaatcctttggagacatactgaaaatgcaaactagtttctaaattatcaattccctacatgaagaagcagtttgccagagtttagtctcagaaaatgactggttggctctatttaaatcagaacccaatttctacgcgtgttgaataaggtaacagcctttgatgaatttccttcacaacatggttttagtgaagcaaacattttttttttaagggcattgttctttctagtttatttctttttatgaaataaaattattttatttaaacagttccattgtcgtttctgaaaactacagtattctcagaagttgtagcagcagtaaaaaaaaaaaagttgttctataagtgattggggcagatttaactgattttgttaaaccaatttgtaagttactgcttctaatattacacttctaaaaagctgaatttatactcatgtcctaaaggagaatatgtggtaataaagtatatttgttaagtaactaattgaaataggcttggttttaagagttccagtatataataatcacaaattgaaacctgacagtatcttgggagttccagtaatgtcacaaattagtgaataagcatgccagtgtgcaagggtaatgtaaggattgttagcctatctaaatattcaaaattactttaaaacttaagtatgttttctgatttttaagaattcagaagtgttctgtaatggattcagatgtttcatttgtagtataatgaaatgtttacagaaagataactttttcattaaaatatttttagaaatg

SEQ ID NO: 347095 - DNA, 5070 bp, Homo sapiens
atcgtgcagaagatcaccttatcgtgcagaagatcacctcatcgtgcagaagatcaccttatcgtgcagaagatcacctcatcgtgcagaagatcacctttctaaacaagagatgcagtctgctggatcacagagaggtcgtggaggtggatctggcaattttatgggtcgcggagggaactttggaggtggtggaggtaattttggccgtggtggaaactttggtggaagaggaggctatggtggtggaggtggtggcagcagaggtagttatggaggaggtgatggtggatataatggatttggaggtgatggtggcaactatggcggtggtcctggttatagtagtagagggggctatggtggtggtggaccaggatatggaaaccaaggtggtggatatggtggaggtggaggatatgatggttacaatgaaggaggaaattttggcggtggtaactatggtggtggtgggaactataatgattttggaaattatagtggacaacagcaatcaaattatggacccatgaaagggggcagttttggtggaagaagctcgggcagtccctatggtggtggttatggatctggtggtggaagtggtggatatggtagcagaaggttctaaaaacagcagaaaagggctacagttcttagcaggagagagagcgaggagttgtcaggaaagctgcaggttactttgagacagtcgtcccaaatgcattagaggaactgtaaaaatctgccacagaaggaacgatgatccatagtcagaaaagttactgcagcttaaacaggaaacccttcttgttcaggactgtcatagccacagtttgcaaaaagtgcagctattgattaatgcaatgtagtgtcaattagatgtacattcctgaggtcttttatctgttgtagctttgtctttttctttttcttttcattacatcaggtatattgccctgtaaattgtggtagtggtaccaggaataaaaaattaaggaatttttaacttttcaatatttgtgtagttcagtttttctacattttagtacagaaactttaacaaaatgcagtttcgaaggtgtttccttgtgagttaacaagtaaagaagatcattgttaattactattttgtatgaattttgctaaagttaactgtaaagaaacacctgctgacttgcagtttaaggggaatctattctccccatttccaaaccatgatatgaatgggcgctgacatgtggagagaatagataatttgtgtgtttgcaatgtgtgttttagataaataggattgggtatttaaattagcatttgtgaatttaatagcattaagattaccttcaaatgaaaaaaaatctcaaaatttctatttggtttttgtgcattttcttttaaaatgtaatcatatgattttagtgtgttagacttgctgagtcctagctgtgtttagaacatctctattctacatttaccttggtcaaatttgaactgctgccataggttttgggtgtaaagaatgtttactgccctccatttaaattctgaaaagggatggtggatgttttccctctcctacgttagaaaccattcttaaaaacttttgaaaatatagaaccattaagcctgctatatctgagcaaattaatgggtaccttttttttcttatttaaagcacaagaggcccataaatcttgagttactttaaattcttttttttgatacaagttttcagagcaagagaataaaaatcatgtgttattaaacccctaactggctggcatgctttcctgtttgtattctatacattttgctggatgaaaccaaggatagttcaggtataattgtccaaaataacctaactgcagcagaaatgtagcacagttgcttagtacaggcttctcacttcctacagacctgaattcaaatttggatagtctgagttcttaaattcccaaagaacacactgttatttcttgtgtatatttcaacataaatcatgttgttaccaatttgtttggaaggccctggttgagaagagttttagttaataaggtcatatatacatatattaatataaaccaatgtctactgttttgctccagctagtgcttacagtttcattcgagccctgagtatgtgccctgctgttactctctttggtagttgaacgttgaattcaagtcttttgttttaagaagtactaagcaaacaagcaataaaaaggggaatggggtgtgctagtgtttgaatatgctctcttgttgctctaattctgtgcctctgtgcattaatatttggatgcatgcaatgccagcatggaaattggtcttcacatatactgcagttttccagaaacattcacaaaccaataaatgtaacagacattccatttgttaatgggcatatatgtgaaaagcagtgtagaaaataggctaatattagaaaatggttaagtcctaaataacttcaagtgtggttatataatggacactgtcaatgttcataacttaaacctgggtacctggtcaaaataatgcttgggaaacattaaaattgagctaaattgtctcaagttcttttattcatataaataaagtttaaaggaatgggggagattaacatttcctgttttatgtttgtgaaattgtttgacacaaccttgacagtatcctttaatggcatgaggttaattgtactgttaaccaactttctatgttctggaactagtattatagtgaaaacatttacagtaagttgatgtttacaacctataagcaggtgaaatctgtgtatgtgacctgtttataagttgtattagcttagctcttgtgaacagtgtggaaaagtaagccatgaggagagcgatttaaccacctttaaaggacctaagatgtgctttttaagcacagtgtggatcacagaaactcactaagacaggacttcagcagccttttgtgtttggacaagtcagcataaataaagaatgacaaggcagcagcaagagcttcaactacagagaagtgaaggcataagatactatgatgatagtgagcaactttccaaaagtgaaatatcgaagaaagtctagcaggaaggagctcttcgccttttggaacatcaatgagagatagttgccacagtcactaggtctagcatttagacctgcaaggaagggcaataagcattaggtaaggcttgaatttgaattttttcactaattaaagagtaattttttgtaaagcaaggtaagagtaatctttttgatttgcaggttgaatgagaaccctacttgcctaaatgaggaatgtctttcctaccatctaaaatacgaaggtttctggctgggtaaggtttgtagttgacagtaaaacctgatgacaccatttgtttccctgcaagtctacattacatatttcacaactttgtccctctctagtaggcacattggaaaaattcttcaactgaaaactaccttggtaccatgtcctacacgttttaaaccttagttttaaaaattcccctgcgaaatagccataagtattcatatcaagtcagttgtgactccttgtgtatacaattcattttttgtgtcttcagggtaaactcaatttttggtaaagtggtttcagcttttgtgaaaaccgtttttgtgtgtaagcatgacacacaacagactcagtaagctgcccatcctcatactaggaaaacaccttcaaaggaacattaaaagttaccagggccaggcacagtggctcacgcctgtaatcccagcactttgggaggctgaggcagatggatcccaagtccaggaatttgagacgagcctgggcaacatagtgagagcctgtcaacaaaaaatagaaaaattagctgggcttggtgatacacatctgtagtcccagctatttgggaggctgccttgatatcaggcagtcgaggctgcagtgagctgactgccccactgtattccagcctgggtgaccccatctcaaagaagaaaagttaccagatgtcatgggtaaaggttggtcttcaagtggcctcataagttgtcttgcatttaaattcagggaattcattggaccaataggttacattttcgttccttttttgttttggttcatctgttaagcagtgggggcctaattactgctcctttgtaaaaacacattttcccaaagaacactgaattaccgttcaaactggttgttgatgggtaataagggctgtttttgctgccccaaaagggcttaacaatttaggcggatagtttacttaaaaaaaaaaatcctttggagacatactgaaaatgcaaactagtttctaaattatcaattccctacatgaagaagcagtttgccagagtttagtctcagaaaatgactggttggctctatttaaatcagaacccaatttctacgcgtgttgaataaggtaacagcctttgatgaatttccttcacaacatggttttagtgaagcaaacattttttttttaagggcattgttctttctagtttatttctttttatgaaataaaattattttatttaaacagttccattgtcgtttctgaaaactacagtattctcagaagttgtagcagcagtaaaaaaaaaaaagttgttctataagtgattggggcagatttaactgattttgttaaaccaatttgtaagttactgcttctaatattacacttctaaaaagctgaatttatactcatgtcctaaaggagaatatgtggtaataaagtatatttgttaagtaactaattgaaataggcttggttttaagagttccagtatataataatcacaaattgaaacctgacagtatcttgggagttccagtaatgtcacaaattagtgaataagcatgccagtgtgcaagggtaatgtaaggattgttagcctatctaaatattcaaaattactttaaaacttaagtatgttttctgatttttaagaattcagaagtgttctgtaatggattcagatgtttcatttgtagtataatgaaatgtttacagaaagataactttttcattaaaatatttttagaaatg

SEQ ID NO: 347096 - DNA, 5040 bp, Homo sapiens
atcgtgcagaagatcaccttatcgtgcagaagatcacctcatcgtgcagaagatcaccttatcgtgcagaagatcacctcatcgtgcagaagatcacctttctaaacaagagatgcagtctgctggatcacagagaggtcgtggaggtggatctggcaattttatgggtcgcggagggaactttggaggtggtggaggtaattttggccgtggtggaaactttggtggaagaggaggctatggtggtggaggtggtggcagcagaggtagttatggaggaggtgatggtggatataatggatttggaggtgatggtggcaactatggcggtggtcctggttatagtagtagagggggctatggtggtggtggaccaggatatggaaaccaaggtggtggatatggtggaggtggaggatatgatggttacaatgaaggaggaaattttggcggtggtaactatggtggtggtgggaactataatgattttggaaattatagtggacaacagcaatcaaattatggacccatgaaagggggcagttttggtggaagaagctcgggcagtccctatggtggtggttatggatctggtggtggaagtggtggatatggtagcagaaggttctaaaaacagcagaaaagggctacagttcttagcaggagagagagcgaggagttgtcaggaaagctgcaggttactttgagacagtcgtcccaaatgcattagaggaactgtaaaaatctgccacagaaggaacgatgatccatagtcagaaaagttactgcagcttaaacaggaaacccttcttgttcaggactgtcatagccacagtttgcaaaaagtgcagctattgattaatgcaatgtagtgtcaattagatgtacattcctgaggtcttttatctgttgtagctttgtctttttctttttcttttcattacatcaggtatattgccctgtaaattgtggtagtggtaccaggaataaaaaattaaggaatttttaacttttcaatatttgtgtagttcagtttttctacattttagtacagaaactttaacaaaatgcagtttcgaaggtgtttccttgtgagttaacaagtaaagaagatcattgttaattactattttgtatgaattttgctaaagttaactgtaaagaaacacctgctgacttgcagtttaaggggaatctattctccccatttccaaaccatgatatgaatgggcgctgacatgtggagagaatagataatttgtgtgtttgcaatgtgtgttttagataaataggattgggtatttaaattagcatttgtgaatttaatagcattaagattaccttcaaatgaaaaaaaatctcaaaatttctatttggtttttgtgcattttcttttaaaatgtaatcatatgattttagtgtgttagacttgctgagtcctagctgtgtttagaacatctctattctacatttaccttggtcaaatttgaactgctgccataggttttgggtgtaaagaatgtttactgccctccatttaaattctgaaaagggatggtggatgttttccctctcctacgttagaaaccattcttaaaaacttttgaaaatatagaaccattaagcctgctatatctgagcaaattaatgggtaccttttttttcttatttaaagcacaagaggcccataaatcttgagttactttaaattcttttttttgatacaagttttcagagcaagagaataaaaatcatgtgttattaaacccctaactggctggcatgctttcctgtttgtattctatacattttgctggatgaaaccaaggatagttcaggtataattgtccaaaataacctaactgcagcagaaatgtagcacagttgcttagtacaggcttctcacttcctacagacctgaattcaaatttggatagtctgagttcttaaattcccaaagaacacactgttatttcttgtgtatatttcaacataaatcatgttgttaccaatttgtttggaaggccctggttgagaagagttttagttaataaggtcatatatacatatattaatataaaccaatgtctactgttttgctccagctagtgcttacagtttcattcgagccctgagtatgtgccctgctgttactctctttggtagttgaacgttgaattcaagtcttttgttttaagaagtactaagcaaacaagcaataaaaaggggaatggggtgtgctagtgtttgaatatgctctcttgttgctctaattctgtgcctctgtgcattaatatttggatgcatgcaatgccagcatggaaattggtcttcacatatactgcagttttccagaaacattcacaaaccaataaatgtaacagacattccatttgttaatgggcatatatgtgaaaagcagtgtagaaaataggctaatattagaaaatggttaagtcctaaataacttcaagtgtggttatataatggacactgtcaatgttcataacttaaacctgggtacctggtcaaaataatgcttgggaaacattaaaattgagctaaattgtctcaagttcttttattcatataaataaagtttaaaggaatgggggagattaacatttcctgttttatgtttgtgaaattgtttgacacaaccttgacagtatcctttaatggcatgaggttaattgtactgttaaccaactttctatgttctggaactagtattatagtgaaaacatttacagtaagttgatgtttacaacctataagcaggtgaaatctgtgtatgtgacctgtttataagttgtattagcttagctcttgtgaacagtgtggaaaagtaagccatgaggagagcgatttaaccacctttaaaggacctaagatgtgctttttaagcacagtgtggatcacagaaactcactaagacaggacttcagcagccttttgtgtttggacaagtcagcataaataaagaatgacaaggcagcagcaagagcttcaactacagagaagtgaaggcataagatactatgatgatagtgagcaactttccaaaagctagttaaatctgcttattacaactgaaatatcgaagaaagtctagcaggaaggagctcttcgccttttggaacatcaatgagagatagttgccacagtcactaggtctagcatttagacctgcaaggaagggcaataagcattaggtaaggcttgaatttgaattttttcactaattaaagagtaattttttgtaaagcaaggtaagagtaatctttttgatttgcaggttgaatgagaaccctacttgcctaaatgaggaatgtctttcctaccatctaaaatacgaaggtttctggctgggtaaggtttgtagttgacagtaaaacctgatgacaccatttgtttccctgcaagtctacattacatatttcacaactttgtccctctctagtaggcacattggaaaaattcttcaactgaaaactaccttggtaccatgtcctacacgttttaaaccttagttttattgtgtatacaattcattttttgtgtcttcagggtaaactcaatttttggtaaagtggtttcagcttttgtgaaaaccgtttttgtgtgtaagcatgacacacaacagactcagtaagctgcccatcctcatactaggaaaacaccttcaaaggaacattaaaagttaccagggccaggcacagtggctcacgcctgtaatcccagcactttgggaggctgaggcagatggatcccaagtccaggaatttgagacgagcctgggcaacatagtgagagcctgtcaacaaaaaatagaaaaattagctgggcttggtgatacacatctgtagtcccagctatttgggaggctgccttgatatcaggcagtcgaggctgcagtgagctgactgccccactgtattccagcctgggtgaccccatctcaaagaagaaaagttaccagatgtcatgggtaaaggttggtcttcaagtggcctcataagttgtcttgcatttaaattcagggaattcattggaccaataggttacattttcgttccttttttgttttggttcatctgttaagcagtgggggcctaattactgctcctttgtaaaaacacattttcccaaagaacactgaattaccgttcaaactggttgttgatgggtaataagggctgtttttgctgccccaaaagggcttaacaatttaggcggatagtttacttaaaaaaaaaaatcctttggagacatactgaaaatgcaaactagtttctaaattatcaattccctacatgaagaagcagtttgccagagtttagtctcagaaaatgactggttggctctatttaaatcagaacccaatttctacgcgtgttgaataaggtaacagcctttgatgaatttccttcacaacatggttttagtgaagcaaacattttttttttaagggcattgttctttctagtttatttctttttatgaaataaaattattttatttaaacagttccattgtcgtttctgaaaactacagtattctcagaagttgtagcagcagtaaaaaaaaaaaagttgttctataagtgattggggcagatttaactgattttgttaaaccaatttgtaagttactgcttctaatattacacttctaaaaagctgaatttatactcatgtcctaaaggagaatatgtggtaataaagtatatttgttaagtaactaattgaaataggcttggttttaagagttccagtatataataatcacaaattgaaacctgacagtatcttgggagttccagtaatgtcacaaattagtgaataagcatgccagtgtgcaagggtaatgtaaggattgttagcctatctaaatattcaaaattactttaaaacttaagtatgttttctgatttttaagaattcagaagtgttctgtaatggattcagatgtttcatttgtagtataatgaaatgtttacagaaagataactttttcattaaaatatttttagaaatg

SEQ ID NO: 347097 - DNA, 5040 bp, Homo sapiens
atcgtgcagaagatcaccttatcgtgcagaagatcacctcatcgtgcagaagatcaccttatcgtgcagaagatcacctcatcgtgcagaagatcacctttctaaacaagagatgcagtctgctggatcacagagaggtcgtggaggtggatctggcaattttatgggtcgcggagggaactttggaggtggtggaggtaattttggccgtggtggaaactttggtggaagaggaggctatggtggtggaggtggtggcagcagaggtagttatggaggaggtgatggtggatataatggatttggaggtgatggtggcaactatggcggtggtcctggttatagtagtagagggggctatggtggtggtggaccaggatatggaaaccaaggtggtggatatggtggaggtggaggatatgatggttacaatgaaggaggaaattttggcggtggtaactatggtggtggtgggaactataatgattttggaaattatagtggacaacagcaatcaaattatggacccatgaaagggggcagttttggtggaagaagctcgggcagtccctatggtggtggttatggatctggtggtggaagtggtggatatggtagcagaaggttctaaaaacagcagaaaagggctacagttcttagcaggagagagagcgaggagttgtcaggaaagctgcaggttactttgagacagtcgtcccaaatgcattagaggaactgtaaaaatctgccacagaaggaacgatgatccatagtcagaaaagttactgcagcttaaacaggaaacccttcttgttcaggactgtcatagccacagtttgcaaaaagtgcagctattgattaatgcaatgtagtgtcaattagatgtacattcctgaggtcttttatctgttgtagctttgtctttttctttttcttttcattacatcaggtatattgccctgtaaattgtggtagtggtaccaggaataaaaaattaaggaatttttaacttttcaatatttgtgtagttcagtttttctacattttagtacagaaactttaacaaaatgcagtttcgaaggtgtttccttgtgagttaacaagtaaagaagatcattgttaattactattttgtatgaattttgctaaagttaactgtaaagaaacacctgctgacttgcagtttaaggggaatctattctccccatttccaaaccatgatatgaatgggcgctgacatgtggagagaatagataatttgtgtgtttgcaatgtgtgttttagataaataggattgggtatttaaattagcatttgtgaatttaatagcattaagattaccttcaaatgaaaaaaaatctcaaaatttctatttggtttttgtgcattttcttttaaaatgtaatcatatgattttagtgtgttagacttgctgagtcctagctgtgtttagaacatctctattctacatttaccttggtcaaatttgaactgctgccataggttttgggtgtaaagaatgtttactgccctccatttaaattctgaaaagggatggtggatgttttccctctcctacgttagaaaccattcttaaaaacttttgaaaatatagaaccattaagcctgctatatctgagcaaattaatgggtaccttttttttcttatttaaagcacaagaggcccataaatcttgagttactttaaattcttttttttgatacaagttttcagagcaagagaataaaaatcatgtgttattaaacccctaactggctggcatgctttcctgtttgtattctatacattttgctggatgaaaccaaggatagttcaggtataattgtccaaaataacctaactgcagcagaaatgtagcacagttgcttagtacaggcttctcacttcctacagacctgaattcaaatttggatagtctgagttcttaaattcccaaagaacacactgttatttcttgtgtatatttcaacataaatcatgttgttaccaatttgtttggaaggccctggttgagaagagttttagttaataaggtcatatatacatatattaatataaaccaatgtctactgttttgctccagctagtgcttacagtttcattcgagccctgagtatgtgccctgctgttactctctttggtagttgaacgttgaattcaagtcttttgttttaagaagtactaagcaaacaagcaataaaaaggggaatggggtgtgctagtgtttgaatatgctctcttgttgctctaattctgtgcctctgtgcattaatatttggatgcatgcaatgccagcatggaaattggtcttcacatatactgcagttttccagaaacattcacaaaccaataaatgtaacagacattccatttgttaatgggcatatatgtgaaaagcagtgtagaaaataggctaatattagaaaatggttaagtcctaaataacttcaagtgtggttatataatggacactgtcaatgttcataacttaaacctgggtacctggtcaaaataatgcttgggaaacattaaaattgagctaaattgtctcaagttcttttattcatataaataaagtttaaaggaatgggggagattaacatttcctgttttatgtttgtgaaattgtttgacacaaccttgacagtatcctttaatggcatgaggttaattgtactgttaaccaactttctatgttctggaactagtattatagtgaaaacatttacagtaagttgatgtttacaacctataagcaggtgaaatctgtgtatgtgacctgtttataagttgtattagcttagctcttgtgaacagtgtggaaaagtaagccatgaggagagcgatttaaccacctttaaaggacctaagatgtgctttttaagcacagtgtggatcacagaaactcactaagacaggacttcagcagccttttgtgtttggacaagtcagcataaataaagaatgacaaggcagcagcaagagcttcaactacagagaagtgaaggcataagatactatgatgatagtgagcaactttccaaaagctagttaaatctgcttattacaactgaaatatcgaagaaagtctagcaggaaggagctcttcgccttttggaacatcaatgagagatagttgccacagtcactaggtctagcatttagacctgcaaggaagggcaataagcattaggtaaggcttgaatttgaattttttcactaattaaagagtaattttttgtaaagcaaggtaagagtaatctttttgatttgcaggttgaatgagaaccctacttgcctaaatgaggaatgtctttcctaccatctaaaatacgaaggtttctggctgggtaaggtttgtagttgacagtaaaacctgatgacaccatttgtttccctgcaagtctacattacatatttcacaactttgtccctctctagtaggcacattggaaaaattcttcaactgaaaactaccttggtaccatgtcctacacgttttaaaccttagttttaaaaattcccctgcgaaatagccataagtattcatatcaagtcagttgtgactccttgtgtatacaattcattttttgtgtcttcagggtaaactcaatttttggtaaagtggtttcagcttttgtgaaaaccgtttttgtgtgtaagcatgacacacaacagactcagtaagctgcccatcctcatactaggaaaacaccttcaaaggaacattaaaagttaccagggccaggcacagtggctcacgcctgtaatcccagcactttgggaggctgaggcagatggatcccaagtccaggaatttgagacgagcctgggcaacatagtgagagcctgtcaacaaaaaatagagccttgatatcaggcagtcgaggctgcagtgagctgactgccccactgtattccagcctgggtgaccccatctcaaagaagaaaagttaccagatgtcatgggtaaaggttggtcttcaagtggcctcataagttgtcttgcatttaaattcagggaattcattggaccaataggttacattttcgttccttttttgttttggttcatctgttaagcagtgggggcctaattactgctcctttgtaaaaacacattttcccaaagaacactgaattaccgttcaaactggttgttgatgggtaataagggctgtttttgctgccccaaaagggcttaacaatttaggcggatagtttacttaaaaaaaaaaatcctttggagacatactgaaaatgcaaactagtttctaaattatcaattccctacatgaagaagcagtttgccagagtttagtctcagaaaatgactggttggctctatttaaatcagaacccaatttctacgcgtgttgaataaggtaacagcctttgatgaatttccttcacaacatggttttagtgaagcaaacattttttttttaagggcattgttctttctagtttatttctttttatgaaataaaattattttatttaaacagttccattgtcgtttctgaaaactacagtattctcagaagttgtagcagcagtaaaaaaaaaaaagttgttctataagtgattggggcagatttaactgattttgttaaaccaatttgtaagttactgcttctaatattacacttctaaaaagctgaatttatactcatgtcctaaaggagaatatgtggtaataaagtatatttgttaagtaactaattgaaataggcttggttttaagagttccagtatataataatcacaaattgaaacctgacagtatcttgggagttccagtaatgtcacaaattagtgaataagcatgccagtgtgcaagggtaatgtaaggattgttagcctatctaaatattcaaaattactttaaaacttaagtatgttttctgatttttaagaattcagaagtgttctgtaatggattcagatgtttcatttgtagtataatgaaatgtttacagaaagataactttttcattaaaatatttttagaaatg

SEQ ID NO: 347098 - DNA, 4113 bp, Homo sapiens
atcgtgcagaagatcaccttatcgtgcagaagatcacctcatcgtgcagaagatcaccttatcgtgcagaagatcacctcatcgtgcagaagatcacctttctaaacaagagatgcagtctgctggatcacagagaggtcgtggaggtggatctggcaattttatgggtcgcggagggaactttggaggtggtggaggtaattttggccgtggtggaaactttggtggaagaggaggctatggtggtggaggtggtggcagcagaggtagttatggaggaggtgatggtggatataatggatttggaggtgatggtggcaactatggcggtggtcctggttatagtagtagagggggctatggtggtggtggaccaggatatggaaaccaaggtggtggatatggtggaggtggaggatatgatggttacaatgaaggaggaaattttggcggtggtaactatggtggtggtgggaactataatgattttggaaattatagtggacaacagcaatcaaattatggacccatgaaagggggcagttttggtggaagaagctcgggcagtccctatggtggtggttatggatctggtggtggaagtggtggatatggtagcagaaggttctaaaaacagcagaaaagggctacagttcttagcaggagagagagcgaggagttgtcaggaaagctgcaggttactttgagacagtcgtcccaaatgcattagaggaactgtaaaaatctgccacagaaggaacgatgatccatagtcagaaaagttactgcagcttaaacaggaaacccttcttgttcaggactgtcatagccacagtttgcaaaaagtgcagctattgattaatgcaatgtagtgtcaattagatgtacattcctgaggtcttttatctgttgtagctttgtctttttctttttcttttcattacatcaggtatattgccctgtaaattgtggtagtggtaccaggaataaaaaattaaggaatttttaacttttcaatatttgtgtagttcagtttttctacattttagtacagaaactttaacaaaatgcagtttcgaaggtgtttccttgtgagttaacaagtaaagaagatcattgttaattactattttgtatgaattttgctaaagttaactgtaaagaaacacctgctgacttgcagtttaaggggaatctattctccccatttccaaaccatgatatgaatgggcgctgacatgtggagagaatagataatttgtgtgtttgcaatgtgtgttttagataaataggattgggtatttaaattagcatttgtgaatttaatagcattaagattaccttcaaatgaaaaaaaatctcaaaatttctatttggtttttgtgcattttcttttaaaatgtaatcatatgattttagtgtgttagacttgctgagtcctagctgtgtttagaacatctctattctacatttaccttggtcaaatttgaactgctgccataggttttgggtgtaaagaatgtttactgccctccatttaaattctgaaaagggatggtggatgttttccctctcctacgttagaaaccattcttaaaaacttttgaaaatatagaaccattaagcctgctatatctgagcaaattaatgggtaccttttttttcttatttaaagcacaagaggcccataaatcttgagttactttaaattcttttttttgatacaagttttcagagcaagagaataaaaatcatgtgttattaaacccctaactggctggcatgctttcctgtttgtattctatacattttgctggatgaaaccaaggatagttcaggtataattgtccaaaataacctaactgcagcagaaatgtagcacagttgcttagtacaggcttctcacttcctacagacctgaattcaaatttggatagtctgagttcttaaattcccaaagaacacactgttatttcttgtgtatatttcaacataaatcatgttgttaccaatttgtttggaaggccctggttgagaagagttttagttaataaggtcatatatacatatattaatataaaccaatgtctactgttttgctccagctagtgcttacagtttcattcgagccctgagtatgtgccctgctgttactctctttggtagttgaacgttgaattcaagtcttttgttttaagaagtactaagcaaacaagcaataaaaaggggaatggggtgtgctagtgtttgaatatgctctcttgttgctctaattctgtgcctctgtgcattaatatttggatgcatgcaatgccagcatggaaattggtcttcacatatactgcagttttccagaaacattcacaaaccaataaatgtaacagacattccatttgttaatgggcatatatgtgaaaagcagtgtagaaaataggctaatattagaaaatggttaagtcctaaataacttcaagtgtggttatataatggacactgtcaatgttcataacttaaacctgggtacctggtcaaaataatgcttgggaaacattaaaattgagctaaattgtctcaagttcttttattcatataaataaagtttaaaggaatgggggagattaacatttcctgttttatgtttgtgaaattgtttgacacaaccttgacagtatcctttaatggcatgaggttaattgtactgttaaccaactttctatgttctggaactagtattatagtgaaaacatttacagtaagttgatgtttacaacctataagcaggtgaaatctgtgtatgtgacctgtttataagttgtattagcttagctcttgtgaacagtgtggaaaagtaagccatgaggagagcgatttaaccacctttaaaggacctaagatgtgctttttaagcacagtgtggatcacagaaactcactaagacaggacttcagcagccttttgtgtttggacaagtcagcataaataaagaatgacaaggcagcagcaagagcttcaactacagagaagtgaaggcataagatactatgatgatagtgagcaactttccaaaagctagttaaatctgcttattacaactgaaatatcgaagaaagtctagcaggaaggagctcttcgccttttggaacatcaatgagagatagttgccacagtcactaggtctagcatttagacctgcaaggaagggcaataagcattaggtaaggcttgaatttgaattttttcactaattaaagagtaattttttgtaaagcaaggtaagagtaatctttttgatttgcaggttgaatgagaaccctacttgcctaaatgaggaatgtctttcctaccatctaaaatacgaaggtttctggctgggtaaggtttgtagttgacagtaaaacctgatgacaccatttgtttccctgcaagtctacattacatatttcacaactttgtccctctctagtaggcacattggaaaaattcttcaactgaaaactaccttggtaccatgtcctacacgttttaaaccttagttttaaaaattcccctgcgaaatagccataagtattcatatcaagtcagttgtgactccttgtgtatacaattcattttttgtgtcttcagggtaaactcaatttttggtaaagtggtttcagcttttgtgaaaaccgtttttgtgtgtaagcatgacacacaacagactcagtaagctgcccatcctcatactaggaaaacaccttcaaaggaacattaaaagttaccagggccaggcacagtggctcacgcctgtaatcccagcactttgggaggctgaggcagatggatcccaagtccaggaatttgagacgagcctgggcaacatagtgagagcctgtcaacaaaaaatagaaaaattagctgggcttggtgatacacatctgtagtcccagctatttgggaggctgccttgatatcaggcagtcgaggctgcagtgagctgactgccccactgtattccagcctgggtgaccccatctcaaagaagaaaagttaccagatgtcatgggtaaaggttggtcttcaagtggcctcataagtgcccgccaatcgaagggtaccgagcctcgagatcgt

SEQ ID NO: 347099 - DNA, 2571 bp, Homo sapiens
atcgtgcagaagatcaccttatcgtgcagaagatcacctcatcgtgcagaagatcaccttatcgtgcagaagatcacctcatcgtgcagaagatcacctttctaaacaagagatgcagtctgctggatcacagagaggtcgtggaggtggatctggcaattttatgggtcgcggagggaactttggaggtggtggaggtaattttggccgtggtggaaactttggtggaagaggaggctatggtggtggaggtggtggcagcagaggtagttatggaggaggtgatggtggatataatggatttggaggtgatggtggcaactatggcggtggtcctggttatagtagtagagggggctatggtggtggtggaccaggatatggaaaccaaggtggtggatatggtggaggtggaggatatgatggttacaatgaaggaggaaattttggcggtggtaactatggtggtggtgggaactataatgattttggaaattatagtggacaacagcaatcaaattatggacccatgaaagggggcagttttggtggaagaagctcgggcagtccctatggtggtggttatggatctggtggtggaagtggtggatatggtagcagaaggttctaaaaacagcagaaaagggctacagttcttagcaggagagagagcgaggagttgtcaggaaagctgcaggttactttgagacagtcgtcccaaatgcattagaggaactgtaaaaatctgccacagaaggaacgatgatccatagtcagaaaagttactgcagcttaaacaggaaacccttcttgttcaggactgtcatagccacagtttgcaaaaagtgcagctattgattaatgcaatgtagtgtcaattagatgtacattcctgaggtcttttatctgttgtagctttgtctttttctttttcttttcattacatcaggtatattgccctgtaaattgtggtagtggtaccaggaataaaaaattaaggaatttttaacttttcaatatttgtgtagttcagtttttctacattttagtacagaaactttaacaaaatgcagtttcgaaggtgtttccttgtgagttaacaagtaaagaagatcattgttaattactattttgtatgaattttgctaaagttaactgtaaagaaacacctgctgacttgcagtttaaggggaatctattctccccatttccaaaccatgatatgaatgggcgctgacatgtggagagaatagataatttgtgtgtttgcaatgtgtgttttagataaataggattgggtatttaaattagcatttgtgaatttaatagcattaagattaccttcaaatgaaaaaaaatctcaaaatttctatttggtttttgtgcattttcttttaaaatgtaatcatatgattttagtgtgttagacttgctgagtcctagctgtgtttagaacatctctattctacatttaccttggtcaaatttgaactgctgccataggttttgggtgtaaagaatgtttactgccctccatttaaattctgaaaagggatggtggatgttttccctctcctacgttagaaaccattcttaaaaacttttgaaaatatagaaccattaagcctgctatatctgagcaaattaatgggtaccttttttttcttatttaaagcacaagaggcccataaatcttgagttactttaaattcttttttttgatacaagttttcagagcaagagaataaaaatcatgtgttattaaacccctaactggctggcatgctttcctgtttgtattctatacattttgctggatgaaaccaaggatagttcaggtataattgtccaaaataacctaactgcagcagaaatgtagcacagttgcttagtacaggcttctcacttcctacagacctgaattcaaatttggatagtctgagttcttaaattcccaaagaacacactgttatttcttgtgtatatttcaacataaatcatgttgttaccaatttgtttggaaggccctggttgagaagagttttagttaataaggtcatatatacatatattaatataaaccaatgtctactgttttgctccagctagtgcttacagtttcattcgagccctgagtatgtgccctgctgttactctctttggtagttgaacgttgaattcaagtcttttgttttaagaagtactaagcaaacaagcaataaaaaggggaatggggtgtgctagtgtttgaatatgctctcttgttgctctaattctgtgcctctgtgcattaatatttggatgcatgcaatgccagcatggaaattggtcttcacatatactgcagttttccagaaacattcacaaaccaataaatgtaacagacattccatttgttaatgggcatatatgtgaaaagcagtgtagaaaataggctaatattagaaaatggttaagtcctaaataacttcaagtgtggttatataatggacactgtcaatgttcataacttaaacctgggtacctggtcaaaataatgcttgggaaacattaaaattgagctaaattgtc

SEQ ID NO: 347100 - DNA, 1368 bp, Homo sapiens
atcgtgcagaagatcaccttatcgtgcagaagatcacctcatcgtgcagaagatcaccttatcgtgcagaagatcacctcatcgtgcagaagatcacctttctaaacaagagatgcagtctgctggatcacagagaggtcgtggaggtggatctggcaattttatgggtcgcggagggaactttggaggtggtggaggtaattttggccgtggtggaaactttggtggaagaggaggctatggtggtggaggtggtggcagcagaggtagttatggaggaggtgatggtggatataatggatttggaggtgatggtggcaactatggcggtggtcctggttatagtagtagagggggctatggtggtggtggaccaggatatggaaaccaaggtggtggatatggtggaggtggaggatatgatggttacaatgaaggaggaaattttggcggtggtaactatggtggtggtgggaactataatgattttggaaattatagtggacaacagcaatcaaattatggacccatgaaagggggcagttttggtggaagaagctcgggcagtccctatggtggtggttatggatctggtggtggaagtggtggatatggtagcagaaggttctaaaaacagcagaaaagggctacagttcttagcaggagagagagcgaggagttgtcaggaaagctgcaggttactttgagacagtcgtcccaaatgcattagaggaactgtaaaaatctgccacagaaggaacgatgatccatagtcagaaaagttactgcagcttaaacaggaaacccttcttgttcaggactgtcatagccacagtttgcaaaaagtgcagctattgattaatgcaatgtagtgtcaattagatgtacattcctgaggtcttttatctgttgtagctttgtctttttctttttcttttcattacatcaggtatattgccctgtaaattgtggtagtggtaccaggaataaaaaattaaggaatttttaacttttcaatatttgtgtagttcagtttttctacattttagtacagaaactttaacaaaatgcagtttcgaaggtgtttccttgtgagttaacaagtaaagaagatcattgttaattactattttgtatgaattttgctaaagttaactgtaaagaaacacctgctgacttgcagtttaaggggaatctattctccccatttccaaaccatgatatgaatgggcgctgacatgtggagagaatagataatttgtgtgtttgcaatgtgtgttttagataaataggattgggtatttaaattagcatttgtgaatttaatagcattaagattaccttcaaatgaaaaaaaatctcaaaatt

SEQ ID NO: 347101 - DNA, 2379 bp, Homo sapiens
atcgtgcagaagatcaccttatcgtgcagaagatcacctcatcgtgcagaagatcaccttatcgtgcagaagatcacctcatcgtgcagaagatcacctttctaaacaagagatgcagtctgctggatcacagagaggtcgtggaggtggatctggcaattttatgggtcgcggagggaactttggaggtggtggaggtaattttggccgtggtggaaactttggtggaagaggaggctatggtggtggaggtggtggcagcagaggtagttatggaggaggtgatggtggatataatggatttggaggtgatggtggcaactatggcggtggtcctggttatagtagtagagggggctatggtggtggtggaccaggatatggaaaccaaggtaactatggtggtggtgggaactataatgattttggaaattatagtggacaacagcaatcaaattatggacccatgaaagggggcagttttggtggaagaagctcgggcagtccctatggtggtggttatggatctggtggtggaagtggtggatatggtagcagaaggttctaaaaacagcagaaaagggttgaatgagaaccctacttgcctaaatgaggaatgtctttcctaccatctaaaatacgaaggtttctggctgggtaaggtttgtagttgacagtaaaacctgatgacaccatttgtttccctgcaagtctacattacatatttcacaactttgtccctctctagtaggcacattggaaaaattcttcaactgaaaactaccttggtaccatgtcctacacgttttaaaccttagttttaaaaattcccctgcgaaatagccataagtattcatatcaagtcagttgtgactccttgtgtatacaattcattttttgtgtcttcagggtaaactcaatttttggtaaagtggtttcagcttttgtgaaaaccgtttttgtgtgtaagcatgacacacaacagactcagtaagctgcccatcctcatactaggaaaacaccttcaaaggaacattaaaagttaccagggccaggcacagtggctcacgcctgtaatcccagcactttgggaggctgaggcagatggatcccaagtccaggaatttgagacgagcctgggcaacatagtgagagcctgtcaacaaaaaatagaaaaattagctgggcttggtgatacacatctgtagtcccagctatttgggaggctgccttgatatcaggcagtcgaggctgcagtgagctgactgccccactgtattccagcctgggtgaccccatctcaaagaagaaaagttaccagatgtcatgggtaaaggttggtcttcaagtggcctcataagttgtcttgcatttaaattcagggaattcattggaccaataggttacattttcgttccttttttgttttggttcatctgttaagcagtgggggcctaattactgctcctttgtaaaaacacattttcccaaagaacactgaattaccgttcaaactggttgttgatgggtaataagggctgtttttgctgccccaaaagggcttaacaatttaggcggatagtttacttaaaaaaaaaaatcctttggagacatactgaaaatgcaaactagtttctaaattatcaattccctacatgaagaagcagtttgccagagtttagtctcagaaaatgactggttggctctatttaaatcagaacccaatttctacgcgtgttgaataaggtaacagcctttgatgaatttccttcacaacatggttttagtgaagcaaacattttttttttaagggcattgttctttctagtttatttctttttatgaaataaaattattttatttaaacagttccattgtcgtttctgaaaactacagtattctcagaagttgtagcagcagtaaaaaaaaaaaagttgttctataagtgattggggcagatttaactgattttgttaaaccaatttgtaagttactgcttctaatattacacttctaaaaagctgaatttatactcatgtcctaaaggagaatatgtggtaataaagtatatttgttaagtaactaattgaaataggcttggttttaagagttccagtatataataatcacaaattgaaacctgacagtatcttgggagttccagtaatgtcacaaattagtgaataagcatgccagtgtgcaagggtaatgtaaggattgttagcctatctaaatattcaaaattactttaaaacttaagtatgttttctgatttttaagaattcagaagtgttctgtaatggattcagatgtttcatttgtagtataatgaaatgtttacagaaagataactttttcattaaaatatttttagaaatg

SEQ ID NO: 347102 - DNA, 1159 bp, Homo sapiens
atcgtgcagaagatcaccttatcgtgcagaagatcacctcatcgtgcagaagatcaccttatcgtgcagaagatcacctcatcgtgcagaagatcacctttctaaacaagagatgcagtctgctggatcacagagaggtcgtggaggtggatctggcaattttatgggtcgcggagggaactttggaggtggtggaggtaattttggccgtggtggaaactttggtggaagaggaggctatggtggtggaggtggtggcagcagaggtagttatggaggaggtgatggtggatataatggatttggaggtgatggtggcaactatggcggtggtcctggttatagtagtagagggggctatggtggtggtggaccaggatatggaaaccaaggtggtggatatggtggaggtggaggatatgatggttacaatgaaggaggaaattttggcggtggtaactatggtggtggtgggaactataatgattttggaaattatagtggacaacagcaatcaaattatggacccatgaaagggggcagttttggtggaagaagctcgggcagtccctatggtggtggttatggatctggtggtggaagtggtggatatggtagcagaaggttctaaaaacagcagaaaagggctacagttcttagcaggagagagagcgaggagttgtcaggaaagctgcaggttactttgagacagtcgtcccaaatgcattagaggaactgtaaaaatctgccacagaaggaacgatgatccatagtcagaaaagttactgcagcttaaacaggaaacccttcttgttcaggactgtcatagccacagtttgcaaaaagtgcagctattgattaatgcaatgtagtgtcaattagatgtacattcctgaggtcttttatctgttgtagctttgtctttttctttttcttttcattacatcaggtatattgccctgtaaattgtggtagtggtaccaggaataaaaaattaaggaatttttaacttttaaaaaaaaaaaaaaaaaaaaaaaccgcgggatatatatgcgggggggagaaaaaggtcagagaagaggcacatggtaagtggttccggacccattttgaaaaggggaaacggggccccaaagggggaataaatggaaagcggtag

SEQ ID NO: 347103 - DNA, 1023 bp, Homo sapiens
atcgtgcagaagatcaccttatcgtgcagaagatcacctcatcgtgcagaagatcaccttatcgtgcagaagatcacctcatcgtgcagaagatcacctttctaaacaagagatgcagtctgctggatcacagagaggtcgtggaggtggatctggcaattttatgggtcgcggagggaactttggaggtggtggaggtaattttggccgtggtggaaactttggtggaagaggaggctatggtggtggaggtggtggcagcagaggtagttatggaggaggtgatggtggatataatggatttggaggtgatggtggcaactatggcggtggtcctggttatagtagtagagggggctatggtggtggtggaccaggatatggaaaccaaggtggtggatatggtggaggtggaggatatgatggttacaatgaaggaggaaattttggcggtggtaactatggtggtggtgggaactataatgattttggaaattatagtggacaacagcaatcaaattatggacccatgaaagggggcagttttggtggaagaagctcgggcagtccctatggtggtggttatggatctggtggtggaagtggtggatatggtagcagaaggttctaaaaacagcagaaaagggctacagttcttagcaggagagagagcgaggagttgtcaggaaagctgcaggttactttgagacagtcgtcccaaatgcattagaggaactgtaaaaatctgccacagaaggaacgatgatccatagtcagaaaagttactgcagcttaaacaggaaacccttcttgttcaggactgtcatagccacagtttgcaaaaagtgcagctattgattaatgcaaccacccgcccccagccctcccctcttggccccgcactgtgtaaaagatacgcgcaattagtctctaaatagtttattttaaaacgcgtctgggtttgtgcccggttgttctttgtattggatccatttaagtaaaaataaaattggttctttattt

SEQ ID NO: 347104 - DNA, 676 bp, Homo sapiens
  misc_feature (669)..(669): n is a, c, g, or t
atcgtgcagaagatcaccttatcgtgcagaagatcacctcatcgtgcagaagatcaccttatcgtgcagaagatcacctcatcgtgcagaagatcacctttctaaacaagagatgcagtctgctggatcacagagaggtcgtggaggtggatctggcaattttatgggtcgcggagggaactttggaggtggtggaggtaattttggccgtggtggaaactttggtggaagaggaggctatggtggtggaggtggtggcagcagaggtagttatggaggaggtgatggtggatataatggatttggaggtgatggtggcaactatggcggtggtcctggttatagtagtagagggggctatggtggtggtggaccaggatatggaaaccaaggtggtggatatggtggaggtggaggatatgatggttacaatgaaggaggaaattttggcggtggtaactatggtggtggtgggaactataatgattttggaaattatagtggacaacagcaatcaaattatggacccatgaaagggggcagttttggtggaagaagctcgggcagtccctatggtggtggttatggatctggtggtggaagtggtggatatggtagcagaaggttctaaaaacagcagaaaaggctacagtccttttctgggagagnggtcgga

SEQ ID NO: 347105 - DNA, 932 bp, Homo sapiens
tgagtaggtgggattacaggcgtgtgccaccatgcctggctaacttttttgtatttttagtagagacggggtatcgccatgttgaccaggctggtctcgaactcctgacctaaggggatccacctgcctcagcctcccaaagtactgggattacaggcgtgagccaccatgcctggccgctgcgtagcatttctgataggggctggtggtagggaaggagcattaaaacaagaatattagtagcacaagcagcaccattcttgaatgtctgctctgtactaggaattgtaataggaactttagtcatttagtcatcatgacctggtgagtgaggattaggttcacttgaatagagtagaaaacccaagataatggtggcttcataatggaaaagtttctaatgtaaccaaaaaaaggcctagaaaggtaggtggtactgggtttgtatgatggttccaaagcagcaggactaggctggtaactagcacctctgctactggttacattcctgttttacaaattagcatttctggttggataatttgtccaaggttatatagccagcagcaggggcatgatcagggtcagatttatctgactccacggtgtccatggtttttccatttttaccaccagcctcaatacctgaatcttcaatttttctcttgtggtggtgattttaagctaataaaaatggacttaacctattgtctttatattgcaacccatacagatgtgggtgtagcgtatatctgaaacaaaagtttcaaaatactgtttaattttattgtctgtactgtgctcttatattttctgtttcatattttttaagtaacccattaaattgattttgtaataactcttctagtgggatgctttataccagaagtgtccaaggaagagaatacagtcatgggttcctagtttctgtt

SEQ ID NO: 347106 - DNA, 1244 bp, Homo sapiens
tgcaagtaacaaagttctgccctggtgtgttgtttgcggataatcacagggcatgtaagggacagacagaaaacagcatgcttatcccagataattatagcaaggagaccaagaagcgtatttaaaatcttgatgttttgagtttcttcctagcttccccctattccttaataaagttctaaattgttttgttggagctctttgcagccattctgagggctttgcatgcttttctgaccttgcagtaaactcaatgctttaggcaaagaatggccacgtcatccgaccccctcagagtttagaattcagaacaggtctgaagaagaccaggcagcggctgagtcaaggaaagcctccgtccgcttttatttcccctgtgcctcttccaggactgtgctgggataacaggctcccgggggttactttggctgggctgggctaaaacctccctgcagagcaggccctgagccctgcctctgcgcctgggtggtgtcagcccctccaccttctgactgttccagcaactctctaagccctcccaaaggcctcaaggcctgtaagcatatgcagcaattttcagccataccaggagaggtcaactgtaatcttggccacctgcctaagaggaagtggctagcttcacttctgaccctcagcaactgccaggtggcctcttggaaatccccctctgggggattccacccgttgggtgggagagcagtagttaaaatgtaaaataagaatcttttgctgggagaagtcaacagatagggagaagtcagctgataacagaaatagttttttttttttttaaaactaacttcactgttaaccaagcagttcaacatgaaagactgaatctcttatgtttaatattttcttctcttttaatcttcataactaatttttttcagataattgtataaaataaccatggtagcaaaataatgtgatcactggaaaataagcagggaaaaacatgctatgaagatactcctatctgggtgaattcttgatagctttacatttttcatctggcatttaaacattaaacagttaatgtatttgacatgaaaattatttcaagttatcttattagttttaatagagtttaaaaagtgtttaaaagagttttcaaaaggctctaaaatcattttgaaatagtttaaaacagttttgaatcgttgtaagttagttttaatagagctttaaaaaggccctaaaatagtcctatcaagttgttg

SEQ ID NO: 347107 - DNA, 1166 bp, Homo sapiens
cccgaactaagaaagcacggctgtgtgggagcattgcatgccggagccctaaccccagctctcagcggcttctgatcacacagacctatgaggactgtccctggtgatgacaccgagcccccatgaaacggtgagatcctgctctgtgtgtttcattcagggagaaagggaagaagacaagcttgatttttaagatttccatgcagaatggtgaggcacactcggtgggcagcacccactggcagtgcccaggaaagatgtgtttcctctgttgctcctggactgagttttcatcgtcgagagctcgagctgcaggtgagaagggaagcatctgccacgccaggggccagggatcgagggtccaggacagaggtgagagaatctgctttggagttcagcctgtctcaagggctctccttccgcttcccagaaaagactctggagacagcaggtctatggggccaagaaggtctcatgtgcatccccatatgggactagggcccaggccacccaaaaccaggccctctccagccaggtgtaggcgagctgggctccatgcaccacctgggctggggccgcggtgactccatgtgagttcccgaggccagaaactcatcccttccttgccagggaactctgggatggttcctaagtgctctacaactggatcatgtttttcctaaatcaacactaaattttcccctttaaaaaagtacttaatgcccactctctacaaatggattttgtctgttcaactacaaatacgaggggatttcctcggaccttctgtccggctttggaatcataaggtattatagacccagaaaggccctttaagtagaggggaaactgaggacctaagagggcctgatacccagcaccattgctgtctcacacacactgaccctttgcctttcactgtgagctctgcccttggggacccgggtcctaggcaactaggacatttcaccggcaggaaacccgtgctgccaaggagagcccttggggctgactcagaaagcgtactttttttttcttttaactcgtctgtatttgttacaactttaagcagaatgtgacttgggcactatatttccatccacaagcctggctctgagttattattattattgttattataattattttgagatggagtttcgctc

SEQ ID NO: 347108 - DNA, 769 bp, Homo sapiens
gcagcgctgtaagaagtacctctaggcctgggaggcattgagaaaaaggaagtgggtcctgttctggttcttgcgactatagtcacctcccgaggcaaatgaccactgtcctgagaggacgtgggtgaggggcaggtgagtagagggatggcagcatctgtggactgagcaagaagaatctctgatgtctgtcctgagccttccggtcagtgatggggtcggtcagtggatggaatagtggaagtcggagcgatctctgatggaggatgactatgggaactaaggagggatctgaggagtgtgaatgatgcacatcttaattagtttcctctcttttatacgtaccgatctgtttatattttcgtttctgtttcattataatgatatattttgctaaagatttaaagaatatattacatagaattgcatgtttccatttccattttgttctctttcatatccagactagtagctcctttatcattacggttattatatttatatatcattcattctttctctatttaaaaagaatcaagcgtctgaaaggtttatctgtttcattggacattttgaaatgtccaataaaatactccctactcttttaatattaatttttttctctttttctttttaggtactttctctttttcccactttttgatgtaatttgttgttctttcccttattttcttaagttttatgcgggatacatttagggttgtaaagtttctttaagtacatctttatgaaatgcataagttcattt

SEQ ID NO: 347109 - DNA, 368 bp, Homo sapiens
gcagcgctgtaagaagtacctctaggcctgggaggcattgagaaaaaggaagtgggtcctgttctggttcttgcgactatagtcacctcccgaggcaaatgaccactgtcctgagaggacgtgggtgaggggcaggaatcagtgtcattcaaggacgtaactgtagacttcagtagggatgagtggcaacaattagaccttgctcagaaaagcctgtacagagaagtgatgctggaaaactatttcaacttgatctcagtgggatgtcaagttcccaaaccagaagtcatcttcagcttggaacaagaagagccatgtatgttggatggtgagatccccagtcagagccgtccaggtgagaagggaac

SEQ ID NO: 347110 - DNA, 280 bp, Homo sapiens
aaaggtttttttttttgaattcaaatatattctttaaaaaattattttaaagtttgttttttttttttaacaggaatcagtgtcattcaaggacgtaactgtagacttcagtagggatgagtggcaacaattagaccttgctcagaaaagcctgtacagagaagtgatgctggaaaactatttcaacttgatctcagtgggtaagcacggctctgctgggtatagagtaggctgcacctaattgagtatatttttcttctcagtagaattgctgaagtct

SEQ ID NO: 347111 - DNA, 856 bp, Homo sapiens
cttcccagcaatatgcatcttgcacgtctggtcggctcctgctccctccttctgctactgggggcctgtctggatgggcggccagcgatgaccccattgagaaggtcattgaagggatcaaccgagggctgagcaatgcagagagagaggtgggcaaggccctggatggcatcaacagtggaatcacgcatgccggaagggaagtggagaaggttttcaacggacttagcaacatggggagccacaccggcaaggagttggacaaaggcgtccaggggctcaaccacggcatggacaaggttgcccatgagatcaaccatggtattggacaagcaggaaagggaaggaagcagacaaagcggtccaagggttccacactggggtccaccaggctgggaaggaagcagagaaacttggccaaggggtcgtcaaccatgctgctgaccaggctggaaaggaagtggagaagcttggccaaggtgcccaccatgctgctggccaggccgggaaggagctgcagaatgctcataatggggtcaaccaagccagcaaggaggccaaccagctgctgaatggcaaccatcaaagcggatcttccagccatcaaggaggggccacaaccacgccgttagcctctggggcctcggtcaacacgcctttcatcaaccttcccgccctgtggaggagcgtcgccaacatcatgccctaaactggcatccggccttgctgggagaataatgtcgccgttgtcacatcagctgacatgacctggaggggttgggggtgggggacaggtttctgaaatccctgaagggggttgtactgggatttgtgaataaacttgatacactaaact

SEQ ID NO: 347112 - DNA, 552 bp, Homo sapiens
ccctgggaaaacgcttctacagcagctctccgctcttccaagctcaaagagctgtgggggatgtaggtggcaacacctaggcaacgtaactcaaccgcaagctcctcgaccttggaacggctatccacaaaaacgaggcgcttctcgcctttgtgcaatcttgaaatcacaattgctgcgtctttcagcgacccgacccaatcgacctggacgtcaggaatcacattattctcagcaggagggttgatcacgctccttcttgctgcacagggcaaccatcaaagcggatcttccagccatcaaggaggggccacaaccacgccgttagcctctggggcctcggtcaacacgcctttcatcaaccttcccgccctgtggaggagcgtcgccaacatcatgccctaaactggcatccggccttgctgggagaataatgtcgccgttgtcacatcagctgacatgacctggaggggttgggggtgggggacaggtttctgaaatccctgaagggggttgtactgggatttgtgaataaacttgatacactaaact

SEQ ID NO: 347113 - DNA, 359 bp, Homo sapiens
ttgcgggtctgcatcggtgtctgcgagagcgccagctatcctgagggaaacttcggagggaaccacgactgctgaatggcaaccatcaaagcggatcttccagccatcaaggaggggccacaaccacgccgttagcctctggggcctcggtcaacacgcctttcatcaaccttcccgccctgtggaggagcgtcgccaacatcatgccctaaactggcatccggccttgctgggagaataatgtcgccgttgtcacatcagctgacatgacctggaggggttgggggtgggggacaggtttctgaaatccctgaagggggttgtactgggatttgtgaataaacttgatacactaaact

SEQ ID NO: 347114 - DNA, 901 bp, Homo sapiens
cttcccagcaatatgcatcttgcacgtctggtcggctcctgctccctccttctgctactgggggcctgtctggatgggcggccagcgatgaccccattgagaaggtcattgaagggatcaaccgagggctgagcaatgcagagagagaggtgggcaaggccctggatggcatcaacagtggaatcacgcatgccggaagggaagtggagaaggttttcaacggacttagcaacatggggagccacaccggcaaggagttggacaaaggcgtccaggggctcaaccacggcatggacaaggttgcccatgagatcaaccatggtattggacaagcaggaaaggaagcagagaagcttggccatggggtcaacaacgctgctggacagggaaggaagcagacaaagcggtccaagggttccacactggggtccaccaggctgggaaggaagcagagaaacttggccaaggggtcgtcaaccatgctgctgaccaggctggaaaggaagtggagaagcttggccaaggtgcccaccatgctgctggccaggccgggaaggagctgcagaatgctcataatggggtcaaccaagccagcaaggaggccaaccagctgctgaatggcaaccatcaaagcggatcttccagccatcaaggaggggccacaaccacgccgttagcctctggggcctcggtcaacacgcctttcatcaaccttcccgccctgtggaggagcgtcgccaacatcatgccctaaactggcatccggccttgctgggagaataatgtcgccgttgtcacatcagctgacatgacctggaggggttgggggtgggggacaggtttctgaaatccctgaagggggttgtactgggatttgtgaataaacttgatacactaaact

SEQ ID NO: 347115 - DNA, 904 bp, Homo sapiens
cttcccagcaatatgcatcttgcacgtctggtcggctcctgctccctccttctgctactgggggcctgtctggatgggcggccagcgatgaccccattgagaaggtcattgaagggatcaaccgagggctgagcaatgcagagagagaggtgggcaaggccctggatggcatcaacagtggaatcacgcatgccggaagggaagtggagaaggttttcaacggacttagcaacatggggagccacaccggcaaggagttggacaaaggcgtccaggggctcaaccacggcatggacaaggttgcccatgagatcaaccatggtattggacaagcaggaaaggaagcagagaagcttggccatggggtcaacaacgctgctggacaggttgggaaggaggcagacaaactgatccatcatggggtccatcacggggccaaccaggcgggaagtgaggcagggaagtttggccaggggtcaaccatgctgctgaccaggctggaaaggaagtggagaagcttggccaaggtgcccaccatgctgctggccaggccgggaaggagctgcagaatgctcataatggggtcaaccaagccagcaaggaggccaaccagctgctgaatggcaaccatcaaagcggatcttccagccatcaaggaggggccacaaccacgccgttagcctctggggcctcggtcaacacgcctttcatcaaccttcccgccctgtggaggagcgtcgccaacatcatgccctaaactggcatccggccttgctgggagaataatgtcgccgttgtcacatcagctgacatgacctggaggggttgggggtgggggacaggtttctgaaatccctgaagggggttgtactgggatttgtgaataaacttgatacactaaact

SEQ ID NO: 347116 - DNA, 668 bp, Homo sapiens
cttcccagcaatatgcatcttgcacgtctggtcggctcctgctccctccttctgctactgggggcctgtctggatgggcggccagcgatgaccccattgagaaggtcattgaagggatcaaccgagggctgagcaatgcagagagagaggtgggcaaggccctggatggcatcaacagtggaatcacgcatgccggaagggaagtggagaaggttttcaacggacttagcaacatggggagccacaccggcaaggagttggacaaaggcgtccaggggctcaaccacggcatggacaaggttgcccatgagatcaaccatggtattggacaagcaggaaaggaagcagagaagcttggccatggggtcaacaacgctgctggacagggcaaccatcaaagcggatcttccagccatcaaggaggggccacaaccacgccgttagcctctggggcctcggtcaacacgcctttcatcaaccttcccgccctgtggaggagcgtcgccaacatcatgccctaaactggcatccggccttgctgggagaataatgtcgccgttgtcacatcagctgacatgacctggaggggttgggggtgggggacaggtttctgaaatccctgaagggggttgtactgggatttgtgaataaacttgatacactaaact

SEQ ID NO: 347117 - DNA, 1567 bp, Homo sapiens
cttcccagcaatatgcatcttgcacgtctggtcggctcctgctccctccttctgctactgggggcctgtctggatgggcggccagcgatgaccccattgagaaggtcattgaagggatcaaccgagggctgagcaatgcagagagagaggtgggcaaggccctggatggcatcaacagtggaatcacgcatgccggaagggaagtggagaaggttttcaacggacttagcaacatggggagccacaccggcaaggagttggacaaaggcgtccaggggctcaaccacggcatggacaaggttgcccatgagatcaaccatggtattggacaagcaggaaaggaagcagagaagcttggccatggggtcaacaacgctgctggacaggttgggaaggaggcagacaaactgatccatcatggggtccatcacggggccaaccaggcgggaagtgaggcagggaagtttggccaggggttggccagggggtccaccatactgctggtcaggttgggaaggaggcagagaagtttggccagggggcccaccatgctgcggggcaggccggaaatgaggcagggacgatttggccagggggcccaccatgctgcggggcaggccggaaatgaggctgggaggtttggccagggggtccaccatggtctcagtgagggctggaaggagacagagaagtttggccagggggtccaccatgctgccagtcagtttgggaaggaaacagagaagctcggcatggggtccaccatggggttaatgaggcctggaaggaagcagagaagtttggccagggtgtccaccatgctgcctcgcaggtggggaaggaggaagacagagtggtccaaggcctccatcatggcgttagtcaggctggaagggaggcggggcagtttggccacgacattcaccacacagcagggcaggctgggaaagagggagacatagcagttcatggtgtccaacctggggtccacgaggccgggaaggaggcagggcagtttggccagggagttcaccatacccttgaacaggccgggaaggaagcagacaaagcggtccaagggttccacactggggtccaccaggctgggaaggaagcagagaaacttggccaaggggtcgtcaaccatgctgctgaccaggctggaaaggaagtggagaagcttggccaaggtgcccaccatgctgctggccaggccgggaaggagctgcagaatgctcataatggggtcaaccaagccagcaaggaggccaaccagctgctgaatggcaaccatcaaagcggatcttccagccatcaaggaggggccacaaccacgccgttagcctctggggcctcggtcaacacgcctttcatcaaccttcccgccctgtggaggagcgtcgccaacatcatgccctaaactggcatccggccttgctgggagaataatgtcgccgttgtcacatcagctgacatgacctggaggggttgggggtgggggacaggtttctgaaatccctgaagggggttgtactgggatttgtgaataaacttgatacactaaact

SEQ ID NO: 347118 - DNA, 1926 bp, Homo sapiens
  misc_feature (1040)..(1040): n is a, c, g, or t
  misc_feature (1101)..(1101): n is a, c, g, or t
  misc_feature (1255)..(1255): n is a, c, g, or t
  misc_feature (1569)..(1569): n is a, c, g, or t
gagtgtttctggtggaatgctggattgttaatcgtgttagatggaattatgaccttgttgttgtctttatgtggcagttaagtatggtttaaagagatgtttatgggtgccaagttgacaagggtagacttgtgatggttaattttatatgtcaacttgaataggccacagggtgccagatatctgtttaaacattattctgaagtgtcttgagtgtgtttacagacgagatttgcatttgaactgggggactcagtaaaggagatagccatccccaaggtgggtggacatcatccagtttgttgagggcgtaaataaaataaaaggcagaggaaggaagaattcacccccctttttttttcctgcctcattgtttgagctgtgacatctcatcttctgtcctcagatggatttacatcactggcttccctggttctcaagcctttggattcagactgaattataccacaggccttcctgggtctccagcttatagatgacagatcatgggacctcttagcctccataatcatgtaagccactttcttgtagtactggtaaaagatatattagaccaatctataaaacagatagctatgaaagagaaaggtgacaggcacaagcctaggcaaatagagaagggttcctggagagcctctgacttgcctaggtcattgtgcacacgtggcttgcctgaatgaacatgcccactgtgaaagattccatttctcaacacatgtgcagtaagggaaataaatcaatgtggctcagactaagcgcccacacatggggtggagccacgaggagtttgctccttatgcaggggagaagccgtgcctcttcagctcgtgtgtggtggcctggcattcaatttgtgaggtgtaaaacctgcatgaaggacccctctttttgtggagagctttccttttgcctaataaattctgccctcctcgcctttcagtgtgtacgcgtgcctaattttttctggtcatgtgataacccaaatttaactgaactaaggagcaaaaaatcctgcatcngctacattaatagctgattgtactagattgagtagtgtccccccaacaaaattcgtgtccnactgaaacctgtgaatatgctcctatttggaattagggactttgcagatgtaatcaagttaagacaaggttgtacttgattaggatgggccctaaatccaatatctcttgtgtccttgtaagaacaggaaaatctgaacacagaaacagagacntagggccatatgaagacagaggcagaggttggagtgatgagtcaatgagtaaaggaatgccaggggttgctagcaactgccagaggctggaagaggcaggcaaggattcttccttcaaggcttcagagggagcatggtccagcccacacctttatttcagacacctagcctcaagaactgtgagagaatgcattggttttacaacaaacagttgtaaaactgtgagaggatgtgtttgttttacaacaaacagttacccagttggtggcactgttacagtagctctcagaaattaatacgctgagtacaaagtnaaaagctaattaggaatagacatggacactgatatggtttggatttgtgtccccactcaaatctcatgttgaattttaatcccctagtattggaggaggtgcatggtgagaggtgattggatcatgggggcagacttgctccttgctgttgtcgtgatagtgagttcttagcgagatctggttgtttaaaagtgtgtagcactccctcttcgctctcttcctcctgctccaaccatgtggacgtgcctccttcctcttcaccttgtgccctgattttaagcttcctgaggcctccccagccatgcttcctgtacggcctgtggaaccgtgagccaattaaacttcttttctttaccc

SEQ ID NO: 347119 - DNA, 905 bp, Homo sapiens
gggacgcccatggaacgcagcgaaggactatggcaggggagaacttcgctacgccgttccacgggcacgtgggccgcggcgccttcagcgacgtgtacgagcccgcggaggacacgtttctgcttttggacgcgctcgaggcagcggctgccgaactggcaggagtggaaatatgcctggaagtagggtcagggtctggtgtagtatctgcattcctagcctctatgataggccctcaggctttgtacatgtgcactgatatcaaccctgaggcagcagcttgtaccctagagacagcacgctgtaacaaagttcacattcaaccagttattacagatttggtcaaaggcttgctaccaagattgaccgaaaaagttgatcttctggtgtttaatcccccctatgtagtgactccacctcaagaggtaggaagtcacggaatagaggcagcttgggctggtggcagaaatggtcgggaagtcatggacaggttttttcccctggttccagatctcctttcaccaagaggattattctatttagttaccattaaagaaaacaacccagaagaaattttgaaaataatgaagacaaaaggtctgcaaggaaccactgcactttccagacaagcaggccaagaaactctttcagtcctcaagttcaccaagtcttagcatacagtgtgtgcccagaactactggaaactgaatgcatttagcatattttgaaactgaagtcattcattaggtaacaaggaattttatcagaaatttgtcattaaaaaaaggtagaaaggtggaacattccctttcagtcaggcctatagaattatttgcacaagtacaagtaaatatgtgtattatatttatagtttgcattttaaatataaaaattatgtatgaaat

SEQ ID NO: 347120 - DNA, 779 bp, Homo sapiens
gggacgcccatggaacgcagcgaaggactatggcaggggagaacttcgctacgccgttccacgggcacgtgggccgcggcgccttcagcgacgtgtacgagcccgcggaggacacgtttctgcttttggacgcgctcgaggcagcggctgccgaactggcaggagtggaaatatgcctggaagtagggtcagggtctggtgtagtatctgcattcctagcctctatgataggccctcaggctttgtacatgtgcactgatatcaaccctgaggcagcagcttgtaccctagagacagcacgctgtaacaaagttcacattcaaccagttattacagatttggtaggaagtcacggaatagaggcagcttgggctggtggcagaaatggtcgggaagtcatggacaggttttttcccctggttccagatctcctttcaccaagaggattattctatttagttaccattaaagaaaacaacccagaagaaattttgaaaataatgaagacaaaaggtctgcaaggaaccactgcactttccagacaagcaggccaagaaactctttcagtcctcaagttcaccaagtcttagcatacagtgtgtgcccagaactactggaaactgaatgcatttagcatattttgaaactgaagtcattcattaggtaacaaggaattttatcagaaatttgtcattaaaaaaaggtagaaaggtggaacattccctttcagtcaggcctatagaattatttgcacaagtacaagtaaatatgtgtattat

SEQ ID NO: 347121 - DNA, 995 bp, Homo sapiens
gggacgcccatggaacgcagcgaaggactatggcaggggagaacttcgctacgccgttccacgggcacgtgggccgcggcgccttcagcgacgtgtacgagcccgcggaggacacgtttctgcttttggacgcgctcgaggcagcggctgccgaactggcaggagtggaaatatgcctggaagtagggtcagggtctggtgtagtatctgcattcctagcctctatgataggccctcaggctttgtacatgtgcactgatatcaaccctgaggcagcagcttgtaccctagagacagcacgctgtaacaaagttcacattcaaccagttattacagatttggtcaaaggcttgctaccaagattgaccgaaaaagttgatcttctggtgtttaatcccccctatgtagtgactccacctcaagaggtaggaagtcacggaatagaggcagcttgggctggtggcagaaatggtcgggaagtcatggacaggttttttcccctggttccagatctcctttcaccaagaggattattctatttagttaccattaaagaaaacaacccagaagaaattttgaaaataatgaagacaaaaggtctgcaaggaaccactgcactttccagacaagcaggccaagaaactctttcagtcctcaagttcaccaagtcttagcatacagtgtgtgcccagaactactggaaactgaatgcatttagcatattttgaaactgaagtcattcattaggtaacaaggaattttatcagaaatttgtcattaaaaaaaggtagaaaggtggaacattccctttcagtcaggcctatagaattatttgcacaagtacaagtaaatatgtgtattatatttatagtttgcattttaaatataaaaattatgtatgaaatatttatttcagcattatgtggtaaggcaatggaattgatctggcaaatgtcttttttttcataccagtccataaaggcagtttgctttca

SEQ ID NO: 347122 - DNA, 2267 bp, Homo sapiens
  misc_feature (1381)..(1381): n is a, c, g, or t
  misc_feature (1442)..(1442): n is a, c, g, or t
  misc_feature (1596)..(1596): n is a, c, g, or t
  misc_feature (1910)..(1910): n is a, c, g, or t
gggacgcccatggaacgcagcgaaggactatggcaggggagaacttcgctacgccgttccacgggcacgtgggccgcggcgccttcagcgacgtgtacgagcccgcggaggacacgtttctgcttttggacgcgctcgaggcagcggctgccgaactggcaggagtggaaatatgcctggaagtagggtcagggtctggtgtagtatctgcattcctagcctctatgataggccctcaggctttgtacatgtgcactgatatcaaccctgaggcagcagcttgtaccctagagacagcacgctgtaacaaagttcacattcaaccagttattacagatttggtcaaaggcttgctaccaagattgaccgaaaaagttgatcttctggtgtttaatcccccctatgtagtgactccacctcaagaggtaggaagtcacggaatagaggcagcttgggctggtggcagaaatggtcgggaagtcatggacaggttttttcccctggttccagatctcctttcaccaagaggattattctatttagttaccattaaagaaaacaacccagaagaaattttgaaaataatgaagacaaaaggtctgcaaggaaccactgcactttccagacaagcaggccaagaaactctttcagtcctcaagttcaccaagtcttagcatacagtgtgtgcccagaactactggaaactgaatgcatttagcatattttgaaactgaagtcattcattagatggatttacatcactggcttccctggttctcaagcctttggattcagactgaattataccacaggccttcctgggtctccagcttatagatgacagatcatgggacctcttagcctccataatcatgtaagccactttcttgtagtactggtaaaagatatattagaccaatctataaaacagatagctatgaaagagaaaggtgacaggcacaagcctaggcaaatagagaagggttcctggagagcctctgacttgcctaggtcattgtgcacacgtggcttgcctgaatgaacatgcccactgtgaaagattccatttctcaacacatgtgcagtaagggaaataaatcaatgtggctcagactaagcgcccacacatggggtggagccacgaggagtttgctccttatgcaggggagaagccgtgcctcttcagctcgtgtgtggtggcctggcattcaatttgtgaggtgtaaaacctgcatgaaggacccctctttttgtggagagctttccttttgcctaataaattctgccctcctcgcctttcagtgtgtacgcgtgcctaattttttctggtcatgtgataacccaaatttaactgaactaaggagcaaaaaatcctgcatcngctacattaatagctgattgtactagattgagtagtgtccccccaacaaaattcgtgtccnactgaaacctgtgaatatgctcctatttggaattagggactttgcagatgtaatcaagttaagacaaggttgtacttgattaggatgggccctaaatccaatatctcttgtgtccttgtaagaacaggaaaatctgaacacagaaacagagacntagggccatatgaagacagaggcagaggttggagtgatgagtcaatgagtaaaggaatgccaggggttgctagcaactgccagaggctggaagaggcaggcaaggattcttccttcaaggcttcagagggagcatggtccagcccacacctttatttcagacacctagcctcaagaactgtgagagaatgcattggttttacaacaaacagttgtaaaactgtgagaggatgtgtttgttttacaacaaacagttacccagttggtggcactgttacagtagctctcagaaattaatacgctgagtacaaagtnaaaagctaattaggaatagacatggacactgatatggtttggatttgtgtccccactcaaatctcatgttgaattttaatcccctagtattggaggaggtgcatggtgagaggtgattggatcatgggggcagacttgctccttgctgttgtcgtgatagtgagttcttagcgagatctggttgtttaaaagtgtgtagcactccctcttcgctctcttcctcctgctccaaccatgtggacgtgcctccttcctcttcaccttgtgccctgattttaagcttcctgaggcctccccagccatgcttcctgtacggcctgtggaaccgtgagccaattaaacttcttttctttaccc

SEQ ID NO: 347123 - DNA, 911 bp, Homo sapiens
gggacgcccatggaacgcagcgaaggactatggcaggggagaacttcgctacgccgttccacgggcacgtgggccgcggcgccttcagcgacgtgtacgagcccgcggaggacacgtttctgcttttggacgcgctcgaggcagcggctgccgaactggcaggagtggaaatatgcctggaagtagggtcagggtctggtgtagtatctgcattcctagcctctatgataggccctcaggctttgtacatgtgcactgatatcaaccctgaggcagcagcttgtaccctagagacagcacgctgtaacaaagttcacattcaaccagttattacagatttggtaggaagtcacggaatagaggcagcttgggctggtggcagaaatggtcgggaagtcatggacaggttttttcccctggttccagatctcctttcaccaagaggattattctatttagttaccattaaagaaaacaacccagaagaaattttgaaaataatgaagacaaaaggtctgcaaggaaccactgcactttccagacaagcaggccaagaaactctttcagtcctcaagttcaccaagtcttagcatacagtgtgtgcccagaactactggaaactgaatgcatttagcatattttgaaactgaagtcattcattaggtaacaaggaattttatcagaaatttgtcattaaaaaaaggtagaaaggtggaacattccctttcagtcaggcctatagaattatttgcacaagtacaagtaaatatgtgtattatatttatagtttgcattttaaatataaaaattatgtatgaaatatttatttcagcattatgtggtaaggcaatggaattgatctggcaaatgtcttttttttcataccagtccataaaggcagtttgctttca

SEQ ID NO: 347124 - DNA, 264 bp, Homo sapiens
actttgtaaagaaggaatgggtagtgtcagctaaaggaaatggtgtgcatcccagcaaaagaaagagaccgaaagcaaagtcataaaccatgcccacgagctcagctgtcctgctccgtgtcctctccatacccttgttgactgtgctcatattagccagagacctaagtgctcttggaggatgtccctggggccccctccccctccgctgtcactgtctacttcctgatcctctcttctgtgcaggagaggtccaggccttct

SEQ ID NO: 347125 - DNA, 257 bp, Homo sapiens
aggatagtcaggggcactggccacctgttttgattcttcttctaagagacagacttgtttctcagtttaaatataactcgaggccaggcgtggtggctcatgcctgtaatcccagcactttggcaggtcgaggcaggcggattgcttgaagtcaggagttcgagaccagcttggccaaaatggtgaaaccctgtctctactaaaaatacaaaaattagttgggtgtggtggcacacacctgtaatcccagctattcg

SEQ ID NO: 347126 - DNA, 477 bp, Homo sapiens
agtccttgggcctcctgtactcacattacctggaacttcttggaaattcagaatctcaggccccaacccagacggactgaatcaaaatcttcattgtggtaagaccctcggtgacacacaggcctgggaagcacaggttagcgtgtcaccttgggcaaagctctcagcattgtgagcctctgttttctactctgtaaaggaggcatgaatatctacatcatcagtttgccatgagtattgaaaaataatgtcttagaagcacagggcagagcctggcatgtagtttgtgctcagtgcacagcagacaagaaaccacatgcaccagacctgggcggccgtcggcagcccaccctgagcaaccatgggtggccctcttgtctctcgggacaagaaatgcttctttagaaatgcttctttcctttctaaaatgaaagttttggacagtatttcctttcatttaaaaatttcatctgtgta

SEQ ID NO: 347127 - DNA, 890 bp, Homo sapiens
ggcctcccaaggtgctgggattacaggcatgagccaccgcaccttgcaggtttttttaagttttagatgcaaagtaaaattgtcagccagctctaagatctttggtaatacttgattatttatctagagtttatcttgagttaatttctctttttttttttttagtgtttagctaaaagttgtattttattcagtgtatttaaagatataaaataatactttttgcattgtctaatctggttacttaaaacaagcaaaaaaaaatcttgtgtacaaatattcccttaaatgtggatatatatgctcttctttttccctttgttactcaaaatagagtttgagttatttttgttttgttttttgtaacccatgtggggcatatctttcccccatacccatgaaatattcatattaaggtttataaaagactataactttaacataatttttatctcatttccataggaagaagaatattagctcgcttgaggtaggattttataccataaagctcaagagttcaggttctaaaaccagacagactgggtttcagttctctaccgtgtcttagtttgaccttaaccaagtcacatagcctaagcccctcttttctcatttgtttaaatgatctgagtagcacctgttacatagtaaacattcagtaaatgttagctgctaaactataataatcaccacaacatatgtctctcactaccatatagtttttttctaaaaataactttaagtttaaaaaataattttactaggccaggtgtggtggctcacacctgtaatcccagcactttgagaggctgaggcaggaggatcacttgagcccaggagttcaagatcagcttgggcaatatagtgagacctcgtctctaccaaaa

SEQ ID NO: 347128 - DNA, 713 bp, Homo sapiens
ttgagaccctctcccgccttgggtgacagagcgagactccacctcaaaaaacaacaacaacaacaaaaaacccagaacattatcatggaaagtttaacaacatgattaacttctgatcctggagagtggtaatgatagactggatcaggagtctactggcctgggcaatagaaatgaaatctggactgtctcagggcttcgtataatcaccagcttttgtgggtggggatgttggggtgtcctacaggggtatcttgattccttctgagaacagatcatttctttgtcctttctgatgtcctaatctaaaacatccagtactcctggaggatttgaacttgtgcccaatggctggtcagactctcttggattgagaatgttggattgccattcctcagactgaatgtgggccaagcaattgtgctttagaaatttatcttagagtctgggtgcggtggctcatacctgtaatcccagcactttgggaggttgaggcgggtggatcacctgaggttgggagttcgagaccaagtctggccaacgtggtgaaaccctgtctctactaaaaatacaaaaaaaaaaaaattagctgggcatggtggtgggcacctgtaactccagctgcttgggaggctgaggcaggagaaactgggaggtggaggttgcagtgagccgagatcgcgccactgcacgccagcctgggcaacaagtgc

SEQ ID NO: 347129 - DNA, 817 bp, Homo sapiens
acaaagaatccctacaaatcagtttttaaaagtcatcagagcagcaagagatatgaattttaatggccaataaatccacatcaaaaggctctaactactagtgttgagaagctacagattccttatcatgctttatgagatcctgaaagatctggtttctttccatctccttaaactcatctcataatattgtttcctctcatttaccatacttaagttcaacctacctcatttccattttcaaatatgctgaccgctttcctattttctgcctgaaacaacttatcctggcatttaaaaaatttgtttcacagcgtgatctgtaatcattttattcgtttgtttacgtcttcattttctgtttctcatttgaagctacatgaagttagggactttatctgtcttattttccactctatcctcagtaccttgctcggtgcttggaacatattaggaactcaaaatatgagatgataacagtgcctattattgattactgagagaactgttagacatttagttgaagattttctacacaggaactgagaataggagattatgtttggccctcatattctctcctatcctccttgcctcattctatgtctaatatattctcaatcaaataaggttagcataatcaggaaatcgaccaaataccaatataaaaccagatgtctatccttaagattttcaaatagaaaacaaattaacagactatacactagttgaaagtaattgtttatactgattataatggttgggtccttttgaaatgagaaaattcaataaacgtgactttgatttttttatgtgg

SEQ ID NO: 347130 - DNA, 408 bp, Homo sapiens
gaaataacatttcgattgtgataaattcagaaaatatagtctttatatccttcattttctgcctttcaaagttgttaatagtttcctccagatgacgacttgttcggctagcatccattgcagctctctgtaattccgtttctgcctgtgaaataacatgtcgatcagatgggtttcgctgacgtgttctttctaactgagttaattgcttagcttctccttccaacatctcatgactccttccaatatcacatcatctcctttccaactatctcatccccccttccaatatcacatcgcgttcgcacgcgtcttgggactatgatgtgtggatgggcggtgatgacatggggagagatgttgtgaagggtgtctctcctgtttaggagtgggactatcctgtatcca

SEQ ID NO: 347131 - DNA, 271 bp, Homo sapiens
gaaataacatttcgattgtgataaattcagaaaatatagtctttatatccttcattttctgcctttcaaagttgttaatagtttcctccagatgacgacttgttcggctagcatccattgcagctctctgtaattccgtttctgcctgtgaaataacatgtcgatcagatgggtttcgctgacgtgttctttctaactgagttaattgcttagcttctcgattccttgctgtgaatgttgctttgaggtcatcccgtttcattttcacaat

SEQ ID NO: 347132 - DNA, 406 bp, Homo sapiens
ataactttatttgatgatctgacgatcagcgattagttctcatccacattgactgtctgtagatttttgaaagtggtaacaggtacataggtaaccaaagtatatagcttatttggtgaatcttcatcctcattacgttttctggacagcctcacatggattcggtataggacattccttattcctttggcccagacagctttgttgagcctggtgtcaatgcgcacatctggagttcccatctccttcatggcaaatttccgaatctctttgagtgcccaaggtgcacgtttcttgaagcccactccatggatgcgcttgtgaatgttgatggtatattctcgggttaccacttcgttgatggcaacggcccgttttcttctcgccacccttctttgcgggaacc

SEQ ID NO: 347133 - DNA, 367 bp, Homo sapiens
cggcacgagggtagaaactggaagctgttcagtgcactggcagctgaaccctgctcctgctccgtttatcagagttactatcatctcagataatatggagctcatgtcagcagtgcaggtggtgagtgcgcagagacaatctggaaggaaacgctgatctgaacagcagtaatcctgggggacatgggggtgggactggattacagaggactcattttctaaatcatgtattttatgatacttgaatttttttgaaatgggcatttatttaatgacatgttataatgtactttttttttaaagaagtgtaatatttgaatttttacatttgttgtgtaatcagcagaagcaataaagatttttcaga

SEQ ID NO: 347134 - DNA, 658 bp, Homo sapiens
gtattctttgttctgaatgggttgcctagaaactccttttttccctttgatgcctaggggagtaaagaaaacaaaaaagagttaagaatattctttaattttggtatattccagtttagcattatagctgatatatttacagctagagtatcttttaatatctataatcaggacagagacataattatgaaaatccacaaaacttgataaagtgagaatctaactgcccagatgatagtggtttctactacaaagcaagcctccatgaattcattcacacctgaggtttattaaatatgtgaccccaggcgggttactttacctcaattgcatacttttctcctcatctgaaaagtgggttcataggattataaagactaattgcgataacatgcagagtgcatggcatgatatttggtgccttgtcaaagcttgataaacagggtccagtctaagaaacattagggagacctcttctctacaaaaaatttaaaaaattattagctgagtctgatggcacatgcctgtggtcccagctattcaggaggctgaggcgggaggattgctggggcccaggaggtcaaagctgcagtgagccatgattttgccactgcattgtagcctgggcgacagagcaaggccctgtctcaaaaaaaaa

SEQ ID NO: 347135 - DNA, 338 bp, Homo sapiens
gctggcagcacactggctgcagagctggcatggccactgcctgtttgtttgtctgcaaggagagtgggaagtagcggggagggtgaccataaccttagcaacctgaagccaagggtgaacccttgctcagatcttgcattttaagagtaaccaaagggttctgaaacatattccctttttaaatctctgctgtgcagtagcgaaggcccctttgaatgtatctttctttccagagtcaaccagaggcaaagccagattgagggttcccaggctgacaaatgtctgctgcctctgccacaggagagagaaggggaaagagggcaaaagaaacaaagaca

SEQ ID NO: 347136 - DNA, 755 bp, Homo sapiens
ctccaggggagaaaggagggcacagtgcccaaggccatgccagggcaaggacgggccactggcccccgccggccgagtcaaccagaggcaaagccagattgagggttcccaggctgacaaatgtctgctgcctctgccacaggagagagaaggggaaagagggcaaaagaaacaaagacatcacgcgttgcaagtggctggacttttaaaaacctacctttgcctccagggttttctaggttactgtcaccccacttcctaaaaagtgtctcccccctcatcctatttaagacctgatgcagtctccccactggttctcccagggaaagaaaaggggaaatgttttgttgaaaataaaagggatgacaagaaagaaaggaaaaaaagctattgttttcatccctaatttataatccaagaggcccccaattgtttctttctgactcaaatctttgagctgttaattataaaagtaactggacttggcgccaacgggctaactatgatcaggctcagcaattagaaaaactctgtagaaagtttactgagtgattatatataattaattcctagttacagactgaacactgaccattttctggagctaataaaagcagttactccccctcccccacgtgaatgccacttaatttcccaaagcagaaagtgaatccatcctggagggtcttgaaggaaaaaaaaggagaggaatcaaaagcttcagtgtgtctgtgtttgctccttgcagctgtgta

SEQ ID NO: 347137 - DNA, 228 bp, Homo sapiens
caagaagctcaacaaaattcaagcagaatcaactcaaagatcaataccaaaacacattataatcaaaaccaaatgacaaagagagaatctttaacagaaagtaagaagtattttgtcatgtagaagggatcctcaatatattaacagatattctcattagtaatccatgtagaagggatcctcagtatgttaacagatacttttctcattagtaatcattgaggccag

SEQ ID NO: 347138 - DNA, 466 bp, Homo sapiens
cgatttcccctcttgtctgctgagccagcaggggccacgtcctgggctgctgtgaggaggaagtgagttggtgctaggaggggctcctgtgtgtgcatgggcgggaggggtgcaggtatctgagcaccccggtctccacttgagagagcagggcaggagctccctgacccacccagactacacacgctgtgtccacgtgtctcacattatctgtggcagaggatccggcttctttctcaatttccagttcttcacaaagcaatgcctttgtaaaatgcaataagaaatactagaaaaatgatatgaacagaaagacacgccgattttttgttattagatgtaacagaccatggccccatgaaatgatcccggaccagatccgtccacacccgccactcagcagctctggccgagctcacagtacaaccacaataaactcttgttgaatgaactctaaaaaatctgt

SEQ ID NO: 347139 - DNA, 507 bp, Homo sapiens
  misc_feature (272)..(272): n is a, c, g, or t
  misc_feature (335)..(335): n is a, c, g, or t
  misc_feature (353)..(353): n is a, c, g, or t
cgatttcccctcttgtctgctgagccagcaggggccacgtcctgggctgctgtgaggaggaagtgagttggtgctaggaggggctcctgtgtgtgcatgggcgggaggggtgcaggtatctgagcaccccggtctccacttgagagagcagggcaggagctccctgacccacccagactacacacgctgtgtccacgtgtctcacattatctgtggcagaggatccggcttaaaaaacggcggggcggggccccctacatcgtttgcggccncaaaaacacccccccgctttacatcggcgcggccccccccccccctttggggggaaaaggggncccggttccccgcgggtncccccctttttgggaaaccagcggcgtccgcaagcctgagccgggcatttgagaccgggccggagccgctgccgtgctgaagcttggagcgcccgcccgggtcgcccataaccatcccgcgtttccagcatccgccgccgccccgggcctggct

SEQ ID NO: 347140 - DNA, 608 bp, Homo sapiens
tgcaaaaccaaataggaatattatttaaaattaggactacagtagcctaacagatcctgcattacaacagcaacatgaatgttatgactataatttataaatagttccagtgtttcttaaattccttaagactttacaaaataaaaattttacactattgataatttatattttacttttctgtaatggagggaaaaataaagatacctccaaggtttaaccagaaatctgttttcaattgcagtgaaatcagatttagatactgcattaggataaaagagcttcctgtctcaaaatgcaaagccatttagtaatttttgaaaatagggctttttcccctcacatgcacagttgttctttttcaaatacatacttgcaaagtaagtataggaaaatgtcaaccttctgccacattcaaccatccttaattttaaagttttcctcttttcacatgtcagttaacttacagtacataaaaacttattgtaggatttatttttcttttatatttttacctggttaagtcattttatacatttttttctaggatggagagcataagccattcactattgtgttagaaagagaaaatgacactttgggattca

SEQ ID NO: 347141 - DNA, 853 bp, Homo sapiens
tccctaacatgggctttgccctggagcgcttcgcagaagccgtggacccggctctggagtgcaaactgtgcggccaggtgcttgaagagcccctgtgcacgccgtgcgggcacgtcttctgcgccagctgcctgttgccctgggcggtgcggaggcgccggtgcccgctgcagtgccagcccttggcgcccggcgagctgtaccgggtgctgccgctgcgcagcctcatccagaagctgcgagtccagtgcgactaccgcgcccgcggctgcggccactcggtcaggctgcacgagctggaggcgcacgtcgagcactgcgacttcggccctgcccgccggctccgcagccgcgggggctgcgcttcggggctgggcggtggtgaggtgcccgcgcgggggggctgcggtccgacacccagggctggccggggcgggggcgcgcgcggggggccgccgggcggccgctggggccgcgggcggggacccgggcctcgggtcctcgcctggaggcggcgcgagaaggcgctgctggcgcagctctgggcgctgcagggcgaggtgcagctcacggcgcgcaggtaccaggagaagttcacccaatacatggctcacgtccgcaacttcgtcggcgacctcggtggcggccaccgcagggatggagagcataagccattcactattgtgttagaaagagaaaatgacactttgggattcaatattataggaggtcgaccaaatcagaataatcaggaaggaacatcgactgaaggaatttacgtttcaaaaattttagaaaatggacctgctgacagagcagatggcctggagattcatgacaaaatcatggaggt

SEQ ID NO: 347142 - DNA, 269 bp, Homo sapiens
tggctgcttgggactgaggccagctacaggagtagggagggacacagggaccaagggagggggaagcttgggagtctcttctgctacttgcctgcccattgcagggggatgagtattttttcttcttcatctctttccctgccacccacttgagctgctgtgagggcacctttcttctaggggctcacttagctccctgaggtctgaccttggctgcagggaggggctggcaggcctggcaaggttagggttcaaagcacttttcccat

SEQ ID NO: 347143 - DNA, 544 bp, Homo sapiens
gcagagctctgcaaggagaggttgtgtcttcgttctttccgccatcttcgttctttccaacatcttcgttctttctcactgaccgagactcagccggtagtgagagatatgagtgagcatgtaacaagatcccaatcctcagaaagaggaaatgaccaagagtcttcccagccagttggacctgtgattgtccagcagcccactgaggaaaaacgtcaagaagaggaaccaccaactgataatcagggtattgcacctagtggggagatcaaaaatgaaggagcacctgctgttcaagggactgatgtggaagcttttcaacaggaactggctctgcttaagatagaggatgcacctggagatggtcctgatgtcagggaggggactctgcccacttttgatcccactaaagtgctggaagcaggtgaagggcaactataggtttaaaccaagacaaatgaagactgaaaccaagaatattgttcttatgctggaaatttgactgctaacattctcttaataaagttttacagttttctgcaaa

SEQ ID NO: 347144 - DNA, 674 bp, Homo sapiens
gcagagctctgcaaggagaggttgtgtcttcgttctttccgccatcttcgttctttccaacatcttcgttctttctcactgaccgagactcagccggtagtgagagatatgagtgagcatgtaacaagatcccaatcctcagaaagaggaaatgaccaagagtcttcccagccagttggacctgtgattgtccagcagcccactgaggaaaaacgtcaagaagaggaaccaccaactgataatcagggtattgcacctagtggggagatcaaaaatgaaggagcacctgctgttcaagggactgatgtggaagcttttcaacaggaactggctctgcttaagatagaggatgcacctggagatggtcctgatgtcagggaggggactctgcccacttttgatcccactaaagtgctggaagcaggtgaagggcaactataggtttaaaccaagacaaatgaagactgaaaccaagaatattgttcttatgctggaaatttgactgctaacattctcttaataaagttttacagttttctgcaaaaaaaaaaacacaaaacctagagcactagtgccccccttggggagccgcggctaaggggcgccaaactttggcccaagtcccaagaaccacccaacaacaacaaacccggtccccaaaggggcaccaaaat

SEQ ID NO: 347145 - DNA, 739 bp, Homo sapiens
gcagagctctgcaaggagaggttgtgtcttcgttctttccgccatcttcgttctttccaacatcttcgttctttctcactgaccgagactcagccggtaggtctgcagagtggtcttcctggtaatttagttgtgagtgaatgtgtggaggagccagcgggcttaggacaggtcctgtggcacagtccgtggctttgagggaaaagggcctcgcggtggtcctccgccttcccccaggtcgtgatgcaggcgccatgggccggtaatcgtggctgggctggaacgagggaggaagtgagagatatgagtgagcatgtaacaagatcccaatcctcagaaagaggaaatgaccaagagtcttcccagccagttggacctgtgattgtccagcagcccactgaggaaaaacgtcaagaagaggaaccaccaactgataatcagggtattgcacctagtggggagatcaaaaatgaaggagcacctgctgttcaagggactgatgtggaagcttttcaacaggaactggctctgcttaagatagaggatgcacctggagatggtcctgatgtcagggaggggactctgcccacttttgatcccactaaagtgctggaagcaggtgaagggcaactataggtttaaaccaagacaaatgaagactgaaaccaagaatattgttcttatgctggaaatttgactgctaacattctcttaataaagttttacagttttctgcaaa

SEQ ID NO: 347146 - DNA, 794 bp, Homo sapiens
gcagagctctgcaaggagaggttgtgtcttcgttctttccgccatcttcgttctttccaacatcttcgttctttctcactgaccgagactcagccggtaggtctgcagagtggtcttcctggtaatttagttgtgagtgaatgtgtggaggagccagcgggcttaggacaggtcctgtggcacagtccgtggctttgagggaaaagggcctcgcggtggtcctccgccttcccccaggtcgtgatgcaggcgccatgggccggtaatcgtggctgggctggaacgagggaggaagtgagagatatgagtgagcatgtaacaagatcccaatcctcagaaagaggaaatgaccaagagtcttcccagccagttggacctgtgattgtccagcagcccactgaggaaaaacgtcaagaagaggaaccaccaactgataatcagggtattgcacctagtggggagatcaaaaatgaaggagcacctgctgttcaagggactgatgtggaagcttttcaacaggaactggctctgcttaagatagaggatgcacctggagatggtcctgatgtcagggaggggactctgcccacttttgatcccactaaagtgctggaagcaggtgaagggcaactataggtttaaaccaagacaaatgaagactgaaaccaagaatattgttcttatgctggaaatttgactgctaacattctcttaataaagttttacagttttctgcaaaacaaaaaaacccggctctttcggtcgggaaaaggttgaatggctggaagttccga

SEQ ID NO: 347147 - DNA, 739 bp, Homo sapiens
tgtgtgtcggatgcatatccgactctgtcggtccttcctcaaacattcattcgtacttaacctcacgagaacgaaagtcaaccggtatgattctgaatcagtctgcagagtggtcttcctggtaatttagttgtgagtgaatgtgtggaggagccagcgggcttaggacaggtcctgtggcacagtccgtggctttgagggaaaagggcctcgcggtggtcctccgccttcccccaggtcgtgatgcaggcgccatgggccggtaatcgtggctgggctggaacgagggaggaagtgagagatatgagtgagcatgtaacaagatcccaatcctcagaaagaggaaatgaccaagagtcttcccagccagttggacctgtgattgtccagcagcccactgaggaaaaacgtcaagaagaggaaccaccaactgataatcagggtattgcacctagtggggagatcaaaaatgaaggagcacctgctgttcaagggactgatgtggaagcttttcaacaggaactggctctgcttaagatagaggatgcacctggagatggtcctgatgtcagggaggggactctgcccacttttgatcccactaaagtgctggaagcaggtgaagggcaactataggtttaaaccaagacaaatgaagactgaaaccaagaatattgttcttatgctggaaatttgactgctaacattctcttaataaagttttacagttttctgcaaa

SEQ ID NO: 347148 - DNA, 1496 bp, Homo sapiens
tcaggcagccagttgagctctcgagaacgtccctcttcccgcccagtcccgcgagcccgggtggcacctgataggtgatcttgggtcccagcgtggggtggaactcgctgaagaatatgcattcgatgcggcagccgctgcccatggcaataaccgggcccaggcccgtagctcctcgttcctcgcgcagaggcgtccccacctcctgtgaacacttgtcagagacagcctcgaggcctgtgtcgctggggcacgcaagcttgccaatccctctgcccaatggcgcctgcgcagcgcgactcagaggcgtggctggggcgggggacggctcgtcccaggaagtcctgggtgggtagacgtcgcacccggaagtaaagcggctccgtgacggagcggcggtgcgcgcggcagggcccggagtatcccgctttctttggaggaaaccaccgcatcagatctgcgctgcggcagaggcaggctacaaccactagcacggctgacgatggccctttctgcggagaccgagtcacacatctaccgagctctgcgtactgcttctggcgctgccgcccaccttgtggccctgggctttaccatctttgtggctgtgcttgccaggcctggctccagcctgttctcctggcacccggtgcttatgtctttggctttctccttcctgatgaccgaggcactactggtgttttctcctgagagttcgctgctgcactccctctcacggaaaggccgagcacgctgccactgggtgctgcagctgctggccctgctgtgtgcactgctgggcctcggccttgtcatcctccacaaagagcagcttggcaaagcccacctggttacgcggcatgggcaggcagggctgctggctgtgctgtgggcagggctgcagtgctcaggtggggtggggctgctctaccccaagctgctgccccgatggcccctggcgaagctcaagctataccatgctacttctgggctggtgggctacctgctgggtagtgccagcctcttgctgggcatgtgctcactctggttcactgcctctgtcactggtgcagcctggtacctggctgtattatgccctgtcctcaccagcttggtcattatgaaccaggtgagcaatgcctacctataccgcaagaggatccaaccatgagctcttcccagcctaggggaagcctggatttgcccctccatgtaggagctgggcctagggacctgttgaactctctcagctgagtcaggggacacctcaggcactgggacagttgggcatttggaggcccgtgtgtgaattcctgctcctcatgctggagtgcctcccatttccttcccctttctctgtcatcccagaggaacataggcatcatgtgtctggatgaagctggggctgcaagactgcctctcctgcaaggcagctcatacttgtactgtatgttcagaaattttaggagagaaaaaagtaaaaaatttgtaaaaaa

SEQ ID NO: 347149 - DNA, 1562 bp, Homo sapiens
tcaggcagccagttgagctctcgagaacgtccctcttcccgcccagtcccgcgagcccgggtggcacctgataggtgatcttgggtcccagcgtggggtggaactcgctgaagaatatgcattcgatgcggcagccgctgcccatggcaataaccgggcccaggcccgtagctcctcgttcctcgcgcagaggcgtccccacctcctgtgaacacttgtcagagacagcctcgaggcctgtgtcgctggggcacgcaagcttgccaatccctctgcccaatggcgcctgcgcagcgcgactcagaggcgtggctggggcgggggacggctcgtcccaggaagtcctgggtgggtagacgtcgcacccggaagtaaagcggctccgtgacggagcggcggtgcgcgcggcagggcccggagtatcccgctttctttggaggaaaccaccgcatcagatctgcgctgcggcagaggcagccttttctccagtgaggagtgaacagtgggcacctgagatcctggcccacgctactatgctttcaggctacaaccactagcacggctgacgatggccctttctgcggagaccgagtcacacatctaccgagctctgcgtactgcttctggcgctgccgcccaccttgtggccctgggctttaccatctttgtggctgtgcttgccaggcctggctccagcctgttctcctggcacccggtgcttatgtctttggctttctccttcctgatgaccgaggcactactggtgttttctcctgagagttcgctgctgcactccctctcacggaaaggccgagcacgctgccactgggtgctgcagctgctggccctgctgtgtgcactgctgggcctcggccttgtcatcctccacaaagagcagcttggcaaagcccacctggttacgcggcatgggcaggcagggctgctggctgtgctgtgggcagggctgcagtgctcaggtggggtggggctgctctaccccaagctgctgccccgatggcccctggcgaagctcaagctataccatgctacttctgggctggtgggctacctgctgggtagtgccagcctcttgctgggcatgtgctcactctggttcactgcctctgtcactggtgcagcctggtacctggctgtattatgccctgtcctcaccagcttggtcattatgaaccaggtgagcaatgcctacctataccgcaagaggatccaaccatgagctcttcccagcctaggggaagcctggatttgcccctccatgtaggagctgggcctagggacctgttgaactctctcagctgagtcaggggacacctcaggcactgggacagttgggcatttggaggcccgtgtgtgaattcctgctcctcatgctggagtgcctcccatttccttcccctttctctgtcatcccagaggaacataggcatcatgtgtctggatgaagctggggctgcaagactgcctctcctgcaaggcagctcatacttgtactgtatgttcagaaattttaggagagaaaaaagtaaaaaatttgtaaaaaa

SEQ ID NO: 347150 - DNA, 1882 bp, Homo sapiens
tcaggcagccagttgagctctcgagaacgtccctcttcccgcccagtcccgcgagcccgggtggcacctgataggtgatcttgggtcccagcgtggggtggaactcgctgaagaatatgcattcgatgcggcagccgctgcccatggcaataaccgggcccaggcccgtagctcctcgttcctcgcgcagaggcgtccccacctcctgtgaacacttgtcagagacagcctcgaggcctgtgtcgctggggcacgcaagcttgccaatccctctgcccaatggcgcctgcgcagcgcgactcagaggcgtggctggggcgggggacggctcgtcccaggaagtcctgggtgggtagacgtcgcacccggaagtaaagcggctccgtgacggagcggcggtgcgcgcggcagggcccggagtatcccgctttctttggaggaaaccaccgcatcagatctgcgctgcggcagaggcaggcaagtccctagcgtggaggggcagcatgctggcagcacttggggaggcggtgcgctaagggattcacgctgtaactgggaccgcagcagggaactacaatttccatagtgctccgcgccctcccagctggctctactgccggcgacggcgtggtacacgctgggatttgtagtcttacatggctttgcgcctcctacctggaaggcgggccagcgattggtaccagttcagacatgggtacacgttgacaggccgccggccgtcgactggcatgttgtgaccattcctggtgctggtcttggtactgttctttcctaccataacttattggaagagggtggcattcctgccttgcagccttttctccagtgaggagtgaacagtgggcacctgagatcctggcccacgctactatgctttcaggctacaaccactagcacggctgacgatggccctttctgcggagaccgagtcacacatctaccgagctctgcgtactgcttctggcgctgccgcccaccttgtggccctgggctttaccatctttgtggctgtgcttgccaggcctggctccattctccttcctgatgaccgaggcactactggtgttttctcctgagagttcgctgctgcactccctctcacggaaaggccgagcacgctgccactgggtgctgcagctgctggccctgctgtgtgcactgctgggcctcggccttgtcatcctccacaaagagcagcttggcaaagcccacctggttacgcggcatgggcaggcagggctgctggctgtgctgtgggcagggctgcagtgctcaggtggggtggggctgctctaccccaagctgctgccccgatggcccctggcgaagctcaagctataccatgctacttctgggctggtgggctacctgctgggtagtgccagcctcttgctgggcatgtgctcactctggttcactgcctctgtcactggtgcagcctggtacctggctgtattatgccctgtcctcaccagcttggtcattatgaaccaggtgagcaatgcctacctataccgcaagaggatccaaccatgagctcttcccagcctaggggaagcctggatttgcccctccatgtaggagctgggcctagggacctgttgaactctctcagctgagtcaggggacacctcaggcactgggacagttgggcatttggaggcccgtgtgtgaattcctgctcctcatgctggagtgcctcccatttccttcccctttctctgtcatcccagaggaacataggcatcatgtgtctggatgaagctggggctgcaagactgcctctcctgcaaggcagctcatacttgtactgtatgttcagaaattttaggagagaaaaaagtaaaaaatttgtaaaaaa

SEQ ID NO: 347151 - DNA, 1524 bp, Homo sapiens
tcaggcagccagttgagctctcgagaacgtccctcttcccgcccagtcccgcgagcccgggtggcacctgataggtgatcttgggtcccagcgtggggtggaactcgctgaagaatatgcattcgatgcggcagccgctgcccatggcaataaccgggcccaggcccgtagctcctcgttcctcgcgcagaggcgtccccacctcctgtgaacacttgtcagagacagcctcgaggcctgtgtcgctggggcacgcaagcttgccaatccctctgcccaatggcgcctgcgcagcgcgactcagaggcgtggctggggcgggggacggctcgtcccaggaagtcctgggtgggtagacgtcgcacccggaagtaaagcggctccgtgacggagcggcggtgcgcgcggcagggcccggagtatcccgctttctttggaggaaaccaccgcatcagatctgcgctgcggcagaggcagccttttctccagtgaggagtgaacagtgggcacctgagatcctggcccacgctactatgctttcaggctacaaccactagcacggctgacgatggccctttctgcggagaccgagtcacacatctaccgagctctgcgtactgcttctggcgctgccgcccaccttgtggccctgggctttaccatctttgtggctgtgcttgccaggcctggctccattctccttcctgatgaccgaggcactactggtgttttctcctgagagttcgctgctgcactccctctcacggaaaggccgagcacgctgccactgggtgctgcagctgctggccctgctgtgtgcactgctgggcctcggccttgtcatcctccacaaagagcagcttggcaaagcccacctggttacgcggcatgggcaggcagggctgctggctgtgctgtgggcagggctgcagtgctcaggtggggtggggctgctctaccccaagctgctgccccgatggcccctggcgaagctcaagctataccatgctacttctgggctggtgggctacctgctgggtagtgccagcctcttgctgggcatgtgctcactctggttcactgcctctgtcactggtgcagcctggtacctggctgtattatgccctgtcctcaccagcttggtcattatgaaccaggtgagcaatgcctacctataccgcaagaggatccaaccatgagctcttcccagcctaggggaagcctggatttgcccctccatgtaggagctgggcctagggacctgttgaactctctcagctgagtcaggggacacctcaggcactgggacagttgggcatttggaggcccgtgtgtgaattcctgctcctcatgctggagtgcctcccatttccttcccctttctctgtcatcccagaggaacataggcatcatgtgtctggatgaagctggggctgcaagactgcctctcctgcaaggcagctcatacttgtactgtatgttcagaaattttaggagagaaaaaagtaaaaaatttgtaaaaaa

SEQ ID NO: 347152 - DNA, 2134 bp, Homo sapiens
  misc_feature (1921)..(1921): n is a, c, g, or t
  misc_feature (1923)..(1923): n is a, c, g, or t
  misc_feature (1934)..(1934): n is a, c, g, or t
  misc_feature (1936)..(1936): n is a, c, g, or t
  misc_feature (1938)..(1938): n is a, c, g, or t
  misc_feature (1947)..(1947): n is a, c, g, or t
  misc_feature (1949)..(1949): n is a, c, g, or t
  misc_feature (2134)..(2134): n is a, c, g, or t
tcaggcagccagttgagctctcgagaacgtccctcttcccgcccagtcccgcgagcccgggtggcacctgataggtgatcttgggtcccagcgtggggtggaactcgctgaagaatatgcattcgatgcggcagccgctgcccatggcaataaccgggcccaggcccgtagctcctcgttcctcgcgcagaggcgtccccacctcctgtgaacacttgtcagagacagcctcgaggcctgtgtcgctggggcacgcaagcttgccaatccctctgcccaatggcgcctgcgcagcgcgactcagaggcgtggctggggcgggggacggctcgtcccaggaagtcctgggtgggtagacgtcgcacccggaagtaaagcggctccgtgacggagcggcggtgcgcgcggcagggcccggagtatcccgctttctttggaggaaaccaccgcatcagatctgcgctgcggcagaggcaggcaagtccctagcgtggaggggcagcatgctggcagcacttggggaggcggtgcgctaagggattcacgctgtaactgggaccgcagcagggaactacaatttccatagtgctccgcgccctcccagctggctctactgccggcgacggcgtggtacacgctgggatttgtagtcttacatggctttgcgcctcctacctggaaggcgggccagcgattggtaccagttcagacatgggtacacgttgacaggccgccggccgtcgactggcatgttgtgaccattcctggtgctggtcttggtactgttctttcctaccataacttattggaagagggtggcattcctgccttgcagccttttctccagtgaggagtgaacagtgggcacctgagatcctggcccacgctactatgctttcaggctacaaccactagcacggctgacgatggccctttctgcggagaccgagtcacacatctaccgagctctgcgtactgcttctggcgctgccgcccaccttgtggccctgggctttaccatctttgtggctgtgcttgccaggcctggctccagcctgttctcctggcacccggtgcttatgtctttggctttctccttcctgatgaccgaggcactactggtgttttctcctgagagttcgctgctgcactccctctcacggaaaggccgagcacgctgccactgggtgctgcagctgctggccctgctgtgtgcactgctgggcctcggccttgtcatcctccacaaagagcagcttggcaaagcccacctggttacgcggcatgggcaggcagggctgctggctgtgctgtgggcagggctgcagtgctcaggtggggtggggctgctctaccccaagctgctgccccgatggcccctggcgaagctcaagctataccatgctacttctgggctggtgggctacctgctgggtagtgccagcctcttgctgggcatgtgctcactctggttcactgcctctgtcactggtgcagcctggtacctggctgtattatgccctgtcctcaccagcttggtcattatgaaccaggtgagcaatgcctacctataccgcaagaggatccaaccatgagctcttcccagcctaggggaagcctggatttgcccctccatgtaggagctgggcctagggacctgttgaactctctcagctgagtcaggggacacctcaggcactgggacagttgggcatttggaggcccgtgtgtgaattcctgctcctcatgctggagtgcctcccatttccttcccctttctctgtcatcccagaggaacataggcatcatgtgtctggatgaagctggggctgcaagactgcctctcctgcaaggcagctcatacttgtactgtatgttcagaaattttaggagagaaaaaagtaaaaaatttgtaaaaaananaaaaaaaaaanananaaaaaaaananaaaaaaaaaaaaaaattggggggctttttttggggggggggagaaaaaggcggtattaaaatggggatgtggtctattttgtttctgtgacccactttttttgtcaaaaggggggaagattcgggggggccccaataaaggggggggataaatcgagaacccggttccgtcttttggtagacaan

SEQ ID NO: 347153 - DNA, 1752 bp, Homo sapiens
tcaggcagccagttgagctctcgagaacgtccctcttcccgcccagtcccgcgagcccgggtggcacctgataggtgatcttgggtcccagcgtggggtggaactcgctgaagaatatgcattcgatgcggcagccgctgcccatggcaataaccgggcccaggcccgtagctcctcgttcctcgcgcagaggcgtccccacctcctgtgaacacttgtcagagacagcctcgaggcctgtgtcgctggggcacgcaagcttgccaatccctctgcccaatggcgcctgcgcagcgcgactcagaggcgtggctggggcgggggacggctcgtcccaggaagtcctgggtgggtagacgtcgcacccggaagtaaagcggctccgtgacggagcggcggtgcgcgcggcagggcccggagtatcccgctttctttggaggaaaccaccgcatcagatctgcgctgcggcagaggcaggcaagtccctagcgtggaggggcagcatgctggcagcacttggggaggcggtgcgctaagggattcacgctgtaactgggaccgcagcagggaactacaatttccatagtgctccgcgccctcccagctggctctactgccggcgacggcgtggtacacgctgggatttgtagtcttacatggctttgcgcctcctacctggaaggcgggccagcgattggtaccagttcagacatgggtacacgttgacaggccgccggccgtcgactggcatgttgtgaccattcctggtgctggtcttggtactgttctttcctaccataacttattggaagagggtggcattcctgccttgcagccttttctccagtgaggagtgaacagtgggcacctgagatcctggcccacgctactatgctttcaggctacaaccactagcacggctgacgatggccctttctgcggagaccgagtcacacatctaccgagctctgcgtactgcttctggcgctgccgcccaccttgtggccctgggctttaccatctttgtggctgtgcttgccaggcctggctccagcctgttctcctggcacccggtgcttatgtctttggctttctccttcctgatgaccgaggcactactggtgttttctcctgagagttcgctgctgcactccctctcacggaaaggccgagcacgctgccactgggtgctgcagctgctggccctgctgtgtgcactgctgggcctcggccttgtcatcctccacaaagagcagcttggcaaagcccacctggttacgcggcatgggcaggcagggctgctggctgtgctgtgggcagggctgcagtgctcaggtggggtggggctgctctaccccaagctgctgccccgatggcccctggcgaagctcaagctatacctataccgcaagaggatccaaccatgagctcttcccagcctaggggaagcctggatttgcccctccatgtaggagctgggcctagggacctgttgaactctctcagctgagtcaggggacacctcaggcactgggacagttgggcatttggaggcccgtgtgtgaattcctgctcctcatgctggagtgcctcccatttccttcccctttctctgtcatcccagaggaacataggcatcatgtgtctggatgaagctggggctgcaagactgcctctcctgcaaggcagctcatacttgtactgtatgttcagaaattttaggagagaaaaaagtaaaaaatttgtaaaaaa

SEQ ID NO: 347154 - DNA, 1396 bp, Homo sapiens
tcaggcagccagttgagctctcgagaacgtccctcttcccgcccagtcccgcgagcccgggtggcacctgataggtgatcttgggtcccagcgtggggtggaactcgctgaagaatatgcattcgatgcggcagccgctgcccatggcaataaccgggcccaggcccgtagctcctcgttcctcgcgcagaggcgtccccacctcctgtgaacacttgtcagagacagcctcgaggcctgtgtcgctggggcacgcaagcttgccaatccctctgcccaatggcgcctgcgcagcgcgactcagaggcgtggctggggcgggggacggctcgtcccaggaagtcctgggtgggtagacgtcgcacccggaagtaaagcggctccgtgacggagcggcggtgcgcgcggcagggcccggagtatcccgctttctttggaggaaaccaccgcatcagatctgcgctgcggcagaggcaggcaagtccctagcgtggaggggcagcatgctggcagcacttggggaggcggtgcgctaagggattcacgctgtaactgggaccgcagcagggaactacaatttccatagtgctccgcgccctcccagctggctctactgccggcgacggcgtggtacacgctgggatttgtagtcttacatggctttgcgcctcctacctggaaggcgggccagcgattggtaccagttcagacatgggtacacgttgacaggccgccggccgtcgactggcatgttgtgaccattcctggtgctggtcttggtactgttctttcctaccataacttattggaagagggtggcattcctgccttgcagccttttctccagtgaggagtgaacagtgggcacctgagatcctggcccacgctactatgctttcaggctacaaccactagcacggctgacgatggccctttctgcggagaccgagtcacacatctaccgagctctgcgtactgcttctggcgctgccgcccaccttgtggccctgggctttaccatctttgtggctgtgcttgccaggcctggctccagtctccacctatgtacagcgaacacctcaacagatggcatgtgactcgaccagtatgctcctagcttgacaagattttggaaaatttcacagtaccttctccgctcggcgtcttgagggtctgtgcctggcaggctgatggtgatggaggatggggcacccacatcgtagcgcttcaccgtcttctggcatatctttaccttcaccaggaggctgtgcaccaagttcgccagcaaacccaccacaggctgcaggatctcagggaagaaagtggcgaaagcaaagtggtcagccatgtcccctcggccccggctatggcgctggtagaagcgaagatataccca

SEQ ID NO: 347155 - DNA, 1920 bp, Homo sapiens
tcaggcagccagttgagctctcgagaacgtccctcttcccgcccagtcccgcgagcccgggtggcacctgataggtgatcttgggtcccagcgtggggtggaactcgctgaagaatatgcattcgatgcggcagccgctgcccatggcaataaccgggcccaggcccgtagctcctcgttcctcgcgcagaggcgtccccacctcctgtgaacacttgtcagagacagcctcgaggcctgtgtcgctggggcacgcaagcttgccaatccctctgcccaatggcgcctgcgcagcgcgactcagaggcgtggctggggcgggggacggctcgtcccaggaagtcctgggtgggtagacgtcgcacccggaagtaaagcggctccgtgacggagcggcggtgcgcgcggcagggcccggagtatcccgctttctttggaggaaaccaccgcatcagatctgcgctgcggcagaggcaggcaagtccctagcgtggaggggcagcatgctggcagcacttggggaggcggtgcgctaagggattcacgctgtaactgggaccgcagcagggaactacaatttccatagtgctccgcgccctcccagctggctctactgccggcgacggcgtggtacacgctgggatttgtagtcttacatggctttgcgcctcctacctggaaggcgggccagcgattggtaccagttcagacatgggtacacgttgacaggccgccggccgtcgactggcatgttgtgaccattcctggtgctggtcttggtactgttctttcctaccataacttattggaagagggtggcattcctgccttgcagccttttctccagtgaggagtgaacagtgggcacctgagatcctggcccacgctactatgctttcaggctacaaccactagcacggctgacgatggccctttctgcggagaccgagtcacacatctaccgagctctgcgtactgcttctggcgctgccgcccaccttgtggccctgggctttaccatctttgtggctgtgcttgccaggcctggctccagcctgttctcctggcacccggtgcttatgtctttggctttctccttcctgatgaccgaggcactactggtgttttctcctgagagttcgctgctgcactccctctcacggaaaggccgagcacgctgccactgggtgctgcagctgctggccctgctgtgtgcactgctgggcctcggccttgtcatcctccacaaagagcagcttggcaaagcccacctggttacgcggcatgggcaggcagggctgctggctgtgctgtgggcagggctgcagtgctcaggtggggtggggctgctctaccccaagctgctgccccgatggcccctggcgaagctcaagctataccatgctacttctgggctggtgggctacctgctgggtagtgccagcctcttgctgggcatgtgctcactctggttcactgcctctgtcactggtgcagcctggtacctggctgtattatgccctgtcctcaccagcttggtcattatgaaccaggtgagcaatgcctacctataccgcaagaggatccaaccatgagctcttcccagcctaggggaagcctggatttgcccctccatgtaggagctgggcctagggacctgttgaactctctcagctgagtcaggggacacctcaggcactgggacagttgggcatttggaggcccgtgtgtgaattcctgctcctcatgctggagtgcctcccatttccttcccctttctctgtcatcccagaggaacataggcatcatgtgtctggatgaagctggggctgcaagactgcctctcctgcaaggcagctcatacttgtactgtatgttcagaaattttaggagagaaaaaagtaaaaaatttgtaaaaaa

SEQ ID NO: 347156 - DNA, 1143 bp, Homo sapiens
actacctgtgaagaataacaatatctgtaacatcctgcgctacggcttgtgtgcctagtggtaacttccgcttatcggggctatggcaacatctcggaacatatttgcactgccgcagaggccggctacaaccactagcacggctgacgatggccctttctgcggagaccgagtcacacatctaccgagctctgcgtactgcttctggcgctgccgcccaccttgtggccctgggctttaccatctttgtggctgtgcttgccaggcctggctccagcctgttctcctggcacccggtgcttatgtctttggctttctccttcctgatgaccgaggcactactggtgttttctcctgagagttcgctgctgcactccctctcacggaaaggccgagcacgctgccactgggtgctgcagctgctggccctgctgtgtgcactgctgggcctcggccttgtcatcctccacaaagagcagcttggcaaagcccacctggttacgcggcatgggcaggcagggctgctggctgtgctgtgggcagggctgcagtgctcaggtggggtggggctgctctaccccaagctgctgccccgatggcccctggcgaagctcaagctataccatgctacttctgggctggtgggctacctgctgggtagtgccagcctcttgctgggcatgtgctcactctggttcactgcctctgtcactggtgcagcctggtacctggctgtattatgccctgtcctcaccagcttggtcattatgaaccaggtgagcaatgcctacctataccgcaagaggatccaaccatgagctcttcccagcctaggggaagcctggatttgcccctccatgtaggagctgggcctagggacctgttgaactctctcagctgagtcaggggacacctcaggcactgggacagttgggcatttggaggcccgtgtgtgaattcctgctcctcatgctggagtgcctcccatttccttcccctttctctgtcatcccagaggaacataggcatcatgtgtctggatgaagctggggctgcaagactgcctctcctgcaaggcagctcatacttgtactgtatgttcagaaattttaggagagaaaaaagtaaaaaatttgtaaaaaa

SEQ ID NO: 347157 - DNA, 1893 bp, Homo sapiens
tcaggcagccagttgagctctcgagaacgtccctcttcccgcccagtcccgcgagcccgggtggcacctgataggtgatcttgggtcccagcgtggggtggaactcgctgaagaatatgcattcgatgcggcagccgctgcccatggcaataaccgggcccaggcccgtagctcctcgttcctcgcgcagaggcgtccccacctcctgtgaacacttgtcagagacagcctcgaggcctgtgtcgctggggcacgcaagcttgccaatccctctgcccaatggcgcctgcgcagcgcgactcagaggcgtggctggggcgggggacggctcgtcccaggaagtcctgggtgggtagacgtcgcacccggaagtaaagcggctccgtgacggagcggcggtgcgcgcggcagggcccggagtatcccgctttctttggaggaaaccaccgcatcagatctgcgctgcggcagaggcaggcaagtccctagcgtggaggggcagcatgctggcagcacttggggaggcggtgcgctaagggattcacgctgtaactgggaccgcagcagggaactacaatttccatagtgctccgcgccctcccagctggctctactgccggcgacggcgtggtacacgctgggatttgtagtcttacatggctttgcgcctcctacctggaaggcgggccagcgattggtaccagttcagacatgggtacacgttgacaggccgccggccgtcgactggcatgttgtgaccattcctggtgctggtcttggtactgttctttcctaccataacttattggaagagggtggcattcctgccttgcagccttttctccagtgaggagtgaacagtgggcacctgagatcctggcccacgctactatgctttcaggctacaaccactagcacggctgacgatggccctttctgcggagaccgagtcacacatctaccgagctctgcgtactgcttctggcgctgccgcccaccttgtggccctgggctttaccatctttgtggctgtgcttgccaggcctggctccagcctgttctcctggcacccggtgcttatgtctttggctttctccttcctgatgaccgaggcactactggtgttttctcctgagagttcgctgctgcactccctctcacggaaaggccgagcacgctgccactgggtgctgcagctgctggccctgctgtgtgcactgctgggcctcggccttgtcatcctccacaaagagcagcttggcaaagcccacctggttacgcggcatgggcaggcagggctgctggctgtgctgtgggcagggctgcagtgctcaggtggggtggggctgctctaccccaagctgctgccccgatggcccctggcgaagctcaagctatacctgctgggtagtgccagcctcttgctgggcatgtgctcactctggttcactgcctctgtcactggtgcagcctggtacctggctgtattatgccctgtcctcaccagcttggtcattatgaaccaggtgagcaatgcctacctataccgcaagaggatccaaccatgagctcttcccagcctaggggaagcctggatttgcccctccatgtaggagctgggcctagggacctgttgaactctctcagctgagtcaggggacacctcaggcactgggacagttgggcatttggaggcccgtgtgtgaattcctgctcctcatgctggagtgcctcccatttccttcccctttctctgtcatcccagaggaacataggcatcatgtgtctggatgaagctggggctgcaagactgcctctcctgcaaggcagctcatacttgtactgtatgttcagaaattttaggagagaaaaaagtaaaaaatttgtaaaaaa

SEQ ID NO: 347158 - DNA, 2284 bp, Homo sapiens
  misc_feature (1921)..(1921): n is a, c, g, or t
  misc_feature (1923)..(1923): n is a, c, g, or t
  misc_feature (1934)..(1934): n is a, c, g, or t
  misc_feature (1936)..(1936): n is a, c, g, or t
  misc_feature (1938)..(1938): n is a, c, g, or t
  misc_feature (1947)..(1947): n is a, c, g, or t
  misc_feature (1949)..(1949): n is a, c, g, or t
tcaggcagccagttgagctctcgagaacgtccctcttcccgcccagtcccgcgagcccgggtggcacctgataggtgatcttgggtcccagcgtggggtggaactcgctgaagaatatgcattcgatgcggcagccgctgcccatggcaataaccgggcccaggcccgtagctcctcgttcctcgcgcagaggcgtccccacctcctgtgaacacttgtcagagacagcctcgaggcctgtgtcgctggggcacgcaagcttgccaatccctctgcccaatggcgcctgcgcagcgcgactcagaggcgtggctggggcgggggacggctcgtcccaggaagtcctgggtgggtagacgtcgcacccggaagtaaagcggctccgtgacggagcggcggtgcgcgcggcagggcccggagtatcccgctttctttggaggaaaccaccgcatcagatctgcgctgcggcagaggcaggcaagtccctagcgtggaggggcagcatgctggcagcacttggggaggcggtgcgctaagggattcacgctgtaactgggaccgcagcagggaactacaatttccatagtgctccgcgccctcccagctggctctactgccggcgacggcgtggtacacgctgggatttgtagtcttacatggctttgcgcctcctacctggaaggcgggccagcgattggtaccagttcagacatgggtacacgttgacaggccgccggccgtcgactggcatgttgtgaccattcctggtgctggtcttggtactgttctttcctaccataacttattggaagagggtggcattcctgccttgcagccttttctccagtgaggagtgaacagtgggcacctgagatcctggcccacgctactatgctttcaggctacaaccactagcacggctgacgatggccctttctgcggagaccgagtcacacatctaccgagctctgcgtactgcttctggcgctgccgcccaccttgtggccctgggctttaccatctttgtggctgtgcttgccaggcctggctccagcctgttctcctggcacccggtgcttatgtctttggctttctccttcctgatgaccgaggcactactggtgttttctcctgagagttcgctgctgcactccctctcacggaaaggccgagcacgctgccactgggtgctgcagctgctggccctgctgtgtgcactgctgggcctcggccttgtcatcctccacaaagagcagcttggcaaagcccacctggttacgcggcatgggcaggcagggctgctggctgtgctgtgggcagggctgcagtgctcaggtggggtggggctgctctaccccaagctgctgccccgatggcccctggcgaagctcaagctataccatgctacttctgggctggtgggctacctgctgggtagtgccagcctcttgctgggcatgtgctcactctggttcactgcctctgtcactggtgcagcctggtacctggctgtattatgccctgtcctcaccagcttggtcattatgaaccaggtgagcaatgcctacctataccgcaagaggatccaaccatgagctcttcccagcctaggggaagcctggatttgcccctccatgtaggagctgggcctagggacctgttgaactctctcagctgagtcaggggacacctcaggcactgggacagttgggcatttggaggcccgtgtgtgaattcctgctcctcatgctggagtgcctcccatttccttcccctttctctgtcatcccagaggaacataggcatcatgtgtctggatgaagctggggctgcaagactgcctctcctgcaaggcagctcatacttgtactgtatgttcagaaattttaggagagaaaaaagtaaaaaatttgtaaaaaananaaaaaaaaaanananaaaaaaaananaaaaaaaaaaaaaaaaaaacaaaaaaaaggagggggggccgacaaaaagatcatcccccaggggggcgcccaagaagcacgagacaaacgcaagattggaaaacaagggggccaacaaagaggggagaggaaaattaaacaacgacgcgaggggaagaggcgccggggcgacgaacaaaaagagagagcagggcgaggaaaacggcgggacacgagaaggcaccacacagggaagcacggaaaacaacaacacagacagaggagggaggggaaatagcgggagaagacacaaacccacacggaaagacgaagagcccagaggaggagaaaaaaat

SEQ ID NO: 347159 - DNA, 336 bp, Homo sapiens
atttttgtttcaaattgccagctgcttatgtcagactgactcccttattatgcctccagtaggcctgtcaatatggccaaacagctagataagtgcggggcaggacaaagggctctttgcacagcagggaggcaatgttggtgggggaggggcaggaggtaggaaaggcaagaggaggaggttcttttccctgggagattattcagtttggcatacaattaaagaaatcatttttagttcccactcaagcattgaatttttgccaaccacatactattaaccccaaatttgatacatttcagaatatcttgtagggatccattctcgccaaggaaa

SEQ ID NO: 347160 - DNA, 314 bp, Homo sapiens
actcgttaaaaagaagtccaaaacctatatgagaaaaacgataacacactactgaaacacataaaagtagacttgaacaactgtaaagaaatatattcttatttaggcagattcagcatcataaaggagttagttctccctagattaatatataaatgattgcaatccaaaaaataaaaataccatcttttcttggaggggaggagtaggctagataacttaattttgaagttcattgggatgaagaaaaaaggaagaatatccaggaaaaatcctcaaaagagaagcaacttggagggaggggagaaccctat

SEQ ID NO: 347161 - DNA, 778 bp, Homo sapiens
aattttgctgttttcttggccacatccatccatgatggaattgcagttatacactttaatttgaaaggaacatttaaaattatatacgattccacctgtaaaatatcctgctgtaggattaatgcagcaagtctcacagaaactatcctgagcgatggactgtgtccaagggagcgtcacgagtaaggaaagtccagtctttgtggaggcacaccctgggctgaacattctttaattaacaaagacaaacatttcacctgtggcctgaacaactggaacaaagtttccaacggtggaaaaactaacaactactaaaaacctttaaaaaagaagactaacagcaacactccaaagtaagttggattctataatagttgcaggttgcaattggaggcaattccaagcaggaaaggttaggctttagtttatgcaaaggatagagaaactagcttcaaatgtgcatttttttccccctggctagcattttcctggagggagaattggtaatgtctcctccaaagctttcctcagttgaagaaatatgtaggaataggaatgtcaaggatgtaagcacgtgcaactaaaactccaatttgtaccgaggaaactgtattagttaaaggatttcattcttcagtagtgaaagtatggtgaaattattattgggatataaaacaaaattgacttgaatgagaatctagcttatcctccataaaaagcttagtgaaatagttttcaactctgttcaactgacaatgaaatctaggctttagctatt

SEQ ID NO: 347162 - DNA, 637 bp, Homo sapiens
gggcaaatgaagacagagaccactaggctgatacactgagtttgatatgaaatgttaattaccattaaaacttttttattgaggcatgatcaaatctgtagtttacaaagattactctggttgtaacattctgggagaaaataaaattattcagtctgagaaagactccatagaacaagtgatattttagctgggtctattcatctcacaggatgaatagaagcttttttgaggaagggctctgcagaatgatgaaataaaatgaaaaaagatatgaaaacataacagggcaccacagattctaggacaagtaagagggccagagtggttggaaaacaggttatttagagaaagaggtatcagatttgaaagacaggcttaggctttgttatgaggaacactacagtttcccatttaattacaaattttgtcattttataagatgggaaattcccctttttccttatagacagtcataacatcaagtgatgggtgattcaacaattattcatgatgacagtgccaacatccctgctcatatattaaatgagacactacctgaagtagataaagtatccacaatttcacttcagaatatttggctgctatgccaaagagacaaccacttatagttgtc

SEQ ID NO: 347163 - DNA, 513 bp, Homo sapiens
tttttttagagacagggtctcgctctgccacccaggctggagcacagtggtgagatcattgctcactgcagcctcaacctcctgggctcaagcaatcctcctacttcagcctcctgagtaactgagactgcaggagacatgctcaccccgatcgcttccaccagctcaggctgcatggtttcaacaagaggaatttgtttctcatagttctggaggctggaattccaagatcaagcagggcctatgaccatgtctgatgttcagggaatgaagaagtgaagaaagcaggaatgaatgaaggaaggaagcagccccagcaattggttcccaggcgagaagctggtggggttctgacttctatcccgattcacacccttttctcctgccctcagggcggtccttctcctgctcttgttcattcatccccttcagccctttcgtattctcttctgtagccgaaccacaaaaaataaatacattagaaatgttttccgagctcatcagatgcatcat

SEQ ID NO: 347164 - DNA, 723 bp, Homo sapiens
cctccaaagtccccccctccaaataccatcacgctgggtgttaggacttcaatatacaaatttgagagggagacaattctgtccatagcaggcccctggggtccccagccagagtaaccccacagaagctaccagtaaatctccaaagccatcaccatagcccaccgaacatttcacctctgcctgcgttctgagagtgggacttgttcattgttctgttttaattctcagcagggcctatgaccatgtctgatgttcagggaatgaagaagtgaagaaagcaggaatgaatgaaggaaggaagcagccccagcaattggttcccaggcgagaagctggtggggttctgacttctatcccgattcacacccttttctcctgccctcagggcggtccttctcctgctcttgttcattcatccccttcagccctttcgtattctcttctgtagccgaaccacaaaaaataaatacattagaaatgttttccgagctcatcagatgcatcataaggccaggtgggcctgccctgtcactgctagccatgggtagacatttacatttaaagtgacaagaattaaatacaatttaaaattcagctccttagctgcaccagctgcatttccagagctcgacagtcacgtgtgactcgtggccaccttactggacagtgcggatctagaatgttctgccattgcaggaagtttggacaactgcaatagcc

SEQ ID NO: 347165 - DNA, 556 bp, Homo sapiens
ctatgaccatgtctgatgttcagggaatgaagaagtgaagaaagcaggaatgaatgaaggaaggaagcagccccagcaattggttcccaggcgagaagctggtggggttctgacttctatcccgattcacacccttttctcctgccctcagggcggtccttctcctgctcttgttcattcatccccttcagccctttcgtattctcttctgtagccgaaccacaaaaaataaatacattagaaatgttttccgagctcatcagatgcatcatgtctatttctctgccccagcccagtggggtgggtgatgcctttgcagcccccacttgccaggggcaccttgtgggcatctagatctccagacctcaaagccagcacccacccaactgcagggtgctgtctgcgctgtacgcattctgagagctccgtggcctgggccagccccagctggaacctcgggtgcccttcactcttccaaaagaggctgtttgctttcaaagaaaggaaagagtagaactgcagactgcatttggctacacagcctgagactcctggg

SEQ ID NO: 347166 - DNA, 886 bp, Homo sapiens
gccctgtgtaattacctccacaatcaacagcctctctactgtgccatcatggtaacacttctattttatggccacacccatcccctctcctccatccctaagccttgacaactgttactctgttctttatctctataattttgtaatttcacagatgttttttaaatggaatcatatggcatgtattctttaaagactggctttttttttctcacgcagcataaactgtagataccagtattctgatcctttttaatgctaaatagtcatccacggtacggatgtgccaaaattttgtcttacgattcatgccctgaaggatgtttggggagtttccaatttgaggctgttaataaggctgctatgaacatttgtgtacaagttcctgtgttaaaaagagattaagttctcgtgatgtatgtcttaaaattcatttgcgcttaagtatgaaaaaaagtcatcagattgtagagggagtttgacagctatagagagaaaacccaattagaacttagtaacagtggctaaggttgtttttcagcaagtatgatctttaaccaacatcatgggtcataagagatttcaaccattgcaagctgtatgttaaagccttcactaatcccactggcttttatactgattttgttctatccgtcttattctagagttaacgtttctgccaggaccagttgtgtagcagtatgtcctatttcttagttctttaaaggcaataactcagccataaaagccagcaggagagtacttcactgacaaattggttggccagtcttgtgtatgtgcattaaatcgttgggagcaaataggaaagaggaagagtgggagcaaagcctcttccggtttgcttttaaatgttaaaaaaaaaaaa

SEQ ID NO: 347167 - DNA, 264 bp, Homo sapiens
cattggatgactggcctccatcacaggtgacttgagtacttcattggtttgtgccattagcccagtcttctcaatgcctttcccccagacttcaacccaggaagaataccttttgttccactcttctccccatctgaaagtgtttttgctctttattaaaaccacgacagtggtatatgctaggatctccttggagacccaaagaatcctgggactttcagacatcaccagcagagcatcctgctgcttctcaaccaactggaa

SEQ ID NO: 347168 - DNA, 420 bp, Homo sapiens
atatggcatgatgccattctcttttaaaaacaaaacaaataacactattttatatgtgtgtatgtttgtatgagcagagaaaaaggtgtggagggagctattaccacttaaggagacggcactggagaaggtggatgaagatcagccttttctttatctgcgtttgaaatatttaacttgtaataaccgacatttttttggtaactttaaatctaataaagtacaaccaaaaaaagcaatgtgctatgaaaaactgcactgcaggccctgctattcccgcctgctgttattaacccagcagtagccgtatctgcagataagaaagaggatgtggtcgtctcaagtctctggaggcaccagggtccaagactggtcctcagctttgtagccaatgttcttgctttctcttttcatattgaa

SEQ ID NO: 347169 - DNA, 299 bp, Homo sapiens
tctttaaaaaacagcaacaacaacaacaacaacaacaacacaagagttaaatcggtaaaagaatgactgaaaagaaattctaatagccaggcgtgggtggctcatgcctgtaatcccagcactttgggagcctgaggcaggcaaatcttttgagtccaaggagttccagaccagcctgggcaacatggcaaaactctgtctctaccaaaaaaaaaagaaataacgaaaattacccaagcgtggtggcacatgactgtggtcccgactactcggaaggctgagatgggagaatcacttga

SEQ ID NO: 347170 - DNA, 231 bp, Homo sapiens
ggggtgtagctgagtgtagttctgagaagcggatggcatctgaggtggggttgggcaggctgagggctgttttcctggttcctgctgaggctcatcccctgctaattgtcttctccaaattatcctgttactgcatggctatgcattagctctttgtttgcctacaacacatatgtgacactgatcccaaggacaaaggaatcatgctgactttatttgcaggaagaccgt

SEQ ID NO: 347171 - DNA, 155 bp, Homo sapiens
agcaaaataataaataaatacataaaatagatttatcagtttatcaataatatagttttcttttctaggtgtaaatataggtaatgactgtcctttagtacattttctcatgatgctcctcttacttggtttggtacaatattaagtattgaaat

SEQ ID NO: 347172 - DNA, 2374 bp, Homo sapiens
cgccggcgcctcgggcggcttctcgccgctcccaggtctggctggctggaggagtctcagctctcagccgctcgcccgcccccgctccgggccctcccctagtcgccgctgtggggcagcgcctggcgggcggcccgcgggcgggtcgcctcccctcctgtagcccacacccttcttaaagcggcggcgggaagatgaggcttcgggagccgctcctgagcggcagcgccgcgatgccaggcgcgtccctacagcgggcctgccgcctgctcgtggccgtctgcgctctgcaccttggcgtcaccctcgtttactacctggctggccgcgacctgagccgcctgccccaactggtcggagtctccacaccgctgcagggcggctcgaacagtgccgccgccatcgggcagtcctccggggagctccggaccggaggggcccggccgccgcctcctctaggcgcctcctcccagccgcgcccgggtggcgactccagcccagtcgtggattctggccctggccccgctagcaacttgacctcggtcccagtgccccacaccaccgcactgtcgctgcccgcctgccctgaggagtccccgctgcttggtaaggactcgggtcggcgccagtcggaggattgggacccccccggatttccccgacaggtcccccagacattccctcaggctggctcttctacgacagccagcctccctcttctggatcagagttttaaatcccagacagaggcttgggactggatgggagagaaggtttgcgaggtgggtccctggggagtcctgttggaggcgtggggccgggaccgcacagggaagtcccgaggcccctctagccccagaaccagagaaggccttggagacttccctgctgtggcccgaggctcaggaagttttggagtttgggtctgcttagggcttcgagcagccttgcactgagaactctggtagggacctcgagtaatccactcccttttggggactgacgtgaggctcccggtggggaaggagactgacctctcggttcacgtgtcttgccatagagccactctcctgagtgggtttttctcctgatcgtttgggccaagtgacttctctctgaacctcatatttctcttctgggataataaatggtcaccctttcaaggggttgttttggaagatattgtgaacaatggtaaataagggcttaattaatgagggtaagccctcagtaaattgtcactgtgtgttcatttcttcctctgtgtggatcgtgaccgagagcccttccccctagcctcctcctggtatgggtacccaaaacctaggtgagcagggatctctcccaggggcagagagcttgtgtactctgggtgttagagggctaaaatataaccagtcaacaccacgttgcccatttctggtacttccggtagcagcctgagtctcaattatcttgcccagatgatctgaactctgacctctagcctgtttcagcataggcagagagcttgagtaggtgagtttgcattcctcatagcagctggctgagcctagtctggacttctctttgacctgtaacctacaggcccacaggcccaaggcaaccacaggttgcttccagggttaccacacaggtggtttctcatttctaatgctaggttttagataattgttgtaagtgaggggccctggcaggcaggatgacatcctgccaataggagttttctgtcactttcccacagagccctggctactacatactcttgctcaatttcgccagtaattgcgtcaatgtgttcatatcaagtttgggaagaacatcttggaattggtcagacgtgaactgtggtaataatgggggcttgtttttttaagcagataattaaattcctttgcatttgatgattattctgggaagcagactagtcccataaaatgaaatggactctgccttgctgctaagtgtctgacttgagacatgctatcgagtttctcaaaatctcttccttgtgtaaaatgtggttgtcgatgattaccttacaggggttttttttaagactaaatgagatcgtgtacattaaatacaggcactcaggctgggcatggtcgctcacgcctgtaatcctagcactttgggaggctgaggggagtggatcacttgaggttaggagtttgagaccagcctggccaatatggtgaaacaccatcccatctctacaaaaatacaaaaaagttagccaggggtggtggcatcgcagctactcaggaggccgaggcaggagaattgcttgaacctgggaggcagaggttgcagtgagtcaagattgtgccagtacactccagcctgggcgacgaagcaagactgtctaaaa

SEQ ID NO: 347173 - DNA, 4232 bp, Homo sapiens
cgccggcgcctcgggcggcttctcgccgctcccaggtctggctggctggaggagtctcagctctcagccgctcgcccgcccccgctccgggccctcccctagtcgccgctgtggggcagcgcctggcgggcggcccgcgggcgggtcgcctcccctcctgtagcccacacccttcttaaagcggcggcgggaagatgaggcttcgggagccgctcctgagcggcagcgccgcgatgccaggcgcgtccctacagcgggcctgccgcctgctcgtggccgtctgcgctctgcaccttggcgtcaccctcgtttactacctggctggccgcgacctgagccgcctgccccaactggtcggagtctccacaccgctgcagggcggctcgaacagtgccgccgccatcgggcagtcctccggggagctccggaccggaggggcccggccgccgcctcctctaggcgcctcctcccagccgcgcccgggtggcgactccagcccagtcgtggattctggccctggccccgctagcaacttgacctcggtcccagtgccccacaccaccgcactgtcgctgcccgcctgccctgaggagtccccgctgcttgtgggccccatgctgattgagtttaacatgcctgtggacctggagctcgtggcaaagcagaacccaaatgtgaagatgggcggccgctatgcccccagggactgcgtctctcctcacaaggtggccatcatcattccattccgcaaccggcaggagcacctcaagtactggctatattatttgcacccagtcctgcagcgccagcagctggactatggcatctatgttatcaaccaggcgggagacactatattcaatcgtgctaagctcctcaatgttggctttcaagaagccttgaaggactatgactacacctgctttgtgtttagtgacgtggacctcattccaatgaatgaccataatgcgtacaggtgtttttcacagccacggcacatttccgttgcaatggataagtttggattcagcctaccttatgttcagtattttggaggtgtctctgctctaagtaaacaacagtttctaaccatcaatggatttcctaataattattggggctggggaggagaagatgatgacatttttaacagattagtttttagaggcatgtctatatctcgcccaaatgctgtggtcgggaggtgtcgcatgatccgccactcaagagacaagaaaaatgaacccaatcctcagaggtttgaccgaattgcacacacaaaggagacaatgctctctgatggtttgaactcactcacctaccaggtgctggatgtacagagatacccattgtatacccaaatcacagtggacatcgggacaccgagctagcgttttggtacacggataagagacctgaaattagccagggacctctgctgtgtgtctctgccaatctgctgggctggtccctctcatttttaccagtctgagtgacaggtccccttcgctcatcattcagatggctttccagatgaccaggacgagtgggatattttgcccccaacttggctcggcatgtgaattcttagctctgcaaggtgtttatgcctttgcgggtttcttgatgtgttcgcagtgtcacccaagagtcagaactgtacacatcccaaaatttggtggccgtggaacacattcccggtgatagaattgctaaattgttgtgaaataggttagaatttttctttaaattatggttttcttattcgtgaaaattcggagagtgctgctaaaattggattggtgtgatctttttggtagttgtaatttaacagaaaaacacaaaatttcaaccattcttaatgttacgtcctccccccacccccttctttcagtggtatgcaaccactgcaatcactgtgcatatgtcttttcttagcaaaaggattttaaaacttgagccctggaccttttgtcctatgtgtgtggattccagggcaactctagcatcagagcaaaagccttgggtttctcgcattcagtggcctatctccagattgtctgatttctgaatgtaaagttgttgtgtttttttttaaatagtagtttgtagtattttaaagaaagaacagatcgagttctaattatgatctagcttgattttgtgttgatccaaatttgcatagctgtttaatgttaagtcatgacaatttatttttcttggcatgctatgtaaacttgaatttcctatgtatttttattgtggtgttttaaatatggggaggggtattgagcattttttagggagaaaaataaatatatgctgtagtggccacaaataggcctatgatttagctggcaggccaggttttctcaagagcaaaatcaccctctggccccttggcaggtaaggcctcccggtcagcattatcctgccagacctcggggaggatacctgggagacagaagcctctgcacctactgtgcagaactctccacttccccaaccctccccaggtgggcagggcggagggagcctcagcctccttagactgacccctcaggcccctaggctggggggttgtaaataacagcagtcaggttgtttaccagccctttgcacctccccaggcagagggagcctctgttctggtgggggccacctccctcagaggctctgctagccacactccgtggcccaccctttgttaccagttcttcctccttcctcttttcccctgcctttctcattccttccttcgtctccctttttgttcctttgcctcttgcctgtcccctaaaacttgactgtggcactcagggtcaaacagactatccattccccagcatgaatgtgccttttaattagtgatctagaaagaagttcagccgaacccacaccccaactccctcccaagaacttcggtgcctaaagcctcctgttccacctcaggttttcacaggtgctcccaccccagttgaggctcccacccacagggctgtctgtcacaaacccacctctgttgggagctattgagccacctgggatgagatgacacaaggcactcctaccactgagcgcctttgccaggtccagcctgggctcaggttccaagactcagctgcctaatcccagggttgagccttgtgctcgtggcggaccccaaaccactgccctcctgggtaccagccctcagtgtggaggctgagctggtgcctggccccagtcttatctgtgcctttactgctttgcgcatctcagatgctaacttggttctttttccagaagcctttgtattggttaaaaattattttccattgcagaagcagctggactatgcaaaaagtatttctctgtcagttccccactctataccaaggatattattaaaactagaaatgactgcattgagagggagttgtgggaaataagaagaatgaaagcctctctttctgtccgcagatcctgacttttccaaagtgccttaaaagaaatcagacaaatgccctgagtggtaacttctgtgttattttactcttaaaaccaaactctaccttttcttgttgttttttttttttttttttttttttttggttaccttctcattcatgtcaagtatgtggttcattcttagaaccaagggaaatactgctccccccatttgctgacgtagtgctctcatgggctcacctgggcccaaggcacagccagggcacagttaggcctggatgtttgcctggtccgtgagatgccgcgggtcctgtttccttactggggatttcagggctgggggttcagggagcatttccttttcctgggagttatgaccgcgaagttgtcatgtgccgtgcccttttctgtttctgtgtatcctattgctggtgactctgtgtgaactggcctttgggaaagatcagagagggcagaggtggcacaggacagtaaaggagatgctgtgctggccttcagcctggacagggtctctgctgactgccaggggcgggggctctgcatagccaggatgacggctttcatgtcccagagacctgttgtgctgtgtattttgatttcctgtgtatgcaaatgtgtgtatttaccattgtgtagggggctgtgtctgatcttggtgttcaaaacagaactgtatttttgcctttaaaattaaataatataacgtgaataaatgaccctatctttgtaaaaaaaaaaaaaaaaaaaaaaaaaaaaaaaaa

SEQ ID NO: 347174 - DNA, 3737 bp, Homo sapiens
gggaagcacgcaaagtcttctttcaaacaattcttgctgcaaatcaaagagttaagtaatccaattgacttagactcggtcccagtgccccacaccaccgcactgtcgctgcccgcctgccctgaggagtccccgctgcttgtgggccccatgctgattgagtttaacatgcctgtggacctggagctcgtggcaaagcagaacccaaatgtgaagatgggcggccgctatgcccccagggactgcgtctctcctcacaaggtggccatcatcattccattccgcaaccggcaggagcacctcaagtactggctatattatttgcacccagtcctgcagcgccagcagctggactatggcatctatgttatcaaccaggcgggagacactatattcaatcgtgctaagctcctcaatgttggctttcaagaagccttgaaggactatgactacacctgctttgtgtttagtgacgtggacctcattccaatgaatgaccataatgcgtacaggtgtttttcacagccacggcacatttccgttgcaatggataagtttggattcagcctaccttatgttcagtattttggaggtgtctctgctctaagtaaacaacagtttctaaccatcaatggatttcctaataattattggggctggggaggagaagatgatgacatttttaacagattagtttttagaggcatgtctatatctcgcccaaatgctgtggtcgggaggtgtcgcatgatccgccactcaagagacaagaaaaatgaacccaatcctcagaggtttgaccgaattgcacacacaaaggagacaatgctctctgatggtttgaactcactcacctaccaggtgctggatgtacagagatacccattgtatacccaaatcacagtggacatcgggacaccgagctagcgttttggtacacggataagagacctgaaattagccagggacctctgctgtgtgtctctgccaatctgctgggctggtccctctcatttttaccagtctgagtgacaggtccccttcgctcatcattcagatggctttccagatgaccaggacgagtgggatattttgcccccaacttggctcggcatgtgaattcttagctctgcaaggtgtttatgcctttgcgggtttcttgatgtgttcgcagtgtcacccaagagtcagaactgtacacatcccaaaatttggtggccgtggaacacattcccggtgatagaattgctaaattgttgtgaaataggttagaatttttctttaaattatggttttcttattcgtgaaaattcggagagtgctgctaaaattggattggtgtgatctttttggtagttgtaatttaacagaaaaacacaaaatttcaaccattcttaatgttacgtcctccccccacccccttctttcagtggtatgcaaccactgcaatcactgtgcatatgtcttttcttagcaaaaggattttaaaacttgagccctggaccttttgtcctatgtgtgtggattccagggcaactctagcatcagagcaaaagccttgggtttctcgcattcagtggcctatctccagattgtctgatttctgaatgtaaagttgttgtgtttttttttaaatagtagtttgtagtattttaaagaaagaacagatcgagttctaattatgatctagcttgattttgtgttgatccaaatttgcatagctgtttaatgttaagtcatgacaatttatttttcttggcatgctatgtaaacttgaatttcctatgtatttttattgtggtgttttaaatatggggaggggtattgagcattttttagggagaaaaataaatatatgctgtagtggccacaaataggcctatgatttagctggcaggccaggttttctcaagagcaaaatcaccctctggccccttggcaggtaaggcctcccggtcagcattatcctgccagacctcggggaggatacctgggagacagaagcctctgcacctactgtgcagaactctccacttccccaaccctccccaggtgggcagggcggagggagcctcagcctccttagactgacccctcaggcccctaggctggggggttgtaaataacagcagtcaggttgtttaccagccctttgcacctccccaggcagagggagcctctgttctggtgggggccacctccctcagaggctctgctagccacactccgtggcccaccctttgttaccagttcttcctccttcctcttttcccctgcctttctcattccttccttcgtctccctttttgttcctttgcctcttgcctgtcccctaaaacttgactgtggcactcagggtcaaacagactatccattccccagcatgaatgtgccttttaattagtgatctagaaagaagttcagccgaacccacaccccaactccctcccaagaacttcggtgcctaaagcctcctgttccacctcaggttttcacaggtgctcccaccccagttgaggctcccacccacagggctgtctgtcacaaacccacctctgttgggagctattgagccacctgggatgagatgacacaaggcactcctaccactgagcgcctttgccaggtccagcctgggctcaggttccaagactcagctgcctaatcccagggttgagccttgtgctcgtggcggaccccaaaccactgccctcctgggtaccagccctcagtgtggaggctgagctggtgcctggccccagtcttatctgtgcctttactgctttgcgcatctcagatgctaacttggttctttttccagaagcctttgtattggttaaaaattattttccattgcagaagcagctggactatgcaaaaagtatttctctgtcagttccccactctataccaaggatattattaaaactagaaatgactgcattgagagggagttgtgggaaataagaagaatgaaagcctctctttctgtccgcagatcctgacttttccaaagtgccttaaaagaaatcagacaaatgccctgagtggtaacttctgtgttattttactcttaaaaccaaactctaccttttcttgttgttttttttttttttttttttttttttggttaccttctcattcatgtcaagtatgtggttcattcttagaaccaagggaaatactgctccccccatttgctgacgtagtgctctcatgggctcacctgggcccaaggcacagccagggcacagttaggcctggatgtttgcctggtccgtgagatgccgcgggtcctgtttccttactggggatttcagggctgggggttcagggagcatttccttttcctgggagttatgaccgcgaagttgtcatgtgccgtgcccttttctgtttctgtgtatcctattgctggtgactctgtgtgaactggcctttgggaaagatcagagagggcagaggtggcacaggacagtaaaggagatgctgtgctggccttcagcctggacagggtctctgctgactgccaggggcgggggctctgcatagccaggatgacggctttcatgtcccagagacctgttgtgctgtgtattttgatttcctgtgtatgcaaatgtgtgtatttaccattgtgtagggggctgtgtctgatcttggtgttcaaaacagaactgtatttttgcctttaaaattaaataatataacgtgaataaatgaccctatctttgtaa

SEQ ID NO: 347175 - DNA, 4178 bp, Homo sapiens
cgccggcgcctcgggcggcttctcgccgctcccaggtctggctggctggaggagtctcagctctcagccgctcgcccgcccccgctccgggccctcccctagtcgccgctgtggggcagcgcctggcgggcggcccgcgggcgggtcgcctcccctcctgtagcccacacccttcttaaagcggcggcgggaagatgaggcttcgggagccgctcctgagcggcagcgccgcgatgccaggcgcgtccctacagcgggcctgccgcctgctcgtggccgtctgcgctctgcaccttggcgtcaccctcgtttactacctggctggccgcgacctgagccgcctgccccaactggtcggagtctccacaccgctgcagggcggctcgaacagtgccgccgccatcgggcagtcctccggggagctccggaccggaggggcccggccgccgcctcctctaggcgcctcctcccagccgcgcccgggtggcgactccagcccagtcgtggattctggccctggccccgctagcaacttgacctcggtcccagtgccccacaccaccgcactgtcgctgcccgcctgccctgaggagtccccgctgcttgtgggccccatgctgattgagtttaacatgcctgtggacctggagctcgtggcaaagcagaacccaaatgtgaagatgggcggccgctatgcccccagggactgcgtctctcctcacaaggtggccatcatcattccattccgcaaccggcaggagcacctcaagtactggctatattatttgcacccagtcctgcagcgccagcagctggactatggcatctatgttatcaaccaggcgggagacactatattcaatcgtgctaagctcctcaatgttggctttcaagaagccttgaaggactatgactacacctgctttgtgtttagtgacgtggacctcattccaatgaatgaccataatgcgtacaggtgtttttcacagccacggcacatttccgttgcaatggataagtttggattcagcctaccttatgttcagtattttggaggtgtctctgctctaagtaaacaacagtttctaaccatcaatggatttcctaataattattggggctggggaggagaagatgatgacatttttaacagattagtttttagaggcatgtctatatctcgcccaaatgctgtggtcgggaggtgtcgcatgatccgccactcaagagacaagaaaaatgaacccaatcctcagaggtttgaccgaattgcacacacaaaggagacaatgctctctgatggtttgaactcactcacctaccaggtgctggatgtacagagatacccattgtatacccaaatcacagtggacatcgggacaccgagctagcgttttggtacacggataagagacctgaaattagccagggacctctgctgtgtgtctctgccaatctgctgggctggtccctctcatttttaccagtctgagtgacaggtccccttcgctcatcattcagatggctttccagatgaccaggacgagtgggatattttgcccccaacttggctcggcatgtgaattcttagctctgcaaggtgtttatgcctttgcgggtttcttgatgtgttcgcagtgtcacccaagagtcagaactgtacacatcccaaaatttggtggccgtggaacacattcccggtgatagaattgctaaattgttgtgaaataggttagaatttttctttaaattatggttttcttattcgtgaaaattcggagagtgctgctaaaattggattggtgtgatctttttggtagttgtaatttaacagaaaaacacaaaatttcaaccattcttaatgttacgtcctccccccacccccttctttcagtggtatgcaaccactgcaatcactgtgcatatgtcttttcttagcaaaaggattttaaaacttgagccctggaccttttgtcctatgtgtgtggattccagggcaactctagcatcagagcaaaagccttgggtttctcgcattcagtggcctatctccagattgtctgatttctgaatgtaaagttgttgtgtttttttttaaatagtagtttgtagtattttaaagaaagaacagatcgagttctaattatgatctagcttgattttgtgttgatccaaatttgcatagctgtttaatgttaagtcatgacaatttatttttcttggcatgctatgtaaacttgaatttcctatgtatttttattgtggtgttttaaatatggggaggggtattgagcattttttagggagaaaaataaatatatgctgtagtggccacaaataggcctatgatttagctggcaggccaggttttctcaagagcaaaatcaccctctggccccttggcaggtaaggcctcccggtcagcattatcctgccagacctcggggaggatacctgggagacagaagcctctgcacctactgtgcagaactctccacttccccaaccctccccaggtgggcagggcggagggagcctcagcctccttagactgacccctcaggcccctaggctggggggttgtaaataacagcagtcaggttgtttaccagccctttgcacctccccaggcagagggagcctctgttctggtgggggccacctccctcagaggctctgctagccacactccgtggcccaccctttgttaccagttcttcctccttcctcttttcccctgcctttctcattccttccttcgtctccctttttgttcctttgcctcttgcctgtcccctaaaacttgactgtggcactcagggtcaaacagactatccattccccagcatgaatgtgccttttaattagtgatctagaaagaagttcagccgaacccacaccccaactccctcccaagaacttcggtgcctaaagcctcctgttccacctcaggttttcacaggtgctcccaccccagttgaggctcccacccacagggctgtctgtcacaaacccacctctgttgggagctattgagccacctgggatgagatgacacaaggcactcctaccactgagcgcctttgccaggtccagcctgggctcaggttccaagactcagctgcctaatcccagggttgagccttgtgctcgtggcggaccccaaaccactgccctcctgggtaccagccctcagtgtggaggctgagctggtgcctggccccagtcttatctgtgcctttactgctttgcgcatctcagatgctaacttggttctttttccagaagcctttgtattggttaaaaattattttccattgcagaagcagctggactatgcaaaaagtatttctctgtcagttccccactctataccaaggatattattaaaactagaaatgactgcattgagagggagttgtgggaaataagaagaatgaaagcctctctttctgtccgcagatcctgacttttccaaagtgccttaaaagaaatcagacaaatgccctgagtggtaacttctgtgttattttactcttaaaaccaaactctaccttttcttgttgttttttttttttttttttttttttttggttaccttctcattcatgtcaagtatgtggttcattcttagaaccaagggaaatactgctccccccatttgctgacgtagtgctctcatgggctcacctgggcccaaggcacagccagggcacagttaggcctggatgtttgcctggtccgtgagatgccgcgggtcctgtttccttactggggatttcagggctgggggttcagggagcatttccttttcctgggagttatgaccgcgaagttgtcatgtgccgtgcccttttctgtttctgtgtatcctattgctggtgactctgtgtgaactggcctttgggaaagatcagagagggcagaggtggcacaggacagtaaaggagatgctgtgctggccttgatgacggctttcatgtcccagagacctgttgtgctgtgtattttgatttcctgtgtatgcaaatgtgtgtatttaccattgtgtagggggctgtgtctgatcttggtgttcaaaacagaactgtatttttgcctttaaaattaaataatataacgtgaataaatgaccctatctttgtaaaaaaaaaaaaaaaaaaaaaaaaaaaaaaaaa

SEQ ID NO: 347176 - DNA, 3122 bp, Homo sapiens
cgccggcgcctcgggcggcttctcgccgctcccaggtctggctggctggaggagtctcagctctcagccgctcgcccgcccccgctccgggccctcccctagtcgccgctgtggggcagcgcctggcgggcggcccgcgggcgggtcgcctcccctcctgtagcccacacccttcttaaagcggcggcgggaagatgaggcttcgggagccgctcctgagcggcagcgccgcgatgccaggcgcgtccctacagcgggcctgccgcctgctcgtggccgtctgcgctctgcaccttggcgtcaccctcgtttactacctggctggccgcgacctgagccgcctgccccaactggtcggagtctccacaccgctgcagggcggctcgaacagtgccgccgccatcgggcagtcctccggggagctccggaccggaggggcccggccgccgcctcctctaggcgcctcctcccagccgcgcccgggtggcgactccagcccagtcgtggattctggccctggccccgctagcaacttgacctcggtcccagtgccccacaccaccgcactgtcgctgcccgcctgccctgaggagtccccgctgcttgtgggccccatgctgattgagtttaacatgcctgtggacctggagctcgtggcaaagcagaacccaaatgtgaagatgggcggccgctatgcccccagggactgcgtctctcctcacaaggtggccatcatcattccattccgcaaccggcaggagcacctcaagtactggctatattatttgcacccagtcctgcagcgccagcagctggactatggcatctatgttatcaaccaggcgggagacactatattcaatcgtgctaagctcctcaatgttggctttcaagaagccttgaaggactatgactacacctgctttgtgtttagtgacgtggacctcattccaatgaatgaccataatgcgtacaggtgtttttcacagccacggcacatttccgttgcaatggataagtttggattcagcctaccttatgttcagtattttggaggtgtctctgctctaagtaaacaacagtttctaaccatcaatggatttcctaataattattggggctggggaggagaagatgatgacatttttaacagattagtttttagaggcatgtctatatctcgcccaaatgctgtggtcgggaggtgtcgcatgatccgccactcaagagacaagaaaaatgaacccaatcctcagaggtttgaccgaattgcacacacaaaggagacaatgctctctgatggtttgaactcactcacctaccaggtgctggatgtacagagatacccattgtatacccaaatcacagtggacatcgggacaccgagctagcgttttggtacacggataagagacctgaaattagccagggacctctgctgtgtgtctctgccaatctgctgggctggtccctctcatttttaccagtctgagtgacaggtccccttcgctcatcattcagatggctttccagatgaccaggacgagtgggatattttgcccccaacttggctcggcatgtgaattcttagctctgcaaggtgtttatgcctttgcgggtttcttgatgtgttcgcagtgtcacccaagagtcagaactgtacacatcccaaaatttggtggccgtggaacacattcccggtgatagaattgctaaattgttgtgaaataggttagaatttttctttaaattatggttttcttattcgtgaaaattcggagagtgctgctaaaattggattggtgtgatctttttggtagttgtaatttaacagaaaaacacaaaatttcaaccattcttaatgttacgtcctccccccacccccttctttcagtggtatgcaaccactgcaatcactgtgcatatgtcttttcttagcaaaaggattttaaaacttgagccctggaccttttgtcctatgtgtgtggattccagggcaactctagcatcagagcaaaagccttgggtttctcgcattcagtggcctatctccagattgtctgatttctgaatgtaaagttgttgtgtttttttttaaatagtagtttgtagtattttaaagaaagaacagatcgagttctaattatgatctagcttgattttgtgttgatccaaatttgcatagctgtttaatgttaagtcatgacaatttatttttcttggcatgctatgtaaacttgaatttcctatgtatttttattgtggtgttttaaatatggggaggggtattgagcattttttagggagaaaaataaatatatgctgtagtggccacaaataggcctatgatttagctggcaggccaggttttctcaagagcaaaatcaccctctggccccttggcaggtaaggcctcccggtcagcattatcctgccagacctcggggaggatacctgggagacagaagcctctgcacctactgtgcagaactctccacttccccaaccctccccaggtgggcagggcggagggagcctcagcctccttagactgacccctcaggcccctaggctggggggttgtaaataacagcagtcaggttgtttaccagccctttgcacctccccaggcagagggagcctctgttctggtgggggccacctccctcagaggctctgctagccacactccgtggcccaccctttgttaccagttcttcctccttcctcttttcccctgcctttctcattccttccttcgtctccctttttgttcctttgcctcttgcctgtcccctaaaacttgactgtggcactcagggtcaaacagactatccattccccagcatgaatgtgccttttaattagtgatctagaaagaagttcagccgaacccacaccccaactccctcccaagagcacccactcctctctgttcaggctgcgcctccaacctgtagcacagcctgacactcctgcgacaccccacaatgccacctctcaggttgcagacgtttctatctacctgaccgcacgctctgccatcaggccatttctcatttgtctatatatctcaacgcactccacactgtgatccacacacaacaccagcacgaacaacc

SEQ ID NO: 347177 - DNA, 3890 bp, Homo sapiens
cgccggcgcctcgggcggcttctcgccgctcccaggtctggctggctggaggagtctcagctctcagccgctcgcccgcccccgctccgggccctcccctagtcgccgctgtggggcagcgcctggcgggcggcccgcgggcgggtcgcctcccctcctgtagcccacacccttcttaaagcggcggcgggaagatgaggcttcgggagccgctcctgagcggcagcgccgcgatgccaggcgcgtccctacagcgggcctgccgcctgctcgtggccgtctgcgctctgcaccttggcgtcaccctcgtttactacctggctggccgcgacctgagccgcctgccccaactggtcggagtctccacaccgctgcagggcggctcgaacagtgccgccgccatcgggcagtcctccggggagctccggaccggaggggcccggccgccgcctcctctaggcgcctcctcccagccgcgcccgggtggcgactccagcccagtcgtggattctggccctggccccgctagcaacttgacctcggtcccagtgccccacaccaccgcactgtcgctgcccgcctgccctgaggagtccccgctgcttgtgggccccatgctgattgagtttaacatgcctgtggacctggagctcgtggcaaagcagaacccaaatgtgaagatgggcggccgctatgcccccagggactgcgtctctcctcacaaggtggccatcatcattccattccgcaaccggcaggagcacctcaagtactggctatattatttgcacccagtcctgcagcgccagcagctggactatggcatctatgttatcaaccagattagtttttagaggcatgtctatatctcgcccaaatgctgtggtcgggaggtgtcgcatgatccgccactcaagagacaagaaaaatgaacccaatcctcagaggtttgaccgaattgcacacacaaaggagacaatgctctctgatggtttgaactcactcacctaccaggtgctggatgtacagagatacccattgtatacccaaatcacagtggacatcgggacaccgagctagcgttttggtacacggataagagacctgaaattagccagggacctctgctgtgtgtctctgccaatctgctgggctggtccctctcatttttaccagtctgagtgacaggtccccttcgctcatcattcagatggctttccagatgaccaggacgagtgggatattttgcccccaacttggctcggcatgtgaattcttagctctgcaaggtgtttatgcctttgcgggtttcttgatgtgttcgcagtgtcacccaagagtcagaactgtacacatcccaaaatttggtggccgtggaacacattcccggtgatagaattgctaaattgttgtgaaataggttagaatttttctttaaattatggttttcttattcgtgaaaattcggagagtgctgctaaaattggattggtgtgatctttttggtagttgtaatttaacagaaaaacacaaaatttcaaccattcttaatgttacgtcctccccccacccccttctttcagtggtatgcaaccactgcaatcactgtgcatatgtcttttcttagcaaaaggattttaaaacttgagccctggaccttttgtcctatgtgtgtggattccagggcaactctagcatcagagcaaaagccttgggtttctcgcattcagtggcctatctccagattgtctgatttctgaatgtaaagttgttgtgtttttttttaaatagtagtttgtagtattttaaagaaagaacagatcgagttctaattatgatctagcttgattttgtgttgatccaaatttgcatagctgtttaatgttaagtcatgacaatttatttttcttggcatgctatgtaaacttgaatttcctatgtatttttattgtggtgttttaaatatggggaggggtattgagcattttttagggagaaaaataaatatatgctgtagtggccacaaataggcctatgatttagctggcaggccaggttttctcaagagcaaaatcaccctctggccccttggcaggtaaggcctcccggtcagcattatcctgccagacctcggggaggatacctgggagacagaagcctctgcacctactgtgcagaactctccacttccccaaccctccccaggtgggcagggcggagggagcctcagcctccttagactgacccctcaggcccctaggctggggggttgtaaataacagcagtcaggttgtttaccagccctttgcacctccccaggcagagggagcctctgttctggtgggggccacctccctcagaggctctgctagccacactccgtggcccaccctttgttaccagttcttcctccttcctcttttcccctgcctttctcattccttccttcgtctccctttttgttcctttgcctcttgcctgtcccctaaaacttgactgtggcactcagggtcaaacagactatccattccccagcatgaatgtgccttttaattagtgatctagaaagaagttcagccgaacccacaccccaactccctcccaagaacttcggtgcctaaagcctcctgttccacctcaggttttcacaggtgctcccaccccagttgaggctcccacccacagggctgtctgtcacaaacccacctctgttgggagctattgagccacctgggatgagatgacacaaggcactcctaccactgagcgcctttgccaggtccagcctgggctcaggttccaagactcagctgcctaatcccagggttgagccttgtgctcgtggcggaccccaaaccactgccctcctgggtaccagccctcagtgtggaggctgagctggtgcctggccccagtcttatctgtgcctttactgctttgcgcatctcagatgctaacttggttctttttccagaagcctttgtattggttaaaaattattttccattgcagaagcagctggactatgcaaaaagtatttctctgtcagttccccactctataccaaggatattattaaaactagaaatgactgcattgagagggagttgtgggaaataagaagaatgaaagcctctctttctgtccgcagatcctgacttttccaaagtgccttaaaagaaatcagacaaatgccctgagtggtaacttctgtgttattttactcttaaaaccaaactctaccttttcttgttgttttttttttttttttttttttttttggttaccttctcattcatgtcaagtatgtggttcattcttagaaccaagggaaatactgctccccccatttgctgacgtagtgctctcatgggctcacctgggcccaaggcacagccagggcacagttaggcctggatgtttgcctggtccgtgagatgccgcgggtcctgtttccttactggggatttcagggctgggggttcagggagcatttccttttcctgggagttatgaccgcgaagttgtcatgtgccgtgcccttttctgtttctgtgtatcctattgctggtgactctgtgtgaactggcctttgggaaagatcagagagggcagaggtggcacaggacagtaaaggagatgctgtgctggccttcagcctggacagggtctctgctgactgccaggggcgggggctctgcatagccaggatgacggctttcatgtcccagagacctgttgtgctgtgtattttgatttcctgtgtatgcaaatgtgtgtatttaccattgtgtagggggctgtgtctgatcttggtgttcaaaacagaactgtatttttgcctttaaaattaaataatataacgtgaataaatgaccctatctttgtaa

SEQ ID NO: 347178 - DNA, 2972 bp, Homo sapiens
tcaggatccccccttaatatttctggcacgtttgaccgaattgcacacacaaaggagacaatgctctctgatggtttgaactcactcacctaccaggtgctggatgtacagagatacccattgtatacccaaatcacagtggacatcgggacaccgagctagcgttttggtacacggataagagacctgaaattagccagggacctctgctgtgtgtctctgccaatctgctgggctggtccctctcatttttaccagtctgagtgacaggtccccttcgctcatcattcagatggctttccagatgaccaggacgagtgggatattttgcccccaacttggctcggcatgtgaattcttagctctgcaaggtgtttatgcctttgcgggtttcttgatgtgttcgcagtgtcacccaagagtcagaactgtacacatcccaaaatttggtggccgtggaacacattcccggtgatagaattgctaaattgttgtgaaataggttagaatttttctttaaattatggttttcttattcgtgaaaattcggagagtgctgctaaaattggattggtgtgatctttttggtagttgtaatttaacagaaaaacacaaaatttcaaccattcttaatgttacgtcctccccccacccccttctttcagtggtatgcaaccactgcaatcactgtgcatatgtcttttcttagcaaaaggattttaaaacttgagccctggaccttttgtcctatgtgtgtggattccagggcaactctagcatcagagcaaaagccttgggtttctcgcattcagtggcctatctccagattgtctgatttctgaatgtaaagttgttgtgtttttttttaaatagtagtttgtagtattttaaagaaagaacagatcgagttctaattatgatctagcttgattttgtgttgatccaaatttgcatagctgtttaatgttaagtcatgacaatttatttttcttggcatgctatgtaaacttgaatttcctatgtatttttattgtggtgttttaaatatggggaggggtattgagcattttttagggagaaaaataaatatatgctgtagtggccacaaataggcctatgatttagctggcaggccaggttttctcaagagcaaaatcaccctctggccccttggcaggtaaggcctcccggtcagcattatcctgccagacctcggggaggatacctgggagacagaagcctctgcacctactgtgcagaactctccacttccccaaccctccccaggtgggcagggcggagggagcctcagcctccttagactgacccctcaggcccctaggctggggggttgtaaataacagcagtcaggttgtttaccagccctttgcacctccccaggcagagggagcctctgttctggtgggggccacctccctcagaggctctgctagccacactccgtggcccaccctttgttaccagttcttcctccttcctcttttcccctgcctttctcattccttccttcgtctccctttttgttcctttgcctcttgcctgtcccctaaaacttgactgtggcactcagggtcaaacagactatccattccccagcatgaatgtgccttttaattagtgatctagaaagaagttcagccgaacccacaccccaactccctcccaagaacttcggtgcctaaagcctcctgttccacctcaggttttcacaggtgctcccaccccagttgaggctcccacccacagggctgtctgtcacaaacccacctctgttgggagctattgagccacctgggatgagatgacacaaggcactcctaccactgagcgcctttgccaggtccagcctgggctcaggttccaagactcagctgcctaatcccagggttgagccttgtgctcgtggcggaccccaaaccactgccctcctgggtaccagccctcagtgtggaggctgagctggtgcctggccccagtcttatctgtgcctttactgctttgcgcatctcagatgctaacttggttctttttccagaagcctttgtattggttaaaaattattttccattgcagaagcagctggactatgcaaaaagtatttctctgtcagttccccactctataccaaggatattattaaaactagaaatgactgcattgagagggagttgtgggaaataagaagaatgaaagcctctctttctgtccgcagatcctgacttttccaaagtgccttaaaagaaatcagacaaatgccctgagtggtaacttctgtgttattttactcttaaaaccaaactctaccttttcttgttgttttttttttttttttttttttttttggttaccttctcattcatgtcaagtatgtggttcattcttagaaccaagggaaatactgctccccccatttgctgacgtagtgctctcatgggctcacctgggcccaaggcacagccagggcacagttaggcctggatgtttgcctggtccgtgagatgccgcgggtcctgtttccttactggggatttcagggctgggggttcagggagcatttccttttcctgggagttatgaccgcgaagttgtcatgtgccgtgcccttttctgtttctgtgtatcctattgctggtgactctgtgtgaactggcctttgggaaagatcagagagggcagaggtggcacaggacagtaaaggagatgctgtgctggccttcagcctggacagggtctctgctgactgccaggggcgggggctctgcatagccaggatgacggctttcatgtcccagagacctgttgtgctgtgtattttgatttcctgtgtatgcaaatgtgtgtatttaccattgtgtagggggctgtgtctgatcttggtgttcaaaacagaactgtatttttgcctttaaaattaaataatataacgtgaataaatgaccctatctttgtaa

SEQ ID NO: 347179 - DNA, 514 bp, Homo sapiens
cggaatacaccgcgcaacctatgaaccttccctctacacttatcatcttcacgattctaattctactgactatcctagaaatcgctgtgccagcgagggctgggggttcagggagcatttccttttcctgggagttatgaccgcgaagttgtcatgtgccgtgcccttttctgtttctgtgtatcctattgctggtgactctgtgtgaactggcctttgggaaagatcagagagggcagaggtggcacaggacagtaaaggagatgctgtgctggccttcagcctggacagggtctctgctgactgccaggggcgggggctctgcatagccaggatgacggctttcatgtcccagagacctgttgtgctgtgtattttgatttcctgtgtatgcaaatgtgtgtatttaccattgtgtagggggctgtgtctgatcttggtgttcaaaacagaactgtatttttgcctttaaaattaaataatataacgtgaataaatgaccctatctttgtaa

SEQ ID NO: 347180 - DNA, 1108 bp, Homo sapiens
cgccggcgcctcgggcggcttctcgccgctcccaggtctggctggctggaggagtctcagctctcagccgctcgcccgcccccgctccgggccctcccctagtcgccgctgtggggcagcgcctggcgggcggcccgcgggcgggtcgcctcccctcctgtagcccacacccttcttaaagcggcggcgggaagatgaggcttcgggagccgctcctgagcggcagcgccgcgatgccaggcgcgtccctacagcgggcctgccgcctgctcgtggccgtctgcgctctgcaccttggcgtcaccctcgtttactacctggctggccgcgacctgagccgcctgccccaactggtcggagtctccacaccgctgcagggcggctcgaacagtgccgccgccatcgggcagtcctccggggagctccggaccggaggggcccggccgccgcctcctctaggcgcctcctcccagccgcgcccgggtggcgactccagcccagtcgtggattctggccctggccccgctagcaacttgacctcggtcccagtgccccacaccaccgcactgtcgctgcccgcctgccctgaggagtccccgctgcttgtgggccccatgctgattgagtttaacatgcctgtggacctggagctcgtggcaaagcagaacccaaatgtgaagatgggcggccgctatgcccccagggactgcgtctctcctcacaaggtggccatcatcattccattccgcaaccggcaggagcacctcaagtactggctatattatttgcacccagtcctgcagcgccagcagctggactatggcatctatgttatcaaccaggtgaggcctgggaaggtggaatgagagagggtgtgtgtgcatgcagatgtgtatcagatgtgtgtgtaatgagggcaggggaaggggagtgatttcacagacacctggcacttacagcgaggaaccagccccccagccaccaccagtgcagatgaggtaaacgccaaacagtgtgcttgcctattgctgtcaactctatagccaagggaaatgctggagtgttttcgttgttctgtttttgttttctggaagtagccttccagcaa

SEQ ID NO: 347181 - DNA, 990 bp, Homo sapiens
cgccggcgcctcgggcggcttctcgccgctcccaggtctggctggctggaggagtctcagctctcagccgctcgcccgcccccgctccgggccctcccctagtcgccgctgtggggcagcgcctggcgggcggcccgcgggcgggtcgcctcccctcctgtagcccacacccttcttaaagcggcggcgggaagatgaggcttcgggagccgctcctgagcggcagcgccgcgatgccaggcgcgtccctacagcgggcctgccgcctgctcgtggccgtctgcgctctgcaccttggcgtcaccctcgtttactacctggctggccgcgacctgagccgcctgccccaactggtcggagtctccacaccgctgcagggcggctcgaacagtgccgccgccatcgggcagtcctccggggagctccggaccggaggggcccggccgccgcctcctctaggcgcctcctcccagccgcgcccgggtggcgactccagcccagtcgtggattctggccctggccccgctagcaacttgacctcggtcccagtgccccacaccaccgcactgtcgctgcccgcctgccctgaggagtccccgctgcttgtgggccccatgctgattgagtttaacatgcctgtggacctggagctcgtggcaaagcagaacccaaatgtgaagatgggcggccgctatgcccccagggactgcgtctctcctcacaaggtggccatcatcattccattccgcaaccggcaggagcacctcaagtactggctatattatttgcacccagtcctgcagcgccagcagctggactatggcatctatgttatcaaccagtatgaaaaaataagaagactcctgtggtgaaggcttcgcctggtctgttctgctctggaggtggcagcgcatggtggttagtcccagcatcttcctggagatttgagcgtgagacgtgctggctgtgtgggctgtgccacctgaggag

SEQ ID NO: 347182 - DNA, 4201 bp, Homo sapiens
cgccggcgcctcgggcggcttctcgccgctcccaggtctggctggctggaggagtctcagctctcagccgctcgcccgcccccgctccgggccctcccctagtcgccgctgtggggcagcgcctggcgggcggcccgcgggcgggtcgcctcccctcctgtagcccacacccttcttaaagcggcggcgggaagatgaggcttcgggagccgctcctgagcggcagcgccgcgatgccaggcgcgtccctacagcgggcctgccgcctgctcgtggccgtctgcgctctgcaccttggcgtcaccctcgtttactacctggctggccgcgacctgagccgcctgccccaactggtcggagtctccacaccgctgcagggcggctcgaacagtgccgccgccatcgggcagtcctccggggagctccggaccggaggggcccggccgccgcctcctctaggcgcctcctcccagccgcgcccgggtggcgactccagcccagtcgtggattctggccctggccccgctagcaacttgacctcggtcccagtgccccacaccaccgcactgtcgctgcccgcctgccctgaggagtccccgctgcttgtgggccccatgctgattgagtttaacatgcctgtggacctggagctcgtggcaaagcagaacccaaatgtgaagatgggcggccgctatgcccccagggactgcgtctctcctcacaaggtggccatcatcattccattccgcaaccggcaggagcacctcaagtactggctatattatttgcacccagtcctgcagcgccagcagctggactatggcatctatgttatcaaccaggcgggagacactatattcaatcgtgctaagctcctcaatgttggctttcaagaagccttgaaggactatgactacacctgctttgtgtttagtgacgtggacctcattccaatgaatgaccataatgcgtacaggtgtttttcacagccacggcacatttccgttgcaatggataagtttggattcagcctaccttatgttcagtattttggaggtgtctctgctctaagtaaacaacagtttctaaccatcaatggatttcctaataattattggggctggggaggagaagatgatgacatttttaacagattagtttttagaggcatgtctatatctcgcccaaatgctgtggtcgggaggtgtcgcatgatccgccactcaagagacaagaaaaatgaacccaatcctcagaggtttgaccgaattgcacacacaaaggagacaatgctctctgatggtttgaactcactcacctaccaggtgctggatgtacagagatacccattgtatacccaaatcacagtggacatcgggacaccgagctagcgttttggtacacggataagagacctgaaattagccagggacctctgctgtgtgtctctgccaatctgctgggctggtccctctcatttttaccagtctgagtgacaggtccccttcgctcatcattcagatggctttccagatgaccaggacgagtgggatattttgcccccaacttggctcggcatgtgaattcttagctctgcaaggtgtttatgcctttgcgggtttcttgatgtgttcgcagtgtcacccaagagtcagaactgtacacatcccaaaatttggtggccgtggaacacattcccggtgatagaattgctaaattgttgtgaaataggttagaatttttctttaaattatggttttcttattcgtgaaaattcggagagtgctgctaaaattggattggtgtgatctttttggtagttgtaatttaacagaaaaacacaaaatttcaaccattcttaatgttacgtcctccccccacccccttctttcagtggtatgcaaccactgcaatcactgtgcatatgtcttttcttagcaaaaggattttaaaacttgagccctggaccttttgtcctatgtgtgtggattccagggcaactctagcatcagagcaaaagccttgggtttctcgcattcagtggcctatctccagattgtctgatttctgaatgtaaagttgttgtgtttttttttaaatagtagtttgtagtattttaaagaaagaacagatcgagttctaattatgatctagcttgattttgtgttgatccaaatttgcatagctgtttaatgttaagtcatgacaatttatttttcttggcatgctatgtaaacttgaatttcctatgtatttttattgtggtgttttaaatatggggaggggtattgagcattttttagggagaaaaataaatatatgctgtagtggccacaaataggcctatgatttagctggcaggccaggttttctcaagagcaaaatcaccctctggccccttggcaggtaaggcctcccggtcagcattatcctgccagacctcggggaggatacctgggagacagaagcctctgcacctactgtgcagaactctccacttccccaaccctccccaggtgggcagggcggagggagcctcagcctccttagactgacccctcaggcccctaggctggggggttgtaaataacagcagtcaggttgtttaccagccctttgcacctccccaggcagagggagcctctgttctggtgggggccacctccctcagaggctctgctagccacactccgtggcccaccctttgttaccagttcttcctccttcctcttttcccctgcctttctcattccttccttcgtctccctttttgttcctttgcctcttgcctgtcccctaaaacttgactgtggcactcagggtcaaacagactatccattccccagcatgaatgtgccttttaattagtgatctagaaagaagttcagccgaacccacaccccaactccctcccaagaacttcggtgcctaaagcctcctgttccacctcaggttttcacaggtgctcccaccccagttgaggctcccacccacagggctgtctgtcacaaacccacctctgttgggagctattgagccacctgggatgagatgacacaaggcactcctaccactgagcgcctttgccaggtccagcctgggctcaggttccaagactcagctgcctaatcccagggttgagccttgtgctcgtggcggaccccaaaccactgccctcctgggtaccagccctcagtgtggaggctgagctggtgcctggccccagtcttatctgtgcctttactgctttgcgcatctcagatgctaacttggttctttttccagaagcctttgtattggttaaaaattattttccattgcagaagcagctggactatgcaaaaagtatttctctgtcagttccccactctataccaaggatattattaaaactagaaatgactgcattgagagggagttgtgggaaataagaagaatgaaagcctctctttctgtccgcagatcctgacttttccaaagtgccttaaaagaaatcagacaaatgccctgagtggtaacttctgtgttattttactcttaaaaccaaactctaccttttcttgttgttttttttttttttttttttttttttggttaccttctcattcatgtcaagtatgtggttcattcttagaaccaagggaaatactgctccccccatttgctgacgtagtgctctcatgggctcacctgggcccaaggcacagccagggcacagttaggcctggatgtttgcctggtccgtgagatgccgcgggtcctgtttccttactggggatttcagggctgggggttcagggagcatttccttttcctgggagttatgaccgcgaagttgtcatgtgccgtgcccttttctgtttctgtgtatcctattgctggtgactctgtgtgaactggcctttgggaaagatcagagagggcagaggtggcacaggacagtaaaggagatgctgtgctggccttcagcctggacagggtctctgctgactgccaggggcgggggctctgcatagccaggatgacggctttcatgtcccagagacctgttgtgctgtgtattttgatttcctgtgtatgcaaatgtgtgtatttaccattgtgtagggggctgtgtctgatcttggtgttcaaaacagaactgtatttttgcctttaaaattaaataatataacgtgaataaatgaccctatctttgtaa

SEQ ID NO: 347183 - DNA, 4261 bp, Homo sapiens
cgccggcgcctcgggcggcttctcgccgctcccaggtctggctggctggaggagtctcagctctcagccgctcgcccgcccccgctccgggccctcccctagtcgccgctgtggggcagcgcctggcgggcggcccgcgggcgggtcgcctcccctcctgtagcccacacccttcttaaagcggcggcgggaagatgaggcttcgggagccgctcctgagcggcagcgccgcgatgccaggcgcgtccctacagcgggcctgccgcctgctcgtggccgtctgcgctctgcaccttggcgtcaccctcgtttactacctggctggccgcgacctgagccgcctgccccaactggtcggagtctccacaccgctgcagggcggctcgaacagtgccgccgccatcgggcagtcctccggggagctccggaccggaggggcccggccgccgcctcctctaggcgcctcctcccagccgcgcccgggtggcgactccagcccagtcgtggattctggccctggccccgctagcaacttgacctcggtcccagtgccccacaccaccgcactgtcgctgcccgcctgccctgaggagtccccgctgcttgtgggccccatgctgattgagtttaacatgcctgtggacctggagctcgtggcaaagcagaacccaaatgtgaagatgggcggccgctatgcccccagggactgcgtctctcctcacaaggtggccatcatcattccattccgcaaccggcaggagcacctcaagtactggctatattatttgcacccagtcctgcagcgccagcagctggactatggcatctatgttatcaaccaggcgggagacactatattcaatcgtgctaagctcctcaatgttggctttcaagaagccttgaaggactatgactacacctgctttgtgtttagtgacgtggacctcattccaatgaatgaccataatgcgtacaggtgtttttcacagccacggcacatttccgttgcaatggataagtttggattcagcctaccttatgttcagtattttggaggtgtctctgctctaagtaaacaacagtttctaaccatcaatggatttcctaataattattggggctggggaggagaagatgatgacatttttaacagattagtttttagaggcatgtctatatctcgcccaaatgctgtggtcgggaggtgtcgcatgatccgccactcaagagacaagaaaaatgaacccaatcctcagaggtttgaccgaattgcacacacaaaggagacaatgctctctgatggtttgaactcactcacctaccaggtgctggatgtacagagatacccattgtatacccaaatcacagtggacatcgggacaccgagctagcgttttggtacacggataagagacctgaaattagccagggacctctgctgtgtgtctctgccaatctgctgggctggtccctctcatttttaccagtctgagtgacaggtccccttcgctcatcattcagatggctttccagatgaccaggacgagtgggatattttgcccccaacttggctcggcatgtgaattcttagctctgcaaggtgtttatgcctttgcgggtttcttgatgtgttcgcagtgtcacccaagagtcagaactgtacacatcccaaaatttggtggccgtggaacacattcccggtgatagaattgctaaattgttgtgaaataggttagaatttttctttaaattatggttttcttattcgtgaaaattcggagagtgctgctaaaattggattggtgtgatctttttggtagttgtaatttaacagaaaaacacaaaatttcaaccattcttaatgttacgtcctccccccacccccttctttcagtggtatgcaaccactgcaatcactgtgcatatgtcttttcttagcaaaaggattttaaaacttgagccctggaccttttgtcctatgtgtgtggattccagggcaactctagcatcagagcaaaagccttgggtttctcgcattcagtggcctatctccagattgtctgatttctgaatgtaaagttgttgtgtttttttttaaatagtagtttgtagtattttaaagaaagaacagatcgagttctaattatgatctagcttgattttgtgttgatccaaatttgcatagctgtttaatgttaagtcatgacaatttatttttcttggcatgctatgtaaacttgaatttcctatgtatttttattgtggtgttttaaatatggggaggggtattgagcattttttagggagaaaaataaatatatgctgtagtggccacaaataggcctatgatttagctggcaggccaggttttctcaagagcaaaatcaccctctggccccttggcaggtaaggcctcccggtcagcattatcctgccagacctcggggaggatacctgggagacagaagcctctgcacctactgtgcagaactctccacttccccaaccctccccaggtgggcagggcggagggagcctcagcctccttagactgacccctcaggcccctaggctggggggttgtaaataacagcagtcaggttgtttaccagccctttgcacctccccaggcagagggagcctctgttctggtgggggccacctccctcagaggctctgctagccacactccgtggcccaccctttgttaccagttcttcctccttcctcttttcccctgcctttctcattccttccttcgtctccctttttgttcctttgcctcttgcctgtcccctaaaacttgactgtggcactcagggtcaaacagactatccattccccagcatgaatgtgccttttaattagtgatctagaaagaagttcagccgaacccacaccccaactccctcccaagaacttcggtgcctaaagcctcctgttccacctcaggttttcacaggtgctcccaccccagttgaggctcccacccacagggctgtctgtcacaaacccacctctgttgggagctattgagccacctgggatgagatgacacaaggcactcctaccactgagcgcctttgccaggtccagcctgggctcaggttccaagactcagctgcctaatcccagggttgagccttgtgctcgtggcggaccccaaaccactgccctcctgggtaccagccctcagtgtggaggctgagctggtgcctggccccagtcttatctgtgcctttactgctttgcgcatctcagatgctaacttggttctttttccagaagcctttgtattggttaaaaattattttccattgcagaagcagctggactatgcaaaaagtatttctctgtcagttccccactctataccaaggatattattaaaactagaaatgactgcattgagagggagttgtgggaaataagaagaatgaaagcctctctttctgtccgcagatcctgacttttccaaagtgccttaaaagaaatcagacaaatgccctgagtggtaacttctgtgttattttactcttaaaaccaaactctaccttttcttgttgttttttttttttttttttttttttttggttaccttctcattcatgtcaagtatgtggttcattcttagaaccaagggaaatactgctccccccatttgctgacgtagtgctctcatgggctcacctgggcccaaggcacagccagggcacagttaggcctggatgtttgcctggtccgtgagatgccgcgggtcctgtttccttactggggatttcagggctgggggttcagggagcatttccttttcctgggagttatgaccgcgaagttgtcatgtgccgtgcccttttctgtttctgtgtatcctattgctggtgactctgtgtgaactggcctttgggaaagatcagagagggcagaggtggcacaggacagtaaaggagatgctgtgctggccttcagcctggacagggtctctgctgactgccaggggcgggggctctgcatagccaggatgacggctttcatgtcccagagacctgttgtgctgtgtattttgatttcctgtgtatgcaaatgtgtgtatttaccattgtgtagggggctgtgtctgatcttggtgttcaaaacagaactgtatttttgcctttaaaattaaataatataacgtgaataaatgaccctatctttgtaaaaaaaaaaacaaaacaaaacaaaaaacacaaaaaaaaaaaaaaaaaaaaaaaaaaaaaaa

SEQ ID NO: 347184 - DNA, 4074 bp, Homo sapiens
cgccggcgcctcgggcggcttctcgccgctcccaggtctggctggctggaggagtctcagctctcagccgctcgcccgcccccgctccgggccctcccctagtcgccgctgtggggcagcgcctggcgggcggcccgcgggcgggtcgcctcccctcctgtagcccacacccttcttaaagcggcggcgggaagatgaggcttcgggagccgctcctgagcggcagcgccgcgatgccaggcgcgtccctacagcgggcctgccgcctgctcgtggccgtctgcgctctgcaccttggcgtcaccctcgtttactacctggctggccgcgacctgagccgcctgccccaactggtcggagtctccacaccgctgcagggcggctcgaacagtgccgccgccatcgggcagtcctccggggagctccggaccggaggggcccggccgccgcctcctctaggcgcctcctcccagccgcgcccgggtggcgactccagcccagtcgtggattctggccctggccccgctagcaacttgacctcggtcccagtgccccacaccaccgcactgtcgctgcccgcctgccctgaggagtccccgctgcttgtgggccccatgctgattgagtttaacatgcctgtggacctggagctcgtggcaaagcagaacccaaatgtgaagatgggcggccgctatgcccccagggactgcgtctctcctcacaaggtggccatcatcattccattccgcaaccggcaggagcacctcaagtactggctatattatttgcacccagtcctgcagcgccagcagctggactatggcatctatgttatcaaccaggcgggagacactatattcaatcgtgctaagctcctcaatgttggctttcaagaagccttgaaggactatgactacacctgctttgtgtttagtgacgtggacctcattccaatgaatgaccataatgcgtacaggtgtttttcacagccacggcacatttccgttgcaatggataagtttggattcagcctaccttatgttcagtattttggaggtgtctctgctctaagtaaacaacagtttctaaccatcaatggatttcctaataattattggggctggggaggagaagatgatgacatttttaacagattagtttttagaggcatgtctatatctcgcccaaatgctgtggtcgggaggtgtcgcatgatccgccactcaagagacaagaaaaatgaacccaatcctcagaggtttgaccgaattgcacacacaaaggagacaatgctctctgatggtttgaactcactcacctaccaggtgctggatgtacagagatacccattgtatacccaaatcacagtggacatcgggacaccgagctagcgttttggtacacggataagagacctgaaattagccagggacctctgctgtgtgtctctgccaatctgctgggctggtccctctcatttttaccagtctgagtgacaggtccccttcgctcatcattcagatggctttccagatgaccaggacgagtgggatattttgcccccaacttggctcggcatgtgaattcttagctctgcaaggtgtttatgcctttgcgggtttcttgatgtgttcgcagtgtcacccaagagtcagaactgtacacatcccaaaatttggtggccgtggaacacattcccggtgatagaattgctaaattgttgtgaaataggttagaatttttctttaaattatggttttcttattcgtgaaaattcggagagtgctgctaaaattggattggtgtgatctttttggtagttgtaatttaacagaaaaacacaaaatttcaaccattcttaatgttacgtcctccccccacccccttctttcagtggtatgcaaccactgcaatcactgtgcatatgtcttttcttagcaaaaggattttaaaacttgagccctggaccttttgtcctatgtgtgtggattccagggcaactctagcatcagagcaaaagccttgggtttctcgcattcagtggcctatctccagattgtctgatttctgaatgtaaagttgttgtgtttttttttaaatagtagtttgtagtattttaaagaaagaacagatcgagttctaattatgatctagcttgattttgtgttgatccaaatttgcatagctgtttaatgttaagtcatgacaatttatttttcttggcatgctatgtaaacttgaatttcctatgtatttttattgtggtgttttaaatatggggaggggtattgagcattttttagggagaaaaataaatatatgctgtagtggccacaaataggcctatgatttagctggcaggccaggttttctcaagagcaaaatcaccctctggccccttggcaggtaaggcctcccggtcagcattatcctgccagacctcggggaggatacctgggagacagaagcctctgcacctactgtgcagaactctccacttccccaaccctccccaggtgggcagggcggagggagcctcagcctccttagactgacccctcaggcccctaggctggggggttgtaaataacagcagtcaggttgtttaccagccctttgcacctccccaggcagagggagcctctgttctggtgggggccacctccctcagaggctctgctagccacactccgtggcccaccctttgttaccagttcttcctccttcctcttttcccctgcctttctcattccttccttcgtctccctttttgttcctttgcctcttgcctgtcccctaaaacttgactgtggcactcagggtcaaacagactatccattccccagcatgaatgtgccttttaattagtgatctagaaagaagttcagccgaacccacaccccaactccctcccaagaacttcggtgcctaaagcctcctgttccacctcaggttttcacaggtgctcccaccccagttgaggctcccacccacagggctgtctgtcacaaacccacctctgttgggagctattgagccacctgggatgagatgacacaaggcactcctaccactgagcgcctttgccaggtccagcctgggctcaggttccaagactcagctgcctaatcccagggttgagccttgtgctcgtggcggaccccaaaccactgccctcctgggtaccagccctcagtgtggaggctgagctggtgcctggccccagtcttatctgtgcctttactgctttgcgcatctcagatgctaacttggttctttttccagaagcctttgtattggttaaaaattattttccattgcagaagcagctggactatgcaaaaagtatttctctgtcagttccccactctataccaaggatattattaaaactagaaatgactgcattgagagggagttgtgggaaataagaagaatgaaagcctctctttctgtccgcagatcctgacttttccaaagtgccttaaaagaaatcagacaaatgccctgagtggtaacttctgtgttattttactcttaaaaccaaactctaccttttcttgttgttttttttttttttttttttttttttggttaccttctcattcatgtcaagtatgtggttcattcttagaaccaagggaaatactgctccccccatttgctgacgtagtgctctcatgggctcacctgggcccaaggcacagccagggcacagttaggcctggatgtttgcctggtccgtgagatgccgcgggtcctgtttccttactggggatttcagggctgggggttcagggagcatttccttttcctgggagttatgaccgcgaagttgtcatgtgccgtgcccttttctgtttctgtgtatcctattgctggtgactctgtgtgaactggcctttgggaaagatcagagagggcagaggtggcacaggacagtaaaggagatgctgtgctggccttcagcctggacagggtctctgctgactgccaggagagagagcattgcatagggagggccccctcctttcatgaaacagagctctgttgtgatgtgtattttgttttgtt

SEQ ID NO: 347185 - DNA, 4687 bp, Homo sapiens
  misc_feature (3706)..(3706): n is a, c, g, or t
  misc_feature (4062)..(4062): n is a, c, g, or t
cgccggcgcctcgggcggcttctcgccgctcccaggtctggctggctggaggagtctcagctctcagccgctcgcccgcccccgctccgggccctcccctagtcgccgctgtggggcagcgcctggcgggcggcccgcgggcgggtcgcctcccctcctgtagcccacacccttcttaaagcggcggcgggaagatgaggcttcgggagccgctcctgagcggcagcgccgcgatgccaggcgcgtccctacagcgggcctgccgcctgctcgtggccgtctgcgctctgcaccttggcgtcaccctcgtttactacctggctggccgcgacctgagccgcctgccccaactggtcggagtctccacaccgctgcagggcggctcgaacagtgccgccgccatcgggcagtcctccggggagctccggaccggaggggcccggccgccgcctcctctaggcgcctcctcccagccgcgcccgggtggcgactccagcccagtcgtggattctggccctggccccgctagcaacttgacctcggtcccagtgccccacaccaccgcactgtcgctgcccgcctgccctgaggagtccccgctgcttgtgggccccatgctgattgagtttaacatgcctgtggacctggagctcgtggcaaagcagaacccaaatgtgaagatgggcggccgctatgcccccagggactgcgtctctcctcacaaggtggccatcatcattccattccgcaaccggcaggagcacctcaagtactggctatattatttgcacccagtcctgcagcgccagcagctggactatggcatctatgttatcaaccaggcgggagacactatattcaatcgtgctaagctcctcaatgttggctttcaagaagccttgaaggactatgactacacctgctttgtgtttagtgacgtggacctcattccaatgaatgaccataatgcgtacaggtgtttttcacagccacggcacatttccgttgcaatggataagtttggattcagcctaccttatgttcagtattttggaggtgtctctgctctaagtaaacaacagtttctaaccatcaatggatttcctaataattattggggctggggaggagaagatgatgacatttttaacagattagtttttagaggcatgtctatatctcgcccaaatgctgtggtcgggaggtgtcgcatgatccgccactcaagagacaagaaaaatgaacccaatcctcagaggtttgaccgaattgcacacacaaaggagacaatgctctctgatggtttgaactcactcacctaccaggtgctggatgtacagagatacccattgtatacccaaatcacagtggacatcgggacaccgagctagcgttttggtacacggataagagacctgaaattagccagggacctctgctgtgtgtctctgccaatctgctgggctggtccctctcatttttaccagtctgagtgacaggtccccttcgctcatcattcagatggctttccagatgaccaggacgagtgggatattttgcccccaacttggctcggcatgtgaattcttagctctgcaaggtgtttatgcctttgcgggtttcttgatgtgttcgcagtgtcacccaagagtcagaactgtacacatcccaaaatttggtggccgtggaacacattcccggtgatagaattgctaaattgttgtgaaataggttagaatttttctttaaattatggttttcttattcgtgaaaattcggagagtgctgctaaaattggattggtgtgatctttttggtagttgtaatttaacagaaaaacacaaaatttcaaccattcttaatgttacgtcctccccccacccccttctttcagtggtatgcaaccactgcaatcactgtgcatatgtcttttcttagcaaaaggattttaaaacttgagccctggaccttttgtcctatgtgtgtggattccagggcaactctagcatcagagcaaaagccttgggtttctcgcattcagtggcctatctccagattgtctgatttctgaatgtaaagttgttgtgtttttttttaaatagtagtttgtagtattttaaagaaagaacagatcgagttctaattatgatctagcttgattttgtgttgatccaaatttgcatagctgtttaatgttaagtcatgacaatttatttttcttggcatgctatgtaaacttgaatttcctatgtatttttattgtggtgttttaaatatggggaggggtattgagcattttttagggagaaaaataaatatatgctgtagtggccacaaataggcctatgatttagctggcaggccaggttttctcaagagcaaaatcaccctctggccccttggcaggtaaggcctcccggtcagcattatcctgccagacctcggggaggatacctgggagacagaagcctctgcacctactgtgcagaactctccacttccccaaccctccccaggtgggcagggcggagggagcctcagcctccttagactgacccctcaggcccctaggctggggggttgtaaataacagcagtcaggttgtttaccagccctttgcacctccccaggcagagggagcctctgttctggtgggggccacctccctcagaggctctgctagccacactccgtggcccaccctttgttaccagttcttcctccttcctcttttcccctgcctttctcattccttccttcgtctccctttttgttcctttgcctcttgcctgtcccctaaaacttgactgtggcactcagggtcaaacagactatccattccccagcatgaatgtgccttttaattagtgatctagaaagaagttcagccgaacccacaccccaactccctcccaagaacttcggtgcctaaagcctcctgttccacctcaggttttcacaggtgctcccaccccagttgaggctcccacccacagggctgtctgtcacaaacccacctctgttgggagctattgagccacctgggatgagatgacacaaggcactcctaccactgagcgcctttgccaggtccagcctgggctcaggttccaagactcagctgcctaatcccagggttgagccttgtgctcgtggcggaccccaaaccactgccctcctgggtaccagccctcagtgtggaggctgagctggtgcctggccccagtcttatctgtgcctttactgctttgcgcatctcagatgctaacttggttctttttccagaagcctttgtattggttaaaaattattttccattgcagaagcagctggactatgcaaaaagtatttctctgtcagttccccactctataccaaggatattattaaaactagaaatgactgcattgagagggagttgtgggaaataagaagaatgaaagcctctctttctgtccgcagatcctgacttttccaaagtgccttaaaagaaatcagacaaatgccctgagtggtaacttctgtgttattttactcttaaaaccaaactctaccttttcttgttgttttttttttttttttttgggggtaacctttctcattctcagtgttcaagtttgtggggtctcatctctttagaaaccaggggaaaatacgggctctcccgcgaatttggcgtgacgttagtgtggcctcctcaaggggngcctccacgcgggggcccagagggccacgagccgaagggcacgagttagagggcgcgtggaagtgttttggccgggggctcgcgggaagaagtgccggagaggtctccggtgtttcccttaaagggggggggtaattccgaggggcccgtgggggctcacgaggggagagccattttctcccattttccgcggggggagtatttagtggacgcgggacaaaaagtttgtgtctcagtgtgtggccgcggggggccccttttcgcgtgggttcccgtggggtataactcccctgatgtggggcgggggatgacaccccttgtgtgtgtgtgaacacgcggtggggcccttgtggggngaaaaagagatacccgagagaagaaaggggccccagagagcgtgtggcggcccacggaggggacacaagagtctcaagagggagaagatatcggcgtgtggtcgacgtgtgcggcactttcttcagaaagcctggtgggaccaccggaggggggcctccctctggtgggtgttgaaactgtcggcccagaaggggggcgccggggggggggggactctctgtggcaataattaagcccccggagggagaattgagcagcggggctgcttctcacacgaagtgtgctcccccgagtagaaagacaccctcggtggtgtgtagggccgcccgagggaggaataaaatttaggaggagcaagtacttcccgtcgttggtgtttatgttggaccccaacatggtggtgttgggttgctcttttcttttcaccccaccatgctgtgtcgttgtttacgggcgggaggaagcaacgtagtgtgagcatatcggaagacactccctgggggggcgggcttcaccaaacaagagcagaagaacaccgcgtggggtctattttgtgggcggccgccttttataacacaatcgtttaaatatataattatattaagcaagcggcgggaaaaactt

SEQ ID NO: 347186 - DNA, 1497 bp, Homo sapiens
  misc_feature (27)..(27): n is a, c, g, or t
tcgctattcatcggcacctcgctattnatcggcacctcgctattcatcggcacctcgtctccctttttgttcctttgcctcttgcctgtcccctaaaacttgactgtggcactcagggtcaaacagactatccattccccagcatgaatgtgccttttaattagtgatctagaaagaagttcagccgaacccacaccccaactccctcccaagaacttcggtgcctaaagcctcctgttccacctcaggttttcacaggtgctcccaccccagttgaggctcccacccacagggctgtctgtcacaaacccacctctgttgggagctattgagccacctgggatgagatgacacaaggcactcctaccactgagcgcctttgccaggtccagcctgggctcaggttccaagactcagctgcctaatcccagggttgagccttgtgctcgtggcggaccccaaaccactgccctcctgggtaccagccctcagtgtggaggctgagctggtgcctggccccagtcttatctgtgcctttactgctttgcgcatctcagatgctaacttggttctttttccagaagcctttgtattggttaaaaattattttccattgcagaagcagctggactatgcaaaaagtatttctctgtcagttccccactctataccaaggatattattaaaactagaaatgactgcattgagagggagttgtgggaaataagaagaatgaaagcctctctttctgtccgcagatcctgacttttccaaagtgccttaaaagaaatcagacaaatgccctgagtggtaacttctgtgttattttactcttaaaaccaaactctaccttttcttgttgttttttttttttttttttttttttttggttaccttctcattcatgtcaagtatgtggttcattcttagaaccaagggaaatactgctccccccatttgctgacgtagtgctctcatgggctcacctgggcccaaggcacagccagggcacagttaggcctggatgtttgcctggtccgtgagatgccgcgggtcctgtttccttactggggatttcagggctgggggttcagggagcatttccttttcctgggagttatgaccgcgaagttgtcatgtgccgtgcccttttctgtttctgtgtatcctattgctggtgactctgtgtgaactggcctttgggaaagatcagagagggcagaggtggcacaggacagtaaaggagatgctgtgctggccttcagcctggacagggtctctgctgactgccaggggcgggggctctgcatagccaggatgacggctttcatgtcccagagacctgttgtgctgtgtattttgatttcctgtgtatgcaaatgtgtgtatttaccattgtgtagggggctgtgtctgatcttggtgttcaaaacagaactgtatttttgcctttaaaattaaataatataacgtgaataaatgaccctatctttgtaa

SEQ ID NO: 347187 - DNA, 3911 bp, Homo sapiens
gaattccgccccgggaagcgcagccatggctctgcggaggctgggggccgcgctgctgctgctgccgctgctcgccgccgtggaagaaacgctaatggactccactacagcgactgctgagctgggctggatggtgcatcctccatcagggtgggaagaggtgagtggctacgatgagaacatgaacacgatccgcacgtaccaggtgtgcaacgtgtttgagtcaagccagaacaactggctacggaccaagtttatccggcgccgtggcgcccaccgcatccacgtggagatgaagttttcggtgcgtgactgcagcagcatccccagcgtgcctggctcctgcaaggagaccttcaacctctattactatgaggctgactttgactcggccaccaagaccttccccaactggatggagaatccatgggtgaaggtggataccattgcagccgacgagagcttctcccaggtggacctgggtggccgcgtcatgaaaatcaacaccgaggtgcggagcttcggacctgtgtcccgcagcggcttctacctggccttccaggactatggcggctgcatgtccctcatcgccgtgcgtgtcttctaccgcaagtgcccccgcatcatccagaatggcgccatcttccaggaaaccctgtcgggggctgagagcacatcgctggtggctgcccggggcagctgcatcgccaatgcggaagaggtggatgtacccatcaagctctactgtaacggggacggcgagtggctggtgcccatcgggcgctgcatgtgcaaagcaggcttcgaggccgttgagaatggcaccgtctgccgaggttgtccatctgggactttcaaggccaaccaaggggatgaggcctgtacccactgtcccatcaacagccggaccacttctgaaggggccaccaactgtgtctgccgcaatggctactacagagcagacctggaccccctggacatgccctgcacaaccatcccctccgcgccccaggctgtgatttccagtgtcaatgagacctccctcatgctggagtggacccctccccgcgactccggaggccgagaggacctcgtctacaacatcatctgcaagagctgtggctcgggccggggtgcctgcacccgctgcggggacaatgtacagtacgcaccacgccagctaggcctgaccgagccacgcatttacatcagtgacctgctggcccacacccagtacaccttcgagatccaggctgtgaacggcgttactgaccagagccccttctcgcctcagttcgcctctgtgaacatcaccaccaaccaggcagctccatcggcagtgtccatcatgcatcaggtgagccgcaccgtggacagcattaccctgtcgtggtcccagccggaccagcccaatggcgtgatcctggactatgagctgcagtactatgagaaggagctcagtgagtacaacgccacagccataaaaagccccaccaacacggtcaccgtgcagggcctcaaagccggcgccatctatgtcttccaggtgcgggcacgcaccgtggcaggctacgggcgctacagcggcaagatgtacttccagaccatgacagaagccgagtaccagacaagcatccaggagaagttgccactcatcatcggctcctcggccgctggcctggtcttcctcattgctgtggttgtcatcgccatcgtgtgtaacagacgggggtttgagcgtgctgactcggagtacacggacaagctgcaacactacaccagtggccacatgaccccaggcatgaagatctacatcgatcctttcacctacgaggaccccaacgaggcagtgcgggagtttgccaaggaaattgacatctcctgtgtcaaaattgagcaggtgatcggagcaggggagtttggcgaggtctgcagtggccacctgaagctgccaggcaagagagagatctttgtggccatcaagacgctcaagtcgggctacacggagaagcagcgccgggacttcctgagcgaagcctccatcatgggccagttcgaccatcccaacgtcatccacctggagggtgtcgtgaccaagagcacacctgtgatgatcatcaccgagttcatggagaatggctccctggactcctttctccggcaaaacgatgggcagttcacagtcatccagctggtgggcatgcttcggggcatcgcagctggcatgaagtacctggcagacatgaactatgttcaccgtgacctggctgcccgcaacatcctcgtcaacagcaacctggtctgcaaggtgtcggactttgggctctcacgctttctagaggacgatacctcagaccccacctacaccagtgccctgggcggaaagatccccatccgctggacagccccggaagccatccagtaccggaagttcacctcggccagtgatgtgtggagctacggcattgtcatgtgggaggtgatgtcctatggggagcggccctactgggacatgaccaaccaggatgtaatcaatgccattgagcaggactatcggctgccaccgcccatggactgcccgagcgccctgcaccaactcatgctggactgttggcagaaggaccgcaaccaccggcccaagttcggccaaattgtcaacacgctagacaagatgatccgcaatcccaacagcctcaaagccatggcgcccctctcctctggcatcaacctgccgctgctggaccgcacgatccccgactacaccagctttaacacggtggacgagtggctggaggccatcaagatggggcagtacaaggagagcttcgccaatgccggcttcacctcctttgacgtcgtgtctcagatgatgatggaggacattctccgggttggggtcactttggctggccaccagaaaaaaatcctgaacagtatccaggtgatgcgggcgcagatgaaccagattcagtctgtggagggccagccactcgccaggaggccacgggccacgggaagaaccaagcggtgccagccacgagacgtcaccaagaaaacatgcaactcaaacgacggaaaaaaaaagggaatgggaaaaaagaaaacagatcctgggagggggcgggaaatacaaggaatattttttaaagaggattctcataaggaaagcaatgactgttcttgcgggggataaaaaagggcttgggagattcatgcgatgtgtccaatcggagacaaaagcagtttctctccaactccctctgggaaggtgacctggccagagccaagaaacactttcagaaaaacaaatgtgaaggggagagacaggggccgcccttggctcctgtccctgctgctcctctaggcctcactcaacaaccaagcgcctggaggacgggacagatggacagacagccaccctgagaacccctctgggaaaatctattcctgccaccactgggcaaacagaagaatttttctgtctttggagagtattttagaaactccaatgaaagacactgtttctcctgttggctcacagggctgaaaggggcttttgtcctcctgggtcagggagaacgcggggaccccagaaaggtcagccttcctgaggatgggcaacccccaggtctgcagctccaggtacatatcacgcgcacagcctggcagcctggccctcctggtgcccactcccgccagcccctgcctcgaggactgatactgcagtgactgccgtcagctccgactgccgctgagaagggttgatcctgcatctgggtttgtttacagcaattcctggactcgggggtattttggtcacagggtggttttggtttagggggtttgtttgttgggttgttttttgttttttggttttttttaatgacaatgaagtgacactttgacatttc

SEQ ID NO: 347188 - DNA, 4727 bp, Homo sapiens
  misc_feature (18)..(18): n is a, c, g, or t
taacacagttgtgaaaanagatggatgtgggttccagtcctagccctgcctgtgtgcacttatgcagaaacgctaatggactccactacagcgactgctgagctgggctggatggtgcatcctccatcagggtgggaagaggtgagtggctacgatgagaacatgaacacgatccgcacgtaccaggtgtgcaacgtgtttgagtcaagccagaacaactggctacggaccaagtttatccggcgccgtggcgcccaccgcatccacgtggagatgaagttttcggtgcgtgactgcagcagcatccccagcgtgcctggctcctgcaaggagaccttcaacctctattactatgaggctgactttgactcggccaccaagaccttccccaactggatggagaatccatgggtgaaggtggataccattgcagccgacgagagcttctcccaggtggacctgggtggccgcgtcatgaaaatcaacaccgaggtgcggagcttcggacctgtgtcccgcagcggcttctacctggccttccaggactatggcggctgcatgtccctcatcgccgtgcgtgtcttctaccgcaagtgcccccgcatcatccagaatggcgccatcttccaggaaaccctgtcgggggctgagagcacatcgctggtggctgcccggggcagctgcatcgccaatgcggaagaggtggatgtacccatcaagctctactgtaacggggacggcgagtggctggtgcccatcgggcgctgcatgtgcaaagcaggcttcgaggccgttgagaatggcaccgtctgccgaggttgtccatctgggactttcaaggccaaccaaggggatgaggcctgtacccactgtcccatcaacagccggaccacttctgaaggggccaccaactgtgtctgccgcaatggctactacagagcagacctggaccccctggacatgccctgcacaaccatcccctccgcgccccaggctgtgatttccagtgtcaatgagacctccctcatgctggagtggacccctccccgcgactccggaggccgagaggacctcgtctacaacatcatctgcaagagctgtggctcgggccggggtgcctgcacccgctgcggggacaatgtacagtacgcaccacgccagctaggcctgaccgagccacgcatttacatcagtgacctgctggcccacacccagtacaccttcgagatccaggctgtgaacggcgttactgaccagagccccttctcgcctcagttcgcctctgtgaacatcaccaccaaccaggcagctccatcggcagtgtccatcatgcatcaggtgagccgcaccgtggacagcattaccctgtcgtggtcccagccggaccagcccaatggcgtgatcctggactatgagctgcagtactatgagaaggagctcagtgagtacaacgccacagccataaaaagccccaccaacacggtcaccgtgcagggcctcaaagccggcgccatctatgtcttccaggtgcgggcacgcaccgtggcaggctacgggcgctacagcggcaagatgtacttccagaccatgacagaagccgagtaccagacaagcatccaggagaagttgccactcatcatcggctcctcggccgctggcctggtcttcctcattgctgtggttgtcatcgccatcgtgtgtaacagacgggggtttgagcgtgctgactcggagtacacggacaagctgcaacactacaccagtggccacatgaccccaggcatgaagatctacatcgatcctttcacctacgaggaccccaacgaggcagtgcgggagtttgccaaggaaattgacatctcctgtgtcaaaattgagcaggtgatcggagcaggggagtttggcgaggtctgcagtggccacctgaagctgccaggcaagagagagatctttgtggccatcaagacgctcaagtcgggctacacggagaagcagcgccgggacttcctgagcgaagcctccatcatgggccagttcgaccatcccaacgtcatccacctggagggtgtcgtgaccaagagcacacctgtgatgatcatcaccgagttcatggagaatggctccctggactcctttctccggcaaaacgatgggcagttcacagtcatccagctggtgggcatgcttcggggcatcgcagctggcatgaagtacctggcagacatgaactatgttcaccgtgacctggctgcccgcaacatcctcgtcaacagcaacctggtctgcaaggtgtcggactttgggctctcacgctttctagaggacgatacctcagaccccacctacaccagtgccctgggcggaaagatccccatccgctggacagccccggaagccatccagtaccggaagttcacctcggccagtgatgtgtggagctacggcattgtcatgtgggaggtgatgtcctatggggagcggccctactgggacatgaccaaccaggatgtaatcaatgccattgagcaggactatcggctgccaccgcccatggactgcccgagcgccctgcaccaactcatgctggactgttggcagaaggaccgcaaccaccggcccaagttcggccaaattgtcaacacgctagacaagatgatccgcaatcccaacagcctcaaagccatggcgcccctctcctctggcatcaacctgccgctgctggaccgcacgatccccgactacaccagctttaacacggtggacgagtggctggaggccatcaagatggggcagtacaaggagagcttcgccaatgccggcttcacctcctttgacgtcgtgtctcagatgatgatggaggacattctccgggttggggtcactttggctggccaccagaaaaaaatcctgaacagtatccaggtgatgcgggcgcagatgaaccagattcagtctgtggaggtttgacattcacctgcctcggctcacctcttcctccaagccccgccccctctgccccacgtgccggccctcctggtgctctatccactgcagggccagccactcgccaggaggccacgggccacgggaagaaccaagcggtgccagccacgagacgtcaccaagaaaacatgcaactcaaacgacggaaaaaaaaagggaatgggaaaaaagaaaacagatcctgggagggggcgggaaatacaaggaatattttttaaagaggattctcataaggaaagcaatgactgttcttgcgggggataaaaaagggcttgggagattcatgcgatgtgtccaatcggagacaaaagcagtttctctccaactccctctgggaaggtgacctggccagagccaagaaacactttcagaaaaacaaatgtgaaggggagagacaggggccgcccttggctcctgtccctgctgctcctctaggcctcactcaacaaccaagcgcctggaggacgggacagatggacagacagccaccctgagaacccctctgggaaaatctattcctgccaccactgggcaaacagaagaatttttctgtctttggagagtattttagaaactccaatgaaagacactgtttctcctgttggctcacagggctgaaaggggcttttgtcctcctgggtcagggagaacgcggggaccccagaaaggtcagccttcctgaggatgggcaacccccaggtctgcagctccaggtacatatcacgcgcacagcctggcagcctggccctcctggtgcccactcccgccagcccctgcctcgaggactgatactgcagtgactgccgtcagctccgactgccgctgagaagggttgatcctgcatctgggtttgtttacagcaattcctggactcgggggtattttggtcacagggtggttttggtttagggggtttgtttgttgggttgttttttgttttttggttttttttaatgacaatgaagtgacactttgacatttcctaccttttgaggacttgatccttctccaggaagaaggtgctttctgcttactgacttaggcaatacaccaagggcgagattttatatgcacatttctggatttttttatacggttttcattgacactcttccctcctcccacctgccaccaggcctcaccaaagcccactgccatggggccatctgggccattcagagactggagtgagatttgggtgtggagggggaggcgccaaggtggaggagcttcccactccaggactgttgatgaaagggacagattgaggaggaagtgggctctgaggctgcagggctggaagtccttgcccacttcccactctcctgccccaatctatctagtacttcccaggcaaataggcccctttgaggctcctgagtgccctcagatggtcaaaacccagttttccctctgggagcctaaaccaggctgcatcggaggccaggacccggatcattcactgtgataccctgccctccagagggtgcgctcagagacacgggcaagcatgcctcttcccttccctggagagaaagtgtgtgatttctctcccacctccttccccccaccagacctttgctgggcctaaaggtcttggccatggggacgccctcagtctagggatctggccacagactccctcctgtgaaccaacacagacacccaagcagagcaatcagttagtgaattgaatggaaataaacgctttagttataatatga

SEQ ID NO: 347189 - DNA, 2679 bp, Homo sapiens
  misc_feature (81)..(81): n is a, c, g, or t
cactcatatggcgttgacatccaagtatcactgaggttggacccagacaaccttagatattacgagttcatgagatgctcntgatccttttccgcaaaacgatgggcagttcacagtcatccagctggtgggcatgcttcggggcatcgcagctggcatgaagtacctggcagacatgaactatgttcaccgtgacctggctgcccgcaacatcctcgtcaacagcaacctggtctgcaaggtgtcggactttgggctctcacgctttctagaggacgatacctcagaccccacctacaccagtgccctgggcggaaagatccccatccgctggacagccccggaagccatccagtaccggaagttcacctcggccagtgatgtgtggagctacggcattgtcatgtgggaggtgatgtcctatggggagcggccctactgggacatgaccaaccaggatgtaatcaatgccattgagcaggactatcggctgccaccgcccatggactgcccgagcgccctgcaccaactcatgctggactgttggcagaaggaccgcaaccaccggcccaagttcggccaaattgtcaacacgctagacaagatgatccgcaatcccaacagcctcaaagccatggcgcccctctcctctggcatcaacctgccgctgctggaccgcacgatccccgactacaccagctttaacacggtggacgagtggctggaggccatcaagatggggcagtacaaggagagcttcgccaatgccggcttcacctcctttgacgtcgtgtctcagatgatgatggaggacattctccgggttggggtcactttggctggccaccagaaaaaaatcctgaacagtatccaggtgatgcgggcgcagatgaaccagattcagtctgtggaggtttgacattcacctgcctcggctcacctcttcctccaagccccgccccctctgccccacgtgccggccctcctggtgctctatccactgcagggccagccactcgccaggaggccacgggccacgggaagaaccaagcggtgccagccacgagacgtcaccaagaaaacatgcaactcaaacgacggaaaaaaaaagggaatgggaaaaaagaaaacagatcctgggagggggcgggaaatacaaggaatattttttaaagaggattctcataaggaaagcaatgactgttcttgcgggggataaaaaagggcttgggagattcatgcgatgtgtccaatcggagacaaaagcagtttctctccaactccctctgggaaggtgacctggccagagccaagaaacactttcagaaaaacaaatgtgaaggggagagacaggggccgcccttggctcctgtccctgctgctcctctaggcctcactcaacaaccaagcgcctggaggacgggacagatggacagacagccaccctgagaacccctctgggaaaatctattcctgccaccactgggcaaacagaagaatttttctgtctttggagagtattttagaaactccaatgaaagacactgtttctcctgttggctcacagggctgaaaggggcttttgtcctcctgggtcagggagaacgcggggaccccagaaaggtcagccttcctgaggatgggcaacccccaggtctgcagctccaggtacatatcacgcgcacagcctggcagcctggccctcctggtgcccactcccgccagcccctgcctcgaggactgatactgcagtgactgccgtcagctccgactgccgctgagaagggttgatcctgcatctgggtttgtttacagcaattcctggactcgggggtattttggtcacagggtggttttggtttagggggtttgtttgttgggttgttttttgttttttggttttttttaatgacaatgaagtgacactttgacatttcctaccttttgaggacttgatccttctccaggaagaaggtgctttctgcttactgacttaggcaatacaccaagggcgagattttatatgcacatttctggatttttttatacggttttcattgacactcttccctcctcccacctgccaccaggcctcaccaaagcccactgccatggggccatctgggccattcagagactggagtgagatttgggtgtggagggggaggcgccaaggtggaggagcttcccactccaggactgttgatgaaagggacagattgaggaggaagtgggctctgaggctgcagggctggaagtccttgcccacttcccactctcctgccccaatctatctagtacttcccaggcaaataggcccctttgaggctcctgagtgccctcagatggtcaaaacccagttttccctctgggagcctaaaccaggctgcatcggaggccaggacccggatcattcactgtgataccctgccctccagagggtgcgctcagagacacgggcaagcatgcctcttcccttccctggagagaaagtgtgtgatttctctcccacctccttccccccaccagacctttgctgggcctaaaggtcttggccatggggacgccctcagtctagggatctggccacagactccctcctgtgaaccaacacagacacccaagcagagcaatcagttagtgaattgaatggaaataaacgctttagttataatatga

SEQ ID NO: 347190 - DNA, 2493 bp, Homo sapiens
gcttctccccttgtacctctgcccatcgcgactgcaaatcaggaagggacgcagtgtgtttgaacctccctgattgatgagggtccaagttttctgtcagtagcatagagggctgagtggcctgggcggaaagatccccatccgctggacagccccggaagccatccagtaccggaagttcacctcggccagtgatgtgtggagctacggcattgtcatgtgggaggtgatgtcctatggggagcggccctactgggacatgaccaaccaggatgtaatcaatgccattgagcaggactatcggctgccaccgcccatggactgcccgagcgccctgcaccaactcatgctggactgttggcagaaggaccgcaaccaccggcccaagttcggccaaattgtcaacacgctagacaagatgatccgcaatcccaacagcctcaaagccatggcgcccctctcctctggcatcaacctgccgctgctggaccgcacgatccccgactacaccagctttaacacggtggacgagtggctggaggccatcaagatggggcagtacaaggagagcttcgccaatgccggcttcacctcctttgacgtcgtgtctcagatgatgatggaggacattctccgggttggggtcactttggctggccaccagaaaaaaatcctgaacagtatccaggtgatgcgggcgcagatgaaccagattcagtctgtggaggtttgacattcacctgcctcggctcacctcttcctccaagccccgccccctctgccccacgtgccggccctcctggtgctctatccactgcagggccagccactcgccaggaggccacgggccacgggaagaaccaagcggtgccagccacgagacgtcaccaagaaaacatgcaactcaaacgacggaaaaaaaaagggaatgggaaaaaagaaaacagatcctgggagggggcgggaaatacaaggaatattttttaaagaggattctcataaggaaagcaatgactgttcttgcgggggataaaaaagggcttgggagattcatgcgatgtgtccaatcggagacaaaagcagtttctctccaactccctctgggaaggtgacctggccagagccaagaaacactttcagaaaaacaaatgtgaaggggagagacaggggccgcccttggctcctgtccctgctgctcctctaggcctcactcaacaaccaagcgcctggaggacgggacagatggacagacagccaccctgagaacccctctgggaaaatctattcctgccaccactgggcaaacagaagaatttttctgtctttggagagtattttagaaactccaatgaaagacactgtttctcctgttggctcacagggctgaaaggggcttttgtcctcctgggtcagggagaacgcggggaccccagaaaggtcagccttcctgaggatgggcaacccccaggtctgcagctccaggtacatatcacgcgcacagcctggcagcctggccctcctggtgcccactcccgccagcccctgcctcgaggactgatactgcagtgactgccgtcagctccgactgccgctgagaagggttgatcctgcatctgggtttgtttacagcaattcctggactcgggggtattttggtcacagggtggttttggtttagggggtttgtttgttgggttgttttttgttttttggttttttttaatgacaatgaagtgacactttgacatttcctaccttttgaggacttgatccttctccaggaagaaggtgctttctgcttactgacttaggcaatacaccaagggcgagattttatatgcacatttctggatttttttatacggttttcattgacactcttccctcctcccacctgccaccaggcctcaccaaagcccactgccatggggccatctgggccattcagagactggagtgagatttgggtgtggagggggaggcgccaaggtggaggagcttcccactccaggactgttgatgaaagggacagattgaggaggaagtgggctctgaggctgcagggctggaagtccttgcccacttcccactctcctgccccaatctatctagtacttcccaggcaaataggcccctttgaggctcctgagtgccctcagatggtcaaaacccagttttccctctgggagcctaaaccaggctgcatcggaggccaggacccggatcattcactgtgataccctgccctccagagggtgcgctcagagacacgggcaagcatgcctcttcccttccctggagagaaagtgtgtgatttctctcccacctccttccccccaccagacctttgctgggcctaaaggtcttggccatggggacgccctcagtctagggatctggccacagactccctcctgtgaaccaacacagacacccaagcagagcaatcagttagtgaattgaatggaaataaacgctttagttataatatga

SEQ ID NO: 347191 - DNA, 1810 bp, Homo sapiens
gaattccgccccgggaagcgcagccatggctctgcggaggctgggggccgcgctgctgctgctgccgctgctcgccgccgtggaagaaacgctaatggactccactacagcgactgctgagctgggctggatggtgcatcctccatcagggtgggaagaggtgagtggctacgatgagaacatgaacacgatccgcacgtaccaggtgtgcaacgtgtttgagtcaagccagaacaactggctacggaccaagtttatccggcgccgtggcgcccaccgcatccacgtggagatgaagttttcggtgcgtgactgcagcagcatccccagcgtgcctggctcctgcaaggagaccttcaacctctattactatgaggctgactttgactcggccaccaagaccttccccaactggatggagaatccatgggtgaaggtggataccattgcagccgacgagagcttctcccaggtggacctgggtggccgcgtcatgaaaatcaacaccgaggtgcggagcttcggacctgtgtcccgcagcggcttctacctggccttccaggactatggcggctgcatgtccctcatcgccgtgcgtgtcttctaccgcaagtgcccccgcatcatccagaatggcgccatcttccaggaaaccctgtcgggggctgagagcacatcgctggtggctgcccggggcagctgcatcgccaatgcggaagaggtggatgtacccatcaagctctactgtaacggggacggcgagtggctggtgcccatcgggcgctgcatgtgcaaagcaggcttcgaggccgttgagaatggcaccgtctgccgaggttgtccatctgggactttcaaggccaaccaaggggatgaggcctgtacccactgtcccatcaacagccggaccacttctgaaggggccaccaactgtgtctgccgcaatggctactacagagcagacctggaccccctggacatgccctgcacaaccatcccctccgcgccccaggctgtgatttccagtgtcaatgagacctccctcatgctggagtggacccctccccgcgactccggaggccgagaggacctcgtctacaacatcatctgcaagagctgtggctcgggccggggtgcctgcacccgctgcggggacaatgtacagtacgcaccacgccagctaggcctgaccgagccacgcatttacatcagtgacctgctggcccacacccagtacaccttcgagatccaggctgtgaacggcgttactgaccagagccccttctcgcctcagttcgcctctgtgaacatcaccaccaaccaggcagctccatcggcagtgtccatcatgcatcaggtgagccgcaccgtggacagcattaccctgtcgtggtcccagccggaccagcccaatggcgtgatcctggactatgagctgcagtactatgagaaggtacctattggctgggtgctgtccccatcacccacctccctgagggcccctctcccaggctgaggcctgggagttctgccccaccgcaagatgagacgcactggtgcagcagaaagagcactggccttggagtcaggctgcctggctcccaatccagctccgctccttcccactgtgagacctcaggcaggtgccttgacctctctggatctcacttttctggtctggaggatacacccagcaatctcagtgaaatgcaacagtcacatccctttccctaccacgaccctttcatcttgacctcagtggcttgatgttgggaaaaactgggtttccaaaaagctgcacttatgaagt

SEQ ID NO: 347192 - DNA, 726 bp, Homo sapiens
gaattccgccccgggaagcgcagccatggctctgcggaggctgggggccgcgctgctgctgctgccgctgctcgccgccgtggaagaaacgctaatggactccactacagcgactgctgagctgggctggatggtgcatcctccatcagggtgggaagaggtgagtggctacgatgagaacatgaacacgatccgcacgtaccaggtgtgcaacgtgtttgagtcaagccagaacaactggctacggaccaagtttatccggcgccgtggcgcccaccgcatccacgtggagatgaagttttcggtgcgtgactgcagcagcatccccagcgtgcctggctcctgcaaggagaccttcaacctctattactatgaggctgactttgactcggccaccaagaccttccccaactggatggagaatccatgggtgaaggtggataccattgcagccgacgagagcttctcccaggtggacctgggtggccgcgtcatgaaaatcaacaccgaggtgcggagcttcggacctgtgtcccgcagcggcttctacctggccttccaggactatggcggctgcatgtccctcatcgccgtgcgtgtcttctaccgcaagtgcccccgcatcatccagaatggcgccatcttccaggaaaccctgtcgggggctgagagcacatcgctggtggctgcccggggcagctgcatcacggggacctcgttaagctt

SEQ ID NO: 347193 - DNA, 800 bp, Homo sapiens
ctgggtggccgcgtcatgaaaatcaacaccgaggtgcggagcttcggacctgtgtcccgcagcggcttctacctggccttccaggactatggcggctgcatgtccctcatcgccgtgcgtgtcttctaccgcaagtgcccccgcatcatccagaatggcgccatcttccaggaaaccctgtcgggggctgagagcacatcgctggtggctgcccggggcagctgcatcgccaatgcggaagaggtggatgtacccatcaagctctactgtaacggggacggcgagtggctggtgcccatcgggcgctgcatgtgcaaagcaggcttcgaggccgttgagaatggcaccgtctgccgaggtaagggccagggtggggcacgtgcccctgcaaatgcatagaactggtcttggctgcagactcgggctgcagacttgggcctggcctctgaagcttagagctgaccatgaggcactctagggccagggtttccaaaccagcaaccatcgttcagcttcttagagggaggcacttgaatatagcactttctgaaaacgatccgcgcacatgccgcaggtggtataccagataatctgggttggcacaggataaaggttttttgtttacatcatcatatgagtatgtcaagtggtgtcaatttcttcctttacaaaggtgatatggttccccttttaagaaaacgtatgttatagtaagtaacatttatatattaataagttaacatattttgagcttttactctgtcagtatagaccagacaatgctgaagtgaccaaacaat

SEQ ID NO: 347194 - DNA, 4746 bp, Homo sapiens
gaattccgccccgggaagcgcagccatggctctgcggaggctgggggccgcgctgctgctgctgccgctgctcgccgccgtggaagaaacgctaatggactccactacagcgactgctgagctgggctggatggtgcatcctccatcagggtgggaagaggtgagtggctacgatgagaacatgaacacgatccgcacgtaccaggtgtgcaacgtgtttgagtcaagccagaacaactggctacggaccaagtttatccggcgccgtggcgcccaccgcatccacgtggagatgaagttttcggtgcgtgactgcagcagcatccccagcgtgcctggctcctgcaaggagaccttcaacctctattactatgaggctgactttgactcggccaccaagaccttccccaactggatggagaatccatgggtgaaggtggataccattgcagccgacgagagcttctcccaggtggacctgggtggccgcgtcatgaaaatcaacaccgaggtgcggagcttcggacctgtgtcccgcagcggcttctacctggccttccaggactatggcggctgcatgtccctcatcgccgtgcgtgtcttctaccgcaagtgcccccgcatcatccagaatggcgccatcttccaggaaaccctgtcgggggctgagagcacatcgctggtggctgcccggggcagctgcatcgccaatgcggaagaggtggatgtacccatcaagctctactgtaacggggacggcgagtggctggtgcccatcgggcgctgcatgtgcaaagcaggcttcgaggccgttgagaatggcaccgtctgccgaggttgtccatctgggactttcaaggccaaccaaggggatgaggcctgtacccactgtcccatcaacagccggaccacttctgaaggggccaccaactgtgtctgccgcaatggctactacagagcagacctggaccccctggacatgccctgcacaaccatcccctccgcgccccaggctgtgatttccagtgtcaatgagacctccctcatgctggagtggacccctccccgcgactccggaggccgagaggacctcgtctacaacatcatctgcaagagctgtggctcgggccggggtgcctgcacccgctgcggggacaatgtacagtacgcaccacgccagctaggcctgaccgagccacgcatttacatcagtgacctgctggcccacacccagtacaccttcgagatccaggctgtgaacggcgttactgaccagagccccttctcgcctcagttcgcctctgtgaacatcaccaccaaccaggcagctccatcggcagtgtccatcatgcatcaggtgagccgcaccgtggacagcattaccctgtcgtggtcccagccggaccagcccaatggcgtgatcctggactatgagctgcagtactatgagaaggagctcagtgagtacaacgccacagccataaaaagccccaccaacacggtcaccgtgcagggcctcaaagccggcgccatctatgtcttccaggtgcgggcacgcaccgtggcaggctacgggcgctacagcggcaagatgtacttccagaccatgacagaagccgagtaccagacaagcatccaggagaagttgccactcatcatcggctcctcggccgctggcctggtcttcctcattgctgtggttgtcatcgccatcgtgtgtaacagacgggggtttgagcgtgctgactcggagtacacggacaagctgcaacactacaccagtggccacatgaccccaggcatgaagatctacatcgatcctttcacctacgaggaccccaacgaggcagtgcgggagtttgccaaggaaattgacatctcctgtgtcaaaattgagcaggtgatcggagcaggggagtttggcgaggtctgcagtggccacctgaagctgccaggcaagagagagatctttgtggccatcaagacgctcaagtcgggctacacggagaagcagcgccgggacttcctgagcgaagcctccatcatgggccagttcgaccatcccaacgtcatccacctggagggtgtcgtgaccaagagcacacctgtgatgatcatcaccgagttcatggagaatggctccctggactcctttctccggcaaaacgatgggcagttcacagtcatccagctggtgggcatgcttcggggcatcgcagctggcatgaagtacctggcagacatgaactatgttcaccgtgacctggctgcccgcaacatcctcgtcaacagcaacctggtctgcaaggtgtcggactttgggctctcacgctttctagaggacgatacctcagaccccacctacaccagtgccctgggcggaaagatccccatccgctggacagccccggaagccatccagtaccggaagttcacctcggccagtgatgtgtggagctacggcattgtcatgtgggaggtgatgtcctatggggagcggccctactgggacatgaccaaccaggatgtaatcaatgccattgagcaggactatcggctgccaccgcccatggactgcccgagcgccctgcaccaactcatgctggactgttggcagaaggaccgcaaccaccggcccaagttcggccaaattgtcaacacgctagacaagatgatccgcaatcccaacagcctcaaagccatggcgcccctctcctctggcatcaacctgccgctgctggaccgcacgatccccgactacaccagctttaacacggtggacgagtggctggaggccatcaagatggggcagtacaaggagagcttcgccaatgccggcttcacctcctttgacgtcgtgtctcagatgatgatggaggacattctccgggttggggtcactttggctggccaccagaaaaaaatcctgaacagtatccaggtgatgcgggcgcagatgaaccagattcagtctgtggaggtttgacattcacctgcctcggctcacctcttcctccaagccccgccccctctgccccacgtgccggccctcctggtgctctatccactgcagggccagccactcgccaggaggccacgggccacgggaagaaccaagcggtgccagccacgagacgtcaccaagaaaacatgcaactcaaacgacggaaaaaaaaagggaatgggaaaaaagaaaacagatcctgggagggggcgggaaatacaaggaatattttttaaagaggattctcataaggaaagcaatgactgttcttgcgggggataaaaaagggcttgggagattcatgcgatgtgtccaatcggagacaaaagcagtttctctccaactccctctgggaaggtgacctggccagagccaagaaacactttcagaaaaacaaatgtgaaggggagagacaggggccgcccttggctcctgtccctgctgctcctctaggcctcactcaacaaccaagcgcctggaggacgggacagatggacagacagccaccctgagaacccctctgggaaaatctattcctgccaccactgggcaaacagaagaatttttctgtctttggagagtattttagaaactccaatgaaagacactgtttctcctgttggctcacagggctgaaaggggcttttgtcctcctgggtcagggagaacgcggggaccccagaaaggtcagccttcctgaggatgggcaacccccaggtctgcagctccaggtacatatcacgcgcacagcctggcagcctggccctcctggtgcccactcccgccagcccctgcctcgaggactgatactgcagtgactgccgtcagctccgactgccgctgagaagggttgatcctgcatctgggtttgtttacagcaattcctggactcgggggtattttggtcacagggtggttttggtttagggggtttgtttgttgggttgttttttgttttttggttttttttaatgacaatgaagtgacactttgacatttcctaccttttgaggacttgatccttctccaggaagaaggtgctttctgcttactgacttaggcaatacaccaagggcgagattttatatgcacatttctggatttttttatacggttttcattgacactcttccctcctcccacctgccaccaggcctcaccaaagcccactgccatggggccatctgggccattcagagactggagtgagatttgggtgtggagggggaggcgccaaggtggaggagcttcccactccaggactgttgatgaaagggacagattgaggaggaagtgggctctgaggctgcagggctggaagtccttgcccacttcccactctcctgccccaatctatctagtacttcccaggcaaataggcccctttgaggctcctgagtgccctcagatggtcaaaacccagttttccctctgggagcctaaaccaggctgcatcggaggccaggacccggatcattcactgtgataccctgccctccagagggtgcgctcagagacacgggcaagcatgcctcttcccttccctggagagaaagtgtgtgatttctctcccacctccttccccccaccagacctttgctgggcctaaaggtcttggccatggggacgccctcagtctagggatctggccacagactccctcctgtgaaccaacacagacacccaagcagagcaatcagttagtgaattgaatggaaataaacgctttagttataatatga

SEQ ID NO: 347195 - DNA, 4004 bp, Homo sapiens
gaattccgccccgggaagcgcagccatggctctgcggaggctgggggccgcgctgctgctgctgccgctgctcgccgccgtggaagaaacgctaatggactccactacagcgactgctgagctgggctggatggtgcatcctccatcagggtgggaagaggtgagtggctacgatgagaacatgaacacgatccgcacgtaccaggtgtgcaacgtgtttgagtcaagccagaacaactggctacggaccaagtttatccggcgccgtggcgcccaccgcatccacgtggagatgaagttttcggtgcgtgactgcagcagcatccccagcgtgcctggctcctgcaaggagaccttcaacctctattactatgaggctgactttgactcggccaccaagaccttccccaactggatggagaatccatgggtgaaggtggataccattgcagccgacgagagcttctcccaggtggacctgggtggccgcgtcatgaaaatcaacaccgaggtgcggagcttcggacctgtgtcccgcagcggcttctacctggccttccaggactatggcggctgcatgtccctcatcgccgtgcgtgtcttctaccgcaagtgcccccgcatcatccagaatggcgccatcttccaggaaaccctgtcgggggctgagagcacatcgctggtggctgcccggggcagctgcatcgccaatgcggaagaggtggatgtacccatcaagctctactgtaacggggacggcgagtggctggtgcccatcgggcgctgcatgtgcaaagcaggcttcgaggccgttgagaatggcaccgtctgccgaggttgtccatctgggactttcaaggccaaccaaggggatgaggcctgtacccactgtcccatcaacagccggaccacttctgaaggggccaccaactgtgtctgccgcaatggctactacagagcagacctggaccccctggacatgccctgcacaaccatcccctccgcgccccaggctgtgatttccagtgtcaatgagacctccctcatgctggagtggacccctccccgcgactccggaggccgagaggacctcgtctacaacatcatctgcaagagctgtggctcgggccggggtgcctgcacccgctgcggggacaatgtacagtacgcaccacgccagctaggcctgaccgagccacgcatttacatcagtgacctgctggcccacacccagtacaccttcgagatccaggctgtgaacggcgttactgaccagagccccttctcgcctcagttcgcctctgtgaacatcaccaccaaccaggcagctccatcggcagtgtccatcatgcatcaggtgagccgcaccgtggacagcattaccctgtcgtggtcccagccggaccagcccaatggcgtgatcctggactatgagctgcagtactatgagaaggagctcagtgagtacaacgccacagccataaaaagccccaccaacacggtcaccgtgcagggcctcaaagccggcgccatctatgtcttccaggtgcgggcacgcaccgtggcaggctacgggcgctacagcggcaagatgtacttccagaccatgacagaagccgagtaccagacaagcatccaggagaagttgccactcatcatcggctcctcggccgctggcctggtcttcctcattgctgtggttgtcatcgccatcgtgtgtaacagacgggggtttgagcgtgctgactcggagtacacggacaagctgcaacactacaccagtggccacatgaccccaggcatgaagatctacatcgatcctttcacctacgaggaccccaacgaggcagtgcgggagtttgccaaggaaattgacatctcctgtgtcaaaattgagcaggtgatcggagcaggggagtttggcgaggtctgcagtggccacctgaagctgccaggcaagagagagatctttgtggccatcaagacgctcaagtcgggctacacggagaagcagcgccgggacttcctgagcgaagcctccatcatgggccagttcgaccatcccaacgtcatccacctggagggtgtcgtgaccaagagcacacctgtgatgatcatcaccgagttcatggagaatggctccctggactcctttctccggcaaaacgatgggcagttcacagtcatccagctggtgggcatgcttcggggcatcgcagctggcatgaagtacctggcagacatgaactatgttcaccgtgacctggctgcccgcaacatcctcgtcaacagcaacctggtctgcaaggtgtcggactttgggctctcacgctttctagaggacgatacctcagaccccacctacaccagtgccctgggcggaaagatccccatccgctggacagccccggaagccatccagtaccggaagttcacctcggccagtgatgtgtggagctacggcattgtcatgtgggaggtgatgtcctatggggagcggccctactgggacatgaccaaccaggatgtaatcaatgccattgagcaggactatcggctgccaccgcccatggactgcccgagcgccctgcaccaactcatgctggactgttggcagaaggaccgcaaccaccggcccaagttcggccaaattgtcaacacgctagacaagatgatccgcaatcccaacagcctcaaagccatggcgcccctctcctctggcatcaacctgccgctgctggaccgcacgatccccgactacaccagctttaacacggtggacgagtggctggaggccatcaagatggggcagtacaaggagagcttcgccaatgccggcttcacctcctttgacgtcgtgtctcagatgatgatggaggacattctccgggttggggtcactttggctggccaccagaaaaaaatcctgaacagtatccaggtgatgcgggcgcagatgaaccagattcagtctgtggaggtttgacattcacctgcctcggctcacctcttcctccaagccccgccccctctgccccacgtgccggccctcctggtgctctatccactgcagggccagccactcgccaggaggccacgggccacgggaagaaccaagcggtgccagccacgagacgtcaccaagaaaacatgcaactcaaacgacggaaaaaaaaagggaatgggaaaaaagaaaacagatcctgggagggggcgggaaatacaaggaatattttttaaagaggattctcataaggaaagcaatgactgttcttgcgggggataaaaaagggcttgggagattcatgcgatgtgtccaatcggagacaaaagcagtttctctccaactccctctgggaaggtgacctggccagagccaagaaacactttcagaaaaacaaatgtgaaggggagagacaggggccgcccttggctcctgtccctgctgctcctctaggcctcactcaacaaccaagcgcctggaggacgggacagatggacagacagccaccctgagaacccctctgggaaaatctattcctgccaccactgggcaaacagaagaatttttctgtctttggagagtattttagaaactccaatgaaagacactgtttctcctgttggctcacagggctgaaaggggcttttgtcctcctgggtcagggagaacgcggggaccccagaaaggtcagccttcctgaggatgggcaacccccaggtctgcagctccaggtacatatcacgcgcacagcctggcagcctggccctcctggtgcccactcccgccagcccctgcctcgaggactgatactgcagtgactgccgtcagctccgactgccgctgagaagggttgatcctgcatctgggtttgtttacagcaattcctggactcgggggtattttggtcacagggtggttttggtttagggggtttgtttgttgggttgttttttgttttttggttttttttaatgacaatgaagtgacactttgacatttc

SEQ ID NO: 347196 - DNA, 4183 bp, Homo sapiens
gagaccatgacacagccaagctgggataggtgagggaagattgctgggagccctagacagctcacggacaagaaactagggagccctgacagaattagaactcccacgttggggcctggagacttcaaacccttcaagagatgagattttccagcagtggtgctgcatggcccctccgcgaggctgtgtggcccctccgtgaggctgcgtggctcgtgacctctctgagtcttcatccagtttcctggtgactctccttgtcttctctctcaggttgtccatctgggactttcaaggccaaccaaggggatgaggcctgtacccactgtcccatcaacagccggaccacttctgaaggggccaccaactgtgtctgccgcaatggctactacagagcagacctggaccccctggacatgccctgcacaaccatcccctccgcgccccaggctgtgatttccagtgtcaatgagacctccctcatgctggagtggacccctccccgcgactccggaggccgagaggacctcgtctacaacatcatctgcaagagctgtggctcgggccggggtgcctgcacccgctgcggggacaatgtacagtacgcaccacgccagctaggcctgaccgagccacgcatttacatcagtgacctgctggcccacacccagtacaccttcgagatccaggctgtgaacggcgttactgaccagagccccttctcgcctcagttcgcctctgtgaacatcaccaccaaccaggcagctccatcggcagtgtccatcatgcatcaggtgagccgcaccgtggacagcattaccctgtcgtggtcccagccggaccagcccaatggcgtgatcctggactatgagctgcagtactatgagaaggagctcagtgagtacaacgccacagccataaaaagccccaccaacacggtcaccgtgcagggcctcaaagccggcgccatctatgtcttccaggtgcgggcacgcaccgtggcaggctacgggcgctacagcggcaagatgtacttccagaccatgacagaagccgagtaccagacaagcatccaggagaagttgccactcatcatcggctcctcggccgctggcctggtcttcctcattgctgtggttgtcatcgccatcgtgtgtaacagacgggggtttgagcgtgctgactcggagtacacggacaagctgcaacactacaccagtggccacatgaccccaggcatgaagatctacatcgatcctttcacctacgaggaccccaacgaggcagtgcgggagtttgccaaggaaattgacatctcctgtgtcaaaattgagcaggtgatcggagcaggggagtttggcgaggtctgcagtggccacctgaagctgccaggcaagagagagatctttgtggccatcaagacgctcaagtcgggctacacggagaagcagcgccgggacttcctgagcgaagcctccatcatgggccagttcgaccatcccaacgtcatccacctggagggtgtcgtgaccaagagcacacctgtgatgatcatcaccgagttcatggagaatggctccctggactcctttctccggcaaaacgatgggcagttcacagtcatccagctggtgggcatgcttcggggcatcgcagctggcatgaagtacctggcagacatgaactatgttcaccgtgacctggctgcccgcaacatcctcgtcaacagcaacctggtctgcaaggtgtcggactttgggctctcacgctttctagaggacgatacctcagaccccacctacaccagtgccctgggcggaaagatccccatccgctggacagccccggaagccatccagtaccggaagttcacctcggccagtgatgtgtggagctacggcattgtcatgtgggaggtgatgtcctatggggagcggccctactgggacatgaccaaccaggatgtaatcaatgccattgagcaggactatcggctgccaccgcccatggactgcccgagcgccctgcaccaactcatgctggactgttggcagaaggaccgcaaccaccggcccaagttcggccaaattgtcaacacgctagacaagatgatccgcaatcccaacagcctcaaagccatggcgcccctctcctctggcatcaacctgccgctgctggaccgcacgatccccgactacaccagctttaacacggtggacgagtggctggaggccatcaagatggggcagtacaaggagagcttcgccaatgccggcttcacctcctttgacgtcgtgtctcagatgatgatggaggacattctccgggttggggtcactttggctggccaccagaaaaaaatcctgaacagtatccaggtgatgcgggcgcagatgaaccagattcagtctgtggaggtttgacattcacctgcctcggctcacctcttcctccaagccccgccccctctgccccacgtgccggccctcctggtgctctatccactgcagggccagccactcgccaggaggccacgggccacgggaagaaccaagcggtgccagccacgagacgtcaccaagaaaacatgcaactcaaacgacggaaaaaaaaagggaatgggaaaaaagaaaacagatcctgggagggggcgggaaatacaaggaatattttttaaagaggattctcataaggaaagcaatgactgttcttgcgggggataaaaaagggcttgggagattcatgcgatgtgtccaatcggagacaaaagcagtttctctccaactccctctgggaaggtgacctggccagagccaagaaacactttcagaaaaacaaatgtgaaggggagagacaggggccgcccttggctcctgtccctgctgctcctctaggcctcactcaacaaccaagcgcctggaggacgggacagatggacagacagccaccctgagaacccctctgggaaaatctattcctgccaccactgggcaaacagaagaatttttctgtctttggagagtattttagaaactccaatgaaagacactgtttctcctgttggctcacagggctgaaaggggcttttgtcctcctgggtcagggagaacgcggggaccccagaaaggtcagccttcctgaggatgggcaacccccaggtctgcagctccaggtacatatcacgcgcacagcctggcagcctggccctcctggtgcccactcccgccagcccctgcctcgaggactgatactgcagtgactgccgtcagctccgactgccgctgagaagggttgatcctgcatctgggtttgtttacagcaattcctggactcgggggtattttggtcacagggtggttttggtttagggggtttgtttgttgggttgttttttgttttttggttttttttaatgacaatgaagtgacactttgacatttcctaccttttgaggacttgatccttctccaggaagaaggtgctttctgcttactgacttaggcaatacaccaagggcgagattttatatgcacatttctggatttttttatacggttttcattgacactcttccctcctcccacctgccaccaggcctcaccaaagcccactgccatggggccatctgggccattcagagactggagtgagatttgggtgtggagggggaggcgccaaggtggaggagcttcccactccaggactgttgatgaaagggacagattgaggaggaagtgggctctgaggctgcagggctggaagtccttgcccacttcccactctcctgccccaatctatctagtacttcccaggcaaataggcccctttgaggctcctgagtgccctcagatggtcaaaacccagttttccctctgggagcctaaaccaggctgcatcggaggccaggacccggatcattcactgtgataccctgccctccagagggtgcgctcagagacacgggcaagcatgcctcttcccttccctggagagaaagtgtgtgatttctctcccacctccttccccccaccagacctttgctgggcctaaaggtcttggccatggggacgccctcagtctagggatctggccacagactccctcctgtgaaccaacacagacacccaagcagagcaatcagttagtgaattgaatggaaataaacgctttagttataatatga

SEQ ID NO: 347197 - DNA, 1138 bp, Homo sapiens
gaattccgccccgggaagcgcagccatggctctgcggaggctgggggccgcgctgctgctgctgccgctgctcgccgccgtggaagaaacgctaatggactccactacagcgactgctgagctgggctggatggtgcatcctccatcagggtgggaagaggtgagtggctacgatgagaacatgaacacgatccgcacgtaccaggtgtgcaacgtgtttgagtcaagccagaacaactggctacggaccaagtttatccggcgccgtggcgcccaccgcatccacgtggagatgaagttttcggtgcgtgactgcagcagcatccccagcgtgcctggctcctgcaaggagaccttcaacctctattactatgaggctgactttgactcggccaccaagaccttccccaactggatggagaatccatgggtgaaggtggataccattgcagccgacgagagcttctcccaggtggacctgggtggccgcgtcatgaaaatcaacaccgaggtgcggagcttcggacctgtgtcccgcagcggcttctacctggccttccaggactatggcggctgcatgtccctcatcgccgtgcgtgtcttctaccgcaagtgcccccgcatcatccagaatggcgccatcttccaggaaaccctgtcgggggctgagagcacatcgctggtggctgcccggggcagctgcatcgccaatgcggaagaggtggatgtacccatcaagctctactgtaacggggacggcgagtggctggtgcccatcgggcgctgcatgtgcaaagcaggcttcgaggccgttgagaatggcaccgtctgccgagagagacaggatctcactatgttgtccaggctggtcttgaactcgtggccacaaatgatcctcccacctcagcctcccaaagtgttggaattataggcatgaaccaccatgcccaggaggagaatttttgataataatattttgtggacatctttgcatatcatgtcagagctataacatcattgtggagaagctcttaggatcccatagaataaatgtaccgtaatttatttactactgctctgttgattgacagatagattgcttgcagtatttcactatcttaaacaaatgctggggtga

SEQ ID NO: 347198 - DNA, 955 bp, Homo sapiens
gaattccgccccgggaagcgcagccatggctctgcggaggctgggggccgcgctgctgctgctgccgctgctcgccgccgtggaagaaacgctaatggactccactacagcgactgctgagctgggctggatggtgcatcctccatcagggtgggaagaggtgagtggctacgatgagaacatgaacacgatccgcacgtaccaggtgtgcaacgtgtttgagtcaagccagaacaactggctacggaccaagtttatccggcgccgtggcgcccaccgcatccacgtggagatgaagttttcggtgcgtgactgcagcagcatccccagcgtgcctggctcctgcaaggagaccttcaacctctattactatgaggctgactttgactcggccaccaagaccttccccaactggatggagaatccatgggtgaaggtggataccattgcagccgacgagagcttctcccaggtggacctgggtggccgcgtcatgaaaatcaacaccgaggtgcggagcttcggacctgtgtcccgcagcggcttctacctggccttctactgtaacggggacggcgagtggctggtgcccatcgggcgctgcatgtgcaaagcaggcttcgaggccgttgagaatggcaccgtctgccgagagagacaggatctcactatgttgtccaggctggtcttgaactcgtggccacaaatgatcctcccacctcagcctcccaaagtgttggaattataggcatgaaccaccatgcccaggaggagaatttttgataataatattttgtggacatctttgcatatcatgtcagagctataacatcattgtggagaagctcttaggatcccatagaataaatgtaccgtaatttatttactactgctctgttgattgacagatagattgcttgcagtatttcactatcttaaacaaatgctggggtga

SEQ ID NO: 347199 - DNA, 991 bp, Homo sapiens
tgacgcgacacgcagagggggcggagagcgcccccgggggcggggcacgcaagtgacggcggcgcgggtggtggagcgctgggcggccaggctccctggctggccggtttgggcgtctgggccgtgaaggtgggacctcctgttccgggccgcaagtttccctctccagccgcccgccgttcgtagcatgtcccccagaactcggggagcgcaggcaggacaggcttagagaagacgcggtccccagcgcttgggccacggacgtcccaccccgctcctctgtcgctggagaaccgccgggccgagccactgggagaagcaggccagagccttccagggcctccggcccgtggacccgaggaggatgagctggctttttcccctgaccaagagcgcctcctcctccgcggctgggtcccccggtggcctcaccagcctccagcagcagaagcagcgcctgatcgagtccctccggaactcacactccagtatagccgaaatacagaaagatgtggaatacagattgccattcaccataaacaacctgacaattaacattaatatattgcttcctccacagtttcctcaggaaaaaccagtgatcagtgtttatccaccaatacgacatcacttaatggataaacaaggagtgtatgttacctctccattagtaaacaatgtatgtatatgggataatttatttcagggtaatataataggtgtattacttttctactaaatattttagaaatctgaaatgcatttaaagtttcattttgtcatgagtactttttttaaaaattgaatatttaagactacgccttaaagttcttacaatatgatatggttgattgtgaaagattataacttccatatactctagtatttacctttgaaccctcaaattattgtaaatagtcaagtaaggaaatattttggctccattttttattcaatggacttttaacctgtttactaatcaccagatatt

SEQ ID NO: 347200 - DNA, 5950 bp, Homo sapiens
tgacgcgacacgcagagggggcggagagcgcccccgggggcggggcacgcaagtgacggcggcgcgggtggtggagcgctgggcggccaggctccctggctggccggtttgggcgtctgggccgtgaaggtgggacctcctgttccgggccgcaagtttccctctccagccgcccgccgttcgtagcatgtcccccagaactcggggagcgcaggcaggacaggcttagagaagacgcggtccccagcgcttgggccacggacgtcccaccccgctcctctgtcgctggagaaccgccgggccgagccactgggagaagcaggccagagccttccagggcctccggcccgtggacccgaggaggatgagctggctttttcccctgaccaagagcgcctcctcctccgcggctgggtcccccggtggcctcaccagcctccagcagcagaagcagcgcctgatcgagtccctccggaactcacactccagtatagccgaaatacagaaagatgtggaatacagattgccattcaccataaacaacctgacaattaacattaatatattgcttcctccacagtttcctcaggaaaaaccagtgatcagtgtttatccaccaatacgacatcacttaatggataaacaaggagtgtatgttacctctccattagtaaacaattttacaatgcactcagatcttggaaaaattattcagagtctgttggatgagttttggaagaatcctccagttttagctcctacttcaacagcatttccttatctatacagtaacccaagtgggatgtctccttatgcttctcagggttttccatttcttcctccatatcctccacaagaagcaaacaggagtatcacttctttatctgttgctgacactgtttcttcttcaacaacaagtcataccacagccaagcctgccgctccttcatttggtgtcctttcaaatctgccattacccattcccacagtggatgcttcaataccgacaagccaaaatggttttgggtacaagatgccagatgtccctgatgcatttccagaactctcagaactaagtgtgtcacaactcacagatatgaatgaacaagaggaggtattactagaacagtttctgactttgcctcaactaaaacaaattattaccgacaaagatgacttagtaaaaagtattgaggaactagcaagaaaaaatctccttttggagcccagcttggaagccaaaagacaaactgttttagataagtatgaattacttacacagatgaagtccactttcgaaaagaagatgcaaaggcagcatgaacttagtgagagctgtagtgcaagtgcccttcaggcaagattgaaagtagctgcacatgaagctgaggaagaatctgataatattgcagaagacttcttggagggaaagatggaaaatttgccactgtagaagagccaaggaagagaaacttcagcaggcgatagcaatgcacagccaatttcatgctccactatagattttcctggaaacatgaactgccaagagaggaatgggacacaaaaccaaacactgttttatatttatggtttgcaaactggcatttcatcagtggctaaattcacagatatcctatatagattgtatacagaactgagactgattttgtaccgattagaatgattgctatgatctttgagaaatttttctgcactatttgcactgaaatgtttatttattgttgataaattgtatcatatttaagttccactgctgttcctcttaccttgattaaatgcctatgcatgtacttttagctagtttttaatattttataaaacttcatttaaatttgtatttttaacttgaagttccatttcgttatcaaggatggtatttagatttttttcctcttaaccttttttcaaaaactattttcaactgtgaggaaacccttatttttctttctttgtggataaaactttcaaaagcaatttaagatattcatagtgttaggaaacaccaaacctgcctatgtgccatctcacaaaagaaacttttaatacctacaataaatcaaaagaataaaccagctgttcttatatattgtttcatttttaaaactaaagatgcatttaagaagcaatacaagtaaatattttacctaataggaaaaaaaaaagttgcctttcatttaaaccattccaacagaaattcttatgctaatttaaaacatatatatatctggtaggtttgtggttggataggttttctaaattcctaatgttaaaaacaatctttatgttaatatacactaaatctatacacaaaaaaagtcaatgaacttttctgacctttactgtgagttaccttttcctaagaggaaagctatagtaataagtaaaatttaatttttaggcaatcctgatttttaatgaatttaattgagtgttcttgtatactacattgagcagtttgcttctataccgtgtcacaaaattcatgtatttcttgagaagccctaaaagctcataaaggaaaatgccgtgaactatgtagctcaggcttggtaaggtgccatctaaattacaaaacaaactaatgcataattttgcttaaatttcatcccagtatgattgtcttcccaacaccagcatatagtatagattgtctgtcttttttatattttttagttcttcctgtacatgtttttggcaataaagttataggaagaacaaaattattttgttagaattaaaacatgcttaatatttagtctgtttgtggagggcaggtattcacgtggactgagatacaatgttggatacagaaaataactttcattgtcttcctgacactgtgctaaggacatgctgttaaagcttcaaagtgaccagatgaggaaggaataattaattattactcctgatttgtagataactgaggtaagagtgtttcaaatttatgatagtcttttgggtattcagaaacctttccttatactgcactggccaccagagcttaattttcccagcagttacagcaatgggagatagaacagtctcaatcttttgccaaccatcaggttcctagaaaccaggtaggtgtatcccataacaagggaggagcataccacagcccctcatttgattaattcatttgatctatctatgttattaagtacctactaggaataaggcattgtggaaatactatacaaagataaacattgtttagatgcttatctactttccttttcaccagaaaaacagaaaaaaaagaaacattttcttacagagtaaaaatgttctacataatcacatgagtagttcatctcagtgttttttattctttaaagttgaactatcccagtttcattctataccattcattggataaccttgttacaacccagtcatgaaacagagcagtgtgatcagttatctgcatttaacaaatagacaaatcagtttacataaaggttatgtatgtcacccacgatgaaaagaatctgcatttgaatatgcccgtatgaatgtgggttctgtttttgcaacagagattaagtgaccattttttctaattttatggctatatattttcttcataaaaattggtcacatcggagaagcagtgccacaggaaaaatgaaatgcatgtgaaagtttgtattctgattttacaagatgagatagaaatcagaattaaagaggaatacttaggagttactaggctaatcagtgtacgaatttgtcataggtagagatttaaaggttaatatcttaaaatagaagaaaattctaaatcaatcaatcagtgagatataaactaaacagacccacttcaaagttgaaagaaatttctaggcataaattgagactaggaaatttatatcagaatagagggtgcttgacacatatatatgcttaaattgaaggacagctcagattcatttttaggagaagaaagtaaactaatgtgctcttaaagaataaaaatttattctatggtttctgtctctgatcatcaccttccattctataaaaagctcagttactgatttgctgggtcatggtcaaaattcttacctatttatttcatatcaactttaaaaaataaattacttgcattctacatattactaattgggaagtaatatgcctcaaatcagttttatactggattattccctatgctttaaaccactgctctcaataaaacacttcctgattaatgtttgattattagatattttagtcttgttggggatattttagtcttgttgggttagccatgctctgaagaatctgtgaaagtacagtaaagttttaataagcaataaatgtaaccttttatataaatctcagtgctaggttaacttctaataagcagacgaacatgttacataaattataatgtctgtcttgtaaaaaagttgaggggactaaaagtttatgactctgatatggaagttgtcatattaaaaaactacattttaaaacatcaaatatttatactatttgcttttcaaataaaagcatagtgctgtttggcatagatactttgtcattttttaaaaaatgtttattgtttttatagacatacactgtcaaacggaagaaattaaagccacatcctcaatattaggcaacagagtttctaagagtggacagctccaagaaggttgtgaagtgagttatgttatgttataaaaatgtgaaagccattaccactatatcctaagttttattttagcaaggtattccctattacatatagtatattgcagaaaatgaataaacattccttgtacttaatttgggaactgctcagcagagaatgcccaaattttatattctgaaagaattaattacacttgctttattttttacattaacagtacttttaaatcacagttctctaatatattctatatttttaaatatgatgaacacaattaaatgttttcatttatatatattgcaacactccctccaaatctttcatactagagagatcagcaatgttgctttcttgccctcgtcctcatttcagcgaaatgtaataattctcccattaaaaaaaatcagatattcaaaatattgatgtaaattgtaaagtttaaattaatcctttcacatattcaaaatattgatctaaattgtaaagtttaatccttttacattctagaatgtactaatatattaaaaccatacagtgtgaataccatttatttatgtccaaacatggccacttttccccactaagtttaatttaggtcacctagtgaagtcttttttaactcataagataggggagggactctcccttaaatgtgcagtgtaacaaaacaaaaattcttttcagaactttcagcagtcagtggtcatgagatgttactaaggttaattaaaccatattagccagttacataatttctaaaatgatagattacaaaacctattcccttcattaaacagacatgacaacccaattctctggttcttgaaactggattttcactcacagatgttttatctactaactttataatgtgatactttgagatcaggctggtggctggcccacactgtcggtagtgtagtctctagaacagtaataaaaggttattacaagaaagctgatacttaaattcatatgtaagaccaggagaatgaatgttgcttctacctcgttagctattaaatcagtgttagagaaaaagtgagatacaaggtttagcatttttaaataatgaggagaaacagactatagatctcagagaaaagcaacaaaattattctcacaattcaaaatatatgctccaaggaaaagttaaagtgatgattatgcctgaaagataagcaattaaaagctccttaggaatgcatctattaactaaaaagggtgcatctcaccaatgtgcctgtttttagaaatatgtataag

SEQ ID NO: 347201 - DNA, 5844 bp, Homo sapiens
tgacgcgacacgcagagggggcggagagcgcccccgggggcggggcacgcaagtgacggcggcgcgggtggtggagcgctgggcggccaggctccctggctggccggtttgggcgtctgggccgtgaaggtgggacctcctgttccgggccgcaagtttccctctccagccgcccgccgttcgtagcatgtcccccagaactcggggagcgcaggcaggacaggcttagagaagacgcggtccccagcgcttgggccacggacgtcccaccccgctcctctgtcgctggagaaccgccgggccgagccactgggagaagcaggccagagccttccagggcctccggcccgtggacccgaggaggatgagctggctttttcccctgaccaagagcgcctcctcctccgcggctgggtcccccggtggcctcaccagcctccagcagcagaagcagcgcctgatcgagtccctccggaactcacactccagtatagccgaaatacagaaagatgtggaatacagattgccattcaccataaacaacctgacaattaacattaatatattgcttcctccacagtttcctcaggaaaaaccagtgatcagtgtttatccaccaatacgacatcacttaatggataaacaaggagtgtatgttacctctccattagtaaacaattttacaatgcactcagatcttggaaaaattattcagagtctgttggatgagttttggaagaatcctccagttttagctcctacttcaacagcatttccttatctatacagtaacccaagtgggatgtctccttatgcttctcagggttttccatttcttcctccatatcctccacaagaagcaaacaggagtatcacttctttatctgttgctgacactgtttcttcttcaacaacaagtcataccacagccaagcctgccgctccttcatttggtgtcctttcaaatctgccattacccattcccacagtggatgcttcaataccgacaagccaaaatggttttgggtacaagatgccagatgtccctgatgcatttccagaactctcagaactaagtgtgtcacaactcacagatatgaatgaacaagaggaggtattactagaacagtttctgactttgcctcaactaaaacaaattattaccgacaaagatgacttagtaaaaagtattgaggaactagcaagaaaaaatctccttttggagcccagcttggaagccaaaagacaaactgttttagataagtatgaattacttacacagatgaagtccactttcgaaaagaagatgcaaaggcagcatgaacttagtgagatttgccactgtagaagagccaaggaagagaaacttcagcaggcgatagcaatgcacagccaatttcatgctccactatagattttcctggaaacatgaactgccaagagaggaatgggacacaaaaccaaacactgttttatatttatggtttgcaaactggcatttcatcagtggctaaattcacagatatcctatatagattgtatacagaactgagactgattttgtaccgattagaatgattgctatgatctttgagaaatttttctgcactatttgcactgaaatgtttatttattgttgataaattgtatcatatttaagttccactgctgttcctcttaccttgattaaatgcctatgcatgtacttttagctagtttttaatattttataaaacttcatttaaatttgtatttttaacttgaagttccatttcgttatcaaggatggtatttagatttttttcctcttaaccttttttcaaaaactattttcaactgtgaggaaacccttatttttctttctttgtggataaaactttcaaaagcaatttaagatattcatagtgttaggaaacaccaaacctgcctatgtgccatctcacaaaagaaacttttaatacctacaataaatcaaaagaataaaccagctgttcttatatattgtttcatttttaaaactaaagatgcatttaagaagcaatacaagtaaatattttacctaataggaaaaaaaaaagttgcctttcatttaaaccattccaacagaaattcttatgctaatttaaaacatatatatatctggtaggtttgtggttggataggttttctaaattcctaatgttaaaaacaatctttatgttaatatacactaaatctatacacaaaaaaagtcaatgaacttttctgacctttactgtgagttaccttttcctaagaggaaagctatagtaataagtaaaatttaatttttaggcaatcctgatttttaatgaatttaattgagtgttcttgtatactacattgagcagtttgcttctataccgtgtcacaaaattcatgtatttcttgagaagccctaaaagctcataaaggaaaatgccgtgaactatgtagctcaggcttggtaaggtgccatctaaattacaaaacaaactaatgcataattttgcttaaatttcatcccagtatgattgtcttcccaacaccagcatatagtatagattgtctgtcttttttatattttttagttcttcctgtacatgtttttggcaataaagttataggaagaacaaaattattttgttagaattaaaacatgcttaatatttagtctgtttgtggagggcaggtattcacgtggactgagatacaatgttggatacagaaaataactttcattgtcttcctgacactgtgctaaggacatgctgttaaagcttcaaagtgaccagatgaggaaggaataattaattattactcctgatttgtagataactgaggtaagagtgtttcaaatttatgatagtcttttgggtattcagaaacctttccttatactgcactggccaccagagcttaattttcccagcagttacagcaatgggagatagaacagtctcaatcttttgccaaccatcaggttcctagaaaccaggtaggtgtatcccataacaagggaggagcataccacagcccctcatttgattaattcatttgatctatctatgttattaagtacctactaggaataaggcattgtggaaatactatacaaagataaacattgtttagatgcttatctactttccttttcaccagaaaaacagaaaaaaaagaaacattttcttacagagtaaaaatgttctacataatcacatgagtagttcatctcagtgttttttattctttaaagttgaactatcccagtttcattctataccattcattggataaccttgttacaacccagtcatgaaacagagcagtgtgatcagttatctgcatttaacaaatagacaaatcagtttacataaaggttatgtatgtcacccacgatgaaaagaatctgcatttgaatatgcccgtatgaatgtgggttctgtttttgcaacagagattaagtgaccattttttctaattttatggctatatattttcttcataaaaattggtcacatcggagaagcagtgccacaggaaaaatgaaatgcatgtgaaagtttgtattctgattttacaagatgagatagaaatcagaattaaagaggaatacttaggagttactaggctaatcagtgtacgaatttgtcataggtagagatttaaaggttaatatcttaaaatagaagaaaattctaaatcaatcaatcagtgagatataaactaaacagacccacttcaaagttgaaagaaatttctaggcataaattgagactaggaaatttatatcagaatagagggtgcttgacacatatatatgcttaaattgaaggacagctcagattcatttttaggagaagaaagtaaactaatgtgctcttaaagaataaaaatttattctatggtttctgtctctgatcatcaccttccattctataaaaagctcagttactgatttgctgggtcatggtcaaaattcttacctatttatttcatatcaactttaaaaaataaattacttgcattctacatattactaattgggaagtaatatgcctcaaatcagttttatactggattattccctatgctttaaaccactgctctcaataaaacacttcctgattaatgtttgattattagatattttagtcttgttggggatattttagtcttgttgggttagccatgctctgaagaatctgtgaaagtacagtaaagttttaataagcaataaatgtaaccttttatataaatctcagtgctaggttaacttctaataagcagacgaacatgttacataaattataatgtctgtcttgtaaaaaagttgaggggactaaaagtttatgactctgatatggaagttgtcatattaaaaaactacattttaaaacatcaaatatttatactatttgcttttcaaataaaagcatagtgctgtttggcatagatactttgtcattttttaaaaaatgtttattgtttttatagacatacactgtcaaacggaagaaattaaagccacatcctcaatattaggcaacagagtttctaagagtggacagctccaagaaggttgtgaagtgagttatgttatgttataaaaatgtgaaagccattaccactatatcctaagttttattttagcaaggtattccctattacatatagtatattgcagaaaatgaataaacattccttgtacttaatttgggaactgctcagcagagaatgcccaaattttatattctgaaagaattaattacacttgctttattttttacattaacagtacttttaaatcacagttctctaatatattctatatttttaaatatgatgaacacaattaaatgttttcatttatatatattgcaacactccctccaaatctttcatactagagagatcagcaatgttgctttcttgccctcgtcctcatttcagcgaaatgtaataattctcccattaaaaaaaatcagatattcaaaatattgatgtaaattgtaaagtttaaattaatcctttcacatattcaaaatattgatctaaattgtaaagtttaatccttttacattctagaatgtactaatatattaaaaccatacagtgtgaataccatttatttatgtccaaacatggccacttttccccactaagtttaatttaggtcacctagtgaagtcttttttaactcataagataggggagggactctcccttaaatgtgcagtgtaacaaaacaaaaattcttttcagaactttcagcagtcagtggtcatgagatgttactaaggttaattaaaccatattagccagttacataatttctaaaatgatagattacaaaacctattcccttcattaaacagacatgacaacccaattctctggttcttgaaactggattttcactcacagatgttttatctactaactttataatgtgatactttgagatcaggctggtggctggcccacactgtcggtagtgtagtctctagaacagtaataaaaggttattacaagaaagctgatacttaaattcatatgtaagaccaggagaatgaatgttgcttctacctcgttagctattaaatcagtgttagagaaaaagtgagatacaaggtttagcatttttaaataatgaggagaaacagactatagatctcagagaaaagcaacaaaattattctcacaattcaaaatatatgctccaaggaaaagttaaagtgatgattatgcctgaaagataagcaattaaaagctccttaggaatgcatctattaactaaaaagggtgcatctcaccaatgtgcctgtttttagaaatatgtataag

SEQ ID NO: 347202 - DNA, 4334 bp, Homo sapiens
tgacgcgacacgcagagggggcggagagcgcccccgggggcggggcacgcaagtgacggcggcgcgggtggtggagcgctgggcggccaggctccctggctggccggtttgggcgtctgggccgtgaaggtgggacctcctgttccgggccgcaagtttccctctccagccgcccgccgttcgtagcatgtcccccagaactcggggagcgcaggcaggacaggcttagagaagacgcggtccccagcgcttgggccacggacgtcccaccccgctcctctgtcgctggagaaccgccgggccgagccactgggagaagcaggccagagccttccagggcctccggcccgtggacccgaggaggatgagctggctttttcccctgaccaagagcgcctcctcctccgcggctgggtcccccggtggcctcaccagcctccagcagcagaagcagcgcctgatcgagtccctccggaactcacactccagtatagccgaaatacagaaagatgtggaatacagattgccattcaccataaacaacctgacaattaacattaatatattgcttcctccacagtttcctcaggaaaaaccagtgatcagtgtttatccaccaatacgacatcacttaatggataaacaaggagtgtatgttacctctccattagtaaacaattttacaatgcactcagatcttggaaaaattattcagagtctgttggatgagttttggaagaatcctccagttttagctcctacttcaacagcatttccttatctatacagtaacccaagtgggatgtctccttatgcttctcagggttttccatttcttcctccatatcctccacaagaagcaaacaggagtatcacttctttatctgttgctgacactgtttcttcttcaacaacaagtcataccacagccaagcctgccgctccttcatttggtgtcctttcaaatctgccattacccattcccacagtggatgcttcaataccgacaagccaaaatggttttgggtacaagatgccagatgtccctgatgcatttccagaactctcagaactaagtgtgtcacaactcacagatatgaatgaacaagaggaggtattactagaacagtttctgactttgcctcaactaaaacaaattattaccgacaaagatgacttagtaaaaagtattgaggaactagcaagaaaaaatctccttttggagcccagcttggaagccaaaagacaaactgttttagataagtatgaattacttacacagatgaagtccactttcgaaaagaagatgcaaaggcagcatgaacttagtgagagctgtagtgcaagtgcccttcaggcaagattgaaagtagctgcacatgaagctgaggaagaatctgataatattgcagaagacttcttggagggaaagatggaaatagatgattttctcagtagcttcatggaaaagagaacaatttgccactgtagaagagccaaggaagagaaacttcagcaggcgatagcaatgcacagccaatttcatgctccactatagattttcctggaaacatgaactgccaagagaggaatgggacacaaaaccaaacactgttttatatttatggtttgcaaactggcatttcatcagtggctaaattcacagatatcctatatagattgtatacagaactgagactgattttgtaccgattagaatgattgctatgatctttgagaaatttttctgcactatttgcactgaaatgtttatttattgttgataaattgtatcatatttaagttccactgctgttcctcttaccttgattaaatgcctatgcatgtacttttagctagtttttaatattttataaaacttcatttaaatttgtatttttaacttgaagttccatttcgttatcaaggatggtatttagatttttttcctcttaaccttttttcaaaaactattttcaactgtgaggaaacccttatttttctttctttgtggataaaactttcaaaagcaatttaagatattcatagtgttaggaaacaccaaacctgcctatgtgccatctcacaaaagaaacttttaatacctacaataaatcaaaagaataaaccagctgttcttatatattgtttcatttttaaaactaaagatgcatttaagaagcaatacaagtaaatattttacctaataggaaaaaaaaaagttgcctttcatttaaaccattccaacagaaattcttatgctaatttaaaacatatatatatctggtaggtttgtggttggataggttttctaaattcctaatgttaaaaacaatctttatgttaatatacactaaatctatacacaaaaaaagtcaatgaacttttctgacctttactgtgagttaccttttcctaagaggaaagctatagtaataagtaaaatttaatttttaggcaatcctgatttttaatgaatttaattgagtgttcttgtatactacattgagcagtttgcttctataccgtgtcacaaaattcatgtatttcttgagaagccctaaaagctcataaaggaaaatgccgtgaactatgtagctcaggcttggtaaggtgccatctaaattacaaaacaaactaatgcataattttgcttaaatttcatcccagtatgattgtcttcccaacaccagcatatagtatagattgtctgtcttttttatattttttagttcttcctgtacatgtttttggcaataaagttataggaagaacaaaattattttgttagaattaaaacatgcttaatatttagtctgtttgtggagggcaggtattcacgtggactgagatacaatgttggatacagaaaataactttcattgtcttcctgacactgtgctaaggacatgctgttaaagcttcaaagtgaccagatgaggaaggaataattaattattactcctgatttgtagataactgagacatacactgtcaaacggaagaaattaaagccacatcctcaatattaggcaacagagtttctaagagtggacagctccaagaaggttgtgaagtgagttatgttatgttataaaaatgtgaaagccattaccactatatcctaagttttattttagcaaggtattccctattacatatagtatattgcagaaaatgaataaacattccttgtacttaatttgggaactgctcagcagagaatgcccaaattttatattctgaaagaattaattacacttgctttattttttacattaacagtacttttaaatcacagttctctaatatattctatatttttaaatatgatgaacacaattaaatgttttcatttatatatattgcaacactccctccaaatctttcatactagagagatcagcaatgttgctttcttgccctcgtcctcatttcagcgaaatgtaataattctcccattaaaaaaaatcagatattcaaaatattgatgtaaattgtaaagtttaaattaatcctttcacatattcaaaatattgatctaaattgtaaagtttaatccttttacattctagaatgtactaatatattaaaaccatacagtgtgaataccatttatttatgtccaaacatggccacttttccccactaagtttaatttaggtcacctagtgaagtcttttttaactcataagataggggagggactctcccttaaatgtgcagtgtaacaaaacaaaaattcttttcagaactttcagcagtcagtggtcatgagatgttactaaggttaattaaaccatattagccagttacataatttctaaaatgatagattacaaaacctattcccttcattaaacagacatgacaacccaattctctggttcttgaaactggattttcactcacagatgttttatctactaactttataatgtgatactttgagatcaggctggtggctggcccacactgtcggtagtgtagtctctagaacagtaataaaaggttattacaagaaagctgatacttaaattcatatgtaagaccaggagaatgaatgttgcttctacctcgttagctattaaatcagtgttagagaaaaagtgagatacaaggtttagcatttttaaataatgaggagaaacagactatagatctcagagaaaagcaacaaaattattctcacaattcaaaatatatgctccaaggaaaagttaaagtgatgattatgcctgaaagataagcaattaaaagctccttaggaatgcatctattaactaaaaagggtgcatctcaccaatgtgcctgtttttagaaatatgtataag

SEQ ID NO: 347203 - DNA, 4984 bp, Homo sapiens
catttaaaacttttctttagacaagccaaaatggttttgggtacaagatgccagatgtccctgatgcatttccagaactctcagaactaagtgtgtcacaactcacagatatgaatgaacaagaggaggtattactagaacagtttctgactttgcctcaactaaaacaaattattaccgacaaagatgacttagtaaaaagtattgaggaactagcaagaaaaaatctccttttggagcccagcttggaagccaaaagacaaactgttttagataagatgaagtccactttcgaaaagaagatgcaaaggcagcatgaacttagtgagagctgtagtgcaagtgcccttcaggcaagattgaaagtagctgcacatgaagctgaggaagaatctgataatattgcagaagacttcttggagggaaagatggaaatagatgattttctcagtagcttcatggaaaagagaacaatttgccactgtagaagagccaaggaagagaaacttcagcaggcgatagcaatgcacagccaatttcatgctccactatagattttcctggaaacatgaactgccaagagaggaatgggacacaaaaccaaacactgttttatatttatggtttgcaaactggcatttcatcagtggctaaattcacagatatcctatatagattgtatacagaactgagactgattttgtaccgattagaatgattgctatgatctttgagaaatttttctgcactatttgcactgaaatgtttatttattgttgataaattgtatcatatttaagttccactgctgttcctcttaccttgattaaatgcctatgcatgtacttttagctagtttttaatattttataaaacttcatttaaatttgtatttttaacttgaagttccatttcgttatcaaggatggtatttagatttttttcctcttaaccttttttcaaaaactattttcaactgtgaggaaacccttatttttctttctttgtggataaaactttcaaaagcaatttaagatattcatagtgttaggaaacaccaaacctgcctatgtgccatctcacaaaagaaacttttaatacctacaataaatcaaaagaataaaccagctgttcttatatattgtttcatttttaaaactaaagatgcatttaagaagcaatacaagtaaatattttacctaataggaaaaaaaaaagttgcctttcatttaaaccattccaacagaaattcttatgctaatttaaaacatatatatatctggtaggtttgtggttggataggttttctaaattcctaatgttaaaaacaatctttatgttaatatacactaaatctatacacaaaaaaagtcaatgaacttttctgacctttactgtgagttaccttttcctaagaggaaagctatagtaataagtaaaatttaatttttaggcaatcctgatttttaatgaatttaattgagtgttcttgtatactacattgagcagtttgcttctataccgtgtcacaaaattcatgtatttcttgagaagccctaaaagctcataaaggaaaatgccgtgaactatgtagctcaggcttggtaaggtgccatctaaattacaaaacaaactaatgcataattttgcttaaatttcatcccagtatgattgtcttcccaacaccagcatatagtatagattgtctgtcttttttatattttttagttcttcctgtacatgtttttggcaataaagttataggaagaacaaaattattttgttagaattaaaacatgcttaatatttagtctgtttgtggagggcaggtattcacgtggactgagatacaatgttggatacagaaaataactttcattgtcttcctgacactgtgctaaggacatgctgttaaagcttcaaagtgaccagatgaggaaggaataattaattattactcctgatttgtagataactgaggtaagagtgtttcaaatttatgatagtcttttgggtattcagaaacctttccttatactgcactggccaccagagcttaattttcccagcagttacagcaatgggagatagaacagtctcaatcttttgccaaccatcaggttcctagaaaccaggtaggtgtatcccataacaagggaggagcataccacagcccctcatttgattaattcatttgatctatctatgttattaagtacctactaggaataaggcattgtggaaatactatacaaagataaacattgtttagatgcttatctactttccttttcaccagaaaaacagaaaaaaaagaaacattttcttacagagtaaaaatgttctacataatcacatgagtagttcatctcagtgttttttattctttaaagttgaactatcccagtttcattctataccattcattggataaccttgttacaacccagtcatgaaacagagcagtgtgatcagttatctgcatttaacaaatagacaaatcagtttacataaaggttatgtatgtcacccacgatgaaaagaatctgcatttgaatatgcccgtatgaatgtgggttctgtttttgcaacagagattaagtgaccattttttctaattttatggctatatattttcttcataaaaattggtcacatcggagaagcagtgccacaggaaaaatgaaatgcatgtgaaagtttgtattctgattttacaagatgagatagaaatcagaattaaagaggaatacttaggagttactaggctaatcagtgtacgaatttgtcataggtagagatttaaaggttaatatcttaaaatagaagaaaattctaaatcaatcaatcagtgagatataaactaaacagacccacttcaaagttgaaagaaatttctaggcataaattgagactaggaaatttatatcagaatagagggtgcttgacacatatatatgcttaaattgaaggacagctcagattcatttttaggagaagaaagtaaactaatgtgctcttaaagaataaaaatttattctatggtttctgtctctgatcatcaccttccattctataaaaagctcagttactgatttgctgggtcatggtcaaaattcttacctatttatttcatatcaactttaaaaaataaattacttgcattctacatattactaattgggaagtaatatgcctcaaatcagttttatactggattattccctatgctttaaaccactgctctcaataaaacacttcctgattaatgtttgattattagatattttagtcttgttggggatattttagtcttgttgggttagccatgctctgaagaatctgtgaaagtacagtaaagttttaataagcaataaatgtaaccttttatataaatctcagtgctaggttaacttctaataagcagacgaacatgttacataaattataatgtctgtcttgtaaaaaagttgaggggactaaaagtttatgactctgatatggaagttgtcatattaaaaaactacattttaaaacatcaaatatttatactatttgcttttcaaataaaagcatagtgctgtttggcatagatactttgtcattttttaaaaaatgtttattgtttttatagacatacactgtcaaacggaagaaattaaagccacatcctcaatattaggcaacagagtttctaagagtggacagctccaagaaggttgtgaagtgagttatgttatgttataaaaatgtgaaagccattaccactatatcctaagttttattttagcaaggtattccctattacatatagtatattgcagaaaatgaataaacattccttgtacttaatttgggaactgctcagcagagaatgcccaaattttatattctgaaagaattaattacacttgctttattttttacattaacagtacttttaaatcacagttctctaatatattctatatttttaaatatgatgaacacaattaaatgttttcatttatatatattgcaacactccctccaaatctttcatactagagagatcagcaatgttgctttcttgccctcgtcctcatttcagcgaaatgtaataattctcccattaaaaaaaatcagatattcaaaatattgatgtaaattgtaaagtttaaattaatcctttcacatattcaaaatattgatctaaattgtaaagtttaatccttttacattctagaatgtactaatatattaaaaccatacagtgtgaataccatttatttatgtccaaacatggccacttttccccactaagtttaatttaggtcacctagtgaagtcttttttaactcataagataggggagggactctcccttaaatgtgcagtgtaacaaaacaaaaattcttttcagaactttcagcagtcagtggtcatgagatgttactaaggttaattaaaccatattagccagttacataatttctaaaatgatagattacaaaacctattcccttcattaaacagacatgacaacccaattctctggttcttgaaactggattttcactcacagatgttttatctactaactttataatgtgatactttgagatcaggctggtggctggcccacactgtcggtagtgtagtctctagaacagtaataaaaggttattacaagaaagctgatacttaaattcatatgtaagaccaggagaatgaatgttgcttctacctcgttagctattaaatcagtgttagagaaaaagtgagatacaaggtttagcatttttaaataatgaggagaaacagactatagatctcagagaaaagcaacaaaattattctcacaattcaaaatatatgctccaaggaaaagttaaagtgatgattatgcctgaaagataagcaattaaaagctccttaggaatgcatctattaactaaaaagggtgcatctcaccaatgtgcctgtttttagaaatatgtataag

SEQ ID NO: 347204 - DNA, 4725 bp, Homo sapiens
taaccccttgcacttaccgggtgaggcaacaccccaccctgcttctgctcaccctccgtgggctacacccactgtctaaccagtcccagtgagatgaaccaggtatctcagctggaaatgcagaaatcacctgccttctctgttggtctccctgggagctgcagactggagctgttcctattcagccatcttgcctgggagccactgtgggcaaatcttaattggaagataatgtaaagagatacatattcatcttcttaaatattagaggtattttttattgttttctttctagattttcctggaaacatgaactgccaagagaggaatgggacacaaaaccaaacactgttttatatttatggtttgcaaactggcatttcatcagtggctaaattcacagatatcctatatagattgtatacagaactgagactgattttgtaccgattagaatgattgctatgatctttgagaaatttttctgcactatttgcactgaaatgtttatttattgttgataaattgtatcatatttaagttccactgctgttcctcttaccttgattaaatgcctatgcatgtacttttagctagtttttaatattttataaaacttcatttaaatttgtatttttaacttgaagttccatttcgttatcaaggatggtatttagatttttttcctcttaaccttttttcaaaaactattttcaactgtgaggaaacccttatttttctttctttgtggataaaactttcaaaagcaatttaagatattcatagtgttaggaaacaccaaacctgcctatgtgccatctcacaaaagaaacttttaatacctacaataaatcaaaagaataaaccagctgttcttatatattgtttcatttttaaaactaaagatgcatttaagaagcaatacaagtaaatattttacctaataggaaaaaaaaaagttgcctttcatttaaaccattccaacagaaattcttatgctaatttaaaacatatatatatctggtaggtttgtggttggataggttttctaaattcctaatgttaaaaacaatctttatgttaatatacactaaatctatacacaaaaaaagtcaatgaacttttctgacctttactgtgagttaccttttcctaagaggaaagctatagtaataagtaaaatttaatttttaggcaatcctgatttttaatgaatttaattgagtgttcttgtatactacattgagcagtttgcttctataccgtgtcacaaaattcatgtatttcttgagaagccctaaaagctcataaaggaaaatgccgtgaactatgtagctcaggcttggtaaggtgccatctaaattacaaaacaaactaatgcataattttgcttaaatttcatcccagtatgattgtcttcccaacaccagcatatagtatagattgtctgtcttttttatattttttagttcttcctgtacatgtttttggcaataaagttataggaagaacaaaattattttgttagaattaaaacatgcttaatatttagtctgtttgtggagggcaggtattcacgtggactgagatacaatgttggatacagaaaataactttcattgtcttcctgacactgtgctaaggacatgctgttaaagcttcaaagtgaccagatgaggaaggaataattaattattactcctgatttgtagataactgaggtaagagtgtttcaaatttatgatagtcttttgggtattcagaaacctttccttatactgcactggccaccagagcttaattttcccagcagttacagcaatgggagatagaacagtctcaatcttttgccaaccatcaggttcctagaaaccaggtaggtgtatcccataacaagggaggagcataccacagcccctcatttgattaattcatttgatctatctatgttattaagtacctactaggaataaggcattgtggaaatactatacaaagataaacattgtttagatgcttatctactttccttttcaccagaaaaacagaaaaaaaagaaacattttcttacagagtaaaaatgttctacataatcacatgagtagttcatctcagtgttttttattctttaaagttgaactatcccagtttcattctataccattcattggataaccttgttacaacccagtcatgaaacagagcagtgtgatcagttatctgcatttaacaaatagacaaatcagtttacataaaggttatgtatgtcacccacgatgaaaagaatctgcatttgaatatgcccgtatgaatgtgggttctgtttttgcaacagagattaagtgaccattttttctaattttatggctatatattttcttcataaaaattggtcacatcggagaagcagtgccacaggaaaaatgaaatgcatgtgaaagtttgtattctgattttacaagatgagatagaaatcagaattaaagaggaatacttaggagttactaggctaatcagtgtacgaatttgtcataggtagagatttaaaggttaatatcttaaaatagaagaaaattctaaatcaatcaatcagtgagatataaactaaacagacccacttcaaagttgaaagaaatttctaggcataaattgagactaggaaatttatatcagaatagagggtgcttgacacatatatatgcttaaattgaaggacagctcagattcatttttaggagaagaaagtaaactaatgtgctcttaaagaataaaaatttattctatggtttctgtctctgatcatcaccttccattctataaaaagctcagttactgatttgctgggtcatggtcaaaattcttacctatttatttcatatcaactttaaaaaataaattacttgcattctacatattactaattgggaagtaatatgcctcaaatcagttttatactggattattccctatgctttaaaccactgctctcaataaaacacttcctgattaatgtttgattattagatattttagtcttgttggggatattttagtcttgttgggttagccatgctctgaagaatctgtgaaagtacagtaaagttttaataagcaataaatgtaaccttttatataaatctcagtgctaggttaacttctaataagcagacgaacatgttacataaattataatgtctgtcttgtaaaaaagttgaggggactaaaagtttatgactctgatatggaagttgtcatattaaaaaactacattttaaaacatcaaatatttatactatttgcttttcaaataaaagcatagtgctgtttggcatagatactttgtcattttttaaaaaatgtttattgtttttatagacatacactgtcaaacggaagaaattaaagccacatcctcaatattaggcaacagagtttctaagagtggacagctccaagaaggttgtgaagtgagttatgttatgttataaaaatgtgaaagccattaccactatatcctaagttttattttagcaaggtattccctattacatatagtatattgcagaaaatgaataaacattccttgtacttaatttgggaactgctcagcagagaatgcccaaattttatattctgaaagaattaattacacttgctttattttttacattaacagtacttttaaatcacagttctctaatatattctatatttttaaatatgatgaacacaattaaatgttttcatttatatatattgcaacactccctccaaatctttcatactagagagatcagcaatgttgctttcttgccctcgtcctcatttcagcgaaatgtaataattctcccattaaaaaaaatcagatattcaaaatattgatgtaaattgtaaagtttaaattaatcctttcacatattcaaaatattgatctaaattgtaaagtttaatccttttacattctagaatgtactaatatattaaaaccatacagtgtgaataccatttatttatgtccaaacatggccacttttccccactaagtttaatttaggtcacctagtgaagtcttttttaactcataagataggggagggactctcccttaaatgtgcagtgtaacaaaacaaaaattcttttcagaactttcagcagtcagtggtcatgagatgttactaaggttaattaaaccatattagccagttacataatttctaaaatgatagattacaaaacctattcccttcattaaacagacatgacaacccaattctctggttcttgaaactggattttcactcacagatgttttatctactaactttataatgtgatactttgagatcaggctggtggctggcccacactgtcggtagtgtagtctctagaacagtaataaaaggttattacaagaaagctgatacttaaattcatatgtaagaccaggagaatgaatgttgcttctacctcgttagctattaaatcagtgttagagaaaaagtgagatacaaggtttagcatttttaaataatgaggagaaacagactatagatctcagagaaaagcaacaaaattattctcacaattcaaaatatatgctccaaggaaaagttaaagtgatgattatgcctgaaagataagcaattaaaagctccttaggaatgcatctattaactaaaaagggtgcatctcaccaatgtgcctgtttttagaaatatgtataag

SEQ ID NO: 347205 - DNA, 1257 bp, Homo sapiens
tgacgcgacacgcagagggggcggagagcgcccccgggggcggggcacgcaagtgacggcggcgcgggtggtggagcgctgggcggccaggctccctggctggccggtttgggcgtctgggccgtgaaggtgggacctcctgttccgggccgcaagtttccctctccagccgcccgccgttcgtagcatgtcccccagaactcggggagcgcaggcaggacaggcttagagaagacgcggtccccagcgcttgggccacggacgtcccaccccgctcctctgtcgctggagaaccgccgggccgagccactgggagaagcaggccagagccttccagggcctccggcccgtggacccgaggaggatgagctggctttttcccctgaccaagagcgcctcctcctccgcggctgggtcccccggtggcctcaccagcctccagcagcagaagcagcgcctgatcgagtccctccggaactcacactccagtatagccgaaatacagaaagatgtggaatacagattgccattcaccataaacaacctgacaattaacattaatatattgcttcctccacagtttcctcaggaaaaaccagtgatcagtgtttatccaccaatacgacatcacttaatggataaacaaggagtgtatgttacctctccattagtaaacaattttacaatgcactcagatcttggaaaaattattcagagtctgttggatgagttttggaagaatcctccagttttagctcctacttcaacagcatttccttatctatacagtaacccaagtgggatgtctccttatgcttctcagggttttccatttcttcctccatatcctccacaagaagcaaacaggagtatcacttctttatctgttgctgacactgtttcttcttcaacaacaagtcataccacagccaagcctgccgctccttcatttggtgtcctttcaaatctgccattacccattcccacagtggatgcttcaataccgacaagccaaaatggttttgggtacaagatgccagatgtccctgatgcatttccagaactctcagaactaagtgtgtcacaactcacagatatgaatgaacaagaggaggtattactagaacagtttctgactttgcctcaactaaaacaaattattaccgacaaagatgacttagtaaaaagtattgaggaactagcaagaaaaaatctccttttggagcccagcaaagaccccaaaaggggtaccgagct

SEQ ID NO: 347206 - DNA, 452 bp, Homo sapiens
gcttcatggaaaagagaacagtatgtaatactcgtcagttgaggacaagtattggataaagtttggaatttttatagaggaggagaagcactgggtgttagctatttctctattatgatatcatccccctttttttgtacaatatatttacctgaaaggaaggtttctattccttgggtgtggacttgggcaaaaaccaggttcctggaacttaaaactttgaaggtctgtcataggactctggacagccacacaccttagctattcccaggggaccccaggggggcaactgccattgctctaagatgtccttttgatgtgacttgagatataaatgagagtgagggcctgtacgtgtggctatttcctgtctggtatgtcagaggaacagtcctggtcagaagggggctcttctgagcagaaattgctaataaactttgtgctgatctgga

SEQ ID NO: 347207 - DNA, 723 bp, Homo sapiens
acgcaagtgacggcggcgcgggtggtggagcgctgggcggccaggctccctggctggccggtttgggcgtctgggccgtgaaggtgggacctcctgttccgggccgcaagtttccctctccagccgcccgccgttcgtagcatgtcccccagaactcggggagcgcaggcaggacaggcttagagaagacgcggtccccagcgcttgggccacggacgtcccaccccgctcctctgtcgctggagaaccgccgggccgagccactgggagaagcaggccagagccttccagggcctccggcccgtggacccgaggaggatgagctggctttttcccctgaccaagagcgcctcctcctccgcggctgggtcccccggtggcctcaccagcctccagcagcagaagcagcgcctgatcgagtccctccggaactcacactccaggtgactggtcgctgcctctccaccggaggaaaaagtagggtgggagggcgggcttgtcctaaccaccctcacagcgcctcagtctgctccccaccagctcctcatgtggtttacctcccttggttgtgggtcacacgcttgctctgccactcctgcccccttttactgttttcctccggaccctccctgcctcctgccgcaccactgctcagcgcttctaactcggatttcctcatccctcctgacacatagctgctgactgtaatctctcaatctctct

SEQ ID NO: 347208 - DNA, 5988 bp, Homo sapiens
tgacgcgacacgcagagggggcggagagcgcccccgggggcggggcacgcaagtgacggcggcgcgggtggtggagcgctgggcggccaggctccctggctggccggtttgggcgtctgggccgtgaaggtgggacctcctgttccgggccgcaagtttccctctccagccgcccgccgttcgtagcatgtcccccagaactcggggagcgcaggcaggacaggcttagagaagacgcggtccccagcgcttgggccacggacgtcccaccccgctcctctgtcgctggagaaccgccgggccgagccactgggagaagcaggccagagccttccagggcctccggcccgtggacccgaggaggatgagctggctttttcccctgaccaagagcgcctcctcctccgcggctgggtcccccggtggcctcaccagcctccagcagcagaagcagcgcctgatcgagtccctccggaactcacactccagtatagccgaaatacagaaagatgtggaatacagattgccattcaccataaacaacctgacaattaacattaatatattgcttcctccacagtttcctcaggaaaaaccagtgatcagtgtttatccaccaatacgacatcacttaatggataaacaaggagtgtatgttacctctccattagtaaacaattttacaatgcactcagatcttggaaaaattattcagagtctgttggatgagttttggaagaatcctccagttttagctcctacttcaacagcatttccttatctatacagtaacccaagtgggatgtctccttatgcttctcagggttttccatttcttcctccatatcctccacaagaagcaaacaggagtatcacttctttatctgttgctgacactgtttcttcttcaacaacaagtcataccacagccaagcctgccgctccttcatttggtgtcctttcaaatctgccattacccattcccacagtggatgcttcaataccgacaagccaaaatggttttgggtacaagatgccagatgtccctgatgcatttccagaactctcagaactaagtgtgtcacaactcacagatatgaatgaacaagaggaggtattactagaacagtttctgactttgcctcaactaaaacaaattattaccgacaaagatgacttagtaaaaagtattgaggaactagcaagaaaaaatctccttttggagcccagcttggaagccaaaagacaaactgttttagataagtatgaattacttacacagatgaagtccactttcgaaaagaagatgcaaaggcagcatgaacttagtgagagctgtagtgcaagtgcccttcaggcaagattgaaagtagctgcacatgaagctgaggaagaatctgataatattgcagaagacttcttggagggaaagatggaaatagatgattttctcagtagcttcatggaaaagagaacaatttgccactgtagaagagccaaggaagagaaacttcagcaggcgatagcaatgcacagccaatttcatgctccactatagattttcctggaaacatgaactgccaagagaggaatgggacacaaaaccaaacactgttttatatttatggtttgcaaactggcatttcatcagtggctaaattcacagatatcctatatagattgtatacagaactgagactgattttgtaccgattagaatgattgctatgatctttgagaaatttttctgcactatttgcactgaaatgtttatttattgttgataaattgtatcatatttaagttccactgctgttcctcttaccttgattaaatgcctatgcatgtacttttagctagtttttaatattttataaaacttcatttaaatttgtatttttaacttgaagttccatttcgttatcaaggatggtatttagatttttttcctcttaaccttttttcaaaaactattttcaactgtgaggaaacccttatttttctttctttgtggataaaactttcaaaagcaatttaagatattcatagtgttaggaaacaccaaacctgcctatgtgccatctcacaaaagaaacttttaatacctacaataaatcaaaagaataaaccagctgttcttatatattgtttcatttttaaaactaaagatgcatttaagaagcaatacaagtaaatattttacctaataggaaaaaaaaaagttgcctttcatttaaaccattccaacagaaattcttatgctaatttaaaacatatatatatctggtaggtttgtggttggataggttttctaaattcctaatgttaaaaacaatctttatgttaatatacactaaatctatacacaaaaaaagtcaatgaacttttctgacctttactgtgagttaccttttcctaagaggaaagctatagtaataagtaaaatttaatttttaggcaatcctgatttttaatgaatttaattgagtgttcttgtatactacattgagcagtttgcttctataccgtgtcacaaaattcatgtatttcttgagaagccctaaaagctcataaaggaaaatgccgtgaactatgtagctcaggcttggtaaggtgccatctaaattacaaaacaaactaatgcataattttgcttaaatttcatcccagtatgattgtcttcccaacaccagcatatagtatagattgtctgtcttttttatattttttagttcttcctgtacatgtttttggcaataaagttataggaagaacaaaattattttgttagaattaaaacatgcttaatatttagtctgtttgtggagggcaggtattcacgtggactgagatacaatgttggatacagaaaataactttcattgtcttcctgacactgtgctaaggacatgctgttaaagcttcaaagtgaccagatgaggaaggaataattaattattactcctgatttgtagataactgaggtaagagtgtttcaaatttatgatagtcttttgggtattcagaaacctttccttatactgcactggccaccagagcttaattttcccagcagttacagcaatgggagatagaacagtctcaatcttttgccaaccatcaggttcctagaaaccaggtaggtgtatcccataacaagggaggagcataccacagcccctcatttgattaattcatttgatctatctatgttattaagtacctactaggaataaggcattgtggaaatactatacaaagataaacattgtttagatgcttatctactttccttttcaccagaaaaacagaaaaaaaagaaacattttcttacagagtaaaaatgttctacataatcacatgagtagttcatctcagtgttttttattctttaaagttgaactatcccagtttcattctataccattcattggataaccttgttacaacccagtcatgaaacagagcagtgtgatcagttatctgcatttaacaaatagacaaatcagtttacataaaggttatgtatgtcacccacgatgaaaagaatctgcatttgaatatgcccgtatgaatgtgggttctgtttttgcaacagagattaagtgaccattttttctaattttatggctatatattttcttcataaaaattggtcacatcggagaagcagtgccacaggaaaaatgaaatgcatgtgaaagtttgtattctgattttacaagatgagatagaaatcagaattaaagaggaatacttaggagttactaggctaatcagtgtacgaatttgtcataggtagagatttaaaggttaatatcttaaaatagaagaaaattctaaatcaatcaatcagtgagatataaactaaacagacccacttcaaagttgaaagaaatttctaggcataaattgagactaggaaatttatatcagaatagagggtgcttgacacatatatatgcttaaattgaaggacagctcagattcatttttaggagaagaaagtaaactaatgtgctcttaaagaataaaaatttattctatggtttctgtctctgatcatcaccttccattctataaaaagctcagttactgatttgctgggtcatggtcaaaattcttacctatttatttcatatcaactttaaaaaataaattacttgcattctacatattactaattgggaagtaatatgcctcaaatcagttttatactggattattccctatgctttaaaccactgctctcaataaaacacttcctgattaatgtttgattattagatattttagtcttgttggggatattttagtcttgttgggttagccatgctctgaagaatctgtgaaagtacagtaaagttttaataagcaataaatgtaaccttttatataaatctcagtgctaggttaacttctaataagcagacgaacatgttacataaattataatgtctgtcttgtaaaaaagttgaggggactaaaagtttatgactctgatatggaagttgtcatattaaaaaactacattttaaaacatcaaatatttatactatttgcttttcaaataaaagcatagtgctgtttggcatagatactttgtcattttttaaaaaatgtttattgtttttatagacatacactgtcaaacggaagaaattaaagccacatcctcaatattaggcaacagagtttctaagagtggacagctccaagaaggttgtgaagtgagttatgttatgttataaaaatgtgaaagccattaccactatatcctaagttttattttagcaaggtattccctattacatatagtatattgcagaaaatgaataaacattccttgtacttaatttgggaactgctcagcagagaatgcccaaattttatattctgaaagaattaattacacttgctttattttttacattaacagtacttttaaatcacagttctctaatatattctatatttttaaatatgatgaacacaattaaatgttttcatttatatatattgcaacactccctccaaatctttcatactagagagatcagcaatgttgctttcttgccctcgtcctcatttcagcgaaatgtaataattctcccattaaaaaaaatcagatattcaaaatattgatgtaaattgtaaagtttaaattaatcctttcacatattcaaaatattgatctaaattgtaaagtttaatccttttacattctagaatgtactaatatattaaaaccatacagtgtgaataccatttatttatgtccaaacatggccacttttccccactaagtttaatttaggtcacctagtgaagtcttttttaactcataagataggggagggactctcccttaaatgtgcagtgtaacaaaacaaaaattcttttcagaactttcagcagtcagtggtcatgagatgttactaaggttaattaaaccatattagccagttacataatttctaaaatgatagattacaaaacctattcccttcattaaacagacatgacaacccaattctctggttcttgaaactggattttcactcacagatgttttatctactaactttataatgtgatactttgagatcaggctggtggctggcccacactgtcggtagtgtagtctctagaacagtaataaaaggttattacaagaaagctgatacttaaattcatatgtaagaccaggagaatgaatgttgcttctacctcgttagctattaaatcagtgttagagaaaaagtgagatacaaggtttagcatttttaaataatgaggagaaacagactatagatctcagagaaaagcaacaaaattattctcacaattcaaaatatatgctccaaggaaaagttaaagtgatgattatgcctgaaagataagcaattaaaagctccttaggaatgcatctattaactaaaaagggtgcatctcaccaatgtgcctgtttttagaaatatgtataag

SEQ ID NO: 347209 - DNA, 4946 bp, Homo sapiens
tgacgcgacacgcagagggggcggagagcgcccccgggggcggggcacgcaagtgacggcggcgcgggtggtggagcgctgggcggccaggctccctggctggccggtttgggcgtctgggccgtgaaggtgggacctcctgttccgggccgcaagtttccctctccagccgcccgccgttcgtagcatgtcccccagaactcggggagcgcaggcaggacaggcttagagaagacgcggtccccagcgcttgggccacggacgtcccaccccgctcctctgtcgctggagaaccgccgggccgagccactgggagaagcaggccagagccttccagggcctccggcccgtggacccgaggaggatgagctggctttttcccctgaccaagagcgcctcctcctccgcggctgggtcccccggtggcctcaccagcctccagcagcagaagcagcgcctgatcgagtccctccggaactcacactccagtatagccgaaatacagaaagatgtggaatacagattgccattcaccataaacaacctgacaattaacattaatatattgcttcctccacagtttcctcaggaaaaaccagtgatcagtgtttatccaccaatacgacatcacttaatggataaacaaggagtgtatgttacctctccattagtaaacaattttacaatgcactcagatcttggaaaaattattcagagtctgttggatgagttttggaagaatcctccagttttagctcctacttcaacagcatttccttatctatacagtaacccaagtgggatgtctccttatgcttctcagggttttccatttcttcctccatatcctccacaagaagcaaacaggagtatcacttctttatctgttgctgacactgtttcttcttcaacaacaagtcataccacagccaagcctgccgctccttcatttggtgtcctttcaaatctgccattacccattcccacagtggatgcttcaataccgacaagccaaaatggttttgggtacaagatgccagatgtccctgatgcatttccagaactctcagaactaagtgtgtcacaactcacagatatgaatgaacaagaggaggtattactagaacagtttctgactttgcctcaactaaaacaaattattaccgacaaagatgacttagtaaaaagtattgaggaactagcaagaaaaaatctccttttggagcccagcttggaagccaaaagacaaactgttttagataagtatgaattacttacacagatgaagtccactttcgaaaagaagatgcaaaggcagcatgaacttagtgagagctgtagtgcaagtgcccttcaggcaagattgaaagtagctgcacatgaagctgaggaagaatctgataatattgcagaagacttcttggagggaaagatggaaatagatgattttctcagtagcttcatggaaaagagaacaatttgccactgtagaagagccaaggaagagaaacttcagcaggcgatagcaatgcacagccaatttcatgctccactatagattttcctggaaacatgaactgccaagagaggaatgggacacaaaaccaaacactgttttatatttatggtttgcaaactggcatttcatcagtggctaaattcacagatatcctatatagattgtatacagaactgagactgattttgtaccgattagaatgattgctatgatctttgagaaatttttctgcactatttgcactgaaatgtttatttattgttgataaattgtatcatatttaagttccactgctgttcctcttaccttgattaaatgcctatgcatgtacttttagctagtttttaatattttataaaacttcatttaaatttgtatttttaacttgaagttccatttcgttatcaaggatggtatttagatttttttcctcttaaccttttttcaaaaactattttcaactgtgaggaaacccttatttttctttctttgtggataaaactttcaaaagcaatttaagatattcatagtgttaggaaacaccaaacctgcctatgtgccatctcacaaaagaaacttttaatacctacaataaatcaaaagaataaaccagctgttcttatatattgtttcatttttaaaactaaagatgcatttaagaagcaatacaagtaaatattttacctaataggaaaaaaaaaagttgcctttcatttaaaccattccaacagaaattcttatgctaatttaaaacatatatatatctggtaggtttgtggttggataggttttctaaattcctaatgttaaaaacaatctttatgttaatatacactaaatctatacacaaaaaaagtcaatgaacttttctgacctttactgtgagttaccttttcctaagaggaaagctatagtaataagtaaaatttaatttttaggcaatcctgatttttaatgaatttaattgagtgttcttgtatactacattgagcagtttgcttctataccgtgtcacaaaattcatgtatttcttgagaagccctaaaagctcataaaggaaaatgccgtgaactatgtagctcaggcttggtaaggtgccatctaaattacaaaacaaactaatgcataattttgcttaaatttcatcccagtatgattgtcttcccaacaccagcatatagtatagattgtctgtcttttttatattttttagttcttcctgtacatgtttttggcaataaagttataggaagaacaaaattattttgttagaattaaaacatgcttaatatttagtctgtttgtggagggcaggtattcacgtggactgagatacaatgttggatacagaaaataactttcattgtcttcctgacactgtgctaaggacatgctgttaaagcttcaaagtgaccagatgaggaaggaataattaattattactcctgatttgtagataactgaggtaagagtgtttcaaatttatgatagtcttttgggtattcagaaacctttccttatactgcactggccaccagagcttaattttcccagcagttacagcaatgggagatagaacagtctcaatcttttgccaaccatcaggttcctagaaaccaggtaggtgtatcccataacaagggaggagcataccacagcccctcatttgattaattcatttgatctatctatgttattaagtacctactaggaataaggcattgtggaaatactatacaaagataaacattgtttagatgcttatctactttccttttcaccagaaaaacagaaaaaaaagaaacattttcttacagagtaaaaatgttctacataatcacatgagtagttcatctcagtgttttttattctttaaagttgaactatcccagtttcattctataccattcattggataaccttgttacaacccagtcatgaaacagagcagtgtgatcagttatctgcatttaacaaatagacaaatcagtttacataaaggttatgtatgtcacccacgatgaaaagaatctgcatttgaatatgcccgtatgaatgtgggttctgtttttgcaacagagattaagtgaccattttttctaattttatggctatatattttcttcataaaaattggtcacatcggagaagcagtgccacaggaaaaatgaaatgcatgtgaaagtttgtattctgattttacaagatgagatagaaatcagaattaaagaggaatacttaggagttactaggctaatcagtgtacgaatttgtcataggtagagatttaaaggttaatatcttaaaatagaagaaaattctaaatcaatcaatcagtgagatataaactaaacagacccacttcaaagttgaaagaaatttctaggcataaattgagactaggaaatttatatcagaatagagggtgcttgacacatatatatgcttaaattgaaggacagctcagattcatttttaggagaagaaagtaaactaatgtgctcttaaagaataaaaatttattctatggtttctgtctctgatcatcaccttccattctataaaaagctcagttactgatttgctgggtcatggtcaaaattcttacctatttatttcatatcaactttaaaaaataaattacttgcattctacatattactaattgggaagtaatatgcctcaaatcagttttatactggattattccctatgctttaaaccactgctctcaataaaacacttcctgattaatgtttgattattagatattttagtcttgttggggatattttagtcttgttgggttagccatgctctgaagaatctgtgaaagtacagtaaagttttaataagcaataaatgtaaccttttatataaatctcagtgctaggttaacttctaataagcagacgaacatgttacataaattataatgtctgtcttgtaaaaaagttgaggggactaaaagtttatgactctgatatggaagttgtcatattaaaaaactacattttaaaacatcaaatatttatactatttgcttttcaaataaaagcatagtgctgtttggcatagatactttgtcattttttaaaaaatgtttattgtttttatagacatacactgtcaaacggaagaaattaaagccacatcctcaatattaggcaacagagtttctaagagtggacagctccaagaaggttgtgaagtaatctgtaactgactgtcggggctgcatccccttttcaaagcggttatacattccactccaaaacctggaaaggatggcaaagcgtcgtgataccaccttatcacagtctgaaaattcacatcctcaagtcttctaaggtatctatgataccacagtcttaataataaccaaatgcaaatttcagcctcaaaaaagccactacttaaggtaata

SEQ ID NO: 347210 - DNA, 6021 bp, Homo sapiens
tgacgcgacacgcagagggggcggagagcgcccccgggggcggggcacgcaagtgacggcggcgcgggtggtggagcgctgggcggccaggctccctggctggccggtttgggcgtctgggccgtgaaggtgggacctcctgttccgggccgcaagtttccctctccagccgcccgccgttcgtagcatgtcccccagaactcggggagcgcaggcaggacaggcttagagaagacgcggtccccagcgcttgggccacggacgtcccaccccgctcctctgtcgctggagaaccgccgggccgagccactgggagaagcaggccagagccttccagggcctccggcccgtggacccgaggaggatgagctggctttttcccctgaccaagagcgcctcctcctccgcggctgggtcccccggtggcctcaccagcctccagcagcagaagcagcgcctgatcgagtccctccggaactcacactccaggctggagcgcagtggcgcgatctcggttcactgcaacctccgtctcccggattcaagcaatcatcctccctcagctccccacacccctccgagtagctgggattacagattgcttcctccacagtttcctcaggaaaaaccagtgatcagtgtttatccaccaatacgacatcacttaatggataaacaaggagtgtatgttacctctccattagtaaacaattttacaatgcactcagatcttggaaaaattattcagagtctgttggatgagttttggaagaatcctccagttttagctcctacttcaacagcatttccttatctatacagtaacccaagtgggatgtctccttatgcttctcagggttttccatttcttcctccatatcctccacaagaagcaaacaggagtatcacttctttatctgttgctgacactgtttcttcttcaacaacaagtcataccacagccaagcctgccgctccttcatttggtgtcctttcaaatctgccattacccattcccacagtggatgcttcaataccgacaagccaaaatggttttgggtacaagatgccagatgtccctgatgcatttccagaactctcagaactaagtgtgtcacaactcacagatatgaatgaacaagaggaggtattactagaacagtttctgactttgcctcaactaaaacaaattattaccgacaaagatgacttagtaaaaagtattgaggaactagcaagaaaaaatctccttttggagcccagcttggaagccaaaagacaaactgttttagataagtatgaattacttacacagatgaagtccactttcgaaaagaagatgcaaaggcagcatgaacttagtgagagctgtagtgcaagtgcccttcaggcaagattgaaagtagctgcacatgaagctgaggaagaatctgataatattgcagaagacttcttggagggaaagatggaaatagatgattttctcagtagcttcatggaaaagagaacaatttgccactgtagaagagccaaggaagagaaacttcagcaggcgatagcaatgcacagccaatttcatgctccactatagattttcctggaaacatgaactgccaagagaggaatgggacacaaaaccaaacactgttttatatttatggtttgcaaactggcatttcatcagtggctaaattcacagatatcctatatagattgtatacagaactgagactgattttgtaccgattagaatgattgctatgatctttgagaaatttttctgcactatttgcactgaaatgtttatttattgttgataaattgtatcatatttaagttccactgctgttcctcttaccttgattaaatgcctatgcatgtacttttagctagtttttaatattttataaaacttcatttaaatttgtatttttaacttgaagttccatttcgttatcaaggatggtatttagatttttttcctcttaaccttttttcaaaaactattttcaactgtgaggaaacccttatttttctttctttgtggataaaactttcaaaagcaatttaagatattcatagtgttaggaaacaccaaacctgcctatgtgccatctcacaaaagaaacttttaatacctacaataaatcaaaagaataaaccagctgttcttatatattgtttcatttttaaaactaaagatgcatttaagaagcaatacaagtaaatattttacctaataggaaaaaaaaaagttgcctttcatttaaaccattccaacagaaattcttatgctaatttaaaacatatatatatctggtaggtttgtggttggataggttttctaaattcctaatgttaaaaacaatctttatgttaatatacactaaatctatacacaaaaaaagtcaatgaacttttctgacctttactgtgagttaccttttcctaagaggaaagctatagtaataagtaaaatttaatttttaggcaatcctgatttttaatgaatttaattgagtgttcttgtatactacattgagcagtttgcttctataccgtgtcacaaaattcatgtatttcttgagaagccctaaaagctcataaaggaaaatgccgtgaactatgtagctcaggcttggtaaggtgccatctaaattacaaaacaaactaatgcataattttgcttaaatttcatcccagtatgattgtcttcccaacaccagcatatagtatagattgtctgtcttttttatattttttagttcttcctgtacatgtttttggcaataaagttataggaagaacaaaattattttgttagaattaaaacatgcttaatatttagtctgtttgtggagggcaggtattcacgtggactgagatacaatgttggatacagaaaataactttcattgtcttcctgacactgtgctaaggacatgctgttaaagcttcaaagtgaccagatgaggaaggaataattaattattactcctgatttgtagataactgaggtaagagtgtttcaaatttatgatagtcttttgggtattcagaaacctttccttatactgcactggccaccagagcttaattttcccagcagttacagcaatgggagatagaacagtctcaatcttttgccaaccatcaggttcctagaaaccaggtaggtgtatcccataacaagggaggagcataccacagcccctcatttgattaattcatttgatctatctatgttattaagtacctactaggaataaggcattgtggaaatactatacaaagataaacattgtttagatgcttatctactttccttttcaccagaaaaacagaaaaaaaagaaacattttcttacagagtaaaaatgttctacataatcacatgagtagttcatctcagtgttttttattctttaaagttgaactatcccagtttcattctataccattcattggataaccttgttacaacccagtcatgaaacagagcagtgtgatcagttatctgcatttaacaaatagacaaatcagtttacataaaggttatgtatgtcacccacgatgaaaagaatctgcatttgaatatgcccgtatgaatgtgggttctgtttttgcaacagagattaagtgaccattttttctaattttatggctatatattttcttcataaaaattggtcacatcggagaagcagtgccacaggaaaaatgaaatgcatgtgaaagtttgtattctgattttacaagatgagatagaaatcagaattaaagaggaatacttaggagttactaggctaatcagtgtacgaatttgtcataggtagagatttaaaggttaatatcttaaaatagaagaaaattctaaatcaatcaatcagtgagatataaactaaacagacccacttcaaagttgaaagaaatttctaggcataaattgagactaggaaatttatatcagaatagagggtgcttgacacatatatatgcttaaattgaaggacagctcagattcatttttaggagaagaaagtaaactaatgtgctcttaaagaataaaaatttattctatggtttctgtctctgatcatcaccttccattctataaaaagctcagttactgatttgctgggtcatggtcaaaattcttacctatttatttcatatcaactttaaaaaataaattacttgcattctacatattactaattgggaagtaatatgcctcaaatcagttttatactggattattccctatgctttaaaccactgctctcaataaaacacttcctgattaatgtttgattattagatattttagtcttgttggggatattttagtcttgttgggttagccatgctctgaagaatctgtgaaagtacagtaaagttttaataagcaataaatgtaaccttttatataaatctcagtgctaggttaacttctaataagcagacgaacatgttacataaattataatgtctgtcttgtaaaaaagttgaggggactaaaagtttatgactctgatatggaagttgtcatattaaaaaactacattttaaaacatcaaatatttatactatttgcttttcaaataaaagcatagtgctgtttggcatagatactttgtcattttttaaaaaatgtttattgtttttatagacatacactgtcaaacggaagaaattaaagccacatcctcaatattaggcaacagagtttctaagagtggacagctccaagaaggttgtgaagtgagttatgttatgttataaaaatgtgaaagccattaccactatatcctaagttttattttagcaaggtattccctattacatatagtatattgcagaaaatgaataaacattccttgtacttaatttgggaactgctcagcagagaatgcccaaattttatattctgaaagaattaattacacttgctttattttttacattaacagtacttttaaatcacagttctctaatatattctatatttttaaatatgatgaacacaattaaatgttttcatttatatatattgcaacactccctccaaatctttcatactagagagatcagcaatgttgctttcttgccctcgtcctcatttcagcgaaatgtaataattctcccattaaaaaaaatcagatattcaaaatattgatgtaaattgtaaagtttaaattaatcctttcacatattcaaaatattgatctaaattgtaaagtttaatccttttacattctagaatgtactaatatattaaaaccatacagtgtgaataccatttatttatgtccaaacatggccacttttccccactaagtttaatttaggtcacctagtgaagtcttttttaactcataagataggggagggactctcccttaaatgtgcagtgtaacaaaacaaaaattcttttcagaactttcagcagtcagtggtcatgagatgttactaaggttaattaaaccatattagccagttacataatttctaaaatgatagattacaaaacctattcccttcattaaacagacatgacaacccaattctctggttcttgaaactggattttcactcacagatgttttatctactaactttataatgtgatactttgagatcaggctggtggctggcccacactgtcggtagtgtagtctctagaacagtaataaaaggttattacaagaaagctgatacttaaattcatatgtaagaccaggagaatgaatgttgcttctacctcgttagctattaaatcagtgttagagaaaaagtgagatacaaggtttagcatttttaaataatgaggagaaacagactatagatctcagagaaaagcaacaaaattattctcacaattcaaaatatatgctccaaggaaaagttaaagtgatgattatgcctgaaagataagcaattaaaagctccttaggaatgcatctattaactaaaaagggtgcatctcaccaatgtgcctgtttttagaaatatgtataag

SEQ ID NO: 347211 - DNA, 5798 bp, Homo sapiens
cagaaactgactaggagcctgcgtgtgggggcgcggtgggcagtacggaatctgatgcatggtcagtatgctgggcgtctagggaccagtcctgggtgatgacctacctgtttcggagttcctcacacatttacacctacatcgacccggcggcgaacgcgacgtgtactgatacacacaatgaagattggaggagctggacggtcagtaacatggattactaagaaagacacggcagtccaacacgagttggatatcgagatgtcccaccccgctcctctgtcgctggagaaccgccgggccgagccactgggagaagcaggccagagccttccagggcctccggcccgtggacccgaggaggatgagctggctttttcccctgaccaagagcgcctcctcctccgcggctgggtcccccggtggcctcaccagcctccagcagcagaagcagcgcctgatcgagtccctccggaactcacactccagtttacaatgcactcagatcttggaaaaattattcagagtctgttggatgagttttggaagaatcctccagttttagctcctacttcaacagcatttccttatctatacagtaacccaagtgggatgtctccttatgcttctcagggttttccatttcttcctccatatcctccacaagaagcaaacaggagtatcacttctttatctgttgctgacactgtttcttcttcaacaacaagtcataccacagccaagcctgccgctccttcatttggtgtcctttcaaatctgccattacccattcccacagtggatgcttcaataccgacaagccaaaatggttttgggtacaagatgccagatgtccctgatgcatttccagaactctcagaactaagtgtgtcacaactcacagatatgaatgaacaagaggaggtattactagaacagtttctgactttgcctcaactaaaacaaattattaccgacaaagatgacttagtaaaaagtattgaggaactagcaagaaaaaatctccttttggagcccagcttggaagccaaaagacaaactgttttagataagtatgaattacttacacagatgaagtccactttcgaaaagaagatgcaaaggcagcatgaacttagtgagagctgtagtgcaagtgcccttcaggcaagattgaaagtagctgcacatgaagctgaggaagaatctgataatattgcagaagacttcttggagggaaagatggaaatagatgattttctcagtagcttcatggaaaagagaacaatttgccactgtagaagagccaaggaagagaaacttcagcaggcgatagcaatgcacagccaatttcatgctccactatagattttcctggaaacatgaactgccaagagaggaatgggacacaaaaccaaacactgttttatatttatggtttgcaaactggcatttcatcagtggctaaattcacagatatcctatatagattgtatacagaactgagactgattttgtaccgattagaatgattgctatgatctttgagaaatttttctgcactatttgcactgaaatgtttatttattgttgataaattgtatcatatttaagttccactgctgttcctcttaccttgattaaatgcctatgcatgtacttttagctagtttttaatattttataaaacttcatttaaatttgtatttttaacttgaagttccatttcgttatcaaggatggtatttagatttttttcctcttaaccttttttcaaaaactattttcaactgtgaggaaacccttatttttctttctttgtggataaaactttcaaaagcaatttaagatattcatagtgttaggaaacaccaaacctgcctatgtgccatctcacaaaagaaacttttaatacctacaataaatcaaaagaataaaccagctgttcttatatattgtttcatttttaaaactaaagatgcatttaagaagcaatacaagtaaatattttacctaataggaaaaaaaaaagttgcctttcatttaaaccattccaacagaaattcttatgctaatttaaaacatatatatatctggtaggtttgtggttggataggttttctaaattcctaatgttaaaaacaatctttatgttaatatacactaaatctatacacaaaaaaagtcaatgaacttttctgacctttactgtgagttaccttttcctaagaggaaagctatagtaataagtaaaatttaatttttaggcaatcctgatttttaatgaatttaattgagtgttcttgtatactacattgagcagtttgcttctataccgtgtcacaaaattcatgtatttcttgagaagccctaaaagctcataaaggaaaatgccgtgaactatgtagctcaggcttggtaaggtgccatctaaattacaaaacaaactaatgcataattttgcttaaatttcatcccagtatgattgtcttcccaacaccagcatatagtatagattgtctgtcttttttatattttttagttcttcctgtacatgtttttggcaataaagttataggaagaacaaaattattttgttagaattaaaacatgcttaatatttagtctgtttgtggagggcaggtattcacgtggactgagatacaatgttggatacagaaaataactttcattgtcttcctgacactgtgctaaggacatgctgttaaagcttcaaagtgaccagatgaggaaggaataattaattattactcctgatttgtagataactgaggtaagagtgtttcaaatttatgatagtcttttgggtattcagaaacctttccttatactgcactggccaccagagcttaattttcccagcagttacagcaatgggagatagaacagtctcaatcttttgccaaccatcaggttcctagaaaccaggtaggtgtatcccataacaagggaggagcataccacagcccctcatttgattaattcatttgatctatctatgttattaagtacctactaggaataaggcattgtggaaatactatacaaagataaacattgtttagatgcttatctactttccttttcaccagaaaaacagaaaaaaaagaaacattttcttacagagtaaaaatgttctacataatcacatgagtagttcatctcagtgttttttattctttaaagttgaactatcccagtttcattctataccattcattggataaccttgttacaacccagtcatgaaacagagcagtgtgatcagttatctgcatttaacaaatagacaaatcagtttacataaaggttatgtatgtcacccacgatgaaaagaatctgcatttgaatatgcccgtatgaatgtgggttctgtttttgcaacagagattaagtgaccattttttctaattttatggctatatattttcttcataaaaattggtcacatcggagaagcagtgccacaggaaaaatgaaatgcatgtgaaagtttgtattctgattttacaagatgagatagaaatcagaattaaagaggaatacttaggagttactaggctaatcagtgtacgaatttgtcataggtagagatttaaaggttaatatcttaaaatagaagaaaattctaaatcaatcaatcagtgagatataaactaaacagacccacttcaaagttgaaagaaatttctaggcataaattgagactaggaaatttatatcagaatagagggtgcttgacacatatatatgcttaaattgaaggacagctcagattcatttttaggagaagaaagtaaactaatgtgctcttaaagaataaaaatttattctatggtttctgtctctgatcatcaccttccattctataaaaagctcagttactgatttgctgggtcatggtcaaaattcttacctatttatttcatatcaactttaaaaaataaattacttgcattctacatattactaattgggaagtaatatgcctcaaatcagttttatactggattattccctatgctttaaaccactgctctcaataaaacacttcctgattaatgtttgattattagatattttagtcttgttggggatattttagtcttgttgggttagccatgctctgaagaatctgtgaaagtacagtaaagttttaataagcaataaatgtaaccttttatataaatctcagtgctaggttaacttctaataagcagacgaacatgttacataaattataatgtctgtcttgtaaaaaagttgaggggactaaaagtttatgactctgatatggaagttgtcatattaaaaaactacattttaaaacatcaaatatttatactatttgcttttcaaataaaagcatagtgctgtttggcatagatactttgtcattttttaaaaaatgtttattgtttttatagacatacactgtcaaacggaagaaattaaagccacatcctcaatattaggcaacagagtttctaagagtggacagctccaagaaggttgtgaagtgagttatgttatgttataaaaatgtgaaagccattaccactatatcctaagttttattttagcaaggtattccctattacatatagtatattgcagaaaatgaataaacattccttgtacttaatttgggaactgctcagcagagaatgcccaaattttatattctgaaagaattaattacacttgctttattttttacattaacagtacttttaaatcacagttctctaatatattctatatttttaaatatgatgaacacaattaaatgttttcatttatatatattgcaacactccctccaaatctttcatactagagagatcagcaatgttgctttcttgccctcgtcctcatttcagcgaaatgtaataattctcccattaaaaaaaatcagatattcaaaatattgatgtaaattgtaaagtttaaattaatcctttcacatattcaaaatattgatctaaattgtaaagtttaatccttttacattctagaatgtactaatatattaaaaccatacagtgtgaataccatttatttatgtccaaacatggccacttttccccactaagtttaatttaggtcacctagtgaagtcttttttaactcataagataggggagggactctcccttaaatgtgcagtgtaacaaaacaaaaattcttttcagaactttcagcagtcagtggtcatgagatgttactaaggttaattaaaccatattagccagttacataatttctaaaatgatagattacaaaacctattcccttcattaaacagacatgacaacccaattctctggttcttgaaactggattttcactcacagatgttttatctactaactttataatgtgatactttgagatcaggctggtggctggcccacactgtcggtagtgtagtctctagaacagtaataaaaggttattacaagaaagctgatacttaaattcatatgtaagaccaggagaatgaatgttgcttctacctcgttagctattaaatcagtgttagagaaaaagtgagatacaaggtttagcatttttaaataatgaggagaaacagactatagatctcagagaaaagcaacaaaattattctcacaattcaaaatatatgctccaaggaaaagttaaagtgatgattatgcctgaaagataagcaattaaaagctccttaggaatgcatctattaactaaaaagggtgcatctcaccaatgtgcctgtttttagaaatatgtataag

SEQ ID NO: 347212 - DNA, 5242 bp, Homo sapiens
tgacgcgacacgcagagggggcggagagcgcccccgggggcggggcacgcaagtgacggcggcgcgggtggtggagcgctgggcggccaggctccctggctggccggtttgggcgtctgggccgtgaaggtgggacctcctgttccgggccgcaagtttccctctccagccgcccgccgttcgtagcatgtccccctccttcatttggtgtcctttcaaatctgccattacccattcccacagtggatgcttcaataccgacaagccaaaatggttttgggtacaagatgccagatgtccctgatgcatttccagaactctcagaactaagtgtgtcacaactcacagatatgaatgaacaagaggaggtattactagaacagtttctgactttgcctcaactaaaacaaattattaccgacaaagatgacttagtaaaaagtattgaggaactagcaagaaaaaatctccttttggagcccagcttggaagccaaaagacaaactgttttagataagtatgaattacttacacagatgaagtccactttcgaaaagaagatgcaaaggcagcatgaacttagtgagagctgtagtgcaagtgcccttcaggcaagattgaaagtagctgcacatgaagctgaggaagaatctgataatattgcagaagacttcttggagggaaagatggaaatagatgattttctcagtagcttcatggaaaagagaacaatttgccactgtagaagagccaaggaagagaaacttcagcaggcgatagcaatgcacagccaatttcatgctccactatagattttcctggaaacatgaactgccaagagaggaatgggacacaaaaccaaacactgttttatatttatggtttgcaaactggcatttcatcagtggctaaattcacagatatcctatatagattgtatacagaactgagactgattttgtaccgattagaatgattgctatgatctttgagaaatttttctgcactatttgcactgaaatgtttatttattgttgataaattgtatcatatttaagttccactgctgttcctcttaccttgattaaatgcctatgcatgtacttttagctagtttttaatattttataaaacttcatttaaatttgtatttttaacttgaagttccatttcgttatcaaggatggtatttagatttttttcctcttaaccttttttcaaaaactattttcaactgtgaggaaacccttatttttctttctttgtggataaaactttcaaaagcaatttaagatattcatagtgttaggaaacaccaaacctgcctatgtgccatctcacaaaagaaacttttaatacctacaataaatcaaaagaataaaccagctgttcttatatattgtttcatttttaaaactaaagatgcatttaagaagcaatacaagtaaatattttacctaataggaaaaaaaaaagttgcctttcatttaaaccattccaacagaaattcttatgctaatttaaaacatatatatatctggtaggtttgtggttggataggttttctaaattcctaatgttaaaaacaatctttatgttaatatacactaaatctatacacaaaaaaagtcaatgaacttttctgacctttactgtgagttaccttttcctaagaggaaagctatagtaataagtaaaatttaatttttaggcaatcctgatttttaatgaatttaattgagtgttcttgtatactacattgagcagtttgcttctataccgtgtcacaaaattcatgtatttcttgagaagccctaaaagctcataaaggaaaatgccgtgaactatgtagctcaggcttggtaaggtgccatctaaattacaaaacaaactaatgcataattttgcttaaatttcatcccagtatgattgtcttcccaacaccagcatatagtatagattgtctgtcttttttatattttttagttcttcctgtacatgtttttggcaataaagttataggaagaacaaaattattttgttagaattaaaacatgcttaatatttagtctgtttgtggagggcaggtattcacgtggactgagatacaatgttggatacagaaaataactttcattgtcttcctgacactgtgctaaggacatgctgttaaagcttcaaagtgaccagatgaggaaggaataattaattattactcctgatttgtagataactgaggtaagagtgtttcaaatttatgatagtcttttgggtattcagaaacctttccttatactgcactggccaccagagcttaattttcccagcagttacagcaatgggagatagaacagtctcaatcttttgccaaccatcaggttcctagaaaccaggtaggtgtatcccataacaagggaggagcataccacagcccctcatttgattaattcatttgatctatctatgttattaagtacctactaggaataaggcattgtggaaatactatacaaagataaacattgtttagatgcttatctactttccttttcaccagaaaaacagaaaaaaaagaaacattttcttacagagtaaaaatgttctacataatcacatgagtagttcatctcagtgttttttattctttaaagttgaactatcccagtttcattctataccattcattggataaccttgttacaacccagtcatgaaacagagcagtgtgatcagttatctgcatttaacaaatagacaaatcagtttacataaaggttatgtatgtcacccacgatgaaaagaatctgcatttgaatatgcccgtatgaatgtgggttctgtttttgcaacagagattaagtgaccattttttctaattttatggctatatattttcttcataaaaattggtcacatcggagaagcagtgccacaggaaaaatgaaatgcatgtgaaagtttgtattctgattttacaagatgagatagaaatcagaattaaagaggaatacttaggagttactaggctaatcagtgtacgaatttgtcataggtagagatttaaaggttaatatcttaaaatagaagaaaattctaaatcaatcaatcagtgagatataaactaaacagacccacttcaaagttgaaagaaatttctaggcataaattgagactaggaaatttatatcagaatagagggtgcttgacacatatatatgcttaaattgaaggacagctcagattcatttttaggagaagaaagtaaactaatgtgctcttaaagaataaaaatttattctatggtttctgtctctgatcatcaccttccattctataaaaagctcagttactgatttgctgggtcatggtcaaaattcttacctatttatttcatatcaactttaaaaaataaattacttgcattctacatattactaattgggaagtaatatgcctcaaatcagttttatactggattattccctatgctttaaaccactgctctcaataaaacacttcctgattaatgtttgattattagatattttagtcttgttggggatattttagtcttgttgggttagccatgctctgaagaatctgtgaaagtacagtaaagttttaataagcaataaatgtaaccttttatataaatctcagtgctaggttaacttctaataagcagacgaacatgttacataaattataatgtctgtcttgtaaaaaagttgaggggactaaaagtttatgactctgatatggaagttgtcatattaaaaaactacattttaaaacatcaaatatttatactatttgcttttcaaataaaagcatagtgctgtttggcatagatactttgtcattttttaaaaaatgtttattgtttttatagacatacactgtcaaacggaagaaattaaagccacatcctcaatattaggcaacagagtttctaagagtggacagctccaagaaggttgtgaagtgagttatgttatgttataaaaatgtgaaagccattaccactatatcctaagttttattttagcaaggtattccctattacatatagtatattgcagaaaatgaataaacattccttgtacttaatttgggaactgctcagcagagaatgcccaaattttatattctgaaagaattaattacacttgctttattttttacattaacagtacttttaaatcacagttctctaatatattctatatttttaaatatgatgaacacaattaaatgttttcatttatatatattgcaacactccctccaaatctttcatactagagagatcagcaatgttgctttcttgccctcgtcctcatttcagcgaaatgtaataattctcccattaaaaaaaatcagatattcaaaatattgatgtaaattgtaaagtttaaattaatcctttcacatattcaaaatattgatctaaattgtaaagtttaatccttttacattctagaatgtactaatatattaaaaccatacagtgtgaataccatttatttatgtccaaacatggccacttttccccactaagtttaatttaggtcacctagtgaagtcttttttaactcataagataggggagggactctcccttaaatgtgcagtgtaacaaaacaaaaattcttttcagaactttcagcagtcagtggtcatgagatgttactaaggttaattaaaccatattagccagttacataatttctaaaatgatagattacaaaacctattcccttcattaaacagacatgacaacccaattctctggttcttgaaactggattttcactcacagatgttttatctactaactttataatgtgatactttgagatcaggctggtggctggcccacactgtcggtagtgtagtctctagaacagtaataaaaggttattacaagaaagctgatacttaaattcatatgtaagaccaggagaatgaatgttgcttctacctcgttagctattaaatcagtgttagagaaaaagtgagatacaaggtttagcatttttaaataatgaggagaaacagactatagatctcagagaaaagcaacaaaattattctcacaattcaaaatatatgctccaaggaaaagttaaagtgatgattatgcctgaaagataagcaattaaaagctccttaggaatgcatctattaactaaaaagggtgcatctcaccaatgtgcctgtttttagaaatatgtataag

SEQ ID NO: 347213 - DNA, 5109 bp, Homo sapiens
cttttggggtctttgctcttttgggtctttgctcttttggggtctttgctcttttggggtctttccttcatttggtgtcctttcaaatctgccattacccattcccacagtggatgcttcaataccgacaagccaaaatggttttgggtacaagatgccagatgtccctgatgcatttccagaactctcagaactaagtgtgtcacaactcacagatatgaatgaacaagaggaggtattactagaacagtttctgactttgcctcaactaaaacaaattattaccgacaaagatgacttagtaaaaagtattgaggaactagcaagaaaaaatctccttttggagcccagcttggaagccaaaagacaaactgttttagataagtatgaattacttacacagatgaagtccactttcgaaaagaagatgcaaaggcagcatgaacttagtgagagctgtagtgcaagtgcccttcaggcaagattgaaagtagctgcacatgaagctgaggaagaatctgataatattgcagaagacttcttggagggaaagatggaaatagatgattttctcagtagcttcatggaaaagagaacaatttgccactgtagaagagccaaggaagagaaacttcagcaggcgatagcaatgcacagccaatttcatgctccactatagattttcctggaaacatgaactgccaagagaggaatgggacacaaaaccaaacactgttttatatttatggtttgcaaactggcatttcatcagtggctaaattcacagatatcctatatagattgtatacagaactgagactgattttgtaccgattagaatgattgctatgatctttgagaaatttttctgcactatttgcactgaaatgtttatttattgttgataaattgtatcatatttaagttccactgctgttcctcttaccttgattaaatgcctatgcatgtacttttagctagtttttaatattttataaaacttcatttaaatttgtatttttaacttgaagttccatttcgttatcaaggatggtatttagatttttttcctcttaaccttttttcaaaaactattttcaactgtgaggaaacccttatttttctttctttgtggataaaactttcaaaagcaatttaagatattcatagtgttaggaaacaccaaacctgcctatgtgccatctcacaaaagaaacttttaatacctacaataaatcaaaagaataaaccagctgttcttatatattgtttcatttttaaaactaaagatgcatttaagaagcaatacaagtaaatattttacctaataggaaaaaaaaaagttgcctttcatttaaaccattccaacagaaattcttatgctaatttaaaacatatatatatctggtaggtttgtggttggataggttttctaaattcctaatgttaaaaacaatctttatgttaatatacactaaatctatacacaaaaaaagtcaatgaacttttctgacctttactgtgagttaccttttcctaagaggaaagctatagtaataagtaaaatttaatttttaggcaatcctgatttttaatgaatttaattgagtgttcttgtatactacattgagcagtttgcttctataccgtgtcacaaaattcatgtatttcttgagaagccctaaaagctcataaaggaaaatgccgtgaactatgtagctcaggcttggtaaggtgccatctaaattacaaaacaaactaatgcataattttgcttaaatttcatcccagtatgattgtcttcccaacaccagcatatagtatagattgtctgtcttttttatattttttagttcttcctgtacatgtttttggcaataaagttataggaagaacaaaattattttgttagaattaaaacatgcttaatatttagtctgtttgtggagggcaggtattcacgtggactgagatacaatgttggatacagaaaataactttcattgtcttcctgacactgtgctaaggacatgctgttaaagcttcaaagtgaccagatgaggaaggaataattaattattactcctgatttgtagataactgaggtaagagtgtttcaaatttatgatagtcttttgggtattcagaaacctttccttatactgcactggccaccagagcttaattttcccagcagttacagcaatgggagatagaacagtctcaatcttttgccaaccatcaggttcctagaaaccaggtaggtgtatcccataacaagggaggagcataccacagcccctcatttgattaattcatttgatctatctatgttattaagtacctactaggaataaggcattgtggaaatactatacaaagataaacattgtttagatgcttatctactttccttttcaccagaaaaacagaaaaaaaagaaacattttcttacagagtaaaaatgttctacataatcacatgagtagttcatctcagtgttttttattctttaaagttgaactatcccagtttcattctataccattcattggataaccttgttacaacccagtcatgaaacagagcagtgtgatcagttatctgcatttaacaaatagacaaatcagtttacataaaggttatgtatgtcacccacgatgaaaagaatctgcatttgaatatgcccgtatgaatgtgggttctgtttttgcaacagagattaagtgaccattttttctaattttatggctatatattttcttcataaaaattggtcacatcggagaagcagtgccacaggaaaaatgaaatgcatgtgaaagtttgtattctgattttacaagatgagatagaaatcagaattaaagaggaatacttaggagttactaggctaatcagtgtacgaatttgtcataggtagagatttaaaggttaatatcttaaaatagaagaaaattctaaatcaatcaatcagtgagatataaactaaacagacccacttcaaagttgaaagaaatttctaggcataaattgagactaggaaatttatatcagaatagagggtgcttgacacatatatatgcttaaattgaaggacagctcagattcatttttaggagaagaaagtaaactaatgtgctcttaaagaataaaaatttattctatggtttctgtctctgatcatcaccttccattctataaaaagctcagttactgatttgctgggtcatggtcaaaattcttacctatttatttcatatcaactttaaaaaataaattacttgcattctacatattactaattgggaagtaatatgcctcaaatcagttttatactggattattccctatgctttaaaccactgctctcaataaaacacttcctgattaatgtttgattattagatattttagtcttgttggggatattttagtcttgttgggttagccatgctctgaagaatctgtgaaagtacagtaaagttttaataagcaataaatgtaaccttttatataaatctcagtgctaggttaacttctaataagcagacgaacatgttacataaattataatgtctgtcttgtaaaaaagttgaggggactaaaagtttatgactctgatatggaagttgtcatattaaaaaactacattttaaaacatcaaatatttatactatttgcttttcaaataaaagcatagtgctgtttggcatagatactttgtcattttttaaaaaatgtttattgtttttatagacatacactgtcaaacggaagaaattaaagccacatcctcaatattaggcaacagagtttctaagagtggacagctccaagaaggttgtgaagtgagttatgttatgttataaaaatgtgaaagccattaccactatatcctaagttttattttagcaaggtattccctattacatatagtatattgcagaaaatgaataaacattccttgtacttaatttgggaactgctcagcagagaatgcccaaattttatattctgaaagaattaattacacttgctttattttttacattaacagtacttttaaatcacagttctctaatatattctatatttttaaatatgatgaacacaattaaatgttttcatttatatatattgcaacactccctccaaatctttcatactagagagatcagcaatgttgctttcttgccctcgtcctcatttcagcgaaatgtaataattctcccattaaaaaaaatcagatattcaaaatattgatgtaaattgtaaagtttaaattaatcctttcacatattcaaaatattgatctaaattgtaaagtttaatccttttacattctagaatgtactaatatattaaaaccatacagtgtgaataccatttatttatgtccaaacatggccacttttccccactaagtttaatttaggtcacctagtgaagtcttttttaactcataagataggggagggactctcccttaaatgtgcagtgtaacaaaacaaaaattcttttcagaactttcagcagtcagtggtcatgagatgttactaaggttaattaaaccatattagccagttacataatttctaaaatgatagattacaaaacctattcccttcattaaacagacatgacaacccaattctctggttcttgaaactggattttcactcacagatgttttatctactaactttataatgtgatactttgagatcaggctggtggctggcccacactgtcggtagtgtagtctctagaacagtaataaaaggttattacaagaaagctgatacttaaattcatatgtaagaccaggagaatgaatgttgcttctacctcgttagctattaaatcagtgttagagaaaaagtgagatacaaggtttagcatttttaaataatgaggagaaacagactatagatctcagagaaaagcaacaaaattattctcacaattcaaaatatatgctccaaggaaaagttaaagtgatgattatgcctgaaagataagcaattaaaagctccttaggaatgcatctattaactaaaaagggtgcatctcaccaatgtgcctgtttttagaaatatgtataag

SEQ ID NO: 347214 - DNA, 1740 bp, Homo sapiens
tgacgcgacacgcagagggggcggagagcgcccccgggggcggggcacgcaagtgacggcggcgcgggtggtggagcgctgggcggccaggctccctggctggccggtttgggcgtctgggccgtgaaggtgggacctcctgttccgggccgcaagtttccctctccagccgcccgccgttcgtagcatgtcccccagaactcggggagcgcaggcaggacaggcttagagaagacgcggtccccagcgcttgggccacggacgtcccaccccgctcctctgtcgctggagaaccgccgggccgagccactgggagaagcaggccagagccttccagggcctccggcccgtggacccgaggaggatgagctggctttttcccctgaccaagagcgcctcctcctccgcggctgggtcccccggtggcctcaccagcctccagcagcagaagcagcgcctgatcgagtccctccggaactcacactccagtatagccgaaatacagaaagatgtggaatacagattgccattcaccataaacaacctgacaattaacattaatatattgcttcctccacagtttcctcaggaaaaaccagtgatcagtgtttatccaccaatacgacatcacttaatggataaacaaggagtgtatgttacctctccattagtaaacaattttacaatgcactcagatcttggaaaaattattcagagtctgttggatgagttttggaagaatcctccagttttagctcctacttcaacagcatttccttatctatacagtaacccaagtgggatgtctccttatgcttctcagggttttccatttcttcctccatatcctccacaagaagcaaacaggagtatcacttctttatctgttgctgacactgtttcttcttcaacaacaagtcataccacagccaagcctgccgctccttcatttggtgtcctttcaaatctgccattacccattcccacagtggatgcttcaataccgacaagccaaaatggttttgggtacaagatgccagatgtccctgatgcatttccagaactctcagaactaagtgtgtcacaactcacagatatgaatgaacaagaggaggtattactagaacagtttctgactttgcctcaactaaaacaaattattaccgacaaagatgacttagtaaaaagtattgaggaactagcaagaaaaaatctccttttggagcccagcttggaagccaaaagacaaactgttttagataagtatgaattacttacacagatgaagtccactttcgaaaagaagatgcaaaggcagcatgaacttagtgagagctgtagtgcaagtgcccttcaggcaagattgaaagtagctgcacatgaagctgaggaagaatctgataatattgcagaagacttcttggagggaaagatggaaatagatgattttctcagtagcttcatggaaaagagaacaatttgccactgtagaagagccaaggaagagaaacttcagcaggcgatagcaatgcacagccaatttcatgctccactataggtaaattgtatttcaagtttgagtctcaaggtgattgcatcagtgttctttaaatagacatgttgttaacggtgcctgttcatcagccttaagcataattctgtcattatagttactgtgctatgtaacatagaatgctttgtattatataataagcataatataaacatataactagtaga

SEQ ID NO: 347215 - DNA, 849 bp, Homo sapiens
cagaaactgactaggagcctgcgtgtgggggcgcggtgggcagtacggaatctgatgcatggtcagtatgctgggcgtctagggaccagtcctgggtgatgacctacctgtttcggagttcctcacacatttacacctacatcgacccggcggcgaacgcgacgtgtactgatacacacaatgaagattggaggagctggacggtcagtaacatggattactaagaaagacacggcagtccaacacgagttggatatcgagatgtcccaccccgctcctctgtcgctggagaaccgccgggccgagccactgggagaagcaggccagagccttccagggcctccggcccgtggacccgaggaggatgagctggctttttcccctgaccaagagcgcctcctcctccgcggctgggtcccccggtggcctcaccagcctccagcagcagaagcagcgcctgatcgagtccctccggaactcacactccagatagtctatttccagtatcccttgctgcccaggcttcgccactgatctttccctttgcccacctgattgccgcgtcagcagaattgttaaaatacaattgtgaagagtaatctccaggtttcacaaagaatggaaaatagaactgttgcaacatcaaaggaaagggaagccagagttttcatcagtgaatgcttctcgtctgagagtcacttatcacgtagtcagtcttcttgagtctctaagatttaccctgttggagcagtctctccccatctcacagcgaccagtgcatgtacatttctcacttctttcatagtcttgtccccacgctcaagaattactttatgttcatcttgattg

SEQ ID NO: 347216 - DNA, 849 bp, Homo sapiens
attcggcacggcggctttttaaatgacccaggcgggggtaatgatcaagatgaactggcccttttctacttccaagcttttaacagataccaccatatttgacagaattcccagagtgaattgcttgtgttattagtagattcagtgcccccagctgggataggcaagccatgacagcttccctgtttcacctacagaagtcttatctgagggatctattcacagtaagcaccaaggtctccatgtcttgaggtcagtttcattgtcttttgaaaagtgcatgcttcatttgaacaattcattcagcagcagatggactttcagtgatttaaaataaaattttgatccaaagctcaggacacaaaccacagtggtaaaattgagtagcatataatatcagactaaattatctgtaattttccacaacccagattgtatgtgttttatgtgtgtttaaataaatatgttagatacacgtgtatacatacacccatatacaacagatccaagactggctgacttcatttgaaatggttgaatctgctgtgtaataaagtggttcaaccatgattaggaactgaaatttagtagaagagggaaaaggagttaatgtaacaaattattttagctacaaaccccggtaatagagcacttgggggatgggatggggtgggttggtgagacaatcagaatggtaaattgattaaatgctcctaaccctgtaattttgtgcatagagcaccctatgctgtggaaataactgttcttagatttcattgtaactggactgttcaggttgcccagagggaaagaacattcctaattctaataaaataaacttttattttg

SEQ ID NO: 347217 - DNA, 198 bp, Homo sapiens
tggaaataactgttcttagatttccacagcatagggtgctctatgcacaaaattacagggttaggagcctgtaattttgtgcatagagcaccctatgctgtggaaataactgttcttagatttcattgtaactggactgttcaggttgcccagagggaaagaacattcctaattctaataaaataaacttttattttg

SEQ ID NO: 347218 - DNA, 5266 bp, Homo sapiens
acgcacgcccctttgttggctcagtagcgatagcagcggccgtggaggtggcgttggggactgttttctctcggaggccggagcggagccgcgtctgactgaggcgggcagcaagcggccccctcgctccctccctccctcctccgcgccctccccgccgccaccagccgtcaaacgccaaccgccgctcctggggaggagccgcggctcgcggggccggagccaggcctgcgtccggacatcagccggagccggagcgagagccggggcctcggcgtccccgccctctccccgcctcggccagcgtccgccgggcccccgcgcgtcgcgccatggactcggacgagggctacaactacgagttcgacgaggacgaggagtgcagtgaggaggacagcggcgccgaggaggaggaggacgaagacgacgacgagccggacgatgataccctggatctgggcgaggtggagctggtggagcccgggctgggcgtcggcggggagcgggacggactgctgtgcggggagacgggcggtggcggcggcagcgctctggggcccggcggtggcggcggcggcggcggcggcggtggtggtggcgggccggggcatgagcaggaggaggattaccgctacgaggtgctcacggccgagcagattctacaacacatggtggaatgtatccgggaggtcaacgaggtcatccagaatccagcaactatcacaagaatactccttagccacttcaattgggataaagagaagctaatggaaaggtactttgatggaaacctggagaagctctttgctgagtgtcatgtaattaatccaagtaaaaagtctcgaacacgccagatgaatacaaggtcatcagcacaggatatgccttgtcagatctgctacttgaactaccctaactcgtatttcactggccttgaatgtggacataagttttgtatgcagtgctggagtgaatatttaactaccaaaataatggaagaaggcatgggtcagactatttcgtgtcctgctcatggttgtgatatcttagtggatgacaacacagttatgcgcctgatcacagattcaaaagttaaattaaagtatcagcatttaataacaaatagctttgtagagtgcaatcgactgttaaagtggtgtcctgccccagattgccaccatgttgttaaagtccaatatcctgatgctaaacctgttcgctgcaaatgtgggcgccaattttgctttaactgtggagaaaattggcatgatcctgttaaatgtaagtggttaaagaaatggattaaaaagtgtgatgatgacagtgaaacctccaattggattgcagccaacacaaaggaatgtcccaaatgccatgtcacaattgagaaggatggtggttgtaatcacatggtctgtcgtaaccagaattgtaaagcagagttttgctgggtgtgtcttggcccatgggaaccacatggatctgcctggtacaactgtaaccgctataatgaggatgatgcaaaggcagcaagagatgcacaggagcgatctagggcagccctgcagaggtacctgttctactgtaatcgctatatgaaccacatgcagagcctgcgctttgagcacaaactatatgctcaggtgaaacagaaaatggaggagatgcagcagcacaacatgtcctggattgaggtgcagttcctgaagaaggcagttgatgtcctctgccagtgtcgtgccacactcatgtacacttatgtcttcgctttctacctcaaaaagaataaccagtccattatctttgagaataaccaagcagatctagagaatgccacagaggtgctctcgggctaccttgaacgagatatttcccaagattctctgcaggatataaagcagaaagtacaagacaagtacagatactgtgagagtcgacgaagggttttgttacagcatgtgcatgaaggctatgaaaaagatctgtgggagtacattgaggactgagaatggccctgcataaaatgaactctgaaaactttaccatctagagtgctcatgcaattaaaacaaaacaaacacaaacaaggaggcactaagcctattctgacaccactggtctgtagtaccagaattgttttgttaatggaaagtttaagtaaattatattgtaataaaaaggtagataaaccattgtacaacagtattctaggccgccaacaaaagtgtgacagacacactaaaagccctccaactttaacttgtaacgtagcttcattctcaaagctgactccttttttttctttttccttttcctgagtgtagtacagttaaaatttcaaacagctccttgacactgcttttcatgttcaaaccagccattttgttgtactttggtaaaggacctcttccccttcctcccctacacatacagatacacccacacacagactgactctctttctctcataccccaaggtcatgagtgaatgatgcttagttccttgtaaagaaaatcttgggatggggaaaggggtaggcagcaagaggattcaacaaacgaaaaacataaaaactttgtatatgacttttaaaacaagaggacaacacagtatttttcaaaattgtatatagcgcatatgcatggacaaagcaagcgtggcacgtgtttgcataatgtttaattacaaaaaaatatttattctttaaaaatcttcaagattatgtctatttgctgtgcattttctttcagtttgcttatctttcccgggttggggttgggataaaggtgtgtcggtttagcacctctggaagacctatctagagctctttcactttcctgaggttattttgccctttctggtgttggtatgtctgttgccggccatgggcctcatgccttgaattcctgctcttgatcagggacaagggaggtcaagctctgactaatgccatgacctgattaaggggtacagcagggagttttgttgctacagctcatgaattaacctgtcccaacctaatccccctccatggcatcatgcctctacccaagcctttgtgtgcccatgttatgcacacagctgtaggcattcttaagtcccctgtcgcatccagtggaagcattttaaaatttcttttactttttggttttcccttaattgctgcttttcagattttagttatggctcgtctgctcaccccttctctacattagggtgtcaaagagaatgttttgctttaaatataaatagccattcatttagtctcagattgtgaatttaaaatggtggataccgaaattgcttgtgtgtgttgctgtgggtttggtttgaaggcaaacacccctagaacatgatattcccatctagtgcatttaaatagaaatcactgagtttgctgcttttttattgtcagcagataggagaattaataatgcattttagctgtgatgtccatttttatgaaattcctactaagagctatgttaaaagtaaaggatggtggtggttgtattaactatatacctgtttaggccattctggctgtggtatttttcaataggtcagcatctgtaaatctgtcagttttatacaggagtgcagagtgaactaggcaactagattaagaggtctaaatatgaaataccagttgaggctgaggacctcttcgtcttcctttaaatgtcttttgcctagggagtgtttaccatttgtgaggcagctttgtctgctcttacactgtacatcctattactccattgggaagtaggttcactttcctctggccttttgcctaagttaggctttgctgaatcaaccctacttttccttttagaaaaggttgttacaggagatttactggcaactgttcttttcccatcaaaaatcagtgaatgtttgctgagtataaatgctgcttccttaaaccacttgtcgctttaggatcaactttacctgtaccttttctcctttcctcccttgccacctcaggtgcaaatctgaactcagtgtctgcttcttccattttctcgtctctctcccctcttcccccattatccatatgacattattttacttcaaatgacagcatcaatcttaaaaagatatacattaaaactaaggagtttttttaaagaaagcctgaataagttcctttccctggtaactttgaaaagcagtcagagttgctatatagatatatgtggctcctttaaaatgctttgtgtatgtgtggtgtttaaaaaaaaaaaatcttaccagttaactttgcagtgtctaggtttgagtgtcataaatccacgtgttcctgttgcaacaaatacccaaaaattgtgtgtgcacttcctaataccagtcttcacccatggaggaacagtgctttttagagatgctttctatttcaatgttggcatactgcctgagggtattgcagttgtgggtgcattccctaatttgtatgatcaagatgaactggcccttttctacttccaagcttttaacagataccaccatatttgacagaattcccagagtgaattgcttgtgttattagtagattcagtgcccccagctgggataggcaagccatgacagcttccctgtttcacctacagaagtcttatctgagggatctattcacagtaagcaccaaggtctccatgtcttgaggtcagtttcattgtcttttgaaaagtgcatgcttcatttgaacaattcattcagcagcagatggactttcagtgatttaaaataaaattttgatccaaagctcaggacacaaaccacagtggtaaaattgagtagcatataatatcagactaaattatctgtaattttccacaacccagattgtatgtgttttatgtgtgtttaaataaatatgttagatacacgtgtatacatacacccatatacaacagatccaagactggctgacttcatttgaaatggttgaatctgctgtgtaataaagtggttcaaccatgattaggaactgaaatttagtagaagagggaaaaggagttaatgtaacaaattattttagctacaaaccccggtaatagagcacttgggggatgggatggggtgggttggtgagacaatcagaatggtaaattgattaaatgctcctaaccctgtaattttgtgcatagagcaccctatgctgtggaaataactgttcttagatttcattgtaactggactgttcaggttgcccagagggaaagaacattcctaattctaataaaataaacttttattttg

SEQ ID NO: 347219 - DNA, 5155 bp, Homo sapiens
acgcacgcccctttgttggctcagtagcgatagcagcggccgtggaggtggcgttggggactgttttctctcggaggccggagcggagccgcgtctgactgaggcgggcagcaagcggccccctcgctccctccctccctcctccgcgccctccccgccgccaccagccgtcaaacgccaaccgccgctcctggggaggagccgcggctcgcggggccggagccaggcctgcgtccggacatcagccggagccggagcgagagccggggcctcggcgtccccgccctctccccgcctcggccagcgtccgccgggcccccgcgcgtcgcgccatggactcggacgagggctacaactacgagttcgacgaggacgaggagtgcagtgaggaggacagcggcgccgaggaggaggaggacgaagacgacgacgagccggacgatgataccctggatctgggcgaggtggagctggtggagcccgggctgggcgtcggcggggagcgggacggactgctgtgcggggagacgggcggtggcggcggcagcgctctggggcccggcggtggcggcggcggcggcggcggcggtggtggtggcgggccggggcatgagcaggaggaggattaccgctacgaggtgctcacggccgagcagattctacaacacatggtggaatgtatccgggaggtcaacgaggtcatccagaatccagcaactatcacaagaatactccttagccacttcaattgggataaagagaagctaatggaaaggtactttgatggaaacctggagaagctctttgctgagtgtcatgtaattaatccaagtaaaaagtctcgaacacgccagatgaatacaaggtcatcagcacaggatatgccttgtcagatctgctacttgaactaccctaactcgtatttcactggccttgaatgtggacataagttttgtatgcagtgctggagtgaatatttaactaccaaaataatggaagaaggcatgggtcagactatttcgtgtcctgctcatggttgtgatatcttagtggatgacaacacagttatgcgcctgatcacagattcaaaagttaaattaaagtatcagcatttaataacaaatagctttgtagagtgcaatcgactgttaaagtggtgtcctgccccagattgccaccatgttgttaaagtccaatatcctgatgctaaacctgttcgctgcaaatgtgggcgccaattttgctttaactgtggagaaaattggcatgatcctgttaaatgtaagtggttaaagaaatggattaaaaagtgtgatgatgacagtgaaacctccaattggattgcagccaacacaaaggaatgtcccaaatgccatgtcacaattgagaaggatggtggttgtaatcacatggtctgtcgtaaccagaattgtaaagcagagttttgctgggtgtgtcttggcccatgggaaccacatggatctgcctggtacaactgtaaccgctataatgaggatgatgcaaaggcagcaagagatgcacaggagcgatctagggcagccctgcagaggtacctgttctactgtaatcgctatatgaaccacatgcagagcctgcgctttgagcacaaactatatgctcaggtgaaacagaaaatggaggagatgcagcagcacaacatgtcctggattgaggtgcagttcctgaagaaggcagttgatgtcctctgccagtgtcgtgccacactcatgtacacttatgtcttcgctttctacctcaaaaagaataaccagtccattatctttgagaataaccaagcagatctagagaatgccacagaggtgctctcgggctaccttgaacgagatatttcccaagattctctgcaggatataaagcagaaagtacaagacaagtacagatactgtgagagtcgacgaagggttttgttacagcatgtgcatgaaggctatgaaaaagatctgtgggagtacattgaggactgagaatggccctgcataaaatgaactctgaaaactttaccatctagagtgctcatgcaattaaaacaaaacaaacacaaacaaggaggcactaagcctattctgacaccactggtctgtagtaccagaattgttttgttaatggaaagtttaagtaaattatattgtaataaaaaggtagataaaccattgtacaacagtattctaggccgccaacaaaagtgtgacagacacactaaaagccctccaactttaacttgtaacgtagcttcattctcaaagctgactccttttttttctttttccttttcctgagtgtagtacagttaaaatttcaaacagctccttgacactgcttttcatgttcaaaccagccattttgttgtactttggtaaaggacctcttccccttcctcccctacacatacagatacacccacacacagactgactctctttctctcataccccaaggtcatgagtgaatgatgcttagttccttgtaaagaaaatcttgggatggggaaaggggtaggcagcaagaggattcaacaaacgaaaaacataaaaactttgtatatgacttttaaaacaagaggacaacacagtatttttcaaaattgtatatagcgcatatgcatggacaaagcaagcgtggcacgtgtttgcataatgtttaattacaaaaaaatatttattctttaaaaatcttcaagattatgtctatttgctgtgcattttctttcagtttgcttatctttcccgggttggggttgggataaaggtgtgtcggtttagcacctctggaagacctatctagagctctttcactttcctgaggttattttgccctttctggtgttggtatgtctgttgccggccatgggcctcatgccttgaattcctgctcttgatcagggacaagggaggtcaagctctgactaatgccatgacctgattaaggggtacagcagggagttttgttgctacagctcatgaattaacctgtcccaacctaatccccctccatggcatcatgcctctacccaagcctttgtgtgcccatgttatgcacacagctgtaggcattcttaagtcccctgtcgcatccagtggaagcattttaaaatttcttttactttttggttttcccttaattgctgcttttcagattttagttatggctcgtctgctcaccccttctctacattagggtgtcaaagagaatgttttgctttaaatataaatagccattcatttagtctcagattgtgaatttaaaatggtggataccgaaattgcttgtgtgtgttgctgtgggtttggtttgaaggcaaacacccctagaacatgatattcccatctagtgcatttaaatagaaatcactgagtttgctgcttttttattgtcagcagataggagaattaataatgcattttagctgtgatgtccatttttatgaaattcctactaagagctatgttaaaagtaaaggatggtggtggttgtattaactatatacctgtttaggccattctggctgtggtatttttcaataggtcagcatctgtaaatctgtcagttttatacaggagtgcagagtgaactaggcaactagattaagaggtctaaatatgaaataccagttgaggctgaggacctcttcgtcttcctttaaatgtcttttgcctagggagtgtttaccatttgtgaggcagctttgtctgctcttacactgtacatcctattactccattgggaagtaggttcactttcctctggccttttgcctaagttaggctttgctgaatcaaccctacttttccttttagaaaaggttgttacaggagatttactggcaactgttcttttcccatcaaaaatcagtgaatgtttgctgagtataaatgctgcttccttaaaccacttgtcgctttaggatcaactttacctgtaccttttctcctttcctcccttgccacctcaggtgcaaatctgaactcagtgtctgcttcttccattttctcgtctctctcccctcttcccccattatccatatgacattattttacttcaaatgacagcatcaatcttaaaaagatatacattaaaactaaggagtttttttaaagaaagcctgaataagttcctttccctggtaactttgaaaagcagtcagagttgctatatagatatatgtggctcctttaaaatgctttgtgtatgtgtggtgtttaaaaaaaaaaaatcttaccagttaactttgcagtgtctaggtttgagtgtcataaatccacgtgttcctgttgcaacaaatacccaaaaattgtgtgtgcacttcctaataccagtcttcacccatggaggaacagtgctttttagagatgctttctatttcaatgttggcatactgcctgagggtattgcagttgtgggtgcattccctaatttgtatgatcaagatgaactggcccttttctacttccaagcttttaacagataccaccatatttgacagaattcccagagtgaattgcttgtgttattagtagattcagtgcccccagctgggataggcaagccatgacagcttccctgtttcacctacagaagtcttatctgagggatctattcacagtaagcaccaaggtctccatgtcttgaggtcagtttcattgtcttttgaaaagtgcatgcttcatttgaacaattcattcagcagcagatggactttcagtgatttaaaataaaattttgatccaaagctcaggacacaaaccacagtggtaaaattgagtagcatataatatcagactaaattatctgtaattttccacaacccagattgtatgtgttttatgtgtgtttaaataaatatgttagatacacgtgtatacatacacccatatacaacagatccaagactggctgacttcatttgaaatggttgaatctgctgtgtaataaagtggttcaaccatgattaggaactgaaatttagtagaagagggaaaaggagtcctgtaattttgtgcatagagcaccctatgctgtggaaataactgttcttagatttcattgtaactggactgttcaggttgcccagagggaaagaacattcctaattctaataaaataaacttttattttg

SEQ ID NO: 347220 - DNA, 5188 bp, Homo sapiens
acgcacgcccctttgttggctcagtagcgatagcagcggccgtggaggtggcgttggggactgttttctctcggaggccggagcggagccgcgtctgactgaggcgggcagcaagcggccccctcgctccctccctccctcctccgcgccctccccgccgccaccagccgtcaaacgccaaccgccgctcctggggaggagccgcggctcgcggggccggagccaggcctgcgtccggacatcagccggagccggagcgagagccggggcctcggcgtccccgccctctccccgcctcggccagcgtccgccgggcccccgcgcgtcgcgccatggactcggacgagggctacaactacgagttcgacgaggacgaggagtgcagtgaggaggacagcggcgccgaggaggaggaggacgaagacgacgacgagccggacgatgataccctggatctgggcgaggtggagctggtggagcccgggctgggcgtcggcggggagcgggacggactgctgtgcggggagacgggcggtggcggcggcagcgctctggggcccggcggtggcggcggcggcggcggcggcggtggtggtggcgggccggggcatgagcaggaggaggattaccgctacgaggtgctcacggccgagcagattctacaacacatggtggaatgtatccgggaggtcaacgaggtcatccagaatccagcaactatcacaagaatactccttagccacttcaattgggataaagagaagctaatggaaaggtactttgatggaaacctggagaagctctttgctgagtgtcatgtaattaatccaagtaaaaagtctcgaacacgccagatgaatacaaggtcatcagcacaggatatgccttgtcagatctgctacttgaactaccctaactcgtatttcactggccttgaatgtggacataagttttgtatgcagtgctggagtgaatatttaactaccaaaataatggaagaaggcatgggtcagactatttcgtgtcctgctcatggttgtgatatcttagtggatgacaacacagttatgcgcctgatcacagattcaaaagttaaattaaagtatcagcatttaataacaaatagctttgtagagtgcaatcgactgttaaagtggtgtcctgccccagattgccaccatgttgttaaagtccaatatcctgatgctaaacctgttcgctgcaaatgtgggcgccaattttgctttaactgtggagaaaattggcatgatcctgttaaatgtaagtggttaaagaaatggattaaaaagtgtgatgatgacagtgaaacctccaattggattgcagccaacacaaaggaatgtcccaaatgccatgtcacaattgagaaggatggtggttgtaatcacatggtctgtcgtaaccagaattgtaaagcagagttttgctgggtgtgtcttggcccatgggaaccacatggatctgcctggtacaactgtaaccgctataatgaggatgatgcaaaggcagcaagagatgcacaggagcgatctagggcagccctgcagaggtacctgttctactgtaatcgctatatgaaccacatgcagagcctgcgctttgagcacaaactatatgctcaggtgaaacagaaaatggaggagatgcagcagcacaacatgtcctggattgaggtgcagttcctgaagaaggcagttgatgtcctctgccagtgtcgtgccacactcatgtacacttatgtcttcgctttctacctcaaaaagaataaccagtccattatctttgagaataaccaagcagatctagagaatgccacagaggtgctctcgggctaccttgaacgagatatttcccaagattctctgcaggatataaagcagaaagtacaagacaagtacagatactgtgagagtcgacgaagggttttgttacagcatgtgcatgaaggctatgaaaaagatctgtgggagtacattgaggactgagaatggccctgcataaaatgaactctgaaaactttaccatctagagtgctcatgcaattaaaacaaaacaaacacaaacaaggaggcactaagcctattctgacaccactggtctgtagtaccagaattgttttgttaatggaaagtttaagtaaattatattgtaataaaaaggtagataaaccattgtacaacagtattctaggccgccaacaaaagtgtgacagacacactaaaagccctccaactttaacttgtaacgtagcttcattctcaaagctgactccttttttttctttttccttttcctgagtgtagtacagttaaaatttcaaacagctccttgacactgcttttcatgttcaaaccagccattttgttgtactttggtaaaggacctcttccccttcctcccctacacatacagatacacccacacacagactgactctctttctctcataccccaaggtcatgagtgaatgatgcttagttccttgtaaagaaaatcttgggatggggaaaggggtaggcagcaagaggattcaacaaacgaaaaacataaaaactttgtatatgacttttaaaacaagaggacaacacagtatttttcaaaattgtatatagcgcatatgcatggacaaagcaagcgtggcacgtgtttgcataatgtttaattacaaaaaaatatttattctttaaaaatcttcaagattatgtctatttgctgtgcattttctttcagtttgcttatctttcccgggttggggttgggataaaggtgtgtcggtttagcacctctggaagacctatctagagctctttcactttcctgaggttattttgccctttctggtgttggtatgtctgttgccggccatgggcctcatgccttgaattcctgctcttgatcagggacaagggaggtcaagctctgactaatgccatgacctgattaaggggtacagcagggagttttgttgctacagctcatgaattaacctgtcccaacctaatccccctccatggcatcatgcctctacccaagcctttgtgtgcccatgttatgcacacagctgtaggcattcttaagtcccctgtcgcatccagtggaagcattttaaaatttcttttactttttggttttcccttaattgctgcttttcagattttagttatggctcgtctgctcaccccttctctacattagggtgtcaaagagaatgttttgctttaaatataaatagccattcatttagtctcagattgtgaatttaaaatggtggataccgaaattgcttgtgtgtgttgctgtgggtttggtttgaaggcaaacacccctagaacatgatattcccatctagtgcatttaaatagaaatcactgagtttgctgcttttttattgtcagcagataggagaattaataatgcattttagctgtgatgtccatttttatgaaattcctactaagagctatgttaaaagtaaaggatggtggtggttgtattaactatatacctgtttaggccattctggctgtggtatttttcaataggtcagcatctgtaaatctgtcagttttatacaggagtgcagagtgaactaggcaactagattaagaggtctaaatatgaaataccagttgaggctgaggacctcttcgtcttcctttaaatgtcttttgcctagggagtgtttaccatttgtgaggcagctttgtctgctcttacactgtacatcctattactccattgggaagtaggttcactttcctctggccttttgcctaagttaggctttgctgaatcaaccctacttttccttttagaaaaggttgttacaggagatttactggcaactgttcttttcccatcaaaaatcagtgaatgtttgctgagtataaatgctgcttccttaaaccacttgtcgctttaggatcaactttacctgtaccttttctcctttcctcccttgccacctcaggtgcaaatctgaactcagtgtctgcttcttccattttctcgtctctctcccctcttcccccattatccatatgacattattttacttcaaatgacagcatcaatcttaaaaagatatacattaaaactaaggagtttttttaaagaaagcctgaataagttcctttccctggtaactttgaaaagcagtcagagttgctatatagatatatgtggctcctttaaaatgctttgtgtatgtgtggtgtttaaaaaaaaaaaatcttaccagttaactttgcagtgtctaggtttgagtgtcataaatccacgtgttcctgttgcaacaaatacccaaaaattgtgtgtgcacttcctaataccagtcttcacccatggaggaacagtgctttttagagatgctttctatttcaatgttggcatactgcctgagggtattgcagttgtgggtgcattccctaatttgtatgatcaagatgaactggcccttttctacttccaagcttttaacagataccaccatatttgacagaattcccagagtgaattgcttgtgttattagtagattcagtgcccccagctgggataggcaagccatgacagcttccctgtttcacctacagaagtcttatctgagggatctattcacagtaagcaccaaggtctccatgtcttgaggtcagtttcattgtcttttgaaaagtgcatgcttcatttgaacaattcattcagcagcagatggactttcagtgatttaaaataaaattttgatccaaagctcaggacacaaaccacagtggtaaaattgagtagcatataatatcagactaaattatctgtaattttccacaacccagattgtatgtgttttatgtgtgtttaaataaatatgttagatacacgtgtatacatacacccatatgaactgaaatttagtagaagagggaaaaggagttaatgtaacaaattattttagctacaaaccccggtaatagagcacttgggggatgggatggggtgggttggtgagacaatcagaatggtaaattgattaaatgctcctaaccctgtaattttgtgcatagagcaccctatgctgtggaaataactgttcttagatttcattgtaactggactgttcaggttgcccagagggaaagaacattcctaattctaataaaataaacttttattttg

SEQ ID NO: 347221 - DNA, 5121 bp, Homo sapiens
acgcacgcccctttgttggctcagtagcgatagcagcggccgtggaggtggcgttggggactgttttctctcggaggccggagcggagccgcgtctgactgaggcgggcagcaagcggccccctcgctccctccctccctcctccgcgccctccccgccgccaccagccgtcaaacgccaaccgccgctcctggggaggagccgcggctcgcggggccggagccaggcctgcgtccggacatcagccggagccggagcgagagccggggcctcggcgtccccgccctctccccgcctcggccagcgtccgccgggcccccgcgcgtcgcgccatggactcggacgagggctacaactacgagttcgacgaggacgaggagtgcagtgaggaggacagcggcgccgaggaggaggaggacgaagacgacgacgagccggacgatgataccctggatctgggcgaggtggagctggtggagcccgggctgggcgtcggcggggagcgggacggactgctgtgcggggagacgggcggtggcggcggcagcgctctggggcccggcggtggcggcggcggcggcggcggcggtggtggtggcgggccggggcatgagcaggaggaggattaccgctacgaggtgctcacggccgagcagattctacaacacatggtggaatgtatccgggaggtcaacgaggtcatccagaatccagcaactatcacaagaatactccttagccacttcaattgggataaagagaagctaatggaaagtatttcactggccttgaatgtggacataagttttgtatgcagtgctggagtgaatatttaactaccaaaataatggaagaaggcatgggtcagactatttcgtgtcctgctcatggttgtgatatcttagtggatgacaacacagttatgcgcctgatcacagattcaaaagttaaattaaagtatcagcatttaataacaaatagctttgtagagtgcaatcgactgttaaagtggtgtcctgccccagattgccaccatgttgttaaagtccaatatcctgatgctaaacctgttcgctgcaaatgtgggcgccaattttgctttaactgtggagaaaattggcatgatcctgttaaatgtaagtggttaaagaaatggattaaaaagtgtgatgatgacagtgaaacctccaattggattgcagccaacacaaaggaatgtcccaaatgccatgtcacaattgagaaggatggtggttgtaatcacatggtctgtcgtaaccagaattgtaaagcagagttttgctgggtgtgtcttggcccatgggaaccacatggatctgcctggtacaactgtaaccgctataatgaggatgatgcaaaggcagcaagagatgcacaggagcgatctagggcagccctgcagaggtacctgttctactgtaatcgctatatgaaccacatgcagagcctgcgctttgagcacaaactatatgctcaggtgaaacagaaaatggaggagatgcagcagcacaacatgtcctggattgaggtgcagttcctgaagaaggcagttgatgtcctctgccagtgtcgtgccacactcatgtacacttatgtcttcgctttctacctcaaaaagaataaccagtccattatctttgagaataaccaagcagatctagagaatgccacagaggtgctctcgggctaccttgaacgagatatttcccaagattctctgcaggatataaagcagaaagtacaagacaagtacagatactgtgagagtcgacgaagggttttgttacagcatgtgcatgaaggctatgaaaaagatctgtgggagtacattgaggactgagaatggccctgcataaaatgaactctgaaaactttaccatctagagtgctcatgcaattaaaacaaaacaaacacaaacaaggaggcactaagcctattctgacaccactggtctgtagtaccagaattgttttgttaatggaaagtttaagtaaattatattgtaataaaaaggtagataaaccattgtacaacagtattctaggccgccaacaaaagtgtgacagacacactaaaagccctccaactttaacttgtaacgtagcttcattctcaaagctgactccttttttttctttttccttttcctgagtgtagtacagttaaaatttcaaacagctccttgacactgcttttcatgttcaaaccagccattttgttgtactttggtaaaggacctcttccccttcctcccctacacatacagatacacccacacacagactgactctctttctctcataccccaaggtcatgagtgaatgatgcttagttccttgtaaagaaaatcttgggatggggaaaggggtaggcagcaagaggattcaacaaacgaaaaacataaaaactttgtatatgacttttaaaacaagaggacaacacagtatttttcaaaattgtatatagcgcatatgcatggacaaagcaagcgtggcacgtgtttgcataatgtttaattacaaaaaaatatttattctttaaaaatcttcaagattatgtctatttgctgtgcattttctttcagtttgcttatctttcccgggttggggttgggataaaggtgtgtcggtttagcacctctggaagacctatctagagctctttcactttcctgaggttattttgccctttctggtgttggtatgtctgttgccggccatgggcctcatgccttgaattcctgctcttgatcagggacaagggaggtcaagctctgactaatgccatgacctgattaaggggtacagcagggagttttgttgctacagctcatgaattaacctgtcccaacctaatccccctccatggcatcatgcctctacccaagcctttgtgtgcccatgttatgcacacagctgtaggcattcttaagtcccctgtcgcatccagtggaagcattttaaaatttcttttactttttggttttcccttaattgctgcttttcagattttagttatggctcgtctgctcaccccttctctacattagggtgtcaaagagaatgttttgctttaaatataaatagccattcatttagtctcagattgtgaatttaaaatggtggataccgaaattgcttgtgtgtgttgctgtgggtttggtttgaaggcaaacacccctagaacatgatattcccatctagtgcatttaaatagaaatcactgagtttgctgcttttttattgtcagcagataggagaattaataatgcattttagctgtgatgtccatttttatgaaattcctactaagagctatgttaaaagtaaaggatggtggtggttgtattaactatatacctgtttaggccattctggctgtggtatttttcaataggtcagcatctgtaaatctgtcagttttatacaggagtgcagagtgaactaggcaactagattaagaggtctaaatatgaaataccagttgaggctgaggacctcttcgtcttcctttaaatgtcttttgcctagggagtgtttaccatttgtgaggcagctttgtctgctcttacactgtacatcctattactccattgggaagtaggttcactttcctctggccttttgcctaagttaggctttgctgaatcaaccctacttttccttttagaaaaggttgttacaggagatttactggcaactgttcttttcccatcaaaaatcagtgaatgtttgctgagtataaatgctgcttccttaaaccacttgtcgctttaggatcaactttacctgtaccttttctcctttcctcccttgccacctcaggtgcaaatctgaactcagtgtctgcttcttccattttctcgtctctctcccctcttcccccattatccatatgacattattttacttcaaatgacagcatcaatcttaaaaagatatacattaaaactaaggagtttttttaaagaaagcctgaataagttcctttccctggtaactttgaaaagcagtcagagttgctatatagatatatgtggctcctttaaaatgctttgtgtatgtgtggtgtttaaaaaaaaaaaatcttaccagttaactttgcagtgtctaggtttgagtgtcataaatccacgtgttcctgttgcaacaaatacccaaaaattgtgtgtgcacttcctaataccagtcttcacccatggaggaacagtgctttttagagatgctttctatttcaatgttggcatactgcctgagggtattgcagttgtgggtgcattccctaatttgtatgatcaagatgaactggcccttttctacttccaagcttttaacagataccaccatatttgacagaattcccagagtgaattgcttgtgttattagtagattcagtgcccccagctgggataggcaagccatgacagcttccctgtttcacctacagaagtcttatctgagggatctattcacagtaagcaccaaggtctccatgtcttgaggtcagtttcattgtcttttgaaaagtgcatgcttcatttgaacaattcattcagcagcagatggactttcagtgatttaaaataaaattttgatccaaagctcaggacacaaaccacagtggtaaaattgagtagcatataatatcagactaaattatctgtaattttccacaacccagattgtatgtgttttatgtgtgtttaaataaatatgttagatacacgtgtatacatacacccatatacaacagatccaagactggctgacttcatttgaaatggttgaatctgctgtgtaataaagtggttcaaccatgattaggaactgaaatttagtagaagagggaaaaggagttaatgtaacaaattattttagctacaaaccccggtaatagagcacttgggggatgggatggggtgggttggtgagacaatcagaatggtaaattgattaaatgctcctaaccctgtaattttgtgcatagagcaccctatgctgtggaaataactgttcttagatttcattgtaactggactgttcaggttgcccagagggaaagaacattcctaattctaataaaataaacttttattttg

SEQ ID NO: 347222 - DNA, 4972 bp, Homo sapiens
acgcacgcccctttgttggctcagtagcgatagcagcggccgtggaggtggcgttggggactgttttctctcggaggccggagcggagccgcgtctgactgaggcgggcagcaagcggccccctcgctccctccctccctcctccgcgccctccccgccgccaccagccgtcaaacgccaaccgccgctcctggggaggagccgcggctcgcggggccggagccaggcctgcgtccggacatcagccggagccggagcgagagccggggcctcggcgtccccgccctctccccgcctcggccagcgtccgccgggcccccgcgcgtcgcgccatggactcggacgagggctacaactacgagttcgacgaggacgaggagtgcagtgaggaggacagcggcgccgaggaggaggaggacgaagacgacgacgagccggacgatgataccctggatctgggcgaggtggagctggtggagcccgggctgggcgtcggcggggagcgggacggactgctgtgcggggagacgggcggtggcggcggcagcgctctggggcccggcggtggcggcggcggcggcggcggcggtggtggtggcgggccggggcatgagcaggaggaggattaccgctacgaggtgctcacggccgagcagattctacaacacatggtggaatgtatccgggaggtcaacgaggtcatccagaatccagcaactatcacaagaatactccttagccacttcaattgggataaagagaagctaatggaaaggcgcctgatcacagattcaaaagttaaattaaagtatcagcatttaataacaaatagctttgtagagtgcaatcgactgttaaagtggtgtcctgccccagattgccaccatgttgttaaagtccaatatcctgatgctaaacctgttcgctgcaaatgtgggcgccaattttgctttaactgtggagaaaattggcatgatcctgttaaatgtaagtggttaaagaaatggattaaaaagtgtgatgatgacagtgaaacctccaattggattgcagccaacacaaaggaatgtcccaaatgccatgtcacaattgagaaggatggtggttgtaatcacatggtctgtcgtaaccagaattgtaaagcagagttttgctgggtgtgtcttggcccatgggaaccacatggatctgcctggtacaactgtaaccgctataatgaggatgatgcaaaggcagcaagagatgcacaggagcgatctagggcagccctgcagaggtacctgttctactgtaatcgctatatgaaccacatgcagagcctgcgctttgagcacaaactatatgctcaggtgaaacagaaaatggaggagatgcagcagcacaacatgtcctggattgaggtgcagttcctgaagaaggcagttgatgtcctctgccagtgtcgtgccacactcatgtacacttatgtcttcgctttctacctcaaaaagaataaccagtccattatctttgagaataaccaagcagatctagagaatgccacagaggtgctctcgggctaccttgaacgagatatttcccaagattctctgcaggatataaagcagaaagtacaagacaagtacagatactgtgagagtcgacgaagggttttgttacagcatgtgcatgaaggctatgaaaaagatctgtgggagtacattgaggactgagaatggccctgcataaaatgaactctgaaaactttaccatctagagtgctcatgcaattaaaacaaaacaaacacaaacaaggaggcactaagcctattctgacaccactggtctgtagtaccagaattgttttgttaatggaaagtttaagtaaattatattgtaataaaaaggtagataaaccattgtacaacagtattctaggccgccaacaaaagtgtgacagacacactaaaagccctccaactttaacttgtaacgtagcttcattctcaaagctgactccttttttttctttttccttttcctgagtgtagtacagttaaaatttcaaacagctccttgacactgcttttcatgttcaaaccagccattttgttgtactttggtaaaggacctcttccccttcctcccctacacatacagatacacccacacacagactgactctctttctctcataccccaaggtcatgagtgaatgatgcttagttccttgtaaagaaaatcttgggatggggaaaggggtaggcagcaagaggattcaacaaacgaaaaacataaaaactttgtatatgacttttaaaacaagaggacaacacagtatttttcaaaattgtatatagcgcatatgcatggacaaagcaagcgtggcacgtgtttgcataatgtttaattacaaaaaaatatttattctttaaaaatcttcaagattatgtctatttgctgtgcattttctttcagtttgcttatctttcccgggttggggttgggataaaggtgtgtcggtttagcacctctggaagacctatctagagctctttcactttcctgaggttattttgccctttctggtgttggtatgtctgttgccggccatgggcctcatgccttgaattcctgctcttgatcagggacaagggaggtcaagctctgactaatgccatgacctgattaaggggtacagcagggagttttgttgctacagctcatgaattaacctgtcccaacctaatccccctccatggcatcatgcctctacccaagcctttgtgtgcccatgttatgcacacagctgtaggcattcttaagtcccctgtcgcatccagtggaagcattttaaaatttcttttactttttggttttcccttaattgctgcttttcagattttagttatggctcgtctgctcaccccttctctacattagggtgtcaaagagaatgttttgctttaaatataaatagccattcatttagtctcagattgtgaatttaaaatggtggataccgaaattgcttgtgtgtgttgctgtgggtttggtttgaaggcaaacacccctagaacatgatattcccatctagtgcatttaaatagaaatcactgagtttgctgcttttttattgtcagcagataggagaattaataatgcattttagctgtgatgtccatttttatgaaattcctactaagagctatgttaaaagtaaaggatggtggtggttgtattaactatatacctgtttaggccattctggctgtggtatttttcaataggtcagcatctgtaaatctgtcagttttatacaggagtgcagagtgaactaggcaactagattaagaggtctaaatatgaaataccagttgaggctgaggacctcttcgtcttcctttaaatgtcttttgcctagggagtgtttaccatttgtgaggcagctttgtctgctcttacactgtacatcctattactccattgggaagtaggttcactttcctctggccttttgcctaagttaggctttgctgaatcaaccctacttttccttttagaaaaggttgttacaggagatttactggcaactgttcttttcccatcaaaaatcagtgaatgtttgctgagtataaatgctgcttccttaaaccacttgtcgctttaggatcaactttacctgtaccttttctcctttcctcccttgccacctcaggtgcaaatctgaactcagtgtctgcttcttccattttctcgtctctctcccctcttcccccattatccatatgacattattttacttcaaatgacagcatcaatcttaaaaagatatacattaaaactaaggagtttttttaaagaaagcctgaataagttcctttccctggtaactttgaaaagcagtcagagttgctatatagatatatgtggctcctttaaaatgctttgtgtatgtgtggtgtttaaaaaaaaaaaatcttaccagttaactttgcagtgtctaggtttgagtgtcataaatccacgtgttcctgttgcaacaaatacccaaaaattgtgtgtgcacttcctaataccagtcttcacccatggaggaacagtgctttttagagatgctttctatttcaatgttggcatactgcctgagggtattgcagttgtgggtgcattccctaatttgtatgatcaagatgaactggcccttttctacttccaagcttttaacagataccaccatatttgacagaattcccagagtgaattgcttgtgttattagtagattcagtgcccccagctgggataggcaagccatgacagcttccctgtttcacctacagaagtcttatctgagggatctattcacagtaagcaccaaggtctccatgtcttgaggtcagtttcattgtcttttgaaaagtgcatgcttcatttgaacaattcattcagcagcagatggactttcagtgatttaaaataaaattttgatccaaagctcaggacacaaaccacagtggtaaaattgagtagcatataatatcagactaaattatctgtaattttccacaacccagattgtatgtgttttatgtgtgtttaaataaatatgttagatacacgtgtatacatacacccatatacaacagatccaagactggctgacttcatttgaaatggttgaatctgctgtgtaataaagtggttcaaccatgattaggaactgaaatttagtagaagagggaaaaggagttaatgtaacaaattattttagctacaaaccccggtaatagagcacttgggggatgggatggggtgggttggtgagacaatcagaatggtaaattgattaaatgctcctaaccctgtaattttgtgcatagagcaccctatgctgtggaaataactgttcttagatttcattgtaactggactgttcaggttgcccagagggaaagaacattcctaattctaataaaataaacttttattttg

SEQ ID NO: 347223 - DNA, 4545 bp, Homo sapiens
cccaattgaagtggctaaggagtattcttgtgataaagagaagctaatggaaaggtactttgatggaaacctggagaagctctttgctgagtgtcatgtaattaatccaagtaaaaagtctcgaacacgccagatgaatacaaggtcatcagcacaggatatgccttgtcagatctgctacttgaactaccctaactcgtatttcactggccttgaatgtggacataagttttgtatgcagtgctggagtgaatatttaactaccaaaataatggaagaaggcatgggtcagactatttcgtgtcctgctcatggttgtgatatcttagtggatgacaacacagttatgcgcctgatcacagattcaaaagttaaattaaagtatcagcatttaataacaaatagctttgtagagtgcaatcgactgttaaagtggtgtcctgccccagattgccaccatgttgttaaagtccaatatcctgatgctaaacctgttcgctgcaaatgtgggcgccaattttgctttaactgtggagaaaattggcatgatcctgttaaatgtaagtggttaaagaaatggattaaaaagtgtgatgatgacagtgaaacctccaattggattgcagccaacacaaaggaatgtcccaaatgccatgtcacaattgagaaggatggtggttgtaatcacatggtctgtcgtaaccagaattgtaaagcagagttttgctgggtgtgtcttggcccatgggaaccacatggatctgcctggtacaactgtaaccgctataatgaggatgatgcaaaggcagcaagagatgcacaggagcgatctagggcagccctgcagaggtacctgttctactgtaatcgctatatgaaccacatgcagagcctgcgctttgagcacaaactatatgctcaggtgaaacagaaaatggaggagatgcagcagcacaacatgtcctggattgaggtgcagttcctgaagaaggcagttgatgtcctctgccagtgtcgtgccacactcatgtacacttatgtcttcgctttctacctcaaaaagaataaccagtccattatctttgagaataaccaagcagatctagagaatgccacagaggtgctctcgggctaccttgaacgagatatttcccaagattctctgcaggatataaagcagaaagtacaagacaagtacagatactgtgagagtcgacgaagggttttgttacagcatgtgcatgaaggctatgaaaaagatctgtgggagtacattgaggactgagaatggccctgcataaaatgaactctgaaaactttaccatctagagtgctcatgcaattaaaacaaaacaaacacaaacaaggaggcactaagcctattctgacaccactggtctgtagtaccagaattgttttgttaatggaaagtttaagtaaattatattgtaataaaaaggtagataaaccattgtacaacagtattctaggccgccaacaaaagtgtgacagacacactaaaagccctccaactttaacttgtaacgtagcttcattctcaaagctgactccttttttttctttttccttttcctgagtgtagtacagttaaaatttcaaacagctccttgacactgcttttcatgttcaaaccagccattttgttgtactttggtaaaggacctcttccccttcctcccctacacatacagatacacccacacacagactgactctctttctctcataccccaaggtcatgagtgaatgatgcttagttccttgtaaagaaaatcttgggatggggaaaggggtaggcagcaagaggattcaacaaacgaaaaacataaaaactttgtatatgacttttaaaacaagaggacaacacagtatttttcaaaattgtatatagcgcatatgcatggacaaagcaagcgtggcacgtgtttgcataatgtttaattacaaaaaaatatttattctttaaaaatcttcaagattatgtctatttgctgtgcattttctttcagtttgcttatctttcccgggttggggttgggataaaggtgtgtcggtttagcacctctggaagacctatctagagctctttcactttcctgaggttattttgccctttctggtgttggtatgtctgttgccggccatgggcctcatgccttgaattcctgctcttgatcagggacaagggaggtcaagctctgactaatgccatgacctgattaaggggtacagcagggagttttgttgctacagctcatgaattaacctgtcccaacctaatccccctccatggcatcatgcctctacccaagcctttgtgtgcccatgttatgcacacagctgtaggcattcttaagtcccctgtcgcatccagtggaagcattttaaaatttcttttactttttggttttcccttaattgctgcttttcagattttagttatggctcgtctgctcaccccttctctacattagggtgtcaaagagaatgttttgctttaaatataaatagccattcatttagtctcagattgtgaatttaaaatggtggataccgaaattgcttgtgtgtgttgctgtgggtttggtttgaaggcaaacacccctagaacatgatattcccatctagtgcatttaaatagaaatcactgagtttgctgcttttttattgtcagcagataggagaattaataatgcattttagctgtgatgtccatttttatgaaattcctactaagagctatgttaaaagtaaaggatggtggtggttgtattaactatatacctgtttaggccattctggctgtggtatttttcaataggtcagcatctgtaaatctgtcagttttatacaggagtgcagagtgaactaggcaactagattaagaggtctaaatatgaaataccagttgaggctgaggacctcttcgtcttcctttaaatgtcttttgcctagggagtgtttaccatttgtgaggcagctttgtctgctcttacactgtacatcctattactccattgggaagtaggttcactttcctctggccttttgcctaagttaggctttgctgaatcaaccctacttttccttttagaaaaggttgttacaggagatttactggcaactgttcttttcccatcaaaaatcagtgaatgtttgctgagtataaatgctgcttccttaaaccacttgtcgctttaggatcaactttacctgtaccttttctcctttcctcccttgccacctcaggtgcaaatctgaactcagtgtctgcttcttccattttctcgtctctctcccctcttcccccattatccatatgacattattttacttcaaatgacagcatcaatcttaaaaagatatacattaaaactaaggagtttttttaaagaaagcctgaataagttcctttccctggtaactttgaaaagcagtcagagttgctatatagatatatgtggctcctttaaaatgctttgtgtatgtgtggtgtttaaaaaaaaaaaatcttaccagttaactttgcagtgtctaggtttgagtgtcataaatccacgtgttcctgttgcaacaaatacccaaaaattgtgtgtgcacttcctaataccagtcttcacccatggaggaacagtgctttttagagatgctttctatttcaatgttggcatactgcctgagggtattgcagttgtgggtgcattccctaatttgtatgatcaagatgaactggcccttttctacttccaagcttttaacagataccaccatatttgacagaattcccagagtgaattgcttgtgttattagtagattcagtgcccccagctgggataggcaagccatgacagcttccctgtttcacctacagaagtcttatctgagggatctattcacagtaagcaccaaggtctccatgtcttgaggtcagtttcattgtcttttgaaaagtgcatgcttcatttgaacaattcattcagcagcagatggactttcagtgatttaaaataaaattttgatccaaagctcaggacacaaaccacagtggtaaaattgagtagcatataatatcagactaaattatctgtaattttccacaacccagattgtatgtgttttatgtgtgtttaaataaatatgttagatacacgtgtatacatacacccatatacaacagatccaagactggctgacttcatttgaaatggttgaatctgctgtgtaataaagtggttcaaccatgattaggaactgaaatttagtagaagagggaaaaggagttaatgtaacaaattattttagctacaaaccccggtaatagagcacttgggggatgggatggggtgggttggtgagacaatcagaatggtaaattgattaaatgctcctaaccctgtaattttgtgcatagagcaccctatgctgtggaaataactgttcttagatttcattgtaactggactgttcaggttgcccagagggaaagaacattcctaattctaataaaataaacttttattttg

SEQ ID NO: 347224 - DNA, 4286 bp, Homo sapiens
aggtagagacaaggtcttgctatgttgcccgggctggtctggagtgcttgacctcaaacagtcctcccgccttggcctccctaagttctgggattataggtgtgagccactgtgcccagccagctgtcattttttattttctaacttgtatttcagtgcaatcgactgttaaagtggtgtcctgccccagattgccaccatgttgttaaagtccaatatcctgatgctaaacctgttcgctgcaaatgtgggcgccaattttgctttaactgtggagaaaattggcatgatcctgttaaatgtaagtggttaaagaaatggattaaaaagtgtgatgatgacagtgaaacctccaattggattgcagccaacacaaaggaatgtcccaaatgccatgtcacaattgagaaggatggtggttgtaatcacatggtctgtcgtaaccagaattgtaaagcagagttttgctgggtgtgtcttggcccatgggaaccacatggatctgcctggtacaactgtaaccgctataatgaggatgatgcaaaggcagcaagagatgcacaggagcgatctagggcagccctgcagaggtacctgttctactgtaatcgctatatgaaccacatgcagagcctgcgctttgagcacaaactatatgctcaggtgaaacagaaaatggaggagatgcagcagcacaacatgtcctggattgaggtgcagttcctgaagaaggcagttgatgtcctctgccagtgtcgtgccacactcatgtacacttatgtcttcgctttctacctcaaaaagaataaccagtccattatctttgagaataaccaagcagatctagagaatgccacagaggtgctctcgggctaccttgaacgagatatttcccaagattctctgcaggatataaagcagaaagtacaagacaagtacagatactgtgagagtcgacgaagggttttgttacagcatgtgcatgaaggctatgaaaaagatctgtgggagtacattgaggactgagaatggccctgcataaaatgaactctgaaaactttaccatctagagtgctcatgcaattaaaacaaaacaaacacaaacaaggaggcactaagcctattctgacaccactggtctgtagtaccagaattgttttgttaatggaaagtttaagtaaattatattgtaataaaaaggtagataaaccattgtacaacagtattctaggccgccaacaaaagtgtgacagacacactaaaagccctccaactttaacttgtaacgtagcttcattctcaaagctgactccttttttttctttttccttttcctgagtgtagtacagttaaaatttcaaacagctccttgacactgcttttcatgttcaaaccagccattttgttgtactttggtaaaggacctcttccccttcctcccctacacatacagatacacccacacacagactgactctctttctctcataccccaaggtcatgagtgaatgatgcttagttccttgtaaagaaaatcttgggatggggaaaggggtaggcagcaagaggattcaacaaacgaaaaacataaaaactttgtatatgacttttaaaacaagaggacaacacagtatttttcaaaattgtatatagcgcatatgcatggacaaagcaagcgtggcacgtgtttgcataatgtttaattacaaaaaaatatttattctttaaaaatcttcaagattatgtctatttgctgtgcattttctttcagtttgcttatctttcccgggttggggttgggataaaggtgtgtcggtttagcacctctggaagacctatctagagctctttcactttcctgaggttattttgccctttctggtgttggtatgtctgttgccggccatgggcctcatgccttgaattcctgctcttgatcagggacaagggaggtcaagctctgactaatgccatgacctgattaaggggtacagcagggagttttgttgctacagctcatgaattaacctgtcccaacctaatccccctccatggcatcatgcctctacccaagcctttgtgtgcccatgttatgcacacagctgtaggcattcttaagtcccctgtcgcatccagtggaagcattttaaaatttcttttactttttggttttcccttaattgctgcttttcagattttagttatggctcgtctgctcaccccttctctacattagggtgtcaaagagaatgttttgctttaaatataaatagccattcatttagtctcagattgtgaatttaaaatggtggataccgaaattgcttgtgtgtgttgctgtgggtttggtttgaaggcaaacacccctagaacatgatattcccatctagtgcatttaaatagaaatcactgagtttgctgcttttttattgtcagcagataggagaattaataatgcattttagctgtgatgtccatttttatgaaattcctactaagagctatgttaaaagtaaaggatggtggtggttgtattaactatatacctgtttaggccattctggctgtggtatttttcaataggtcagcatctgtaaatctgtcagttttatacaggagtgcagagtgaactaggcaactagattaagaggtctaaatatgaaataccagttgaggctgaggacctcttcgtcttcctttaaatgtcttttgcctagggagtgtttaccatttgtgaggcagctttgtctgctcttacactgtacatcctattactccattgggaagtaggttcactttcctctggccttttgcctaagttaggctttgctgaatcaaccctacttttccttttagaaaaggttgttacaggagatttactggcaactgttcttttcccatcaaaaatcagtgaatgtttgctgagtataaatgctgcttccttaaaccacttgtcgctttaggatcaactttacctgtaccttttctcctttcctcccttgccacctcaggtgcaaatctgaactcagtgtctgcttcttccattttctcgtctctctcccctcttcccccattatccatatgacattattttacttcaaatgacagcatcaatcttaaaaagatatacattaaaactaaggagtttttttaaagaaagcctgaataagttcctttccctggtaactttgaaaagcagtcagagttgctatatagatatatgtggctcctttaaaatgctttgtgtatgtgtggtgtttaaaaaaaaaaaatcttaccagttaactttgcagtgtctaggtttgagtgtcataaatccacgtgttcctgttgcaacaaatacccaaaaattgtgtgtgcacttcctaataccagtcttcacccatggaggaacagtgctttttagagatgctttctatttcaatgttggcatactgcctgagggtattgcagttgtgggtgcattccctaatttgtatgatcaagatgaactggcccttttctacttccaagcttttaacagataccaccatatttgacagaattcccagagtgaattgcttgtgttattagtagattcagtgcccccagctgggataggcaagccatgacagcttccctgtttcacctacagaagtcttatctgagggatctattcacagtaagcaccaaggtctccatgtcttgaggtcagtttcattgtcttttgaaaagtgcatgcttcatttgaacaattcattcagcagcagatggactttcagtgatttaaaataaaattttgatccaaagctcaggacacaaaccacagtggtaaaattgagtagcatataatatcagactaaattatctgtaattttccacaacccagattgtatgtgttttatgtgtgtttaaataaatatgttagatacacgtgtatacatacacccatatacaacagatccaagactggctgacttcatttgaaatggttgaatctgctgtgtaataaagtggttcaaccatgattaggaactgaaatttagtagaagagggaaaaggagttaatgtaacaaattattttagctacaaaccccggtaatagagcacttgggggatgggatggggtgggttggtgagacaatcagaatggtaaattgattaaatgctcctaaccctgtaattttgtgcatagagcaccctatgctgtggaaataactgttcttagatttcattgtaactggactgttcaggttgcccagagggaaagaacattcctaattctaataaaataaacttttattttg

SEQ ID NO: 347225 - DNA, 5212 bp, Homo sapiens
acgcacgcccctttgttggctcagtagcgatagcagcggccgtggaggtggcgttggggactgttttctctcggaggccggagcggagccgcgtctgactgaggcgggcagcaagcggccccctcgctccctccctccctcctccgcgccctccccgccgccaccagccgtcaaacgccaaccgccgctcctggggaggagccgcggctcgcggggccggagccaggcctgcgtccggacatcagccggagccggagcgagagccggggcctcggcgtccccgccctctccccgcctcggccagcgtccgccgggcccccgcgcgtcgcgccatggactcggacgagggctacaactacgagttcgacgaggacgaggagtgcagtgaggaggacagcggcgccgaggaggaggaggacgaagacgacgacgagccggacgatgataccctggatctgggcgaggtggagctggtggagcccgggctgggcgtcggcggggagcgggacggactgctgtgcggggagacgggcggtggcggcggcagcgctctggggcccggcggtggcggcggcggcggcggcggcggtggtggtggcgggccggggcatgagcaggaggaggattaccgctacgaggtgctcacggccgagcagattctacaacacatggtggaatgtatccgggaggtcaacgaggtcatccagaatccagcaactatcacaagaatactccttagccacttcaattgggataaagagaagctaatggaaaggtactttgatggaaacctggagaagctctttgctgagtgtcatgtaattaatccaagtaaaaagtctcgaacacgccagatgaatacaaggtcatcagcacaggatatgccttgtcagatctgctacttgaactaccctaactcgtatttcactggccttgaatgtggacataagttttgtatgcagtgctggagtgaatatttaactaccaaaataatggaagaaggcatgggtcagactatttcgtgtcctgctcatggttgtgatatcttagtggatgacaacacagttatgcgcctgatcacagattcaaaagttaaattaaagtatcagcatttaataacaaatagctttgtagagtgcaatcgactgttaaagtggtgtcctgccccagattgccaccatgttgttaaagtccaatatcctgatgctaaacctgttcgctgcaaatgtgggcgccaattttgctttaactgtggagaaaattggcatgatcctgttaaatgtaagtggttaaagaaatggattaaaaagtgtgatgatgacagtgaaacctccaattggattgcagccaacacaaaggaatgtcccaaatgccatgtcacaattgagaaggatggtggttgtaatcacatggtctgtcgtaaccagaattgtaaagcagagttttgctgggtgtgtcttggcccatgggaaccacatggatctgcctggtacaactgtaaccgctataatgaggatgatgcaaaggcagcaagagatgcacaggagcgatctagggcagccctgcagaggtacctgttctactgtaatcgctatatgaaccacatgcagagcctgcgctttgagcacaaactatatgctcaggtgaaacagaaaatggaggagatgcagcagcacaacatgtcctggattgaggtgcagttcctgaagaaggcagttgatgtcctctgccagtgtcgtgccacactcatgtacacttatgtcttcgctttctacctcaaaaagaataaccagtccattatctttgagaataaccaagcagatctagagaatgccacagaggtgctctcgggctaccttgaacgagatatttcccaagattctctgcaggatataaagcagaaagtacaagacaagtacagatactgtgagagtcgacgaagggttttgttacagcatgtgcatgaaggctatgaaaaagatctgtgggagtacattgaggactgagaatggccctgcataaaatgaactctgaaaactttaccatctagagtgctcatgcaattaaaacaaaacaaacacaaacaaggaggcactaagcctattctgacaccactggtctgtagtaccagaattgttttgttaatggaaagtttaagtaaattatattgtaataaaaaggtagataaaccattgtacaacagtattctaggccgccaacaaaagtgtgacagacacactaaaagccctccaactttaacttgtaacgtagcttcattctcaaagctgactccttttttttctttttccttttcctgagtgtagtacagttaaaatttcaaacagctccttgacactgcttttcatgttcaaaccagccattttgttgtactttggtaaaggacctcttccccttcctcccctacacatacagatacacccacacacagactgactctctttctctcataccccaaggtcatgagtgaatgatgcttagttccttgtaaagaaaatcttgggatggggaaaggggtaggcagcaagaggattcaacaaacgaaaaacataaaaactttgtatatgacttttaaaacaagaggacaacacagtatttttcaaaattgtatatagcgcatatgcatggacaaagcaagcgtggcacgtgtttgcataatgtttaattacaaaaaaatatttattctttaaaaatcttcaagattatgtctatttgctgtgcattttctttcagtttgcttatctttcccgggttggggttgggataaaggtgtgtcggtttagcacctctggaagacctatctagagctctttcactttcctgaggttattttgccctttctggtgttggtatgtctgttgccggccatgggcctcatgccttgaattcctgctcttgatcagggacaagggaggtcaagctctgactaatgccatgacctgattaaggggtacagcagggagttttgttgctacagctcatgaattaacctgtcccaacctaatccccctccatggcatcatgcctctacccaagcctttgtgtgcccatgttatgcacacagctgtaggcattcttaagtcccctgtcgcatccagtggaagcattttaaaatttcttttactttttggttttcccttaattgctgcttttcagattttagttatggctcgtctgctcaccccttctctacattagggtgtcaaagagaatgttttgctttaaatataaatagccattcatttagtctcagattgtgaatttaaaatggtggataccgaaattgcttgtgtgtgttgctgtgggtttggtttgaaggcaaacacccctagaacatgatattcccatctagtgcatttaaatagaaatcactgagtttgctgcttttttattgtcagcagataggagaattaataatgcattttagctgtgatgtccatttttatgaaattcctactaagagctatgttaaaagtaaaggatggtggtggttgtattaactatatacctgtttaggccattctggctgtggtatttttcaataggtcagcatctgtaaatctgtcagttttatacaggagtgcagagtgaactaggcaactagattaagaggtctaaatatgaaataccagttgaggctgaggacctcttcgtcttcctttaaatgtcttttgcctagggagtgtttaccatttgtgaggcagctttgtctgctcttacactgtacatcctattactccattgggaagtaggttcactttcctctggccttttgcctaagttaggctttgctgaatcaaccctacttttccttttagaaaaggttgttacaggagatttactggcaactgttcttttcccatcaaaaatcagtgaatgtttgctgagtataaatgctgcttccttaaaccacttgtcgctttaggatcaactttacctgtaccttttctcctttcctcccttgccacctcaggtgcaaatctgaactcagtgtctgcttcttccattttctcgtctctctcccctcttcccccattatccatatgacattattttacttcaaatgacagcatcaatcttaaaaagatatacattaaaactaaggagtttttttaaagaaagcctgaataagttcctttccctggtaactttgaaaagcagtcagagttgctatatagatatatgtggctcctttaaaatgctttgtgtatgtgtggtgtttaaaaaaaaaaaatcttaccagttaactttgcagtgtctaggtttgagtgtcataaatccacgtgttcctgttgcaacaaatacccaaaaattgtgtgtgcacttcctaataccagtcttcacccatggaggaacagtgctttttagagatgctttctatttcaatgttggcatactgcctgagggtattgcagttgtgggtgcattccctaatttgtatgatcaagatgaactggcccttttctacttccaagcttttaacagataccaccatatttgacagaattcccagagtgaattgcttgtgttattagtagattcagtgcccccagctgggataggcaagccatgacagcttccctgtttcacctacagaagtcttatctgagggatctattcacagtaagcaccaaggtctccatgtcttgaggtcagtttcattgtcttttgaaaagtgcatgcttcatttgaacaattcattcagcagcagatggactttcagtgatttaaaataaaattttgatccaaagctcaggacacaaaccacagtgccagattgtatgtgttttatgtgtgtttaaataaatatgttagatacacgtgtatacatacacccatatacaacagatccaagactggctgacttcatttgaaatggttgaatctgctgtgtaataaagtggttcaaccatgattaggaactgaaatttagtagaagagggaaaaggagttaatgtaacaaattattttagctacaaaccccggtaatagagcacttgggggatgggatggggtgggttggtgagacaatcagaatggtaaattgattaaatgctcctaaccctgtaattttgtgcatagagcaccctatgctgtggaaataactgttcttagatttcattgtaactggactgttcaggttgcccagagggaaagaacattcctaattctaataaaataaacttttattttg

SEQ ID NO: 347226 - DNA, 4307 bp, Homo sapiens
gagttcaacttttttagtttctacatataagcgagatcatgtagtatttcttttctgtgcctggcttatttcacttagtgtaatgtcctccaggttcatccatgttgtcacaacagaattccttttttgaggctgagtactcgtgtgtgtgtgtacatacatgacgttttctttctgtgttcatccattgatggacactttacatggattccatgtcttggctattgtgaataatgctgtagtgaatgtgagagtacagagatacctttgacatactgatttcaattccttttcatatatacacagtagtgggattgctggattctgtggtggttttgttttcagttttttaaggaacctccccataccattttccataatggctatactaatttacattcccatcaacagtgtatcaagagtctccttctttctttatctttgccaagacttatctttcatctttttgataaaaaccattctaacaggtgtgaagtgagacttcattatggttttaatttgataatcagcttttatgtacagtttatgtgttataattatatcacccaatttttcttaatgggacagcgatctagggcagccctgcagaggtacctgttctactgtaatcgctatatgaaccacatgcagagcctgcgctttgagcacaaactatatgctcaggtgaaacagaaaatggaggagatgcagcagcacaacatgtcctggattgaggtgcagttcctgaagaaggcagttgatgtcctctgccagtgtcgtgccacactcatgtacacttatgtcttcgctttctacctcaaaaagaataaccagtccattatctttgagaataaccaagcagatctagagaatgccacagaggtgctctcgggctaccttgaacgagatatttcccaagattctctgcaggatataaagcagaaagtacaagacaagtacagatactgtgagagtcgacgaagggttttgttacagcatgtgcatgaaggctatgaaaaagatctgtgggagtacattgaggactgagaatggccctgcataaaatgaactctgaaaactttaccatctagagtgctcatgcaattaaaacaaaacaaacacaaacaaggaggcactaagcctattctgacaccactggtctgtagtaccagaattgttttgttaatggaaagtttaagtaaattatattgtaataaaaaggtagataaaccattgtacaacagtattctaggccgccaacaaaagtgtgacagacacactaaaagccctccaactttaacttgtaacgtagcttcattctcaaagctgactccttttttttctttttccttttcctgagtgtagtacagttaaaatttcaaacagctccttgacactgcttttcatgttcaaaccagccattttgttgtactttggtaaaggacctcttccccttcctcccctacacatacagatacacccacacacagactgactctctttctctcataccccaaggtcatgagtgaatgatgcttagttccttgtaaagaaaatcttgggatggggaaaggggtaggcagcaagaggattcaacaaacgaaaaacataaaaactttgtatatgacttttaaaacaagaggacaacacagtatttttcaaaattgtatatagcgcatatgcatggacaaagcaagcgtggcacgtgtttgcataatgtttaattacaaaaaaatatttattctttaaaaatcttcaagattatgtctatttgctgtgcattttctttcagtttgcttatctttcccgggttggggttgggataaaggtgtgtcggtttagcacctctggaagacctatctagagctctttcactttcctgaggttattttgccctttctggtgttggtatgtctgttgccggccatgggcctcatgccttgaattcctgctcttgatcagggacaagggaggtcaagctctgactaatgccatgacctgattaaggggtacagcagggagttttgttgctacagctcatgaattaacctgtcccaacctaatccccctccatggcatcatgcctctacccaagcctttgtgtgcccatgttatgcacacagctgtaggcattcttaagtcccctgtcgcatccagtggaagcattttaaaatttcttttactttttggttttcccttaattgctgcttttcagattttagttatggctcgtctgctcaccccttctctacattagggtgtcaaagagaatgttttgctttaaatataaatagccattcatttagtctcagattgtgaatttaaaatggtggataccgaaattgcttgtgtgtgttgctgtgggtttggtttgaaggcaaacacccctagaacatgatattcccatctagtgcatttaaatagaaatcactgagtttgctgcttttttattgtcagcagataggagaattaataatgcattttagctgtgatgtccatttttatgaaattcctactaagagctatgttaaaagtaaaggatggtggtggttgtattaactatatacctgtttaggccattctggctgtggtatttttcaataggtcagcatctgtaaatctgtcagttttatacaggagtgcagagtgaactaggcaactagattaagaggtctaaatatgaaataccagttgaggctgaggacctcttcgtcttcctttaaatgtcttttgcctagggagtgtttaccatttgtgaggcagctttgtctgctcttacactgtacatcctattactccattgggaagtaggttcactttcctctggccttttgcctaagttaggctttgctgaatcaaccctacttttccttttagaaaaggttgttacaggagatttactggcaactgttcttttcccatcaaaaatcagtgaatgtttgctgagtataaatgctgcttccttaaaccacttgtcgctttaggatcaactttacctgtaccttttctcctttcctcccttgccacctcaggtgcaaatctgaactcagtgtctgcttcttccattttctcgtctctctcccctcttcccccattatccatatgacattattttacttcaaatgacagcatcaatcttaaaaagatatacattaaaactaaggagtttttttaaagaaagcctgaataagttcctttccctggtaactttgaaaagcagtcagagttgctatatagatatatgtggctcctttaaaatgctttgtgtatgtgtggtgtttaaaaaaaaaaaatcttaccagttaactttgcagtgtctaggtttgagtgtcataaatccacgtgttcctgttgcaacaaatacccaaaaattgtgtgtgcacttcctaataccagtcttcacccatggaggaacagtgctttttagagatgctttctatttcaatgttggcatactgcctgagggtattgcagttgtgggtgcattccctaatttgtatgatcaagatgaactggcccttttctacttccaagcttttaacagataccaccatatttgacagaattcccagagtgaattgcttgtgttattagtagattcagtgcccccagctgggataggcaagccatgacagcttccctgtttcacctacagaagtcttatctgagggatctattcacagtaagcaccaaggtctccatgtcttgaggtcagtttcattgtcttttgaaaagtgcatgcttcatttgaacaattcattcagcagcagatggactttcagtgatttaaaataaaattttgatccaaagctcaggacacaaaccacagtggtaaaattgagtagcatataatatcagactaaattatctgtaattttccacaacccagattgtatgtgttttatgtgtgtttaaataaatatgttagatacacgtgtatacatacacccatatacaacagatccaagactggctgacttcatttgaaatggttgaatctgctgtgtaataaagtggttcaaccatgattaggaactgaaatttagtagaagagggaaaaggagttaatgtaacaaattattttagctacaaaccccggtaatagagcacttgggggatgggatggggtgggttggtgagacaatcagaatggtaaattgattaaatgctcctaaccctgtaattttgtgcatagagcaccctatgctgtggaaataactgttcttagatttcattgtaactggactgttcaggttgcccagagggaaagaacattcctaattctaataaaataaacttttattttg

SEQ ID NO: 347227 - DNA, 2925 bp, Homo sapiens
  misc_feature (85)..(85): n is a, c, g, or t
aattacatattctgaaagagcattccgaaagatgggactggttgactcttcacatgatggaggtatagccccccctaaactcagnaaaagatatacacccacacacagactgactctctttctctcataccccaaggtcatgagtgaatgatgcttagttccttgtaaagaaaatcttgggatggggaaaggggtaggcagcaagaggattcaacaaacgaaaaacataaaaactttgtatatgacttttaaaacaagaggacaacacagtatttttcaaaattgtatatagcgcatatgcatggacaaagcaagcgtggcacgtgtttgcataatgtttaattacaaaaaaatatttattctttaaaaatcttcaagattatgtctatttgctgtgcattttctttcagtttgcttatctttcccgggttggggttgggataaaggtgtgtcggtttagcacctctggaagacctatctagagctctttcactttcctgaggttattttgccctttctggtgttggtatgtctgttgccggccatgggcctcatgccttgaattcctgctcttgatcagggacaagggaggtcaagctctgactaatgccatgacctgattaaggggtacagcagggagttttgttgctacagctcatgaattaacctgtcccaacctaatccccctccatggcatcatgcctctacccaagcctttgtgtgcccatgttatgcacacagctgtaggcattcttaagtcccctgtcgcatccagtggaagcattttaaaatttcttttactttttggttttcccttaattgctgcttttcagattttagttatggctcgtctgctcaccccttctctacattagggtgtcaaagagaatgttttgctttaaatataaatagccattcatttagtctcagattgtgaatttaaaatggtggataccgaaattgcttgtgtgtgttgctgtgggtttggtttgaaggcaaacacccctagaacatgatattcccatctagtgcatttaaatagaaatcactgagtttgctgcttttttattgtcagcagataggagaattaataatgcattttagctgtgatgtccatttttatgaaattcctactaagagctatgttaaaagtaaaggatggtggtggttgtattaactatatacctgtttaggccattctggctgtggtatttttcaataggtcagcatctgtaaatctgtcagttttatacaggagtgcagagtgaactaggcaactagattaagaggtctaaatatgaaataccagttgaggctgaggacctcttcgtcttcctttaaatgtcttttgcctagggagtgtttaccatttgtgaggcagctttgtctgctcttacactgtacatcctattactccattgggaagtaggttcactttcctctggccttttgcctaagttaggctttgctgaatcaaccctacttttccttttagaaaaggttgttacaggagatttactggcaactgttcttttcccatcaaaaatcagtgaatgtttgctgagtataaatgctgcttccttaaaccacttgtcgctttaggatcaactttacctgtaccttttctcctttcctcccttgccacctcaggtgcaaatctgaactcagtgtctgcttcttccattttctcgtctctctcccctcttcccccattatccatatgacattattttacttcaaatgacagcatcaatcttaaaaagatatacattaaaactaaggagtttttttaaagaaagcctgaataagttcctttccctggtaactttgaaaagcagtcagagttgctatatagatatatgtggctcctttaaaatgctttgtgtatgtgtggtgtttaaaaaaaaaaaatcttaccagttaactttgcagtgtctaggtttgagtgtcataaatccacgtgttcctgttgcaacaaatacccaaaaattgtgtgtgcacttcctaataccagtcttcacccatggaggaacagtgctttttagagatgctttctatttcaatgttggcatactgcctgagggtattgcagttgtgggtgcattccctaatttgtatgatcaagatgaactggcccttttctacttccaagcttttaacagataccaccatatttgacagaattcccagagtgaattgcttgtgttattagtagattcagtgcccccagctgggataggcaagccatgacagcttccctgtttcacctacagaagtcttatctgagggatctattcacagtaagcaccaaggtctccatgtcttgaggtcagtttcattgtcttttgaaaagtgcatgcttcatttgaacaattcattcagcagcagatggactttcagtgatttaaaataaaattttgatccaaagctcaggacacaaaccacagtggtaaaattgagtagcatataatatcagactaaattatctgtaattttccacaacccagattgtatgtgttttatgtgtgtttaaataaatatgttagatacacgtgtatacatacacccatatacaacagatccaagactggctgacttcatttgaaatggttgaatctgctgtgtaataaagtggttcaaccatgattaggaactgaaatttagtagaagagggaaaaggagttaatgtaacaaattattttagctacaaaccccggtaatagagcacttgggggatgggatggggtgggttggtgagacaatcagaatggtaaattgattaaatgctcctaaccctgtaattttgtgcatagagcaccctatgctgtggaaataactgttcttagatttcattgtaactggactgttcaggttgcccagagggaaagaacattcctaattctaataaaataaacttttattttg

SEQ ID NO: 347228 - DNA, 2648 bp, Homo sapiens
  misc_feature (13)..(13): n is a, c, g, or t
  misc_feature (23)..(23): n is a, c, g, or t
  misc_feature (27)..(27): n is a, c, g, or t
  misc_feature (41)..(41): n is a, c, g, or t
  misc_feature (43)..(43): n is a, c, g, or t
gtggtgaagtagngagggttggntttngggtgaggaaaggngntgagtgtttgcataatgtttaattacaaaaaaatatttattctttaaaaatcttcaagattatgtctatttgctgtgcattttctttcagtttgcttatctttcccgggttggggttgggataaaggtgtgtcggtttagcacctctggaagacctatctagagctctttcactttcctgaggttattttgccctttctggtgttggtatgtctgttgccggccatgggcctcatgccttgaattcctgctcttgatcagggacaagggaggtcaagctctgactaatgccatgacctgattaaggggtacagcagggagttttgttgctacagctcatgaattaacctgtcccaacctaatccccctccatggcatcatgcctctacccaagcctttgtgtgcccatgttatgcacacagctgtaggcattcttaagtcccctgtcgcatccagtggaagcattttaaaatttcttttactttttggttttcccttaattgctgcttttcagattttagttatggctcgtctgctcaccccttctctacattagggtgtcaaagagaatgttttgctttaaatataaatagccattcatttagtctcagattgtgaatttaaaatggtggataccgaaattgcttgtgtgtgttgctgtgggtttggtttgaaggcaaacacccctagaacatgatattcccatctagtgcatttaaatagaaatcactgagtttgctgcttttttattgtcagcagataggagaattaataatgcattttagctgtgatgtccatttttatgaaattcctactaagagctatgttaaaagtaaaggatggtggtggttgtattaactatatacctgtttaggccattctggctgtggtatttttcaataggtcagcatctgtaaatctgtcagttttatacaggagtgcagagtgaactaggcaactagattaagaggtctaaatatgaaataccagttgaggctgaggacctcttcgtcttcctttaaatgtcttttgcctagggagtgtttaccatttgtgaggcagctttgtctgctcttacactgtacatcctattactccattgggaagtaggttcactttcctctggccttttgcctaagttaggctttgctgaatcaaccctacttttccttttagaaaaggttgttacaggagatttactggcaactgttcttttcccatcaaaaatcagtgaatgtttgctgagtataaatgctgcttccttaaaccacttgtcgctttaggatcaactttacctgtaccttttctcctttcctcccttgccacctcaggtgcaaatctgaactcagtgtctgcttcttccattttctcgtctctctcccctcttcccccattatccatatgacattattttacttcaaatgacagcatcaatcttaaaaagatatacattaaaactaaggagtttttttaaagaaagcctgaataagttcctttccctggtaactttgaaaagcagtcagagttgctatatagatatatgtggctcctttaaaatgctttgtgtatgtgtggtgtttaaaaaaaaaaaatcttaccagttaactttgcagtgtctaggtttgagtgtcataaatccacgtgttcctgttgcaacaaatacccaaaaattgtgtgtgcacttcctaataccagtcttcacccatggaggaacagtgctttttagagatgctttctatttcaatgttggcatactgcctgagggtattgcagttgtgggtgcattccctaatttgtatgatcaagatgaactggcccttttctacttccaagcttttaacagataccaccatatttgacagaattcccagagtgaattgcttgtgttattagtagattcagtgcccccagctgggataggcaagccatgacagcttccctgtttcacctacagaagtcttatctgagggatctattcacagtaagcaccaaggtctccatgtcttgaggtcagtttcattgtcttttgaaaagtgcatgcttcatttgaacaattcattcagcagcagatggactttcagtgatttaaaataaaattttgatccaaagctcaggacacaaaccacagtggtaaaattgagtagcatataatatcagactaaattatctgtaattttccacaacccagattgtatgtgttttatgtgtgtttaaataaatatgttagatacacgtgtatacatacacccatatacaacagatccaagactggctgacttcatttgaaatggttgaatctgctgtgtaataaagtggttcaaccatgattaggaactgaaatttagtagaagagggaaaaggagttaatgtaacaaattattttagctacaaaccccggtaatagagcacttgggggatgggatggggtgggttggtgagacaatcagaatggtaaattgattaaatgctcctaaccctgtaattttgtgcatagagcaccctatgctgtggaaataactgttcttagatttcattgtaactggactgttcaggttgcccagagggaaagaacattcctaattctaataaaataaacttttattttg

SEQ ID NO: 347229 - DNA, 1256 bp, Homo sapiens
cacgtggtaaattgagtacgcatataatatcagactaaattatctgtaattttccacaacccagattgtatgtgttttatgtgtgtttaaataaatatgttagatacacgtgtatacatacacccatatacaacagatccaagactggctgacttcatttgaaaagcagtcagagttgctatatagatatatgtggctcctttaaaatgctttgtgtatgtgtggtgtttaaaaaaaaaaaatcttaccagttaactttgcagtgtctaggtttgagtgtcataaatccacgtgttcctgttgcaacaaatacccaaaaattgtgtgtgcacttcctaataccagtcttcacccatggaggaacagtgctttttagagatgctttctatttcaatgttggcatactgcctgagggtattgcagttgtgggtgcattccctaatttgtatgatcaagatgaactggcccttttctacttccaagcttttaacagataccaccatatttgacagaattcccagagtgaattgcttgtgttattagtagattcagtgcccccagctgggataggcaagccatgacagcttccctgtttcacctacagaagtcttatctgagggatctattcacagtaagcaccaaggtctccatgtcttgaggtcagtttcattgtcttttgaaaagtgcatgcttcatttgaacaattcattcagcagcagatggactttcagtgatttaaaataaaattttgatccaaagctcaggacacaaaccacagtggtaaaattgagtagcatataatatcagactaaattatctgtaattttccacaacccagattgtatgtgttttatgtgtgtttaaataaatatgttagatacacgtgtatacatacacccatatacaacagatccaagactggctgacttcatttgaaatggttgaatctgctgtgtaataaagtggttcaaccatgattaggaactgaaatttagtagaagagggaaaaggagttaatgtaacaaattattttagctacaaaccccggtaatagagcacttgggggatgggatggggtgggttggtgagacaatcagaatggtaaattgattaaatgctcctaaccctgtaattttgtgcatagagcaccctatgctgtggaaataactgttcttagatttcattgtaactggactgttcaggttgcccagagggaaagaacattcctaattctaataaaataaacttttattttg

SEQ ID NO: 347230 - DNA, 1123 bp, Homo sapiens
atgagagtttagtgtactgatagtcttctggtactgaagtagtaagtgatttgatatatgtggctcctttaaaatgctttgtgtatgtgtggtgtttaaaaaaaaaaaatcttaccagttaactttgcagtgtctaggtttgagtgtcataaatccacgtgttcctgttgcaacaaatacccaaaaattgtgtgtgcacttcctaataccagtcttcacccatggaggaacagtgctttttagagatgctttctatttcaatgttggcatactgcctgagggtattgcagttgtgggtgcattccctaatttgtatgatcaagatgaactggcccttttctacttccaagcttttaacagataccaccatatttgacagaattcccagagtgaattgcttgtgttattagtagattcagtgcccccagctgggataggcaagccatgacagcttccctgtttcacctacagaagtcttatctgagggatctattcacagtaagcaccaaggtctccatgtcttgaggtcagtttcattgtcttttgaaaagtgcatgcttcatttgaacaattcattcagcagcagatggactttcagtgatttaaaataaaattttgatccaaagctcaggacacaaaccacagtggtaaaattgagtagcatataatatcagactaaattatctgtaattttccacaacccagattgtatgtgttttatgtgtgtttaaataaatatgttagatacacgtgtatacatacacccatatacaacagatccaagactggctgacttcatttgaaatggttgaatctgctgtgtaataaagtggttcaaccatgattaggaactgaaatttagtagaagagggaaaaggagttaatgtaacaaattattttagctacaaaccccggtaatagagcacttgggggatgggatggggtgggttggtgagacaatcagaatggtaaattgattaaatgctcctaaccctgtaattttgtgcatagagcaccctatgctgtggaaataactgttcttagatttcattgtaactggactgttcaggttgcccagagggaaagaacattcctaattctaataaaataaacttttattttg

SEQ ID NO: 347231 - DNA, 1907 bp, Homo sapiens
acgcacgcccctttgttggctcagtagcgatagcagcggccgtggaggtggcgttggggactgttttctctcggaggccggagcggagccgcgtctgactgaggcgggcagcaagcggccccctcgctccctccctccctcctccgcgccctccccgccgccaccagccgtcaaacgccaaccgccgctcctggggaggagccgcggctcgcggggccggagccaggcctgcgtccggacatcagccggagccggagcgagagccggggcctcggcgtccccgccctctccccgcctcggccagcgtccgccgggcccccgcgcgtcgcgccatggactcggacgagggctacaactacgagttcgacgaggacgaggagtgcagtgaggaggacagcggcgccgaggaggaggaggacgaagacgacgacgagccggacgatgataccctggatctgggcgaggtggagctggtggagcccgggctgggcgtcggcggggagcgggacggactgctgtgcggggagacgggcggtggcggcggcagcgctctggggcccggcggtggcggcggcggcggcggcggcggtggtggtggcgggccggggcatgagcaggaggaggattaccgctacgaggtgctcacggccgagcagattctacaacacatggtggaatgtatccgggaggtcaacgaggtcatccagaatccagcaactatcacaagaatactccttagccacttcaattgggataaagagaagctaatggaaaggtactttgatggaaacctggagaagctctttgctgagtgtcatgtaattaatccaagtaaaaagtctcgaacacgccagatgaatacaaggtcatcagcacaggatatgccttgtcagatctgctacttgaactaccctaactcgtatttcactggccttgaatgtggacataagttttgtatgcagtgctggagtgaatatttaactaccaaaataatggaagaaggcatgggtcagactatttcgtgtcctgctcatggttgtgatatcttagtggatgacaacacagttatgcgcctgatcacagattcaaaagttaaattaaagtatcagcatttaataacaaatagctttgtagagtgcaatcgactgttaaagtggtgtcctgccccagattgccaccatgttgttaaagtccaatatcctgatgctaaacctgttcgctgcaaatgtgggcgccaattttgctttaactgtggagaaaattggcatgatcctgttaaatgtaagtggttaaagaaatggattaaaaagtgtgatgatgacagtgaaacctccaattggattgcagccaacacaaaggaatgtcccaaatgccatgtcacaattgagaaggatggtggttgtaatcacatggtctgtcgtaaccagaattgtaaagcagagttttgctgggtgtgtcttggcccatgggaaccacatggatctgcctggtacaactgtaaccgctataatgaggatgatgcaaaggcagcaagagatgcacaggagcgatctagggcagccctgcagaggtacctgttctactgtaatcgctatatgaaccacatgcagagcctgcgctttgagcacaaactatatgctcaggtgaaacagaaaatggaggagatgcagcagcacaacatgtcctggattgaggtgcagttcctgaagaaggcagttgatgtcctctgccagtgtcgtgccacactcatgtacacttatgtcttcgctttctacctcaaaaagaataaccagtccattatctttgagataccacagcggtctagataatgccaaagggtgctcttgtctacctggacgagatattcccaagatctttgaagatataggggacttgttcagtttggg

SEQ ID NO: 347232 - DNA, 562 bp, Homo sapiens
tgttgcccaggctggtcacaaactcctgagctcaagcagtcagcctgccttggcctctctaagtgctgggattacaggtgtgagcaccctgcctggctgaaattttgattacatttagtgtgctgatgtggcagtctgctgaaattattttttttttgcaattaagacagcgccggatttactatagtaacttactttctgtttaatttctttttggcttatttttaatcctaaagaaacctgacatagtagtgtggcagactatgtttaaatagtcttgatcttatcattcaaatatatttccttagaggaataaagaaataactctagggatggaaatttgggtggagtattgtggaaatttaacttcaacctaggagttcactaaatgtccatgaagtgctattaccttaaaatgactttttttcccctccttctttagaatccagcaactatcacaagaatactccttagccacttcaattgggataaagagaagctaatggaaaggtaaggaactatattgtcagctttgtacttagaagtaacacagaaagcctat

SEQ ID NO: 347233 - DNA, 558 bp, Homo sapiens
gctcatttgtctttttatatttaatacaaacattgttgcccgcctttcctaagatgtatgtgtgttcggtgtatctgcatgtctagattcaccatgaaaagttcattttaggagcccatctattgtcaaattggacattttagccacgtaagaaatgtgaccttacagagccctgttgagtcactgtttatagtgagttttctgataatacctttgttaagttcatgttttgtttttcttacagtatttcactggccttgaatgtggacataagttttgtatgcagtgctggagtgaatatttaactaccaaaataatggaagaaggcatgggtcaggtaaagatatcaagttgtttttcagtttttgttgaatttcctatagtgttaagacccttgcacaaatttgcacaaataaaaacaggtgaagctttatgtgtcatgattctagattcaaacacctaaagataataggctttttcctaaagtaatgtggcattccagttaaagagccactccaggtacgttttctcagccggcatcaatattggtatatgtta

SEQ ID NO: 347234 - DNA, 526 bp, Homo sapiens
tatgctcatttgtctttttatatttaatacaaacattgttgcccgcctttcctaagatgtatgtgtgttcggtgtatctgcatgtctagattcaccatgaaaagttcattttaggagcccatctattgtcaaattggacattttagccacgtaagaaatgtgaccttacagagccctgttgagtcactgtttatagtgagttttctgataatacctttgttaagttcatgttttgtttttcttacagtatttcactggccttgaatgtggacataagttttgtatgcagtgctggagtgaatatttaactaccaaaataatggaagaaggcatgggtcaggtaaagatatcaagttgtttttcagtttttgttgaatttcctatagtgttaagacccttgcacaaatttgcacaaataaaaacaggtgaagctttatgtgtcatgattctagattcaaacacctaaagataataggctttttcctaaagtaatgtggcattccagttaaagagccactccaggtac

SEQ ID NO: 347235 - DNA, 403 bp, Homo sapiens
aagcatgggttgaaacttctcaatatagtctgaggcaccttagcaacaattattatgaaattgtcatcaaagcgtgtcttcatgcttatagtcattcttcacacatattgagtacccactatgtgctagttctactactaaattctaggtaattaactgtaaagcagacatgggttctctccttgtatttgccagtcactagaaactagtgacaatactgtggaactataaggcatgaaatgattggcttatttacttgcttacagtaggtaggccttaattctattaactctttgtgtcacttaacagctttaactgtggagaaaattggcatgatcctgttaaatgtaaggtgagtttgtctgacatttcaatttttaaataatggcacacttctaagact

SEQ ID NO: 347236 - DNA, 533 bp, Homo sapiens
tgatcattacatgtattcagaggtaattccttaggataagccaagtcagctcctgattgttattaggataaccatggctaaggcacctctttgtcaggctttgtaattaggggaatacacaccttgcagttgggcttctcttcaagctctaggttccccactcagcttctgccaaagaaaatcctgctttggttgattttatatatactggacattgtagctatgggatttccctggcttaagaggatgtgagcctagtgataatcttattcattggcttttacatttaagcttgactatagttaagtgctaaagtaatttgctatttttaaaagtcttttgttgtatcctaaccgttgttattttcaaacagtggttaaagaaatggattaaaaagtgtgatgatgacagtgaaacctccaattggattgcagccaacacaaaggttggtgttttccttcagtaactcttggtaataaaaatgataaggattggtactttggcattagcaaaagcaatgaggtgacctactt

SEQ ID NO: 347237 - DNA, 5288 bp, Homo sapiens
  misc_feature (5026)..(5026): n is a, c, g, or t
  misc_feature (5030)..(5030): n is a, c, g, or t
  misc_feature (5032)..(5032): n is a, c, g, or t
  misc_feature (5041)..(5041): n is a, c, g, or t
acgcacgcccctttgttggctcagtagcgatagcagcggccgtggaggtggcgttggggactgttttctctcggaggccggagcggagccgcgtctgactgaggcgggcagcaagcggccccctcgctccctccctccctcctccgcgccctccccgccgccaccagccgtcaaacgccaaccgccgctcctggggaggagccgcggctcgcggggccggagccaggcctgcgtccggacatcagccggagccggagcgagagccggggcctcggcgtccccgccctctccccgcctcggccagcgtccgccgggcccccgcgcgtcgcgccatggactcggacgagggctacaactacgagttcgacgaggacgaggagtgcagtgaggaggacagcggcgccgaggaggaggaggacgaagacgacgacgagccggacgatgataccctggatctgggcgaggtggagctggtggagcccgggctgggcgtcggcggggagcgggacggactgctgtgcggggagacgggcggtggcggcggcagcgctctggggcccggcggtggcggcggcggcggcggcggcggtggtggtggcgggccggggcatgagcaggaggaggattaccgctacgaggtgctcacggccgagcagattctacaacacatggtggaatgtatccgggaggtcaacgaggtcatccagaatccagcaactatcacaagaatactccttagccacttcaattgggataaagagaagctaatggaaaggtactttgatggaaacctggagaagctctttgctgagtgtcatgtaattaatccaagtaaaaagtctcgaacacgccagatgaatacaaggtcatcagcacaggatatgccttgtcagatctgctacttgaactaccctaactcgtatttcactggccttgaatgtggacataagttttgtatgcagtgctggagtgaatatttaactaccaaaataatggaagaaggcatgggtcagactatttcgtgtcctgctcatggttgtgatatcttagtggatgacaacacagttatgcgcctgatcacagattcaaaagttaaattaaagtatcagcatttaataacaaatagctttgtagagtgcaatcgactgttaaagtggtgtcctgccccagattgccaccatgttgttaaagtccaatatcctgatgctaaacctgttcgctgcaaatgtgggcgccaattttgctttaactgtggagaaaattggcatgatcctgttaaatgtaagtggttaaagaaatggattaaaaagtgtgatgatgacagtgaaacctccaattggattgcagccaacacaaaggaatgtcccaaatgccatgtcacaattgagaaggatggtggttgtaatcacatggtctgtcgtaaccagaattgtaaagcagagttttgctgggtgtgtcttggcccatgggaaccacatggatctgcctggtacaactgtaaccgctataatgaggatgatgcaaaggcagcaagagatgcacaggagcgatctagggcagccctgcagaggtacctgttctactgtaatcgctatatgaaccacatgcagagcctgcgctttgagcacaaactatatgctcaggtgaaacagaaaatggaggagatgcagcagcacaacatgtcctggattgaggtgcagttcctgaagaaggcagttgatgtcctctgccagtgtcgtgccacactcatgtacacttatgtcttcgctttctacctcaaaaagaataaccagtccattatctttgagaataaccaagcagatctagagaatgccacagaggtgctctcgggctaccttgaacgagatatttcccaagattctctgcaggatataaagcagaaagtacaagacaagtacagatactgtgagagtcgacgaagggttttgttacagcatgtgcatgaaggctatgaaaaagatctgtgggagtacattgaggactgagaatggccctgcataaaatgaactctgaaaactttaccatctagagtgctcatgcaattaaaacaaaacaaacacaaacaaggaggcactaagcctattctgacaccactggtctgtagtaccagaattgttttgttaatggaaagtttaagtaaattatattgtaataaaaaggtagataaaccattgtacaacagtattctaggccgccaacaaaagtgtgacagacacactaaaagccctccaactttaacttgtaacgtagcttcattctcaaagctgactccttttttttctttttccttttcctgagtgtagtacagttaaaatttcaaacagctccttgacactgcttttcatgttcaaaccagccattttgttgtactttggtaaaggacctcttccccttcctcccctacacatacagatacacccacacacagactgactctctttctctcataccccaaggtcatgagtgaatgatgcttagttccttgtaaagaaaatcttgggatggggaaaggggtaggcagcaagaggattcaacaaacgaaaaacataaaaactttgtatatgacttttaaaacaagaggacaacacagtatttttcaaaattgtatatagcgcatatgcatggacaaagcaagcgtggcacgtgtttgcataatgtttaattacaaaaaaatatttattctttaaaaatcttcaagattatgtctatttgctgtgcattttctttcagtttgcttatctttcccgggttggggttgggataaaggtgtgtcggtttagcacctctggaagacctatctagagctctttcactttcctgaggttattttgccctttctggtgttggtatgtctgttgccggccatgggcctcatgccttgaattcctgctcttgatcagggacaagggaggtcaagctctgactaatgccatgacctgattaaggggtacagcagggagttttgttgctacagctcatgaattaacctgtcccaacctaatccccctccatggcatcatgcctctacccaagcctttgtgtgcccatgttatgcacacagctgtaggcattcttaagtcccctgtcgcatccagtggaagcattttaaaatttcttttactttttggttttcccttaattgctgcttttcagattttagttatggctcgtctgctcaccccttctctacattagggtgtcaaagagaatgttttgctttaaatataaatagccattcatttagtctcagattgtgaatttaaaatggtggataccgaaattgcttgtgtgtgttgctgtgggtttggtttgaaggcaaacacccctagaacatgatattcccatctagtgcatttaaatagaaatcactgagtttgctgcttttttattgtcagcagataggagaattaataatgcattttagctgtgatgtccatttttatgaaattcctactaagagctatgttaaaagtaaaggatggtggtggttgtattaactatatacctgtttaggccattctggctgtggtatttttcaataggtcagcatctgtaaatctgtcagttttatacaggagtgcagagtgaactaggcaactagattaagaggtctaaatatgaaataccagttgaggctgaggacctcttcgtcttcctttaaatgtcttttgcctagggagtgtttaccatttgtgaggcagctttgtctgctcttacactgtacatcctattactccattgggaagtaggttcactttcctctggccttttgcctaagttaggctttgctgaatcaaccctacttttccttttagaaaaggttgttacaggagatttactggcaactgttcttttcccatcaaaaatcagtgaatgtttgctgagtataaatgctgcttccttaaaccacttgtcgctttaggatcaactttacctgtaccttttctcctttcctcccttgccacctcaggtgcaaatctgaactcagtgtctgcttcttccattttctcgtctctctcccctcttcccccattatccatatgacattattttacttcaaatgacagcatcaatcttaaaaagatatacattaaaactaaggagtttttttaaagaaagcctgaataagttcctttccctggtaactttgaaaagcagtcagagttgctatatagatatatgtggctcctttaaaatgctttgtgtatgtgtggtgtttaaaaaaaaaaaatcttaccagttaactttgcagtgtctaggtttgagtgtcataaatccacgtgttcctgttgcaacaaatacccaaaaattgtgtgtgcacttcctaataccagtcttcacccatggaggaacagtgctttttagagatgctttctatttcaatgttggcatactgcctgagggtattgcagttgtgggtgcattccctaatttgtatgatcaagatgaactggcccttttctacttccaagcttttaacagataccaccatatttgacagaattcccagagtgaattgcttgtgttattagtagattcagtgcccccagctgggataggcaagccatgacagcttccctgtttcacctacagaagtcttatctgagggatctattcacagtaagcaccaaggtctccatgtcttgaggtcagtttcattgtcttttgaaaagtgcatgcttcatttgaacaattcattcagcagcagatggactttcagtgatttaaaataaaattttgatccaaagctcaggacacaaaccacagtggtaaaattgagtagcatataatatcagactaaattatctgtaattttccacaacccagattgtatgtgttttatgtgtgtttaaataaatatgttagatacacgtgtatacatacacccatatacaacagatccaagactggctgacttcatttgaaatggttgaatctgctgtgtaataaagtggttcaaccatgattaggaactgaaatttagtagaagagggaaaaggagttnggtncnatttttgtnaaaccccgggatagagcctggggcaggactggggcgggtggtgcgcacacagaagggcatatgtaaagggcctaacccgcaattgtggctaaagaccatcgggaaaaagggtcgaaaggaaagaggagcaacgcccgggaagagaaccacccaaaaagacagtgttgcaccacaaaagagaggcggcgcagacatagaggcgcaagaacagaagtatacgacgacacaaagccactcacacagcaca

SEQ ID NO: 347238 - DNA, 5334 bp, Homo sapiens
acgcacgcccctttgttggctcagtagcgatagcagcggccgtggaggtggcgttggggactgttttctctcggaggccggagcggagccgcgtctgactgaggcgggcagcaagcggccccctcgctccctccctccctcctccgcgccctccccgccgccaccagccgtcaaacgccaaccgccgctcctggggaggagccgcggctcgcggggccggagccaggcctgcgtccggacatcagccggagccggagcgagagccggggcctcggcgtccccgccctctccccgcctcggccagcgtccgccgggcccccgcgcgtcgcgccatggactcggacgagggctacaactacgagttcgacgaggacgaggagtgcagtgaggaggacagcggcgccgaggaggaggaggacgaagacgacgacgagccggacgatgataccctggatctgggcgaggtggagctggtggagcccgggctgggcgtcggcggggagcgggacggactgctgtgcggggagacgggcggtggcggcggcagcgctctggggcccggcggtggcggcggcggcggcggcggcggtggtggtggcgggccggggcatgagcaggaggaggattaccgctacgaggtgctcacggccgagcagattctacaacacatggtggaatgtatccgggaggtcaacgaggtcatccagtgcatattgggtacttccagaagtatgaattcagtgatgcaaaggacaggcgggctgcagcagcaaagaatccagcaactatcacaagaatactccttagccacttcaattgggataaagagaagctaatggaaaggtactttgatggaaacctggagaagctctttgctgagtgtcatgtaattaatccaagtaaaaagtctcgaacacgccagatgaatacaaggtcatcagcacaggatatgccttgtcagatctgctacttgaactaccctaactcgtatttcactggccttgaatgtggacataagttttgtatgcagtgctggagtgaatatttaactaccaaaataatggaagaaggcatgggtcagactatttcgtgtcctgctcatggttgtgatatcttagtggatgacaacacagttatgcgcctgatcacagattcaaaagttaaattaaagtatcagcatttaataacaaatagctttgtagagtgcaatcgactgttaaagtggtgtcctgccccagattgccaccatgttgttaaagtccaatatcctgatgctaaacctgttcgctgcaaatgtgggcgccaattttgctttaactgtggagaaaattggcatgatcctgttaaatgtaagtggttaaagaaatggattaaaaagtgtgatgatgacagtgaaacctccaattggattgcagccaacacaaaggaatgtcccaaatgccatgtcacaattgagaaggatggtggttgtaatcacatggtctgtcgtaaccagaattgtaaagcagagttttgctgggtgtgtcttggcccatgggaaccacatggatctgcctggtacaactgtaaccgctataatgaggatgatgcaaaggcagcaagagatgcacaggagcgatctagggcagccctgcagaggtacctgttctactgtaatcgctatatgaaccacatgcagagcctgcgctttgagcacaaactatatgctcaggtgaaacagaaaatggaggagatgcagcagcacaacatgtcctggattgaggtgcagttcctgaagaaggcagttgatgtcctctgccagtgtcgtgccacactcatgtacacttatgtcttcgctttctacctcaaaaagaataaccagtccattatctttgagaataaccaagcagatctagagaatgccacagaggtgctctcgggctaccttgaacgagatatttcccaagattctctgcaggatataaagcagaaagtacaagacaagtacagatactgtgagagtcgacgaagggttttgttacagcatgtgcatgaaggctatgaaaaagatctgtgggagtacattgaggactgagaatggccctgcataaaatgaactctgaaaactttaccatctagagtgctcatgcaattaaaacaaaacaaacacaaacaaggaggcactaagcctattctgacaccactggtctgtagtaccagaattgttttgttaatggaaagtttaagtaaattatattgtaataaaaaggtagataaaccattgtacaacagtattctaggccgccaacaaaagtgtgacagacacactaaaagccctccaactttaacttgtaacgtagcttcattctcaaagctgactccttttttttctttttccttttcctgagtgtagtacagttaaaatttcaaacagctccttgacactgcttttcatgttcaaaccagccattttgttgtactttggtaaaggacctcttccccttcctcccctacacatacagatacacccacacacagactgactctctttctctcataccccaaggtcatgagtgaatgatgcttagttccttgtaaagaaaatcttgggatggggaaaggggtaggcagcaagaggattcaacaaacgaaaaacataaaaactttgtatatgacttttaaaacaagaggacaacacagtatttttcaaaattgtatatagcgcatatgcatggacaaagcaagcgtggcacgtgtttgcataatgtttaattacaaaaaaatatttattctttaaaaatcttcaagattatgtctatttgctgtgcattttctttcagtttgcttatctttcccgggttggggttgggataaaggtgtgtcggtttagcacctctggaagacctatctagagctctttcactttcctgaggttattttgccctttctggtgttggtatgtctgttgccggccatgggcctcatgccttgaattcctgctcttgatcagggacaagggaggtcaagctctgactaatgccatgacctgattaaggggtacagcagggagttttgttgctacagctcatgaattaacctgtcccaacctaatccccctccatggcatcatgcctctacccaagcctttgtgtgcccatgttatgcacacagctgtaggcattcttaagtcccctgtcgcatccagtggaagcattttaaaatttcttttactttttggttttcccttaattgctgcttttcagattttagttatggctcgtctgctcaccccttctctacattagggtgtcaaagagaatgttttgctttaaatataaatagccattcatttagtctcagattgtgaatttaaaatggtggataccgaaattgcttgtgtgtgttgctgtgggtttggtttgaaggcaaacacccctagaacatgatattcccatctagtgcatttaaatagaaatcactgagtttgctgcttttttattgtcagcagataggagaattaataatgcattttagctgtgatgtccatttttatgaaattcctactaagagctatgttaaaagtaaaggatggtggtggttgtattaactatatacctgtttaggccattctggctgtggtatttttcaataggtcagcatctgtaaatctgtcagttttatacaggagtgcagagtgaactaggcaactagattaagaggtctaaatatgaaataccagttgaggctgaggacctcttcgtcttcctttaaatgtcttttgcctagggagtgtttaccatttgtgaggcagctttgtctgctcttacactgtacatcctattactccattgggaagtaggttcactttcctctggccttttgcctaagttaggctttgctgaatcaaccctacttttccttttagaaaaggttgttacaggagatttactggcaactgttcttttcccatcaaaaatcagtgaatgtttgctgagtataaatgctgcttccttaaaccacttgtcgctttaggatcaactttacctgtaccttttctcctttcctcccttgccacctcaggtgcaaatctgaactcagtgtctgcttcttccattttctcgtctctctcccctcttcccccattatccatatgacattattttacttcaaatgacagcatcaatcttaaaaagatatacattaaaactaaggagtttttttaaagaaagcctgaataagttcctttccctggtaactttgaaaagcagtcagagttgctatatagatatatgtggctcctttaaaatgctttgtgtatgtgtggtgtttaaaaaaaaaaaatcttaccagttaactttgcagtgtctaggtttgagtgtcataaatccacgtgttcctgttgcaacaaatacccaaaaattgtgtgtgcacttcctaataccagtcttcacccatggaggaacagtgctttttagagatgctttctatttcaatgttggcatactgcctgagggtattgcagttgtgggtgcattccctaatttgtatgatcaagatgaactggcccttttctacttccaagcttttaacagataccaccatatttgacagaattcccagagtgaattgcttgtgttattagtagattcagtgcccccagctgggataggcaagccatgacagcttccctgtttcacctacagaagtcttatctgagggatctattcacagtaagcaccaaggtctccatgtcttgaggtcagtttcattgtcttttgaaaagtgcatgcttcatttgaacaattcattcagcagcagatggactttcagtgatttaaaataaaattttgatccaaagctcaggacacaaaccacagtggtaaaattgagtagcatataatatcagactaaattatctgtaattttccacaacccagattgtatgtgttttatgtgtgtttaaataaatatgttagatacacgtgtatacatacacccatatacaacagatccaagactggctgacttcatttgaaatggttgaatctgctgtgtaataaagtggttcaaccatgattaggaactgaaatttagtagaagagggaaaaggagttaatgtaacaaattattttagctacaaaccccggtaatagagcacttgggggatgggatggggtgggttggtgagacaatcagaatggtaaattgattaaatgctcctaaccctgtaattttgtgcatagagcaccctatgctgtggaaataactgttcttagatttcattgtaactggactgttcaggttgcccagagggaaagaacattcctaattctaataaaataaacttttattttg

SEQ ID NO: 347239 - DNA, 5072 bp, Homo sapiens
agctgggactacaggtgtgtaccactacacctggctaatttttgtatttttattagggacgggttttgccttgttgcccaggctggtcacaaactcctgagctcaagcagtcagcctgccttggcctctctaagtgctgggattacaggtgtgagcaccctgcctggctgaaattttgattacatttagtgtgctgatgtggcagtctgctgaaattattttttttttgcaattaagacagcgccggatttactatagtaacttactttctgtttaatttctttttggcttatttttaatcctaaagaaacctgacatagtagtgtggcagactatgtttaaatagtcttgatcttatcattcaaatatatttccttagaggaataaagaaataactctagggatggaaatttgggtggagtattgtggaaatttaacttcaacctaggagttcactaaatgtccatgaagtgctattaccttaaaatgactttttttcccctccttctttagaatccagcaactatcacaagaatactccttagccacttcaattgggataaagagaagctaatggaaaggtactttgatggaaacctggagaagctctttgctgagtgtcatgtaattaatccaagtaaaaagtctcgaacacgccagatgaatacaaggtcatcagcacaggatatgccttgtcagatctgctacttgaactaccctaactcgtatttcactggccttgaatgtggacataagttttgtatgcagtgctggagtgaatatttaactaccaaaataatggaagaaggcatgggtcagactatttcgtgtcctgctcatggttgtgatatcttagtggatgacaacacagttatgcgcctgatcacagattcaaaagttaaattaaagtatcagcatttaataacaaatagctttgtagagtgcaatcgactgttaaagtggtgtcctgccccagattgccaccatgttgttaaagtccaatatcctgatgctaaacctgttcgctgcaaatgtgggcgccaattttgctttaactgtggagaaaattggcatgatcctgttaaatgtaagtggttaaagaaatggattaaaaagtgtgatgatgacagtgaaacctccaattggattgcagccaacacaaaggaatgtcccaaatgccatgtcacaattgagaaggatggtggttgtaatcacatggtctgtcgtaaccagaattgtaaagcagagttttgctgggtgtgtcttggcccatgggaaccacatggatctgcctggtacaactgtaaccgctataatgaggatgatgcaaaggcagcaagagatgcacaggagcgatctagggcagccctgcagaggtacctgttctactgtaatcgctatatgaaccacatgcagagcctgcgctttgagcacaaactatatgctcaggtgaaacagaaaatggaggagatgcagcagcacaacatgtcctggattgaggtgcagttcctgaagaaggcagttgatgtcctctgccagtgtcgtgccacactcatgtacacttatgtcttcgctttctacctcaaaaagaataaccagtccattatctttgagaataaccaagcagatctagagaatgccacagaggtgctctcgggctaccttgaacgagatatttcccaagattctctgcaggatataaagcagaaagtacaagacaagtacagatactgtgagagtcgacgaagggttttgttacagcatgtgcatgaaggctatgaaaaagatctgtgggagtacattgaggactgagaatggccctgcataaaatgaactctgaaaactttaccatctagagtgctcatgcaattaaaacaaaacaaacacaaacaaggaggcactaagcctattctgacaccactggtctgtagtaccagaattgttttgttaatggaaagtttaagtaaattatattgtaataaaaaggtagataaaccattgtacaacagtattctaggccgccaacaaaagtgtgacagacacactaaaagccctccaactttaacttgtaacgtagcttcattctcaaagctgactccttttttttctttttccttttcctgagtgtagtacagttaaaatttcaaacagctccttgacactgcttttcatgttcaaaccagccattttgttgtactttggtaaaggacctcttccccttcctcccctacacatacagatacacccacacacagactgactctctttctctcataccccaaggtcatgagtgaatgatgcttagttccttgtaaagaaaatcttgggatggggaaaggggtaggcagcaagaggattcaacaaacgaaaaacataaaaactttgtatatgacttttaaaacaagaggacaacacagtatttttcaaaattgtatatagcgcatatgcatggacaaagcaagcgtggcacgtgtttgcataatgtttaattacaaaaaaatatttattctttaaaaatcttcaagattatgtctatttgctgtgcattttctttcagtttgcttatctttcccgggttggggttgggataaaggtgtgtcggtttagcacctctggaagacctatctagagctctttcactttcctgaggttattttgccctttctggtgttggtatgtctgttgccggccatgggcctcatgccttgaattcctgctcttgatcagggacaagggaggtcaagctctgactaatgccatgacctgattaaggggtacagcagggagttttgttgctacagctcatgaattaacctgtcccaacctaatccccctccatggcatcatgcctctacccaagcctttgtgtgcccatgttatgcacacagctgtaggcattcttaagtcccctgtcgcatccagtggaagcattttaaaatttcttttactttttggttttcccttaattgctgcttttcagattttagttatggctcgtctgctcaccccttctctacattagggtgtcaaagagaatgttttgctttaaatataaatagccattcatttagtctcagattgtgaatttaaaatggtggataccgaaattgcttgtgtgtgttgctgtgggtttggtttgaaggcaaacacccctagaacatgatattcccatctagtgcatttaaatagaaatcactgagtttgctgcttttttattgtcagcagataggagaattaataatgcattttagctgtgatgtccatttttatgaaattcctactaagagctatgttaaaagtaaaggatggtggtggttgtattaactatatacctgtttaggccattctggctgtggtatttttcaataggtcagcatctgtaaatctgtcagttttatacaggagtgcagagtgaactaggcaactagattaagaggtctaaatatgaaataccagttgaggctgaggacctcttcgtcttcctttaaatgtcttttgcctagggagtgtttaccatttgtgaggcagctttgtctgctcttacactgtacatcctattactccattgggaagtaggttcactttcctctggccttttgcctaagttaggctttgctgaatcaaccctacttttccttttagaaaaggttgttacaggagatttactggcaactgttcttttcccatcaaaaatcagtgaatgtttgctgagtataaatgctgcttccttaaaccacttgtcgctttaggatcaactttacctgtaccttttctcctttcctcccttgccacctcaggtgcaaatctgaactcagtgtctgcttcttccattttctcgtctctctcccctcttcccccattatccatatgacattattttacttcaaatgacagcatcaatcttaaaaagatatacattaaaactaaggagtttttttaaagaaagcctgaataagttcctttccctggtaactttgaaaagcagtcagagttgctatatagatatatgtggctcctttaaaatgctttgtgtatgtgtggtgtttaaaaaaaaaaaatcttaccagttaactttgcagtgtctaggtttgagtgtcataaatccacgtgttcctgttgcaacaaatacccaaaaattgtgtgtgcacttcctaataccagtcttcacccatggaggaacagtgctttttagagatgctttctatttcaatgttggcatactgcctgagggtattgcagttgtgggtgcattccctaatttgtatgatcaagatgaactggcccttttctacttccaagcttttaacagataccaccatatttgacagaattcccagagtgaattgcttgtgttattagtagattcagtgcccccagctgggataggcaagccatgacagcttccctgtttcacctacagaagtcttatctgagggatctattcacagtaagcaccaaggtctccatgtcttgaggtcagtttcattgtcttttgaaaagtgcatgcttcatttgaacaattcattcagcagcagatggactttcagtgatttaaaataaaattttgatccaaagctcaggacacaaaccacagtggtaaaattgagtagcatataatatcagactaaattatctgtaattttccacaacccagattgtatgtgttttatgtgtgtttaaataaatatgttagatacacgtgtatacatacacccatatacaacagatccaagactggctgacttcatttgaaatggttgaatctgctgtgtaataaagtggttcaaccatgattaggaactgaaatttagtagaagagggaaaaggagttaatgtaacaaattattttagctacaaaccccggtaatagagcacttgggggatgggatggggtgggttggtgagacaatcagaatggtaaattgattaaatgctcctaaccctgtaattttgtgcatagagcaccctatgctgtggaaataactgttcttagatttcattgtaactggactgttcaggttgcccagagggaaagaacattcctaattctaataaaataaacttttattttg

SEQ ID NO: 347240 - DNA, 5212 bp, Homo sapiens
acgcacgcccctttgttggctcagtagcgatagcagcggccgtggaggtggcgttggggactgttttctctcggaggccggagcggagccgcgtctgactgaggcgggcagcaagcggccccctcgctccctccctccctcctccgcgccctccccgccgccaccagccgtcaaacgccaaccgccgctcctggggaggagccgcggctcgcggggccggagccaggcctgcgtccggacatcagccggagccggagcgagagccggggcctcggcgtccccgccctctccccgcctcggccagcgtccgccgggcccccgcgcgtcgcgccatggactcggacgagggctacaactacgagttcgacgaggacgaggagtgcagtgaggaggacagcggcgccgaggaggaggaggacgaagacgacgacgagccggacgatgataccctggatctgggcgaggtggagctggtggagcccgggctgggcgtcggcggggagcgggacggactgctgtgcggggagacgggcggtggcggcggcagcgctctggggcccggcggtggcggcggcggcggcggcggcggtggtggtggcgggccggggcatgagcaggaggaggattaccgctacgaggtgctcacggccgagcagattctacaacacatggtggaatgtatccgggaggtcaacgaggtcatccagaatccagcaactatcacaagaatactccttagccacttcaattgggataaagagaagctaatggaaaggtactttgatggaaacctggagaagctctttgctgagtgtcatgtaattaatccaagtaaaaagtctcgaacacgccagatgaatacaaggtcatcagcacaggatatgccttgtcagatctgctacttgaactaccctaactcgtatttcactggccttgaatgtggacataagttttgtatgcagtgctggagtgaatatttaactaccaaaataatggaagaaggcatgggtcagactatttcgtgtcctgctcatggttgtgatatcttagtggatgacaacacagttatgcgcctgatcacagattcaaaagttaaattaaagtatcagcatttaataacaaatagctttgtagagtgcaatcgactgttaaagtggtgtcctgccccagattgccaccatgttgttaaagtccaatatcctgatgctaaacctgttcgctgcaaatgtgggcgccaattttgctttaactgtggagaaaattggcatgatcctgttaaatgtaagtggttaaagaaatggattaaaaagtgtgatgatgacagtgaaacctccaattggattgcagccaacacaaaggaatgtcccaaatgccatgtcacaattgagaaggatggtggttgtaatcacatggtctgtcgtaaccagaattgtaaagcagagttttgctgggtgtgtcttggcccatgggaaccacatggatctgcctggtacaactgtaaccgctataatgaggatgatgcaaaggcagcaagagatgcacaggagcgatctagggcagccctgcagaggtacctgttctactgtaatcgctatatgaaccacatgcagagcctgcgctttgagcacaaactatatgctcaggtgaaacagaaaatggaggagatgcagcagcacaacatgtcctggattgaggtgcagttcctgaagaaggcagttgatgtcctctgccagtgtcgtgccacactcatgtacacttatgtcttcgctttctacctcaaaaagaataaccagtccattatctttgagaataaccaagcagatctagagaatgccacagaggtgctctcgggctaccttgaacgagatatttcccaagattctctgcaggatataaagcagaaagtacaagacaagtacagatactgtgagagtcgacgaagggttttgttacagcatgtgcatgaaggctatgaaaaagatctgtgggagtacattgaggactgagaatggccctgcataaaatgaactctgaaaactttaccatctagagtgctcatgcaattaaaacaaaacaaacacaaacaaggaggcactaagcctattctgacaccactggtctgtagtaccagaattgttttgttaatggaaagtttaagtaaattatattgtaataaaaaggtagataaaccattgtacaacagtattctaggccgccaacaaaagtgtgacagacacactaaaagccctccaactttaacttgtaacgtagcttcattctcaaagctgactccttttttttctttttccttttcctgagtgtagtacagttaaaatttcaaacagctccttgacactgcttttcatgttcaaaccagccattttgttgtactttggtaaaggacctcttccccttcctcccctacacatacagatacacccacacacagactgactctctttctctcataccccaaggtcatgagtgaatgatgcttagttccttgtaaagaaaatcttgggatggggaaaggggtaggcagcaagaggattcaacaaacgaaaaacataaaaactttgtatatgacttttaaaacaagaggacaacacagtatttttcaaaattgtatatagcgcatatgcatggacaaagcaagcgtggcacgtgtttgcataatgtttaattacaaaaaaatatttattctttatttcccgggttggggttgggataaaggtgtgtcggtttagcacctctggaagacctatctagagctctttcactttcctgaggttattttgccctttctggtgttggtatgtctgttgccggccatgggcctcatgccttgaattcctgctcttgatcagggacaagggaggtcaagctctgactaatgccatgacctgattaaggggtacagcagggagttttgttgctacagctcatgaattaacctgtcccaacctaatccccctccatggcatcatgcctctacccaagcctttgtgtgcccatgttatgcacacagctgtaggcattcttaagtcccctgtcgcatccagtggaagcattttaaaatttcttttactttttggttttcccttaattgctgcttttcagattttagttatggctcgtctgctcaccccttctctacattagggtgtcaaagagaatgttttgctttaaatataaatagccattcatttagtctcagattgtgaatttaaaatggtggataccgaaattgcttgtgtgtgttgctgtgggtttggtttgaaggcaaacacccctagaacatgatattcccatctagtgcatttaaatagaaatcactgagtttgctgcttttttattgtcagcagataggagaattaataatgcattttagctgtgatgtccatttttatgaaattcctactaagagctatgttaaaagtaaaggatggtggtggttgtattaactatatacctgtttaggccattctggctgtggtatttttcaataggtcagcatctgtaaatctgtcagttttatacaggagtgcagagtgaactaggcaactagattaagaggtctaaatatgaaataccagttgaggctgaggacctcttcgtcttcctttaaatgtcttttgcctagggagtgtttaccatttgtgaggcagctttgtctgctcttacactgtacatcctattactccattgggaagtaggttcactttcctctggccttttgcctaagttaggctttgctgaatcaaccctacttttccttttagaaaaggttgttacaggagatttactggcaactgttcttttcccatcaaaaatcagtgaatgtttgctgagtataaatgctgcttccttaaaccacttgtcgctttaggatcaactttacctgtaccttttctcctttcctcccttgccacctcaggtgcaaatctgaactcagtgtctgcttcttccattttctcgtctctctcccctcttcccccattatccatatgacattattttacttcaaatgacagcatcaatcttaaaaagatatacattaaaactaaggagtttttttaaagaaagcctgaataagttcctttccctggtaactttgaaaagcagtcagagttgctatatagatatatgtggctcctttaaaatgctttgtgtatgtgtggtgtttaaaaaaaaaaaatcttaccagttaactttgcagtgtctaggtttgagtgtcataaatccacgtgttcctgttgcaacaaatacccaaaaattgtgtgtgcacttcctaataccagtcttcacccatggaggaacagtgctttttagagatgctttctatttcaatgttggcatactgcctgagggtattgcagttgtgggtgcattccctaatttgtatgatcaagatgaactggcccttttctacttccaagcttttaacagataccaccatatttgacagaattcccagagtgaattgcttgtgttattagtagattcagtgcccccagctgggataggcaagccatgacagcttccctgtttcacctacagaagtcttatctgagggatctattcacagtaagcaccaaggtctccatgtcttgaggtcagtttcattgtcttttgaaaagtgcatgcttcatttgaacaattcattcagcagcagatggactttcagtgatttaaaataaaattttgatccaaagctcaggacacaaaccacagtggtaaaattgagtagcatataatatcagactaaattatctgtaattttccacaacccagattgtatgtgttttatgtgtgtttaaataaatatgttagatacacgtgtatacatacacccatatacaacagatccaagactggctgacttcatttgaaatggttgaatctgctgtgtaataaagtggttcaaccatgattaggaactgaaatttagtagaagagggaaaaggagttaatgtaacaaattattttagctacaaaccccggtaatagagcacttgggggatgggatggggtgggttggtgagacaatcagaatggtaaattgattaaatgctcctaaccctgtaattttgtgcatagagcaccctatgctgtggaaataactgttcttagatttcattgtaactggactgttcaggttgcccagagggaaagaacattcctaattctaataaaataaacttttattttg

SEQ ID NO: 347241 - DNA, 2190 bp, Homo sapiens
acgcacgcccctttgttggctcagtagcgatagcagcggccgtggaggtggcgttggggactgttttctctcggaggccggagcggagccgcgtctgactgaggcgggcagcaagcggccccctcgctccctccctccctcctccgcgccctccccgccgccaccagccgtcaaacgccaaccgccgctcctggggaggagccgcggctcgcggggccggagccaggcctgcgtccggacatcagccggagccggagcgagagccggggcctcggcgtccccgccctctccccgcctcggccagcgtccgccgggcccccgcgcgtcgcgccatggactcggacgagggctacaactacgagttcgacgaggacgaggagtgcagtgaggaggacagcggcgccgaggaggaggaggacgaagacgacgacgagccggacgatgataccctggatctgggcgaggtggagctggtggagcccgggctgggcgtcggcggggagcgggacggactgctgtgcggggagacgggcggtggcggcggcagcgctctggggcccggcggtggcggcggcggcggcggcggcggtggtggtggcgggccggggcatgagcaggaggaggattaccgctacgaggtgctcacggccgagcagattctacaacacatggtggaatgtatccgggaggtcaacgaggtcatccagaatccagcaactatcacaagaatactccttagccacttcaattgggataaagagaagctaatggaaaggtactttgatggaaacctggagaagctctttgctgagtgtcatgtaattaatccaagtaaaaagtctcgaacacgccagatgaatacaaggtcatcagcacaggatatgccttgtcagatctgctacttgaactaccctaactcgtatttcactggccttgaatgtggacataagttttgtatgcagtgctggagtgaatatttaactaccaaaataatggaagaaggcatgggtcagactatttcgtgtcctgctcatggttgtgatatcttagtggatgacaacacagttatgcgcctgatcacagattcaaaagttaaattaaagtatcagcatttaataacaaatagctttgtagagtgcaatcgactgttaaagtggtgtcctgccccagattgccaccatgttgttaaagtccaatatcctgatgctaaacctgttcgctgcaaatgtgggcgccaattttgctttaactgtggagaaaattggcatgatcctgttaaatgtaagtggttaaagaaatggattaaaaagtgtgatgatgacagtgaaacctccaattggattgcagccaacacaaaggaatgtcccaaatgccatgtcacaattgagaaggatggtggttgtaatcacatggtctgtcgtaaccagaattgtaaagcagagttttgctgggtgtgtcttggcccatgggaaccacatggatctgcctggtacaactgtaaccgctataatgaggatgatgcaaaggcagcaagagatgcacaggagcgatctagggcagccctgcagaggtacctgttctactgtaatcgctatatgaaccacatgcagagcctgcgctttgagcacaaactatatgctcaggtgaaacagaaaatggaggagatgcagcagcacaacatgtcctggattgaggtgcagttcctgaagaaggcagttgatgtcctctgccagtgtcgtgccacactcatgtacacttatgtcttcgctttctacctcaaaaagaataaccagtccattatctttgagaataaccaagcagatctagagaatgccacagaggtgctctcgggctaccttgaacgagatatttcccaagattctctgcaggatataaagcagaaagtacaagacaagtacagatactgtgagagtcgacgaagggttttgttacagcatgtgcatgaaggctatgaaaaagatctgtgggagtacattgaggactgagaatggccctgcataaaatgaactctgaaaactttaccatctagagtgctcatgcaattaaaacaaaacaaacacaaacaaggaggcactaagcctattctgacaccactggtctgtagtaccagaattgttttgttaatggaaagtttaagtaaattatattgtaataaaaaggtagataaac

SEQ ID NO: 347242 - DNA, 412 bp, Homo sapiens
ctctgagcaagagctaaggtagaatgggctgaataggaaaaaacaaagctagtcctgggaatgggcaacttgccatctcaccattcccaaacccctaaccctccacggcccagccaccaggagccagcagccgcgagtcagtgtggaaatggctctctgcagagggaaccagaggctgcagacagcaaaggcgagaggatgctggccttggagagggccgttccccaactgcctccagcccagagcagggtggggaaagccccgagagtctctgggcagaagctggagtgggtggagaggggaagctccggcccctgtgtccaggtagcaaagccctgtcctcacatttcttacttgcaaccaggacctacatgtgaaatgatcacttctcattaaaaaccaccttcattgc

SEQ ID NO: 347243 - DNA, 289 bp, Homo sapiens
gggggcctttggtctcctaccgctcgggagtgcccctctcccccagcgcctctgaataagccccgggtgcttgcaggctcctgcacttctgcagtgcgggcggcaggaagcagcgcgtcccgggccctctcccgttctcacggggccttgaacctgtgtgagaggctcaccttctcaaaaacggctggctgcccagaggggatctctgtggggaactgtcgatgggcagaagcgccagctcctacttgatttctgcttcccccattcccctttctcctggtggccctgc

SEQ ID NO: 347244 - DNA, 453 bp, Homo sapiens
gggtcagcaaactctggcccatgggccaaatctagtctgttgccttttttgtacaacctgcaggttaagcatggtttttacattttcaaatagttgtgtaaaaatatcaaaagaatattttgtgacaagtagaaattttatgacattcagatttcattgtcataatgttttattggaacacagccatacctgtttgtttaggtataatctgtagttgttgtgttttaggcagaattgaatagttgctgtagagaccatatggccaacaaagcttaaaatgtgtactgtctggtcctttgcataaaaaggttgccagcccctattctagaattattgaaatcacatccctaccactccatggccagtaaattgaaagatgcaaggaaagacaaattaaattgatttaattgggtgtgaggtgggataggatcaaatgagagataaaatgtttat

SEQ ID NO: 347245 - DNA, 1700 bp, Homo sapiens
gtctgtaggaattgaaccttccgtgccgttttcaaatgctgtctgtgctcggaaaatacataatatcaagtcccttactgaaccccctacagattgtgttcataaggtgcttcactgctgttggtctacctggcctactgtttgtactcctgcctcatttactgtggccttcattcaagtagtaatgattatttacctattaagagtatagggtgggcgtggtggctcatgtaatcccagcactttgggaagccaagatgggtggatcacttgaagtcaggagtttgagaccagcctgggcaacatgatgaaaccccatctctactaaaaatacaaaagttagctggatgtggtggcagcctcctgtaatcccaactactcggcaggctgaggcaggagaatcgcttgaacccaggaggtggaggttacagtgagctgagatcatgctacagcaccccagcctgggcgacagaagagagacactgtctcaaaaaaaaaaaaaaaaaggtgtaagggagggcagaaattcttattcttttaaacccattgaaactttaaacagcctttcaggagcagaccctcctacggatttgctgaatccaaggcgaggaaggctatatccaggttacagtgaagtttgccccagacagtatgaagatgggggttctagatctggatactccaggcagtttttactatgtgaccctgtgcctgtcacagtatttcagcctgtaaaatatggacaatgtttgcctttttggcttccagttagctttgtgaggattaattgagatgagtgcaaagctcatttgtaatgtgtggcaggtggttttattactattttgagcagtagtggaaaagcccatttgaactggtaggatgagataagatcatggtggccttgacaactacatggaggagccagttgggtatgggaaagtttgagcagggaaagaaagaatgtagtgaaagcagtgtcaggtcaaagaaaggtttgcctaggagtgatgtaaagaatgggatggaggagtgggcagggaaggaggaaagaggagacatgtcagagggaccaaaaaggaggcagcaagtccaaggtcacaaacctgagtgactagaaaacttagcagcatcactaacacccagttggtgacgtggaactggtgctctcctgggagagagcttcaattctcaacctactaagttgaaggtgatggtgctatatctaagtggcagacagagataagggataggtgtctacaggggcaagatttggagccaggagaagaaatgagctctccaagggtagtggagagagatctgggatgttgggggctggcaggtaaatgctttaagtgatagaataggaggaatgagaaagccagcaaaagaaattcacgtcccatgtcttccatcatctatatgtctgacttgtttaagtggtcctggattcaccaaattttatagagctctgcctctgcctttattgggtaggcctgatttttgatgatgtccttaaaaggctagcctgattcttcttgtagttttgtagaacactttgtatcgagagttctctgataatgaaagtggtattacagaataatctgcccccgaaggactcctgattttgttaaagtgatacctttctctgtaaataaatgatggcgtgccacttaaaaaaccttcagcagatttcttttttt

SEQ ID NO: 347246 - DNA, 327 bp, Homo sapiens
gacagtgaaaactaaagaagggacaggagagaggaggccaagagccatgggctcctttagagggtcgtccttgctggttgcctatcccagggaatgcttactggactctgctgaaggtgccacttccctcagactatggtgggagcgggtatgaggatgagggtggcatgcacagagttgagttaacaggtgtgggaatcccttcggtttctcttggtgggtgggcccattcctagggggatctaggcagaggtttgggaggtagtgccacccactccccatcttcactgcctaaaccagagctacatggtgatttctttctttggg

SEQ ID NO: 347247 - DNA, 236 bp, Homo sapiens
caagatcatgcccctgcactctggcctgggtgagagagcgagatgctgtctcatacaaaatgaaacaaaaaacccccaaaatttagtatattcaaatagtggaatattatttagccacaaaaagaaatgaagtactgttctgtgctacaacatgaatgaacctagaaaacatgctaagcaaaagaagtcagacatcaaaggccatgtggtgtatgattccattcaaatgaaacatc

SEQ ID NO: 347248 - DNA, 1696 bp, Homo sapiens
  misc_feature (1204)..(1204): n is a, c, g, or t
agagaagcgaggtttccattctgagggacggcgtagagttcggccgaaggaacctgacccaggctctgtgaggaggcaaggggacaggccaacccagaggacaggattccctggaggccacagaggagcaccaaggagaagatctgcctgtgggtcttcattgcccagctcctgcccacactcctgcctgctgccctgacgagagtcatcatgtctcttgagcagaggagtctgcactgcaagcctgaggaagcccttgaggcccaacaagaggccctgggcctggtgtgtgtgcaggctgccacctcctcctcctctcctctggtcctgggcaccctggaggaggtgcccactgctgggtcaacagatcctccccagagtcctcagggagcctccgcctttcccactaccatcaacttcactcgacagaggcaacccagtgagggttccagcagccgtgaagaggaggggccaagcacctcttgtatcctggagtccttgttccgagcagtaatcactaagaaggtggctgatttggttggttttctgctcctcaaatatcgagccagggagccagtcacaaaggcagaaatgctggagagtgtcatcaaaaattacaagcactgttttcctgagatcttcggcaaagcctctgagtccttgcagctggtctttggcattgacgtgaaggaagcagaccccaccggccactcctatgtccttgtcacctgcctaggtctctcctatgatggcctgctgggtgataatcagatcatgcccaagacaggcttcctgataattgtcctggtcatgattgcaatggagggcggccatgctcctgaggaggaaatctgggaggagctgagtgtgatggaggtgtatgatgggagggagcacagtgcctatggggagcccaggaagctgctcacccaagatttggtgcaggaaaagtacctggagtaccggcaggtgccggacagtgatcccgcacgctatgagttcctgtggggtccaagggccctcgctgaaaccagctatgtgaaagtccttgagtatgtgatcaaggtcagtgcaagagttcgctttttcttcccatccctgcgtgaagcagctttgagagaggaggaagagggagtctgagcatgagttgcagccaaggccagtgggagggggactgggccagtgcaccttccagggccgcgtncagcagcttcccctgcctcgtgtgacatgaggcccattcttcactctgaagagagcggtcagtgttctcagtagtaggtttctgttctattgggtgacttggagatttatctttgttctcttttggaattgttcaaatgtttttttttaagggatggttgaatgaacttcagcatccaagtttatgaatgacagcagtcacacagttctgtgtatatagtttaagggtaagagtcttgtgttttattcagattgggaaatccattctattttgtgaattgggataataacagcagtggaataagtacttagaaatgtgaaaaatgagcagtaaaatagatgagataaagaactaaagaaattaagagatagtcaattcttgccttatacctcagtctattctgtaaaatttttaaagatatatgcatacctggatttccttggcttctttgagaatgtaagagaaattaaatctgaataaagaattcttcct

SEQ ID NO: 347249 - DNA, 559 bp, Homo sapiens
ttttcagtagagacagggtttcaccatgttggccaggctggtgtcaaactcctgacctcaggtgttccacctgcctcggcctcccaaagtgcagggattacaggcgtgaaccacagtgcctggcccagagtaaacttttaaaaacacagctctgaggaatatcaggcacagagtccggcacatagtaggcactcaatacatcacaaaaggcctgcttcaataattatgtttcagccactctctggaatatcatgaagctgtttttaaaagggaggaagggggctttcaggcatccatcacagtcacacaggcaaaattatggaatgattaacgtagcagtatatgtcaattacacaactattcataatagcaaaagactagaagcaactcaagtgttctcaaatagggagactggctgaaaaaaagttcatacataatcaaaggccatggggcttcaacacctgtgaaagtaagtgaaaaacatataaatataaataaaggaaaaagactatggaactgtaacaagaaaggaagaaaaaaacaaaaaaatgagaacaat

SEQ ID NO: 347250 - DNA, 260 bp, Homo sapiens
attcatgaacccccacccaagtctattaaccccagggcttttgacactagcagagggaaaggcttctacccagattaatgacaggggctattcaaagattcttgaccagtgtccaaaagaaaaaaatatttaaattagcatccactatgggctggattctatgctgagcactagagtcacaggtggtgcacccactgtgagacacaaatacacaaacagacaaacacaatacagtgttaaaggagctgtaatagccaaaa

SEQ ID NO: 347251 - DNA, 686 bp, Homo sapiens
  misc_feature (9)..(9): n is a, c, g, or t
  misc_feature (38)..(38): n is a, c, g, or t
  misc_feature (41)..(41): n is a, c, g, or t
aatcgcaancggcacactggtctggaaccccggatatnagncttcgaccctgaaatccttggggtgcctcgaggacgactggccgaaaagccgcattccctgcctcacaggccggaagtcccagcccagtccccgcgcgcgtccctcttcctcctcatactccccctctgtgccctcaggtgtggcggtcagatgtccagtttgcctggaagcacctcttgtgtccagatggtgagttcttggggagggggaggtaagagggaggctgggcactgaggaactgggcttggcctcatcctgcttgactcagtctcttacagacacctggggctcttgatcctggcactgctggccctcctcaccctactgggtgttgttctggccctcacctgccggcgcccacagtcaggtaagctcacctggggtaacctgggaagtcagacctgcccagctcggagactagctgccccctcaccctcccctgttgagagaaaacctccttgagggccagggattccctttcccactctgaggctctggccagagggagagaggactctggacctaggaaaagaggcttttggctccaggtggtcaggacagtgggggttgggggtggggtgggtgggtgctggcggtggggaccaagatccggaaagatgaataaagacaaacatgacaaacta

SEQ ID NO: 347252 - DNA, 2009 bp, Homo sapiens
ctggaagtcagtgcacttcactgactacagccagcacactcagatggtcatggccctgacactccgctgcccactgaagctggaagctgccctctgccagaggcacgactggcataccctttgcaaagacctcccgaatgccacggctcgagagtcagatgggtggtatgttttggagaaggtggacctgcacccccagctctgcttcaagttctcttttggaaacagcagccatgttgaatgcccccaccagactgggtctctcacatcctggaatgtaagcatggatacccaagcccagcagctgattcttcacttctcctcaagaatgcatgccaccttcagtgctgcctggagcctcccaggcttggggcaggacactttggtgccccccgtgtacactgtcagccaggcccggggctcaagcccagtgtcactagacctcatcattcccttcctgaggccagggtgctgtgtcctggctagcagctggagcagacacaaacccacctgggaagaattccctagccagtggggactcccctctcccccagctccatgcttcactcagctccccgggaggagaagatgcctggctcataggggtggggggctctgtgtctgtgccctcaggtgtggcggtcagatgtccagtttgcctggaagcacctcttgtgtccagatggtgagttcttggggagggggaggtaagagggaggctgggcactgaggaactgggcttggcctcatcctgcttgactcagtctcttacagacacctggggctcttgatcctggcactgctggccctcctcaccctactgggtgttgttctggccctcacctgccggcgcccacagtcaggcccgggcccagcgcggccagtgctcctcctgcacgcggcggactcggaggcgcagcggcgcctggtgggagcgctggctgaactgctacgggcagcgctgggcggcgggcgcgacgtgatcgtggacctgtgggaggggaggcacgtggcgcgcgtgggcccgctgccgtggctctgggcggcgcggacgcgcgtagcgcgggagcagggcactgtgctgctgctgtggagcggcgccgaccttcgcccggtcagcggccccgacccccgcgccgcgcccctgctcgccctgctccacgctgccccgcgcccgctgctgctgctcgcttacttcagtcgcctctgcgccaagggcgacatccccccgccgctgcgcgccctgccgcgctaccgcctgctgcgcgacctgccgcgtctgctgcgggcgctggacgcgcggcctttcgcagaggccaccagctggggccgccttggggcgcggcagcgcaggcagagccgcctagagctgtgcagccggctcgaacgagaggccgcccgacttgcagacctaggttgagcagagctccaccgcagtcccgggtgtctgcggccgcaacgcaacggacactggctggaaccccggaatgagccttcgaccctgaaatccttggggtgcctcgaggacgactggccgaaaagccgcattccctgcctcacaggccggaagtcccagcccagtccccgcgcgcgtccctcttcctcctcatactttcccttgactgagagctcctctaacccctgttctgatgggggagggcggtcttcccacttcctctccagaactccagaaagagcagtgtgcttatgcttcagtccaggctggagaggttggggccggggtagggaggcaggagccatgtcagttctgaaggagggtgaggcggtgggggattgcagggggcggctgagagaaaacctccttgagggccagggattccctttcccactctgaggctctggccagagggagagaggactctggacctaggaaaagaggcttttggctccaggtggtcaggacagtgggggttgggggtggggtgggtgggtgctggcggtggggaccaagatccggaaagatgaataaagacaaacatgacaaacta

SEQ ID NO: 347253 - DNA, 1555 bp, Homo sapiens
  misc_feature (9)..(9): n is a, c, g, or t
  misc_feature (38)..(38): n is a, c, g, or t
  misc_feature (41)..(41): n is a, c, g, or t
aatcgcaancggcacactggtctggaaccccggatatnagncttcgaccctgaaatccttggggtgcctcgaggacgactggccgaaaagccgcattccctgcctcacaggccggaagtcccagcccagtccccgcgcgcgtccctcttcctcctcatactccccctctgtgccctcaggtgtggcggtcagatgtccagtttgcctggaagcacctcttgtgtccagatggtgagttcttggggagggggaggtaagagggaggctgggcactgaggaactgggcttggcctcatcctgcttgactcagtctcttacagacacctggggctcttgatcctggcactgctggccctcctcaccctactgggtgttgttctggccctcacctgccggcgcccacagtcaggcccgggcccagcgcggccagtgctcctcctgcacgcggcggactcggaggcgcagcggcgcctggtgggagcgctggctgaactgctacgggcagcgctgggcggcgggcgcgacgtgatcgtggacctgtgggaggggaggcacgtggcgcgcgtgggcccgctgccgtggctctgggcggcgcggacgcgcgtagcgcgggagcagggcactgtgctgctgctgtggagcggcgccgaccttcgcccggtcagcggccccgacccccgcgccgcgcccctgctcgccctgctccacgctgccccgcgcccgctgctgctgctcgcttacttcagtcgcctctgcgccaagggcgacatccccccgccgctgcgcgccctgccgcgctaccgcctgctgcgcgacctgccgcgtctgctgcgggcgctggacgcgcggcctttcgcagaggccaccagctggggccgccttggggcgcggcagcgcaggcagagccgcctagagctgtgcagccggctcgaacgagaggccgcccgacttgcagacctaggttgagcagagctccaccgcagtcccgggtgtctgcggccgcaacgcaacggacactggctggaaccccggaatgagccttcgaccctgaaatccttggggtgcctcgaggacgactggccgaaaagccgcattccctgcctcacaggccggaagtcccagcccagtccccgcgcgcgtccctcttcctcctcatactttcccttgactgagagctcctctaacccctgttctgatgggggagggcggtcttcccacttcctctccagaactccagaaagagcagtgtgcttatgcttcagtccaggctggagaggttggggccggggtagggaggcaggagccatgtcagttctgaaggagggtgaggcggtgggggattgcagggggcggctgagagaaaacctccttgagggccagggattccctttcccactctgaggctctggccagagggagagaggactctggacctaggaaaagaggcttttggctccaggtggtcaggacagtgggggttgggggtggggtgggtgggtgctggcggtggggaccaagatccggaaagatgaataaagacaaacatgacaaacta

SEQ ID NO: 347254 - DNA, 922 bp, Homo sapiens
ctggaagtcagtgcacttcactgactacagccagcacactcagatggtcatggccctgacactccgctgcccactgaagctggaagctgccctctgccagaggcacgactggcataccctttgcaaagacctcccgaatgccacggctcgagagtcagatgggtggtatgttttggagaaggtggacctgcacccccagctctgcttcaagttctcttttggaaacagcagccatgttgaatgcccccaccagactgggtctctcacatcctggaatgtaagcatggatacccaagcccagcagctgattcttcacttctcctcaagaatgcatgccaccttcagtgctgcctggagcctcccaggcttggggcaggacactttggtgccccccgtgtacactgtcagccaggcccggggctcaagcccagtgtcactagacctcatcattcccttcctgaggccagggtgctgtgtcctgtctgtgccctcaggtgtggcggtcagatgtccagtttgcctggaagcacctcttgtgtccagatgtctcttacagacacctggggctcttgatcctggcactgctggccctcctcaccctactgggtgttgttctggccctcacctgccggcgcccacagtcaggtaagctcacctggggtaacctgggaagtcagacctgcccagctcggagactagctgccccctcaccctcccctgttgagagaaaacctccttgagggccagggattccctttcccactctgaggctctggccagagggagagaggactctggacctaggaaaagaggcttttggctccaggtggtcaggacagtgggggttgggggtggggtgggtgggtgctggcggtggggaccaagatccggaaagatgaataaagacaaacatgacaaacta

SEQ ID NO: 347255 - DNA, 1732 bp, Homo sapiens
cgctggtacggccggaagtatgggataacagcagccatgttgaatcccccaccagactgggtctctcacatcctggaatgtaagcatggatacccaagcccagcagctgattcttcacttctcctcaagaatgcatgccaccttcagtgctgcctggagcctcccaggcttggggcaggacactttggtgccccccgtgtacactgtcagccaggcccggggctcaagcccagtgtcactagacctcatcattcccttcctgaggccagggtgctgtgtcctggctagcagctggagcagacacaaacccacctgggaagaattccctagccagtggggactcccctctcccccagctccatgcttcactcagctccccgggaggagaagatgcctggctcataggggtggggggctctgtgtctgtgccctcaggtgtggcggtcagatgtccagtttgcctggaagcacctcttgtgtccagatgtctcttacagacacctggggctcttgatcctggcactgctggccctcctcaccctactgggtgttgttctggccctcacctgccggcgcccacagtcaggcccgggcccagcgcggccagtgctcctcctgcacgcggcggactcggaggcgcagcggcgcctggtgggagcgctggctgaactgctacgggcagcgctgggcggcgggcgcgacgtgatcgtggacctgtgggaggggaggcacgtggcgcgcgtgggcccgctgccgtggctctgggcggcgcggacgcgcgtagcgcgggagcagggcactgtgctgctgctgtggagcggcgccgaccttcgcccggtcagcggccccgacccccgcgccgcgcccctgctcgccctgctccacgctgccccgcgcccgctgctgctgctcgcttacttcagtcgcctctgcgccaagggcgacatccccccgccgctgcgcgccctgccgcgctaccgcctgctgcgcgacctgccgcgtctgctgcgggcgctggacgcgcggcctttcgcagaggccaccagctggggccgccttggggcgcggcagcgcaggcagagccgcctagagctgtgcagccggctcgaacgagaggccgcccgacttgcagacctaggttgagcagagctccaccgcagtcccgggtgtctgcggccgcaacgcaacggacactggctggaaccccggaatgagccttcgaccctgaaatccttggggtgcctcgaggacgactggccgaaaagccgcattccctgcctcacaggccggaagtcccagcccagtccccgcgcgcgtccctcttcctcctcatactttcccttgactgagagctcctctaacccctgttctgatgggggagggcggtcttcccacttcctctccagaactccagaaagagcagtgtgcttatgcttcagtccaggctggagaggttggggccggggtagggaggcaggagccatgtcagttctgaaggagggtgaggcggtgggggattgcagggggcggctgagagaaaacctccttgagggccagggattccctttcccactctgaggctctggccagagggagagaggactctggacctaggaaaagaggcttttggctccaggtggtcaggacagtgggggttgggggtggggtgggtgggtgctggcggtggggaccaagatccggaaagatgaataaagacaaacatgacaaacta

SEQ ID NO: 347256 - DNA, 629 bp, Homo sapiens
ctggaagtcagtgcacttcactgactacagccagcacactcagatggtcatggccctgacactccgctgcccactgaagctggaagctgccctctgccagaggcacgactggcataccctttgcaaagacctcccgaatgccacggctcgagagtcagatgggtggtatgttttggagaaggtggacctgcacccccagctctgcttcaagttctcttttggaaacagcagccatgttgaatgcccccaccagactgggtctctcacatcctggaatgtaagcatggatacccaagcccagcagctgattcttcacttctcctcaagaatgcatgccaccttcagtgctgcctggagcctcccaggcttggggcaggacactttggtgccccccgtgtacactgtcagccaggtatggcctcgcccccactaggtcctattgctcagagcacagccctcaatttccttgtgacctcattgagatagaccctgggaaggcagaaacaaacaaatccctgacttttaccatctggtttactttatttacgtgatcagcctctgttcagctaacttgctgacagtaggttcctcaagggagcactttcttttttttctttttttcttttttt

SEQ ID NO: 347257 - DNA, 849 bp, Homo sapiens
ccttttcttaataactgacaagtgacacaagtggtaccttttaaacagatggatgcaaaaacttgtgagatcgaatgaactgatgtaccccattggtattttgggaacccaaattccataattaactttttacccaagtggcaaaagtagaagatgttctagtcaccaaattgattatttgatggacttttgttctttcttccacaagattttggcgacccagaaagggtaaagacatgataagagaagatgcatcctgaacaacttttattgtttggcttgaagcatttgctgttatgctgtgtggagggaaggggaacctgctagttaggaacatgtggcatgcatgtactagaagttaccatagagactgcatacactaagactgcagcattgtgattggtgggaaagatacattttgcagaagcttttctggagagataaaggtaagacacgagaaagaaagtgagactgccaataaaggggcagagcacagagaagtcccaaacaaccatacattctagaaaactgggacagcagagattacaactactgctataaaactacataaactgttcactcaatggctgcctgtcaggaaaatttcaagtattgtcagacagaacagacacaagatattctagaataaaaaggtaaacaagtaaacctactgaggttataggggtgacaaaagggaaatggcaagaaaacatttaaaaatgattcaatgctagaaaaaaaaaagaatctcagagagcaataaaatttaaagttacatttaactttaaatgtaggctgacctttggggaattatttaaattctgagtacctctgcttccttccctatga

SEQ ID NO: 347258 - DNA, 575 bp, Homo sapiens
ccttttcttaataactgacaagtgacacaagtggtaccttttaaacagatggatgcaaaaacttgtgagatcgaatgaactgatgtaccccattggtattttgggaacccaaattccataattaactttttacccaagtggcaaaagtagaagatgttctagtcaccaaattgattatttgatggacttttgttctttcttccacaagattttggcgacccagaaagggtaaagacatgataagagaagatgcatcctgaacaacttttattgtttagagtaactcctcaaaacatacttgttgagcaaaatgggacgtcaaaattttgcctggaagttggaaactttcagattttccaaattccaacctgtttttacagtctaggttaatccagtctaacctatcaagttcatctaactgggtcctccctgggaaaaaggaagaaagaggacataggaagtgaataaagaattgaacaggggaaagaaactcagttgtctaacaagatatttttaaaatatttatttctccaagagggttaaacctcattcacaccttggagtaaattacttta

SEQ ID NO: 347259 - DNA, 428 bp, Homo sapiens
agttcagggctaaataaatgtaaagtactaacatcatcattatcactagttctactctgcacttatgtctagaatttttgtagtagccagtgtacagacaaaatcactaaaattggttgctaatttctgatttacaagctgagcagaattccctacttagagtaactcctcaaaacatacttgttgagcaaaatgggacgtcaaaattttgcctggaagttggaaactttcagattttccaaattccaacctgtttttacagtctaggttaatccagtctaacctatcaagttcatctaactgggtcctccctgggaaaaaggaagaaagaggacataggaagtgaataaagaattgatacctcagctgggcgtgcagtggctcatgcctttaatctcagcactttgggaggccaaggcgggcacatc

SEQ ID NO: 347260 - DNA, 127 bp, Homo sapiens
ttgatggacttttgttctttcttccacaagattttggcgacccagaaagggtaaagacatgataagagaagatgcatcctgaacaacttttattgtgagtagaaaaaaaatagcataaagtgagcat

SEQ ID NO: 347261 - DNA, 604 bp, Homo sapiens
attttgggctttgttgttgccattttttttttcaatttcgataaggctacatttgacgccgtatcatgatgattacaatactggctctgataatacctggtgattttaaaggatttttttaagcccattttgagccttcctgtttattgtttcttcttcattggaggaagatattaaatatgtgaaacacatctgcaaatggtacttgaaaaatgaaatgaaatgcctttgtgcttcttgcagcccattctacaatttattttaacttcacagttaaaaagtgtatattttttattttctacctatctagttatagcctaattgatttctttggacagagaaacacattcagtagacaaactttaggtgaatggaaattagtcctgatctattttgacatagctctttatttttcatgtgtaacgcagcttgccttcatgggcaggaaggtggatggggaagccgcacgtgcctggcgtagtgtagatctaatagcggtcgtgttacgaagattaaatgagttaatgtttggaaacctgttgggacagagctggcaaacggtgaatgtgttgcatgcatcaactgtgatgatgcattccagtgt

SEQ ID NO: 347262 - DNA, 779 bp, Homo sapiens
taacttgccagcacccaccacatgagcaatttattaaattaaacagatcaggccccatgtgcatgtgtgtgtgtgcgtgtgtgtgtatgcgtgcgcgtgtgtccttttggtttggtttctccagaaaacgctgactaatactgtatggtttgggaaacatttcaggaaaactttggcagggagaggggcacaaaggataattaccaactaaatatccaactctctcactttgcaagtttctaatttgtggcttcctcagtctcagttccacattatattaaaacaggccttcctgagagtccacaatttcaaacaaacctctcaaggaattcgattcactgacccagaggaggcaaagcgaattatttactatttggcttgtagcagaagctacctgacatttttatgcatgctttacgccctctatccaactagactataccttcactagggactcttagcacctagcctgacattctaaacgtaatgctcaataaatggtcaaattgaattgagtcaaacatgtcgttctcagattgctccattacagtatgtcaacctccacaaatgggagcattctaggcagacccaaggggatgggagagcatttagagatagctcttatctcttacttctcttctccctcccctccacacacatttctaaatctcatttctgctccctgttcttctctctgtgcctggcctcatgcccaaaatttagtcagcaattctcaagaaccaattggaggtagagccctgcgcttgatacctggtggg

SEQ ID NO: 347263 - DNA, 576 bp, Homo sapiens
agtccctcctgccgcgagccacccagggcggcggcctgcagctgcaccagtcgcgggacagatcttgacccatcttatcaccgtcttctctggcactcagtatttggagtaatcagttgttaccagttgcggaggcagcgcatagcacaacgtagtacctggaacctgacggcacctagcatgtttcaacagttagcgcccgcatcaccccaagggattaaatttggcattctttctcttgagactcaagtcctggcagagctgttgatcctctcacaagattctgtcatagaagacaccaggcctgaagagcgtgatgtagctggagctagctacacctcttgatagctaagactccaaggctccagacaccttggtgattgcactctccaccatgccaggaccgcagtgccagtttaccccactcacctgtagagaatgtatccggcggagatggagtttcactcttgttgcccagactggagtgcaatgacacaatctcagctcaccacaacctctgcctcctgggttcaagcgattctcccgcctcagcctcccgagtagccgggattatag

SEQ ID NO: 347264 - DNA, 379 bp, Homo sapiens
catagcggctgcactattttccattccctctagcagtgtgcgagggctctgattctccacatcgttcccagcacttgttactgttgttgtctacttagcagccactctagtgggcgtggagcgacctcactgtggtttggtttgcgttttcctggcagctgatgctgttgagcatctttgcatgtgctcattggctgtttgggtatctttttttttgtttttgttttgttttgtttttgagacatattctcactctgtcacccaggctggagtataatggcgtgatcttggctcactgcaatctccacctcctgggtttaagtgattcctttgccttggcctccaagtagcttggactacaggcgcccaccatcacacc

SEQ ID NO: 347265 - DNA, 760 bp, Homo sapiens
  misc_feature (15)..(17): n is a, c, g, or t
cgtacttagaggatnnngagtgggtagtgtcctccctcccctcccgctctccttactcagtgaccccagcaaggtccctgatggatgtttcaatggcccagtgagtagggagcccagagcttcactgtgccaagagaccctccccaaagcagccaagcaccttctcacagggcaaggccttggagcaggttcccaaggagcccctcctcatcctggaagaagcagtccctaaacagagctcaacaacactccctggctgtgcagcattggataactcacttcacctttctgagccttccagatttcccatctgttatatgggcattaataatatcccctacttccacagagttgtcatgagggttaaaggagctaatacaagcaatgtgttcgtagtggtcctggcacattgcactcaataaagaccagtctctgtgaaacatcgttgtacactaagtgttagctccatccccactcttctccaagcttcagtttcctcctctgtaaaaaataatgcctgccctgctcaagggctattataaggttcagaggagattatgggtgtaaacactataaagtcctataaaaattgaagttgtgctttccagccttccagaagaatccaacccattccaagatctcttttcttccagagcccacaatgcagtgccccaaacactctcttcttgcagtcatctttctaagcagagagatccccaccttagccagaaaagggctccatttggccaatactgtcccc

SEQ ID NO: 347266 - DNA, 778 bp, Homo sapiens
  misc_feature (4)..(4): n is a, c, g, or t
  misc_feature (9)..(9): n is a, c, g, or t
caanccccnaccccccagccacacccaccttgaggtgagcacggggctcctccctcccctcccgctctccttactcagtgaccccagcaaggtccctgatggatgtttcaatggcccagtgagtagggagcccagagcttcactgtgccaagagaccctccccaaagcagccaagcaccttctcacagggcaaggccttggagcaggttcccaaggagcccctcctcatcctggaagaagcagtccctaaacagagctcaacaacactccctggctgtgcagcattggataactcacttcacctttctgagccttccagatttcccatctgttatatgggcattaataatatcccctacttccacagagttgtcatgagggttaaaggagctaatacaagcaatgtgttcgtagtggtcctggcacattgcactcaataaagaccagtctctgtgaaacatcgttgtacactaagtgttagctccatccccactcttctccaagcttcagtttcctcctctgtaaaaaataatgcctgccctgctcaagggctattataaggttcagaggagattatgggtgtaaacactataaagtcctataaaaattgaagttgtgctttccagccttccagaagaatccaacccattccaagatctcttttcttccagagcccacaatgcagtgccccaaacactctcttcttgcagtcatctttctaagcagagagatccccaccttagccagaaaagggctccatttggccaatactgtcccc

SEQ ID NO: 347267 - DNA, 1119 bp, Homo sapiens
tttactttaaaaaagaatttatttgttacagccctgggggctgagaagtccaaggttgaggggctgcacctggtgagggccttcttgctgctggggactctgcagagtcctgagggtggcgcaggtgtcacatggccagggggcggagcatattcacaggccagctcaggtcttccttcctcttctaatgaagtcaccagtcccactccggtgataaccctttaatccatgaatccatcgacaggttaatcccaaccacgcttagaggccccacctctcagtactgccacattggagattaagtttgaacatgagtttcattgaggataaacatccaaaacagctcatcccaaatctaaatgtttcttaaatcaactaatcaattaaaaaaagaaaacctctctgggctgaacaaggcgtatcagtgagctaaagccagcctacatgcctggcagtgccaatctacctcaaggtcctcagaactctccagtcccctcacctttccctaagaccaggtgacttgtggctccctgaacacagcaagcaggtcctcacatctgagcatgtgggcctgagcgccctttctgcctaagtcacaggcccaacacatcctgctcggcagcctcagcaacaacttcctcctgcccagaaggccttcctcaattgcttctccccaccataggccggatcaggtgagacgtgctcacgtgtcacacctggttcacgtatgtcgtggcaggatcttttcacttggagggttcaaccaggattcttggtgctgttccaaggcccccctccccaccctgtcacctcagctttgtgtccataaatgttcactgtatttcataaaccagaaaaaaagcagtgtctctgcaataaaaagaactcttacagaaaacttagtgtgagatatgtatagctgtgtacatatgtacactgatttttggttactcacttgacatgatgtgagtgctatgaagttaggcctggagtgctgggaactggtgtcccctctgtttttttgtttttatttttttgagatgcagtttttgctctgttgcccaggctggagtgcagtggagcaatctcggctcactgcaacctctgcctcgtggattc

SEQ ID NO: 347268 - DNA, 2538 bp, Homo sapiens
atcagggagcgtgtcagaggccgaccacgtgtactgtggagactgtcaaagtctcccggagcccaatttccggaagcggtgagttctgaaagaagttcctgcaccgtagtttcccaagtctgcgaatccccaaccatgagcgcctcgggcgtactgtcctttacccagcaaggatgggagcaggtgctggccaaagtgaaacgggctgtggtttacctggacgccgcctgcgccgagagcctgcactggggctgcggatccacccgtctcctggaggcggtggggggtcctgactgtcacctgcgagagttcgagcccgacgcaattggtggtggagccaagcagcccaaggcagtgtttgtgctgagctgcctgctgaaaggccggaccgtggagatcctacgggacatcatctgccgcagtcacttccagtattgtgtggtggtcacaaccgtgagccacgctgtccacctcacagctaatcatgtcccagcggcggcagcggccgagatggaggggcagcagccggtgttcgagcagctggaggagaagctgtgtgaatggatgggcaacatgaactacacggccgaggtgttccatgtcccgttattgcttgcccctgttgctccccactttgccttgactccagcttttgcatcccttttcccactgctaccccaggatgtgcacctccttaatagcgcccgaccggacaagaggaagctgggaagcctgggtgatgtggactccactacgctaaccccagagctgctgctgcagatcagatgcctagtgtcaggcctcagttctctgtgtgaacatttaggagtacgggaggagtgttttgctgtaggttccttaagtcaggtcatcgctgcggatctggccaattatgcccctgcaaagaacaggaagaagactgctgcaggcagggcatcagtggtttttgtggacagaaccctggatctcacaggagcagttggacatcatggagacaacttagtagagaagatcatttcagcacttccccagctcccaggccacacaaatgatgtgatggttaacatgatagcgctcactgcactccatactgaggaggaaaattataatgtggttgcaccaggctgtctttcacaatccagtgacaccacagccaaagccctatgggaagctttactgaacactaagcacaaagaggcagtgatggaagttcggagacatctagtggaagcggcaagcagagaaaacctgccaatcaagatgagtatggggagagtcacaccgggacagctcatgtcctatattcagctcttcaagaacaacctcaaagctctaatgaatcattgtggcctcctccagcttggactggccacagctcaaacgttgaaacacccacagactgccaagtgggacaactttctggcttttgaaaggctccttcttcagagcattggggagtcagcaatgtccgttgtgttaaatcagctgctgcccatgattaagcctgtaacccagagaaccaacgaggactacagccctgaggaactgctgatccttctcatatatatttattctgtcactggagagctcacggtagacaaagacctgtgtgaagcagaagaaaaagtcaagaaagcattggctcaggtcttctgtgaggaatctggattgtcacctttgctgcaaaaaattacggactgggactcttcaattaatctgacatttcacaaatccaaaattgccgtggatgaactctttacttcacttcgggatattgctggagctcggagtctcctgaaacagtttaagtctgtatatgttcctggaaatcatacccaccaggcatcttataagccattgttgaagcaagttgtggaggaaatatttcatcccgagaggccagattccgttgatattgaacacatgtcttcaggcctcactgatctccttaaaactggatttagcatgttcatgaaggtgagccggcctcatcctagtgactaccccctcctgatcctctttgtggtaggtggggtcacagtctctgaagtgaaaatggtcaaagatcttgtggcatcgttgaagccaggaacccaggtaatcgtgctgtccacacgactcctgaagccacttaacattcctgagctgttatttgcaactgaccgactgcatccagaccttggcttctgagcatccgctaagaagataagacctactcaagctggaaatgccgatgcaattttctgccaccactccaaatactcctccacaaccagcgtccctgtcactaattgcgagaatgatggaattctgcctgaagggtcttgatacctactcagtgaggtactttgcttggattgctgtgattcttaaaaaaaaaaaaaaaaagtttttttattttcctgaaggcgacagtctgtcttttggcgagtccaattagtgatcgtttccatttatccttaaccctctctttgtgatcttcctgattccacctacaagttcattagttctaaataaaagcctgttggcaagtgttgg

SEQ ID NO: 347269 - DNA, 2484 bp, Homo sapiens
atcagggagcgtgtcagaggccgaccacgtgtactgtggagactgtcaaagtctcccggagcccaatttccggaagcggtgagttctgaaagaagttcctgcaccgtagtttcccaagtctgcgaatccccaaccatgagcgcctcgggcgtactgtcctttacccagcaaggatgggagcaggtgctggccaaagtgaaacgggctgtggtttacctggacgccgcctgcgccgagagcctgcactggggctgcggatccacccgtctcctggaggcggtggggggtcctgactgtcacctgcgagagttcgagcccgacgcaattggtggtggagccaagcagcccaaggcagtgtttgtgctgagctgcctgctgaaaggccggaccgtggagatcctacgggacatcatctgccgcagtcacttccagtattgtgtggtggtcacaaccgtgagccacgctgtccacctcacagctaatcatgtcccagcggcggcagcggccgagatggaggggcagcagccggtgttcgagcagctggaggagaagctgtgtgaatggatgggcaacatgaactacacggccgaggtgttccatgtcccgttattgcttgcccctgttgctccccactttgccttgactccagcttttgcatcccttttcccactgctaccccaggatgtgcacctccttaatagcgcccgaccggacaagaggaagctgggaagcctgggtgatgtggactccactacgctaaccccagagctgctgctgcagatcagatgcctagtgtcaggcctcagttctctgtgtgaacatttaggagtacgggaggagtgttttgctgtaggttccttaagtcaggtcatcgctgcggatctggccaattatgcccctgcaaagaacaggaagaagactgctgcaggcagggcatcagtggtttttgtggacagaaccctggatctcacaggagcagttggacatcatggagacaacttagtagagaagatcatttcagcacttccccagctcccaggccacacaaatgatgtgatggttaacatgatagcgctcactgcactccatactgaggaggaaaattataatgtggttgcaccaggctgtctttcacaatccagtgacaccacagccaaagccctatgggaagctttactgaacactaagcacaaagaggcagtgatggaagttcggagacatctagtggaagcggcaagcagagcctatattcagctcttcaagaacaacctcaaagctctaatgaatcattgtggcctcctccagcttggactggccacagctcaaacgttgaaacacccacagactgccaagtgggacaactttctggcttttgaaaggctccttcttcagagcattggggagtcagcaatgtccgttgtgttaaatcagctgctgcccatgattaagcctgtaacccagagaaccaacgaggactacagccctgaggaactgctgatccttctcatatatatttattctgtcactggagagctcacggtagacaaagacctgtgtgaagcagaagaaaaagtcaagaaagcattggctcaggtcttctgtgaggaatctggattgtcacctttgctgcaaaaaattacggactgggactcttcaattaatctgacatttcacaaatccaaaattgccgtggatgaactctttacttcacttcgggatattgctggagctcggagtctcctgaaacagtttaagtctgtatatgttcctggaaatcatacccaccaggcatcttataagccattgttgaagcaagttgtggaggaaatatttcatcccgagaggccagattccgttgatattgaacacatgtcttcaggcctcactgatctccttaaaactggatttagcatgttcatgaaggtgagccggcctcatcctagtgactaccccctcctgatcctctttgtggtaggtggggtcacagtctctgaagtgaaaatggtcaaagatcttgtggcatcgttgaagccaggaacccaggtaatcgtgctgtccacacgactcctgaagccacttaacattcctgagctgttatttgcaactgaccgactgcatccagaccttggcttctgagcatccgctaagaagataagacctactcaagctggaaatgccgatgcaattttctgccaccactccaaatactcctccacaaccagcgtccctgtcactaattgcgagaatgatggaattctgcctgaagggtcttgatacctactcagtgaggtactttgcttggattgctgtgattcttaaaaaaaaaaaaaaaaagtttttttattttcctgaaggcgacagtctgtcttttggcgagtccaattagtgatcgtttccatttatccttaaccctctctttgtgatcttcctgattccacctacaagttcattagttctaaataaaagcctgttggcaagtgttgg

SEQ ID NO: 347270 - DNA, 1806 bp, Homo sapiens
atcagggagcgtgtcagaggccgaccacgtgtactgtggagactgtcaaagtctcccggagcccaatttccggaagcggtgagttctgaaagaagttcctgcaccgtagtttcccaagtctgcgaatccccaaccatgagcgcctcgggcgtactgtcctttacccagcaaggatgggagcaggtgctggccaaagtgaaacgggctgtggtttacctggacgccgcctgcgccgagagcctgcactggggctgcggatccacccgtctcctggaggcggtggggggtcctgactgtcacctgcgagagttcgagcccgacgcaattggtggtggagccaagcagcccaaggcagtgtttgtgctgagctgcctgctgaaaggccggaccgtggagatcctacgggacatcatctgccgcagtcacttccagtattgtgtggtggtcacaaccgtgagccacgctgtccacctcacagctaatcatgtcccagcggcggcagcggccgagatggaggggcagcagccggtgttcgagcagctggaggagaagctgtgtgaatggatgggcaacatgaactacacggccgaggtgttccatgtcccgttattgcttgcccctgttgctccccactttgccttgactccagcttttgcatcccttttcccactgctaccccaggatgtgcacctccttaatagcgcccgaccggacaagaggaagctgggaagcctgggtgatgtggactccactacgctaaccccagagctgctgctgcagatcagatgcctagtgtcaggcctcagttctctgtgtgaacatttaggagtacgggaggagtgttttgctgtaggttccttaagtcaggtcatcgctgcggatctggccaattatgcccctgcaaagaacaggaagaagactgctgcaggcagggcatcagtggtttttgtggacagaaccctggatctcacaggagcagttggacatcatggagacaacttagtagagaagatcatttcagcacttccccagctcccaggccacacaaatgatgtgatggttaacatgatagcgctcactgcactccatactgaggaggaaaattataatgtggttgcaccaggctgtctttcacaatccagtgacaccacagccaaagccctatgggaagctttactgaacactaagcacaaagaggcagtgatggaagttcggagacatctagtggaagcggcaagcagagaaaacctgccaatcaagatgagtatggggagagtcacaccgggacagctcatgtcctatattcagctcttcaagaacaacctcaaagctctaatgaatcattgtggcctcctccagcttggactggccacagctcaaacgttgaaacacccacagactgccaagtgggacaactttctggcttttgaaaggctccttcttcagagcattggggagtcagcaatgtccgttgtgttaaatcagctgctgcccatgattaagcctgtaacccagagaaccaacgaggactacagccctgaggaactgctgatccttctcatatatatttattctgtcactggagagctcacggtagacaaagacctgtgtgaagcagaagaaaaagtcaagaaagcattggctcaggtcttctgtgaggaatctggattgtcacctttgctgcaaaaaattacgggacactaaattttgattcaaatgaaccccatcttatgaaattgaggtatggttggagaaaaaaaatcaaattccaatgtggattatttataaataaagatcgatccgccg

SEQ ID NO: 347271 - DNA, 1624 bp, Homo sapiens
atcagggagcgtgtcagaggccgaccacgtgtactgtggagactgtcaaagtctcccggagcccaatttccggaagcggtgagttctgaaagaagttcctgcaccgtagtttcccaagtctgcgaatccccaaccatgagcgcctcgggcgtactgtcctttacccagcaaggatgggagcaggtgctggccaaagtgaaacgggctgtggtttacctggacgccgcctgcgccgagagcctgcactggggctgcggatccacccgtctcctggaggcggtggggggtcctgactgtcacctgcgagagttcgagcccgacgcaattggtggtggagccaagcagcccaaggcagtgtttgtgctgagctgcctgctgaaaggccggaccgtggagatcctacgggacatcatctgccgcagtcacttccagtattgtgtggtggtcacaaccgtgagccacgctgtccacctcacagctaatcatgtcccagcggcggcagcggccgagatggaggggcagcagccggtgttcgagcagctggaggagaagctgtgtgaatggatgggcaacatgaactacacggccgaggtgttccatgtcccgttattgcttgcccctgttgctccccactttgccttgactccagcttttgcatcccttttcccactgctaccccaggatgtgcacctccttaatagcgcccgaccggacaagaggaagctgggaagcctgggtgatgtggactccactacgctaaccccagagctgctgctgcagatcagatgcctagtgtcaggcctcagttctctgtgtgaacatttaggagtacgggaggagtgttttgctgtaggttccttaagtcaggtcatcgctgcggatctggccaattatgcccctgcaaagaacaggaagaagactgctgcaggcagggcatcagtggtttttgtggacagaaccctggatctcacaggagcagttggacatcatggagacaacttagtagagaagatcatttcagcacttccccagctcccaggccacacaaatgatgtgatggttaacatgatagcgctcactgcactccatactgaggaggaaaattataatgtggttgcaccaggctgtctttcacaatccagtgacaccacagccaaagccctatgggaagctttactgaacactaagcacaaagaggcagtgatggaagttcggagacatctagtggaagcggcaagcagagaaaacctgccaatcaagatgagtatggggagagtcacaccgggacagctcatgtcctatattcagctcttcaagaacaacctcaaagctctaatgaatcattgtggcctcctccagcttggactggccacagctcaaacgttgaaacacccacagactgccaagtgggacaactttctggcttttgaaaggctccttcttcaggtatgttgctatgggaacctcgtgggatcttaataattaatgttttgacttccagagaaaaaccttgacatttattatagccttagtaataaatcatattgttgacatgtgccctgcttcatattctctaagtgccccctagttaaaattcaagtagaaacttttttcacacctgttt

SEQ ID NO: 347272 - DNA, 3546 bp, Homo sapiens
atcagggagcgtgtcagaggccgaccacgtgtactgtggagactgtcaaagtctcccggagcccaatttccggaagcggtgagttctgaaagaagttcctgcaccgtagtttcccaagtctgcgaatccccaaccatgagcgcctcgggcgtactgtcctttacccagcaaggatgggagcaggtgctggccaaagtgaaacgggctgtggtttacctggacgccgcctgcgccgagagcctgcactggggctgcggatccacccgtctcctggaggcggtggggggtcctgactgtcacctgcgagagttcgagcccgacgcaattggtggtggagccaagcagcccaaggcagtgtttgtgctgagctgcctgctgaaaggccggaccgtggagatcctacgggacatcatctgccgcagtcacttccagtattgtgtggtggtcacaaccgtgagccacgctgtccacctcacagctaatcatgtcccagcggcggcagcggccgagatggaggggcagcagccggtgttcgagcagctggaggagaagctgtgtgaatggatgggcaacatgaactacacggccgaggtgttccatgtcccgttattgcttgcccctgttgctccccactttgccttgactccagcttttgcatcccttttcccactgctaccccaggatgtgcacctccttaatagcgcccgaccggacaagaggaagctgggaagcctgggtgatgtggactccactacgctaaccccagagctgctgctgcagatcagatgcctagtgtcaggcctcagttctctgtgtgaacatttaggagtacgggaggagtgttttgctgtaggttccttaagtcaggtcatcgctgcggatctggccaattatgcccctgcaaagaacaggaagaagactgctgcaggcagggcatcagtggtttttgtggacagaaccctggatctcacaggagcagttggacatcatggagacaacttagtagagaagatcatttcagcacttccccagctcccaggccacacaaatgatgtgatggttaacatgatagcgctcactgcactccatactgaggaggaaaattataatgtggttgcaccaggctgtctttcacaatccagtgacaccacagccaaagccctatgggaagctttactgaacactaagcacaaagaggcagtgatggaagttcggagacatctagtggaagcggcaagcagagaaaacctgccaatcaagatgagtatggggagagtcacaccgggacagctcatgtcctatattcagctcttcaagaacaacctcaaagctctaatgaatcattgtggcctcctccagcttggactggccacagctcaaacgttgaaacacccacagactgccaagtgggacaactttctggcttttgaaaggctccttcttcagagcattggggagtcagcaatgtccgttgtgttaaatcagctgctgcccatgattaagcctgtaacccagagaaccaacgaggactacagccctgaggaactgctgatccttctcatatatatttattctgtcactggagagctcacggtagacaaagacctgtgtgaagcagaagaaaaagtcaagaaagcattggctcaggtcttctgtgaggaatctggattgtcacctttgctgcaaaaaattacggactgggactcttcaattaatctgacatttcacaaatccaaaattgccgtggatgaactctttacttcacttcgggatattgctggagctcggagtctcctgaaacagtttaagtctgtatatgttcctggaaatcatacccaccaggcatcttataagccattgttgaagcaagttgtggaggaaatatttcatcccgagaggccagattccgttgatattgaacacatgtcttcaggcctcactgatctccttaaaactggatttagcatgttcatgaaggtgagccggcctcatcctagtgactaccccctcctgatcctctttgtggtaggtggggtcacagtctctgaagtgaaaatggtcaaagatcttgtggcatcgttgaagccaggaacccaggtaatcgtgctgtccacacgactcctgaagccacttaacattcctgagctgttatttgcaactgaccgactgcatccagaccttggcttctgagcatccgctaagaagataagacctactcaagctggaaatgccgatgcaattttctgccaccactccaaatactcctccacaaccagcgtccctgtcactaattgcgagaatgatggaattctgcctgaagggtcttgatacctactcagtgaggtactttgcttggattgctgtgattcttaaaaaaaaaaaaaaaaagtttttttattttcctgaaggcgacagtctgtcttttggcgagtccaattagtgatcgtttccatttatccttaaccctctctttgtgatcttcctgattccacctacaagttcattagttctaaataaaagcctgttggcaagtgttggtagattacaactctttttatttgaagttgctcgagaagttagacatgctttagaattatgagtgtggggaaaatttgatgttccttaggattatataactgaggagggaacattgcaaatagggtctgaggctttgtttctctcttgctctgaaacatttctgaaaaggcaaggaagggaggggtagtgtctggggcagtgctggtagcctgcatgtgttgtaaatcatcctgccataacaaaggactgcattgttctagctggcccactgggcaggtctgccaggctacttggaactgtagtgggaaggtggttgattggagggttatctgtatataaaaggttttctcccctccaaagaaagactccagtacaagatacctggtcccagggagtctaaattgtaacagcaacccctgtggactttgtgggtatgagttttgattgaaatataaagctttcttttctgtaagtttaagttttccatctgaccatagcagaaaaacctagacccacctagtgaaactttgtaagaactccagggcaaaaacgaaccacttgcaacccacatgtttgtaggtgtatggtcgatggaagtttctggcatccatgttggtaataaagagataaaactgaaaaggtttttattgtggattacacaggtggaggaaataacatgtaaaccaaaacactcacatgtctctgattttagttctctataaaacactgtcatttttgaaagaaccatgaagttggagattattttaagatgtaatcaaagcaggatttttgtggacacagacactcttttcttgcccaggtatgttttccacataatatcagttctttcatgaaatagaggagaccgcaggtgcctttttcattctactaatcttaaagtgttgaatttgaataaggaagttaatggtagccatccgtaagaaatgttaaagaggagacgacttttctaaaataaaaaattggaaagtaacctgtacgtgactcaaa

SEQ ID NO: 347273 - DNA, 1596 bp, Homo sapiens
atcagggagcgtgtcagaggccgaccacgtgtactgtggagactgtcaaagtctcccggagcccaatttccggaagcggtgagttctgaaagaagttcctgcaccgtagtttcccaagtctgcgaatccccaaccatgagcgcctcgggcgtactgtcctttacccagcaaggatgggagcaggtgctggccaaagtgaaacgggctgtggtttacctggacgccgcctgcgccgagagcctgcactggggctgcggatccacccgtctcctggaggcggtggggggtcctgactgtcacctgcgagagttcgagcccgacgcaattggtggtggagccaagcagcccaaggcagtgtttgtgctgagctgcctgctgaaaggccggaccgtggagatcctacgggacatcatctgccgcagtcacttccagtattgtgtggtggtcacaaccgtgagccacgctgtccacctcacagctaatcatgtcccagcggcggcagcggccgagatggaggggcagcagccggtgttcgagcagctggaggagaagctgtgtgaatggatgggcaacatgaactacacggccgaggtgttccatgtcccgttattgcttgcccctgttgctccccactttgccttgactccagcttttgcatcccttttcccactgctaccccaggatgtgcacctccttaatagcgcccgaccggacaagaggaagctgggaagcctgggtgatgtggactccactacgctaaccccagagctgctgctgcagatcagatgcctagtgtcaggcctcagttctctgtgtgaacatttaggagtacgggaggagtgttttgctgtaggttccttaagtcaggtcatcgctgcggatctggccaattatgcccctgcaaagaacaggaagaagactgctgcaggcagggcatcagtggtttttgtggacagaaccctggatctcacaggagcagttggacatcatggagacaacttagtagagaagatcatttcagcacttccccagctcgtgagccggcctcatcctagtgactaccccctcctgatcctctttgtggtaggtggggtcacagtctctgaagtgaaaatggtcaaagatcttgtggcatcgttgaagccaggaacccaggtaatcgtgctgtccacacgactcctgaagccacttaacattcctgagctgttatttgcaactgaccgactgcatccagaccttggcttctgagcatccgctaagaagataagacctactcaagctggaaatgccgatgcaattttctgccaccactccaaatactcctccacaaccagcgtccctgtcactaattgcgagaatgatggaattctgcctgaagggtcttgatacctactcagtgaggtactttgcttggattgctgtgattcttaaaaaaaaaaaaaaaaagtttttttattttcctgaaggcgacagtctgtcttttggcgagtccaattagtgatcgtttccatttatccttaaccctctctttgtgatcttcctgattccacctacaagttcattagttctaaataaaagcctgttggcaagtgttgg

SEQ ID NO: 347274 - DNA, 1770 bp, Homo sapiens
cagcaaggtagtggctgggctctgcctgtcaaatgtacctagtgccagtctcagccatcctgagtgccccattggctaaaggttcagtagacacagcccggctgtcccacaggccatctgtcccagactgtgcccccctccttccaggcagggcactagcgccaggtgccattcagctggctgccttctacttttccttcctagaacttcacttcatgccctcccccaaagacatttgttgcattctatttctcatcatccaataccctgagattggcccccctaattccctgcggtgtgtttgccctctcctgttgttaggtaatcgtgctgtccacacgactcctgaagccacttaacattcctgagctgttatttgcaactgaccgactgcatccagaccttggcttctgagcatccgctaagaagataagacctactcaagctggaaatgccgatgcaattttctgccaccactccaaatactcctccacaaccagcgtccctgtcactaattgcgagaatgatggaattctgcctgaagggtcttgatacctactcagtgaggtactttgcttggattgctgtgattcttaaaaaaaaaaaaaaaaagtttttttattttcctgaaggcgacagtctgtcttttggcgagtccaattagtgatcgtttccatttatccttaaccctctctttgtgatcttcctgattccacctacaagttcattagttctaaataaaagcctgttggcaagtgttggtagattacaactctttttatttgaagttgctcgagaagttagacatgctttagaattatgagtgtggggaaaatttgatgttccttaggattatataactgaggagggaacattgcaaatagggtctgaggctttgtttctctcttgctctgaaacatttctgaaaaggcaaggaagggaggggtagtgtctggggcagtgctggtagcctgcatgtgttgtaaatcatcctgccataacaaaggactgcattgttctagctggcccactgggcaggtctgccaggctacttggaactgtagtgggaaggtggttgattggagggttatctgtatataaaaggttttctcccctccaaagaaagactccagtacaagatacctggtcccagggagtctaaattgtaacagcaacccctgtggactttgtgggtatgagttttgattgaaatataaagctttcttttctgtaagtttaagttttccatctgaccatagcagaaaaacctagacccacctagtgaaactttgtaagaactccagggcaaaaacgaaccacttgcaacccacatgtttgtaggtgtatggtcgatggaagtttctggcatccatgttggtaataaagagataaaactgaaaaggtttttattgtggattacacaggtggaggaaataacatgtaaaccaaaacactcacatgtctctgattttagttctctataaaacactgtcatttttgaaagaaccatgaagttggagattattttaagatgtaatcaaagcaggatttttgtggacacagacactcttttcttgcccaggtatgttttccacataatatcagttctttcatgaaatagaggagaccgcaggtgcctttttcattctactaatcttaaagtgttgaatttgaataaggaagttaatggtagccatccgtaagaaatgttaaagaggagacgacttttctaaaataaaaaattggaaagtaacctgtacgtgactcaaa

SEQ ID NO: 347275 - DNA, 553 bp, Homo sapiens
atggtagtgtgattgatgagctacagtctagcaatatagcagtgcaggtagagactagaaacttgggagctggacacggaggctcacacctgtaaaccaaggttttgtaaactttttttctacagatgaggtgttgcttatgttgcccaggctgctctcaaacccctggcaccaagtgatcctcccacctcagactctcaagtctctgtgtagccttagccaccacacttggcttcaattcttataagaagcaaaagtaggcctggcaaggtgactcatgcctgtaatcccagcactttgggaggccaatgcaggtggatcactgaaagtcaggagttcgagactagccgggccaacatggtgaaaccccgtctctactaaaaacacaaaaagtagccaggcatagtggtacatgtctgtaatcccagctactcaggaggctgaggcaggagaactgcatgaacctgtgaggcagaggttgcagtcagccaagattataccactgcactccagcctgggcaacagaatgacaccttgtctcaaaaaaaaaaaa

SEQ ID NO: 347276 - DNA, 959 bp, Homo sapiens
  misc_feature (787)..(788): n is a, c, g, or t
cttgctcacttgcagaagttggcaagtgacgagtggccagggaccgtgcgtcagggcgtccctctgccctcagcctgctgtgtttcacccggtctctggtgagcacatctctggctgctttgcgtgaatgagccaagggagggatagatctagcttactgcctccccctcccttaagccaagcagaatggggtgtgtgtgcacacctgtggtgaacgaatctgtccgttcaccctgtgccagggccgtccttacagcaaggaccccggggatgtgtccgtccccatcagtgtcatgttagcaagcagtgacaacatccctttgcaggaggcatcctgaaccactctgtcctcagacagtggcagagcccaagagaacaatgtgccccacccctccaccagcctcaggaatcattgtcttgtccccatcacagcagccctaagactcagggcacatgcgccaagcctggggggctagtttctgtgtgggaagcgatggggaagcggtgaggagctcctggagaaggtggcagctttcataccgggtgatgttctgactctggtgttctctcccatctcagcacccattctgctccccagtcaggttggttctttgtggctcagatctgtcaccccttaatgaagtggctttctggctgccaaggattgagagctgctactgaggagtataagtcactaatagcattggaaaacactgtgaaatactccaaggtgccaagctgggcccagcccagtgtggttctaaaaggctaataaaaatccaccatnnaaaaaaaaaaaaaaaaaaacccgggcttcttcgggtgcgggaaaaggttgatggctggcttttttccgccctttttgaagggaatcggccctaggggcttatcgactgtctttctaaatcataacagaaacaacaagacacaaacaacaacaacaaaaaaaaagaacaaag

SEQ ID NO: 347277 - DNA, 650 bp, Homo sapiens
aagccacatttgaaaaacttgggagagaggaggagaaaaaggaagccacacagaattttggtgccacgaggaggaggacatctgtatcttgtatttgcatggtgttttacagtttagaaaacacagacaccatcataggtcactgtgaggtgggcacatttattactattttccagttgcagaaatcatcacccagaaataagggaaaaacctgattgcaagtcttcttatatgggtctgttctttctactacatctaagacatttctctgtggcatgcctgcactttgcagtgttatcttccaaacaccatctactttcagaaccctacacttcggagaaactgtacttgtaccattcttcaaacacgctacaagttttcctgcctctatgtatttgttcatactatttcttccccttaaacttctttacccaacttggactgttagaatgttgcccaaacctttcaaggtctaaatctccatgttacctgtttttcttctatgctattttttttaacatgattctttgtattacagatatttacaaacatttcttctcccatactaaatttaactttgtattcattttactgcctagtaaagctccttgcatagtaaggaaactagttttgaattaataggccagtca

SEQ ID NO: 347278 - DNA, 1297 bp, Homo sapiens
ccacacctggcctgcactcattttaaagttggaaaaacagaggccccagtgattagctttaggacggaaaccagtaaatagaaataaaaacacacaaaaatatatacatatatatacctacacacatctatacctacaaatgtttatatatgtatatacacacatatacacacacctgtataatatacacatattatatatattatttatttatttaagtttttattctttgtttttttgagacagagtctcactttgttgcccaggctggagtgccatggcgtgaccatagctcaatgcagcctcgacctcccaaacacaagcaaacctgcctcagcctctcaagtagttgcgactacaggcatgcaccaccacacctggctaatttttgttttattctttgtacacatggggatcttgatatgttacctaggttggtcttgaactcctggcctcaagtgactttcccacctcagtatcccaaagtgctgagattacaggtgtgagccactgtgcccagccaaaaccaaacatttttgagttaaaagcccctaataaggatggcagaattagataaacaaataggttcaataaagaagatcttgacaaagttttaatctactaatttaacgataatggaaattagtggaattcgagagtgaagaaatttctgcatttataaaagaatgaatagaattttggcagagaagccactttgtttttgaaacgagttaagaatcaaagaataaattaggatgatggcattacctggttaatgatatccaatatatgtaaattatctttgctgtgggtaggaaatttgtttattttccatgagcacttcaagaaccccattaacaaattgagttacatcttttgactcaactttcattatctgaatagtcctgctgggacaggtaatattctccatttggggctacaaatgtttgcattagaaatcaatctatttgtaaatgttgtattcaattttacatgatcttgatcttattttgtttaaatttgttgtttttttcaatgacaagttgatgcttccataatacatttaaaaacataacatacaatcctgtagttctgactgaactttcgtcaggtttcagcactgtaaaccaagaaacatcaacagatgaaaagttctcctcccaaaagggttaaaagtctccggggtttctaactagattgacttcagtatattctagacattcttttgctgttgcttggctcatttccttcttgataagattctattttccttcctcttcctcttctctctgttact

SEQ ID NO: 347279 - DNA, 1769 bp, Homo sapiens
ttgtttcatgtttctatattttgtctcccagttagattgaaacccgttgaaggtacagtatgtgtgtgactccttccatctctaccccaccactgatccattttaagcatttaataaaggcaaggaaggccttcacctttattaacttttttgaaaaatcagaattttcagcccacaattcactttcaaaaatacacattaagtgcctactctgtgccaggccctgttttaaggcacaagtcctggccttcatgaaacttacattccagtcagggagacataataagcacataaattatcaataaatactatgaagaaaaataaagcaagataatacagtggcgactggcggggtgacagattttaaacagcctggtcacagcaaggccaagaagagagcactgcatttttaggacctaaaagagaatatgcaggccttttatgttctcctcttcacagatcaagcctaacagtactcgtttcagtattaggcaggttagaatgccctgtgctgcaggaacaacaacaaaagctcagtggctttgcacgtaaacgttcacttctctctcacacaagtcgaatgcaggctagtgagggcttccctccacgtgttggctcagttgtctgggttctgctgccatcccaacactaggtcgcctgtgcacagagaaatgccaggggatgacagctcccccttttagtgattcactttttcatttacaggaaatcttcaggtgtgttttccctcagccagtcctagggtacggcaggtgacacctccaaccctctcggaagcacacccaaggcggagggaatgatgttgggagaatagtagaaatttctccggttccaaaatccgtattgcttccttatgggaaagggcttatttttccttgttttccatctggctattaccattttgatagcctctcttcaggctagataagctgggggtgtcagggacagatgagagaagaaaaaaggtacatttctggtgacaaggcacaaataggcttgtcagggagcgagacgcacatgcaggataagggctctccgtgatgtggaacaagcctgtgtttggagctcagtaaggcggaaagccaggtgggctggagccccaccctttcctgagctctcaggctgaggctcctgaaggcttcaggagcacagcagcaccttgttgacctgcagcaccctgcctgcttggcccggtctcttcacgctgtcgtctcagtgcacaattgaattttcctcctgaggaagttgatggctgctggaacacgcaacgacttcaatacgatgatgaacaaaaagtatcgcaattagacatacctccgcagcactgctgtttgctgtgtcttaaaggaggttgtttggaaaaaaacgaagaggagttgatgacattgttccaagctctgcatatatgggaacacttgaactttttacacagtaggaaaacatttcatttgtcccctgcctatacagcccaagctcctgtctcggtgtttctttctatctttcagcaagtgctgcaaataggcaaaggatggcaaaggaacagcaaccctcccctgtgaatcggggccattcacggttagagtcaccaaacctgtatttcaggggacatctttccagctcccaatctcccactcaggggaggaaggaacggggagctggtgtttcctgggcacagagttctggtttgggattataagaacattccggaaatgatgacggttgcacaataataaatatatttaatgccgcca

SEQ ID NO: 347280 - DNA, 411 bp, Homo sapiens
aagccatccctgaacagcaagcctagtgtccttcattttctttttgcttctagtcaaaccaggcaatgtgaggaacatcattcagcactttgagaacaaccagcagtatgatgccccagaacctgggacacaacgactctcgaccggaagctttcctgaggacctgctggagagtgacaggtagcactggctggatgggactcgccagctgctcgaagagtgggtcatgggcagggctgatgctagggtttaattccagctacttgacccctctccactagcttctaaggctccctttacagaacttcctccccacccccagtatcttcaggagacacattgtgtgccagtgaacaggccagtggaagagcaagcagatccccgacttccagcccaagaactacacacttt

SEQ ID NO: 347281 - DNA, 6564 bp, Homo sapiens
aattggctcatttaagaatttcaaaacatttaatgtaaaagcttttttttttttaaggaagtccataaattttggttcccagggttgcactggacttggaaggagtgctgttgtgtacatactattgtatggttttatttattattttactgtacaaatcagccgaaagaatttttccaagtgccatttcggatttattaatccttttttttttcctttcctcaaagatatttgctgttgtcatattaagcattggagactagaaaattactttccccctttgagctagagggtctcttgccaacagaaggacagctgagaaagctggatttaaaggatggttttatctgtactttgcagttaacagtgatattttgaaggcacatttttctgtgattcatttttttttggccatagtgctaaccttgaagagattcgtggctgggtttttggtttctgagaaggtcgtagtttttcctcttttcctttttttttttcttttttcttttcttttctttttttttaaagcgggggaggggaagaggggctgagaaaggaaatcatgttcactggtagaagtagagtggagcatcagttaccagggtcctgagagctggaggagaaaggattctatcttcaagttgggaggccctcctctcaccttgctcaaaaattgcaagcgattcaatcctgatcaagacaccaaagctacaggattctggaaccgtggagacaccgagaaaccatgagtgtaaggttaccccagagtatagacaggttaagtagcctgtcttctctgggagattctgcaccagagcgcaagtccccttcccaccatcgccagccttcggatgcctctgagacaacaggtctcgttcaacgctgtgtcattatccaaaaggaccagcatggcttcggcttcacagtcagtggggatcgcattgttctggtgcagtctgtgcggcctggaggtgcagccatgaaggccggtgtgaaagagggcgaccggatcatcaaagtcaacggcaccatggtgaccaatagctcacacctggaagtggtaaagctgatcaaatctggcgcctatgtcgcactcaccctcctgggctcttcaccttcatccatgggcatctctgggctccagcaggacccatccccagcaggagctccccgaatcacgtcagtgatcccctcaccaccacctcctccacctctaccacctccacaacgcatcacaggacccaaacctctgcaggatcccgaagttcaaaaacatgccacccagatcctcaggaatatgctgaggcaggaagaaaaagaattacaggacatacttccactatatggtgacaccagccagagaccatcagaaggccggctctctctggattcccaggagggggacagtggcttggactctgggacagaacgctttccttccctcagtgagtcattgatgaatcggaactcggtactgtcagaccctgggctagacagtcctcgaacctcccctgtgatcatggccagggtggcccagcaccacaggcggcagggctcggatgcagcagtcccctcaaccggtgaccagggtgtagatcaaagcccaaagcctttaattattggcccagaggaagactatgacccgggttatttcaacaacgagagcgacatcatattccaggatctggagaaactgaagtctcggccagctcacctgggggtttttctacgttacatcttctctcaggcggaccccagtccactgcttttttacctgtgtgcagaagtttatcagcaggcaagccccaaggattcccgaagcttggggaaagacatctggaatattttcctggagaaaaatgcgcctctgagagtgaagatccctgagatgctacaggctgaaattgactcgcgcctgcggaacagcgaagatgcccgtggtgttctctgtgaagctcaagaggcagccatgcctgagatccaagagcagatccacgactacagaacgaagcgcacactggggctgggcagcctgtatggtgaaaatgacctgctggacctggatggggaccctctccgagagcgccaagtggctgagaagcagctggctgcccttggagatattttgtccaagtatgaggaagacaggagcgcccccatggacttcgccctcaatacctacatgagccatgctgggatccgtcttcgagaggcacgaccttccaacacagctgaaaaggcccagtctgctcctgacaaggacaagtggctaccgttcttccctaagaccaagaagagcagcaattccaagaaagaaaaggatgccttggaggacaagaagcgaaaccctatcctcaaatacattgggaagcccaaaagctcttctcaaagcacatttcatattcccttgtcccctgtggaagtcaaaccaggcaatgtgaggaacatcattcagcactttgagaacaaccagcagtatgatgccccagaacctgggacacaacgactctcgaccggaagctttcctgaggacctgctggagagtgacagttcacgctcagagattcgcctgggccgctctgaaagcctcaagggccgggaagagatgaaacggtctcgaaaggcagagaacgtgccccgctctcgcagtgatgttgacatggatgctgctgcggaggctactcgcctgcaccagtcagcctcgtcctctacctccagcctctccaccaggtctcttgagaacccaacccctccattcactcccaaaatgggccgcaggagcattgagtcccccagtttggggttctgcacagataccctccttccccacctcctagaggatgatctgggccagctgtctgacctggagccagagccagatgcccaaaattggcagcatacagtgggcaaggatgtggtggctgggctaacccagcgggagattgaccggcaagaggtcatcaatgagctgtttgtgactgaagcttcccacctgcgcacactccgggtcctggacctgatcttctaccagcgaatgaagaaggagaacctgatgccccgggaggagctggcccggctcttcccgaacctgcctgaactcatagagattcacaattcctggtgtgaagccatgaagaagctccgggaggaaggccccatcatcaaagagatcagtgacctcatgctggcccggtttgatggccctgcccgagaggaactccagcaagtggctgcacagttctgttcctatcagtcaatagccctagagctaatcaagaccaagcaacgcaaggagagtcgattccagctcttcatgcaggaggctgagagccaccctcagtgtcggcggctgcagctgagagacctcatcatctctgagatgcagcggctcaccaagtacccgctgctgctggagagcatcatcaagcacacagagggtggcacctctgagcatgagaagctgtgccgggcccgggaccagtgccgggagattctcaagtatgtgaatgaagcggtaaaacaaacagagaaccgccaccgtttagagggctaccagaaacgcctggatgccaccgccctggagagggccagcaaccccctggcagcagagttcaagagcctggatcttacaaccagaaaaatgatccatgagggacccctgacctggaggatcagcaaggataagaccttggacctccacgtgctgctgctggaggacctcctagtgctgctacagaaacaggatgagaagctattgctgaagtgccacagcaagactgctgtgggctcctcagacagcaagcagaccttcagccccgtgctcaagctcaatgctgtgctcatccgctctgtggccacagataaacgggccttcttcatcatctgcacctccaagctgggcccaccccagatctatgagctggttgcattgacgtcatcagacaagaacacatggatggagctcttagaagaggccgtgcggaatgccaccaggcaccccggagctgccccaatgcccgtccatcctccacccccaggtccccgggagccagcccagcagggccccacacccagcagggtagaactggatgactcagacgtgttccatggtgaacctgaacctgaggagctgcctggaggcactgggtcccagcagagggtccaagggaagcaccaggtcctgctagaggaccctgagcaggagggcagtgcagaggaagaggaactgggtgtcctgccttgcccttccacatccctggatggagagaacaggggcatcaggacaaggaaccccatccacttggccttcccaggccctctgttcatggaagggctcgctgactccgctctggaagatgtggagaacctgcgacatctgatcctgtggagcctgctgccaggtcacaccatggaaactcaggctgcccaggagcccgaggacgacctgacacccacaccttctgtcatcagcgtcacctctcacccctgggacccaggctccccagggcaagcaccccctgggggtgaaggggacaacacccagcttgcagggctggagggggaacggccagagcaggaagacatgggtctctgttctctggaacacctacccccaaggaccagaaattctgggatatgggagtctccagaactggacaggaatctggctgaagatgcttcaagcacagaggcagcaggaggttacaaagttgtgagaaaagctgaggtggcaggcagcaaggttgtccctgcactaccagagagtggccagtcagagcctgggccacctgaagtggaaggcggaacaaaggctacggggaactgcttttatgtcagcatgccatcaggacccccggactcaagcaccgaccactcagaggcacccatgagcccccctcagcctgacagcctccctgcagggcagacagagcctcagcctcagctgcagggaggcaacgatgatccaagacgccccagccgctctcctccaagcctggccctcagggacgtgggcatgatcttccataccattgagcagctcactctcaagctcaacaggctcaaggatatggagctggcccacagagagctgctcaagtcccttgggggagagtcatctggtggcaccacgcctgtgggcagtttccacacagaagcagctagatggacagatggctccctctcacctcccgctaaggagcccctagcttctgactccaggaacagccatgaactggggccctgccctgaggatggctctgacgcccccctggaagacagcacagcagacgcagccgcgtcaccaggaccataaccgtacaaaccaccaaatcctctgcgtccccactcctccttcagggactggcctgagaccggggcacagggtaggggggatcccaacactcctccctgtggaggaggcagttagggaaactaggatccagccaaggcccggggggagacccgcatgttgcttggtctgctcaagtcggagtcaggtttcagtgtcttttccctcccttagcccaaccctccaaggcctcatgtctcctaagcatgctgactgcatccgaaaggcccccactcaccatggtctgccctcaccccacatatgtgtgtacacgcgcacgcctgtatgtgcgctgccctcagacatgcaagtgaaaggaggaggcttctgtgtaaatgcactttcttcctcccctctttctccataagaccccaggcagaggtgggtgcctcccctcccctctttgtcactttggtttcctataaatatgtatgtatcgtatgtgcatctttgctattgtaaataactttgaccttttttgttcctgttcctgaagtgctggaggcagttatggaaggagctgcttagggaagaggggtttcacttgtatctccttagttaacaacccagttccaggatcgagcctaaagcgggagccaggcctgagtgttcctgtccctgtgagtgggaaggtcttctggctccccatcccacctggctccagagcctgccctccacagcttgctgccaagctactccctccctccctggacttctcatcttcacaagatggggatcatgggggtttcttaccccacctatgtccccctcttccccaccctgtccctgtagaaaaccagtgaagcaggtacggagctgaggactgggccccaggaggtggggacaggggtctgaatgccgagtccctgaattcacccaggaccatccaaggggccaccgcagcattggccccatcaccacgtcctcacccaactctccctgatgaatagaatatacacactgtgctaggtgtatatatacatatatatatatataaatatatatataatatataaaatatagatatggaaatgactgttctgctgttaagataatgtatactcttttattttcttcctttcatggttaagattttttttttaagaaaagttaaatatccttcagtggtggtgtgtgtgtttcttggaatcgctgtgataaaaggtacggtgtttgttccctgtaagactggttaggattggatagtgggaacc

SEQ ID NO: 347282 - DNA, 7605 bp, Homo sapiens
aattggctcatttaagaatttcaaaacatttaatgtaaaagcttttttttttttaaggaagtccataaattttggttcccagggttgcactggacttggaaggagtgctgttgtgtacatactattgtatggttttatttattattttactgtacaaatcagccgaaagaatttttccaagtgccatttcggatttattaatccttttttttttcctttcctcaaagatatttgctgttgtcatattaagcattggagactagaaaattactttccccctttgagctagagggtctcttgccaacagaaggacagctgagaaagctggatttaaaggatggttttatctgtactttgcagttaacagtgatattttgaaggcacatttttctgtgattcatttttttttggccatagtgctaaccttgaagagattcgtggctgggtttttggtttctgagaaggtcgtagtttttcctcttttcctttttttttttcttttttcttttcttttctttttttttaaagcgggggaggggaagaggggctgagaaaggaaatcatgttcactggtagaagtagagtggagcatcagttaccagggtcctgagagctggaggagaaaggattctatcttcaagttgggaggccctcctctcaccttgctcaaaaattgcaagcgattcaatcctgatcaagacaccaaagctacaggattctggaaccgtggagacaccgagaaaccatgagtgtaaggttaccccagagtatagacaggttaagtagcctgtcttctctgggagattctgcaccagagcgcaagtccccttcccaccatcgccagccttcggatgcctctgagacaacaggtctcgttcaacgctgtgtcattatccaaaaggaccagcatggcttcggcttcacagtcagtggggatcgcattgttctggtgcagtctgtgcggcctggaggtgcagccatgaaggccggtgtgaaagagggcgaccggatcatcaaagtcaacggcaccatggtgaccaatagctcacacctggaagtggtaaagctgatcaaatctggcgcctatgtcgcactcaccctcctgggctcttcaccttcatccatgggcatctctgggctccagcaggacccatccccagcaggagctccccgaatcacgtcagtgatcccctcaccaccacctcctccacctctaccacctccacaacgcatcacaggacccaaacctctgcaggatcccgaagttcaaaaacatgccacccagatcctcaggaatatgctgaggcaggaagaaaaagaattacagcgtatctgtgaggtctatagccggaaccccgccagcctactggaagagcagatcgaaggtgcccggcggcgagtcactcagttacagctgaagatccagcaggagactggtggctcagtggacatacttccactatatggtgacaccagccagagaccatcagaaggccggctctctctggattcccaggagggggacagtggcttggactctgggacagaacgctttccttccctcagtgagtcattgatgaatcggaactcggtactgtcagaccctgggctagacagtcctcgaacctcccctgtgatcatggccagggtggcccagcaccacaggcggcagggctcggatgcagcagtcccctcaaccggtgaccagggtgtagatcaaagcccaaagcctttaattattggcccagaggaagactatgacccgggttatttcaacaacgagagcgacatcatattccaggatctggagaaactgaagtctcggccagctcacctgggggtttttctacgttacatcttctctcaggcggaccccagtccactgcttttttacctgtgtgcagaagtttatcagcaggcaagccccaaggattcccgaagcttggggaaagacatctggaatattttcctggagaaaaatgcgcctctgagagtgaagatccctgagatgctacaggctgaaattgactcgcgcctgcggaacagcgaagatgcccgtggtgttctctgtgaagctcaagaggcagccatgcctgagatccaagagcagatccacgactacagaacgaagcgcacactggggctgggcagcctgtatggtgaaaatgacctgctggacctggatggggaccctctccgagagcgccaagtggctgagaagcagctggctgcccttggagatattttgtccaagtatgaggaagacaggagcgcccccatggacttcgccctcaatacctacatgagccatgctgggatccgtcttcgagaggcacgaccttccaacacagctgaaaaggcccagtctgctcctgacaaggacaagtggctaccgttcttccctaagaccaagaagagcagcaattccaagaaagaaaaggatgccttggaggacaagaagcgaaaccctatcctcaaatacattgggaagcccaaaagctcttctcaaagcacatttcatattcccttgtcccctgtggaagtcaaaccaggcaatgtgaggaacatcattcagcactttgagaacaaccagcagtatgatgccccagaacctgggacacaacgactctcgaccggaagctttcctgaggacctgctggagagtgacagttcacgctcagagattcgcctgggccgctctgaaagcctcaagggccgggaagagatgaaacggtctcgaaaggcagagaacgtgccccgctctcgcagtgatgttgacatggatgctgctgcggaggctactcgcctgcaccagtcagcctcgtcctctacctccagcctctccaccaggtctcttgagaacccaacccctccattcactcccaaaatgggccgcaggagcattgagtcccccagtttggggttctgcacagataccctccttccccacctcctagaggatgatctgggccagctgtctgacctggagccagagccagatgcccaaaattggcagcatacagtgggcaaggatgtggtggctgggctaacccagcgggagattgaccggcaagaggtcatcaatgagctgtttgtgactgaagcttcccacctgcgcacactccgggtcctggacctgatcttctaccagcgaatgaagaaggagaacctgatgccccgggaggagctggcccggctcttcccgaacctgcctgaactcatagagattcacaattcctggtgtgaagccatgaagaagctccgggaggaaggccccatcatcaaagagatcagtgacctcatgctggcccggtttgatggccctgcccgagaggaactccagcaagtggctgcacagttctgttcctatcagtcaatagccctagagctaatcaagaccaagcaacgcaaggagagtcgattccagctcttcatgcaggaggctgagagccaccctcagtgtcggcggctgcagctgagagacctcatcatctctgagatgcagcggctcaccaagtacccgctgctgctggagagcatcatcaagcacacagagggtggcacctctgagcatgagaagctgtgccgggcccgggaccagtgccgggagattctcaagtatgtgaatgaagcggtaaaacaaacagagaaccgccaccgtttagagggctaccagaaacgcctggatgccaccgccctggagagggccagcaaccccctggcagcagagttcaagagcctggatcttacaaccagaaaaatgatccatgagggacccctgacctggaggatcagcaaggataagaccttggacctccacgtgctgctgctggaggacctcctagtgctgctacagaaacaggatgagaagctattgctgaagtgccacagcaagactgctgtgggctcctcagacagcaagcagaccttcagccccgtgctcaagctcaatgctgtgctcatccgctctgtggccacagataaacgggccttcttcatcatctgcacctccaagctgggcccaccccagatctatgagctggttgcattgacgtcatcagacaagaacacatggatggagctcttagaagaggccgtgcggaatgccaccaggcaccccggagctgccccaatgcccgtccatcctccacccccaggtccccgggagccagcccagcagggccccacacccagcagggtagaactggatgactcagacgtgttccatggtgaacctgaacctgaggagctgcctggaggcactgggtcccagcagagggtccaagggaagcaccaggtcctgctagaggaccctgagcaggagggcagtgcagaggaagaggaactgggtgtcctgccttgcccttccacatccctggatggagagaacaggggcatcaggacaaggaaccccatccacttggccttcccaggccctctgttcatggaagggctcgctgactccgctctggaagatgtggagaacctgcgacatctgatcctgtggagcctgctgccaggtcacaccatggaaactcaggctgcccaggagcccgaggacgacctgacacccacaccttctgtcatcagcgtcacctctcacccctgggacccaggctccccagggcaagcaccccctgggggtgaaggggacaacacccagcttgcagggctggagggggaacggccagagcaggaagacatgggtctctgttctctggaacacctacccccaaggaccagaaattctgggatatgggagtctccagaactggacaggaatctggctgaagatgcttcaagcacagaggcagcaggaggttacaaagttgtgagaaaagctgaggtggcaggcagcaaggttgtccctgcactaccagagagtggccagtcagagcctgggccacctgaagtggaaggcggaacaaaggctacgggtaataactttctccttggagctaaagacaggccaagactggagtgtggaacctgtgagggcagagtcggacccctgcccatggtcacacacacacccacaagctccctcagctgcctggaatggggaggaggaagatctggctctaaagacggggagatctggttctaaaggctggctgtccatccagccttaagaagccacctgtccaggctcctgttcagaatggcagggataaatgcctgtgtgcaattgtgggaggggcagggaagcctggcctgggggtggggacctagtgtccttcacctgatatgcaagcagccacttccccacctcagccgccgctccagtgtcactgtggaaatcggctgaaagagcctcccagattccgcggtggttctctgtgcttcctgcctgtcaggaaccctccacgtccttcctccagctctctctgacaccccttggttgggtcaagggacctccagaggatcgtggcatggatggaagaggggcagggcagggctgtagttcatccagagctggagtcaggcagggcaagagggctgctgcctgctcctttcagaagagcctgaaaccagctcacaatctgtttactcaaggagggggagccactccaatttccccaaatgaaacactgcagctctgccacttctcccttgagttcatcgctcagcatctcccccagcttggggccagactgagcaagtgtcatctagaaggtctcgggagcagggcttttagggggctggcagacagtgagcaaggcccacgttctctgagtttgtctggagaggactgcctggcctgctctgtcaggtggctggggaatcccacaggaacgggaggatagcttcgacttctctgtttgcctcctgatctcattctcttactgtggggacagggaactgcttttatgtcagcatgccatcaggacccccggactcaagcaccgaccactcagaggcacccatgagcccccctcagcctgacagcctccctgcagggcagacagagcctcagcctcagctgcagggaggcaacgatgatccaagacgccccagccgctctcctccaagcctggccctcagggacgtgggcatgatcttccataccattgagcagctcactctcaagctcaacaggctcaaggatatggagctggcccacagagagctgctcaagtcccttgggggagagtcatctggtggcaccacgcctgtgggcagtttccacacagaagcagctagatggacagatggctccctctcacctcccgctaaggagcccctagcttctgactccaggaacagccatgaactggggccctgccctgaggatggctctgacgcccccctggaagacagcacagcagacgcagccgcgtcaccaggaccataaccgtacaaaccaccaaatcctctgcgtccccactcctccttcagggactggcctgagaccggggcacagggtaggggggatcccaacactcctccctgtggaggaggcagttagggaaactaggatccagccaaggcccggggggagacccgcatgttgcttggtctgctcaagtcggagtcaggtttcagtgtcttttccctcccttagcccaaccctccaaggcctcatgtctcctaagcatgctgactgcatccgaaaggcccccactcaccatggtctgccctcaccccacatatgtgtgtacacgcgcacgcctgtatgtgcgctgccctcagacatgcaagtgaaaggaggaggcttctgtgtaaatgcactttcttcctcccctctttctccataagaccccaggcagaggtgggtgcctcccctcccctctttgtcactttggtttcctataaatatgtatgtatcgtatgtgcatctttgctattgtaaataactttgaccttttttgttcctgttcctgaagtgctggaggcagttatggaaggagctgcttagggaagaggggtttcacttgtatctccttagttaacaacccagttccaggatcgagcctaaagcgggagccaggcctgagtgttcctgtccctgtgagtgggaaggtcttctggctccccatcccacctggctccagagcctgccctccacagcttgctgccaagctactccctccctccctggacttctcatcttcacaagatggggatcatgggggtttcttaccccacctatgtccccctcttccccaccctgtccctgtagaaaaccagtgaagcaggtacggagctgaggactgggccccaggaggtggggacaggggtctgaatgccgagtccctgaattcacccaggaccatccaaggggccaccgcagcattggccccatcaccacgtcctcacccaactctccctgatgaatagaatatacacactgtgctaggtgtatatatacatatatatatatataaatatatatataatatataaaatatagatatggaaatgactgttctgctgttaagataatgtatactcttttattttcttcctttcatggttaagattttttttttaagaaaagttaaatatccttcagtggtggtgtgtgtgtttcttggaatcgctgtgataaaaggtacggtgtttgttccctgtaagactggttaggattggatagtgggaacc

SEQ ID NO: 347283 - DNA, 4235 bp, Homo sapiens
ctcggtacccagagaggacaaacgcagagaggttctcgcgttgaccaaggaagtcatactcctgcttgctgatcctctctgcgtttgaaacgcagagaggacaagaagcgaaaccctatcctcaaatacattgggaagcccaaaagctcttctcaaagcacatttcatattcccttgtcccctgtggaagtcaaaccaggcaatgtgaggaacatcattcagcactttgagaacaaccagcagtatgatgccccagaacctgggacacaacgactctcgaccggaagctttcctgaggacctgctggagagtgacagttcacgctcagagattcgcctgggccgctctgaaagcctcaagggccgggaagagatgaaacggtctcgaaaggcagagaacgtgccccgctctcgcagtgatgttgacatggatgctgctgcggaggctactcgcctgcaccagtcagcctcgtcctctacctccagcctctccaccaggtctcttgagaacccaacccctccattcactcccaaaatgggccgcaggagcattgagtcccccagtttggggttctgcacagataccctccttccccacctcctagaggatgatctgggccagctgtctgacctggagccagagccagatgcccaaaattggcagcatacagtgggcaaggatgtggtggctgggctaacccagcgggagattgaccggcaagaggtcatcaatgagctgtttgtgactgaagcttcccacctgcgcacactccgggtcctggacctgatcttctaccagcgaatgaagaaggagaacctgatgccccgggaggagctggcccggctcttcccgaacctgcctgaactcatagagattcacaattcctggtgtgaagccatgaagaagctccgggaggaaggccccatcatcaaagagatcagtgacctcatgctggcccggtttgatggccctgcccgagaggaactccagcaagtggctgcacagttctgttcctatcagtcaatagccctagagctaatcaagaccaagcaacgcaaggagagtcgattccagctcttcatgcaggaggctgagagccaccctcagtgtcggcggctgcagctgagagacctcatcatctctgagatgcagcggctcaccaagtacccgctgctgctggagagcatcatcaagcacacagagggtggcacctctgagcatgagaagctgtgccgggcccgggaccagtgccgggagattctcaagtatgtgaatgaagcggtaaaacaaacagagaaccgccaccgtttagagggctaccagaaacgcctggatgccaccgccctggagagggccagcaaccccctggcagcagagttcaagagcctggatcttacaaccagaaaaatgatccatgagggacccctgacctggaggatcagcaaggataagaccttggacctccacgtgctgctgctggaggacctcctagtgctgctacagaaacaggatgagaagctattgctgaagtgccacagcaagactgctgtgggctcctcagacagcaagcagaccttcagccccgtgctcaagctcaatgctgtgctcatccgctctgtggccacagataaacgggccttcttcatcatctgcacctccaagctgggcccaccccagatctatgagctggttgcattgacgtcatcagacaagaacacatggatggagctcttagaagaggccgtgcggaatgccaccaggcaccccggagctgccccaatgcccgtccatcctccacccccaggtccccgggagccagcccagcagggccccacacccagcagggtagaactggatgactcagacgtgttccatggtgaacctgaacctgaggagctgcctggaggcactgggtcccagcagagggtccaagggaagcaccaggtcctgctagaggaccctgagcaggagggcagtgcagaggaagaggaactgggtgtcctgccttgcccttccacatccctggatggagagaacaggggcatcaggacaaggaaccccatccacttggccttcccaggccctctgttcatggaagggctcgctgactccgctctggaagatgtggagaacctgcgacatctgatcctgtggagcctgctgccaggtcacaccatggaaactcaggctgcccaggagcccgaggacgacctgacacccacaccttctgtcatcagcgtcacctctcacccctgggacccaggctccccagggcaagcaccccctgggggtgaaggggacaacacccagcttgcagggctggagggggaacggccagagcaggaagacatgggtctctgttctctggaacacctacccccaaggaccagaaattctgggatatgggagtctccagaactggacaggaatctggctgaagatgcttcaagcacagaggcagcaggaggttacaaagttgtgagaaaagggaactgcttttatgtcagcatgccatcaggacccccggactcaagcaccgaccactcagaggcacccatgagcccccctcagcctgacagcctccctgcagggcagacagagcctcagcctcagctgcagggaggcaacgatgatccaagacgccccagccgctctcctccaagcctggccctcagggacgtgggcatgatcttccataccattgagcagctcactctcaagctcaacaggctcaaggatatggagctggcccacagagagctgctcaagtcccttgggggagagtcatctggtggcaccacgcctgtgggcagtttccacacagaagcagctagatggacagatggctccctctcacctcccgctaaggagcccctagcttctgactccaggaacagccatgaactggggccctgccctgaggatggctctgacgcccccctggaagacagcacagcagacgcagccgcgtcaccaggaccataaccgtacaaaccaccaaatcctctgcgtccccactcctccttcagggactggcctgagaccggggcacagggtaggggggatcccaacactcctccctgtggaggaggcagttagggaaactaggatccagccaaggcccggggggagacccgcatgttgcttggtctgctcaagtcggagtcaggtttcagtgtcttttccctcccttagcccaaccctccaaggcctcatgtctcctaagcatgctgactgcatccgaaaggcccccactcaccatggtctgccctcaccccacatatgtgtgtacacgcgcacgcctgtatgtgcgctgccctcagacatgcaagtgaaaggaggaggcttctgtgtaaatgcactttcttcctcccctctttctccataagaccccaggcagaggtgggtgcctcccctcccctctttgtcactttggtttcctataaatatgtatgtatcgtatgtgcatctttgctattgtaaataactttgaccttttttgttcctgttcctgaagtgctggaggcagttatggaaggagctgcttagggaagaggggtttcacttgtatctccttagttaacaacccagttccaggatcgagcctaaagcgggagccaggcctgagtgttcctgtccctgtgagtgggaaggtcttctggctccccatcccacctggctccagagcctgccctccacagcttgctgccaagctactccctccctccctggacttctcatcttcacaagatggggatcatgggggtttcttaccccacctatgtccccctcttccccaccctgtccctgtagaaaaccagtgaagcaggtacggagctgaggactgggccccaggaggtggggacaggggtctgaatgccgagtccctgaattcacccaggaccatccaaggggccaccgcagcattggccccatcaccacgtcctcacccaactctccctgatgaatagaatatacacactgtgctaggtgtatatatacatatatatatatataaatatatatataatatataaaatatagatatggaaatgactgttctgctgttaagataatgtatactcttttattttcttcctttcatggttaagattttttttttaagaaaagttaaatatccttcagtggtggtgtgtgtgtttcttggaatcgctgtgataaaaggtacggtgtttgttccctgtaagactggttaggattggatagtgggaacc

SEQ ID NO: 347284 - DNA, 3044 bp, Homo sapiens
tgttggcaggcacctgtaattccagttactcgggaggctgaggcaggagaatcacttgaacccgggaggcgcaggttgcagtgagccaagatggcaccactacattctagcctgggtgacagagcaagaatccgtttcaaaaaaaaaaaaagttttataactcctaagcaccatacacctatcagccatcactgttattagagcaggagaggaatgggggtggctgtggaagatgacattaggggtcctggaatttcctctgtcccttatgtaagtgggttccaagtggtcctgaagatccacatctgtctcgtgctgcactctccatctgcgttgagggtcagggctttgagtcccactctgtcaccctggcccaggctgcagtcacacctgccatccctagtacagacccttctaccttcctttcctcacacagataaacgggccttcttcatcatctgcacctccaagctgggcccaccccagatctatgagctggttgcattgacgtcatcagacaagaacacatggatggagctcttagaagaggccgtgcggaatgccaccaggcaccccggagctgccccaatgcccgtccatcctccacccccaggtccccgggagccagcccagcagggccccacacccagcagggtagaactggatgactcagacgtgttccatggtgaacctgaacctgaggagctgcctggaggcactgggtcccagcagagggtccaagggaagcaccaggtcctgctagaggaccctgagcaggagggcagtgcagaggaagaggaactgggtgtcctgccttgcccttccacatccctggatggagagaacaggggcatcaggacaaggaaccccatccacttggccttcccaggccctctgttcatggaagggctcgctgactccgctctggaagatgtggagaacctgcgacatctgatcctgtggagcctgctgccaggtcacaccatggaaactcaggctgcccaggagcccgaggacgacctgacacccacaccttctgtcatcagcgtcacctctcacccctgggacccaggctccccagggcaagcaccccctgggggtgaaggggacaacacccagcttgcagggctggagggggaacggccagagcaggaagacatgggtctctgttctctggaacacctacccccaaggaccagaaattctgggatatgggagtctccagaactggacaggaatctggctgaagatgcttcaagcacagaggcagcaggaggttacaaagttgtgagaaaagggaactgcttttatgtcagcatgccatcaggacccccggactcaagcaccgaccactcagaggcacccatgagcccccctcagcctgacagcctccctgcagggcagacagagcctcagcctcagctgcagggaggcaacgatgatccaagacgccccagccgctctcctccaagcctggccctcagggacgtgggcatgatcttccataccattgagcagctcactctcaagctcaacaggctcaaggatatggagctggcccacagagagctgctcaagtcccttgggggagagtcatctggtggcaccacgcctgtgggcagtttccacacagaagcagctagatggacagatggctccctctcacctcccgctaaggagcccctagcttctgactccaggaacagccatgaactggggccctgccctgaggatggctctgacgcccccctggaagacagcacagcagacgcagccgcgtcaccaggaccataaccgtacaaaccaccaaatcctctgcgtccccactcctccttcagggactggcctgagaccggggcacagggtaggggggatcccaacactcctccctgtggaggaggcagttagggaaactaggatccagccaaggcccggggggagacccgcatgttgcttggtctgctcaagtcggagtcaggtttcagtgtcttttccctcccttagcccaaccctccaaggcctcatgtctcctaagcatgctgactgcatccgaaaggcccccactcaccatggtctgccctcaccccacatatgtgtgtacacgcgcacgcctgtatgtgcgctgccctcagacatgcaagtgaaaggaggaggcttctgtgtaaatgcactttcttcctcccctctttctccataagaccccaggcagaggtgggtgcctcccctcccctctttgtcactttggtttcctataaatatgtatgtatcgtatgtgcatctttgctattgtaaataactttgaccttttttgttcctgttcctgaagtgctggaggcagttatggaaggagctgcttagggaagaggggtttcacttgtatctccttagttaacaacccagttccaggatcgagcctaaagcgggagccaggcctgagtgttcctgtccctgtgagtgggaaggtcttctggctccccatcccacctggctccagagcctgccctccacagcttgctgccaagctactccctccctccctggacttctcatcttcacaagatggggatcatgggggtttcttaccccacctatgtccccctcttccccaccctgtccctgtagaaaaccagtgaagcaggtacggagctgaggactgggccccaggaggtggggacaggggtctgaatgccgagtccctgaattcacccaggaccatccaaggggccaccgcagcattggccccatcaccacgtcctcacccaactctccctgatgaatagaatatacacactgtgctaggtgtatatatacatatatatatatataaatatatatataatatataaaatatagatatggaaatgactgttctgctgttaagataatgtatactcttttattttcttcctttcatggttaagattttttttttaagaaaagttaaatatccttcagtggtggtgtgtgtgtttcttggaatcgctgtgataaaaggtacggtgtttgttccctgtaagactggttaggattggatagtgggaacc

SEQ ID NO: 347285 - DNA, 2850 bp, Homo sapiens
tgccctctctccttcctgttctctctcccttccctttccttgtgttttggtctctcctcttcctggtggtggtggtgtcggtgcagctgaggtggcaggcagcaaggttgtccctgcactaccagagagtggccagtcagagcctgggccacctgaagtggaaggcggaacaaaggctacgggtaataactttctccttggagctaaagacaggccaagactggagtgtggaacctgtgagggcagagtcggacccctgcccatggtcacacacacacccacaagctccctcagctgcctggaatggggaggaggaagatctggctctaaagacggggagatctggttctaaaggctggctgtccatccagccttaagaagccacctgtccaggctcctgttcagaatggcagggataaatgcctgtgtgcaattgtgggaggggcagggaagcctggcctgggggtggggacctagtgtccttcacctgatatgcaagcagccacttccccacctcagccgccgctccagtgtcactgtggaaatcggctgaaagagcctcccagattccgcggtggttctctgtgcttcctgcctgtcaggaaccctccacgtccttcctccagctctctctgacaccccttggttgggtcaagggacctccagaggatcgtggcatggatggaagaggggcagggcagggctgtagttcatccagagctggagtcaggcagggcaagagggctgctgcctgctcctttcagaagagcctgaaaccagctcacaatctgtttactcaaggagggggagccactccaatttccccaaatgaaacactgcagctctgccacttctcccttgagttcatcgctcagcatctcccccagcttggggccagactgagcaagtgtcatctagaaggtctcgggagcagggcttttagggggctggcagacagtgagcaaggcccacgttctctgagtttgtctggagaggactgcctggcctgctctgtcaggtggctggggaatcccacaggaacgggaggatagcttcgacttctctgtttgcctcctgatctcattctcttactgtggggacagggaactgcttttatgtcagcatgccatcaggacccccggactcaagcaccgaccactcagaggcacccatgagcccccctcagcctgacagcctccctgcagggcagacagagcctcagcctcagctgcagggaggcaacgatgatccaagacgccccagccgctctcctccaagcctggccctcagggacgtgggcatgatcttccataccattgagcagctcactctcaagctcaacaggctcaaggatatggagctggcccacagagagctgctcaagtcccttgggggagagtcatctggtggcaccacgcctgtgggcagtttccacacagaagcagctagatggacagatggctccctctcacctcccgctaaggagcccctagcttctgactccaggaacagccatgaactggggccctgccctgaggatggctctgacgcccccctggaagacagcacagcagacgcagccgcgtcaccaggaccataaccgtacaaaccaccaaatcctctgcgtccccactcctccttcagggactggcctgagaccggggcacagggtaggggggatcccaacactcctccctgtggaggaggcagttagggaaactaggatccagccaaggcccggggggagacccgcatgttgcttggtctgctcaagtcggagtcaggtttcagtgtcttttccctcccttagcccaaccctccaaggcctcatgtctcctaagcatgctgactgcatccgaaaggcccccactcaccatggtctgccctcaccccacatatgtgtgtacacgcgcacgcctgtatgtgcgctgccctcagacatgcaagtgaaaggaggaggcttctgtgtaaatgcactttcttcctcccctctttctccataagaccccaggcagaggtgggtgcctcccctcccctctttgtcactttggtttcctataaatatgtatgtatcgtatgtgcatctttgctattgtaaataactttgaccttttttgttcctgttcctgaagtgctggaggcagttatggaaggagctgcttagggaagaggggtttcacttgtatctccttagttaacaacccagttccaggatcgagcctaaagcgggagccaggcctgagtgttcctgtccctgtgagtgggaaggtcttctggctccccatcccacctggctccagagcctgccctccacagcttgctgccaagctactccctccctccctggacttctcatcttcacaagatggggatcatgggggtttcttaccccacctatgtccccctcttccccaccctgtccctgtagaaaaccagtgaagcaggtacggagctgaggactgggccccaggaggtggggacaggggtctgaatgccgagtccctgaattcacccaggaccatccaaggggccaccgcagcattggccccatcaccacgtcctcacccaactctccctgatgaatagaatatacacactgtgctaggtgtatatatacatatatatatatataaatatatatataatatataaaatatagatatggaaatgactgttctgctgttaagataatgtatactcttttattttcttcctttcatggttaagattttttttttaagaaaagttaaatatccttcagtggtggtgtgtgtgtttcttggaatcgctgtgataaaaggtacggtgtttgttccctgtaagactggttaggattggatagtgggaacc

SEQ ID NO: 347286 - DNA, 5842 bp, Homo sapiens
aattggctcatttaagaatttcaaaacatttaatgtaaaagcttttttttttttaaggaagtccataaattttggttcccagggttgcactggacttggaaggagtgctgttgtgtacatactattgtatggttttatttattattttactgtacaaatcagccgaaagaatttttccaagtgccatttcggatttattaatccttttttttttcctttcctcaaagatatttgctgttgtcatattaagcattggagactagaaaattactttccccctttgagctagagggtctcttgccaacagaaggacagctgagaaagctggatttaaaggatggttttatctgtactttgcagttaacagtgatattttgaaggcacatttttctgtgattcatttttttttggccatagtgctaaccttgaagagattcgtggctgggtttttggtttctgagaaggtcgtagtttttcctcttttcctttttttttttcttttttcttttcttttctttttttttaaagcgggggaggggaagaggggctgagaaaggaaatcatgttcactggtagaagtagagtggagcatcagttaccagggtcctgagagctggaggagaaaggattctatcttcaagttgggaggccctcctctcaccttgctcaaaaattgcaagcgattcaatcctgatcaagacaccaaagctacaggattctggaaccgtggagacaccgagaaaccatgagtgtaaggttaccccagagtatagacaggttaagtagcctgtcttctctgggagattctgcaccagagcgcaagtccccttcccaccatcgccagccttcggatgcctctgagacaacaggtctcgttcaacgctgtgtcattatccaaaaggaccagcatggcttcggcttcacagtcagtggggatcgcattgttctggtgcagtctgtgcggcctggaggtgcagccatgaaggccggtgtgaaagagggcgaccggatcatcaaagtcaacggcaccatggtgaccaatagctcacacctggaagtggtaaagctgatcaaatctggcgcctatgtcgcactcaccctcctgggctcttcaccttcatccatgggcatctctgggctccagcaggacccatccccagcaggagctccccgaatcacgtcagtgatcccctcaccaccacctcctccacctctaccacctccacaacgcatcacaggacccaaacctctgcaggatcccgaagttcaaaaacatgccacccagatcctcaggaatatgctgaggcaggaagaaaaagaattacagcgtatctgtgaggtctatagccggaaccccgccagcctactggaagagcagatcgaaggtgcccggcggcgagtcactcagttacagctgaagatccagcaggagactggtggctcagtggacatacttccactatatggtgacaccagccagagaccatcagaaggccggctctctctggattcccaggagggggacagtggcttggactctgggacagaacgctttccttccctcagtgagtcattgatgaatcggaactcggtactgtcagaccctgggctagacagtcctcgaacctcccctgtgatcatggccagggtggcccagcaccacaggcggcagggctcggatgcagcagtcccctcaaccggtgaccagggtgtagatcaaagcccaaagcctttaattattggcccagaggaagactatgacccgggttatttcaacaacgagagcgacatcatattccaggatctggagaaactgaagtctcggccagctcacctgggggtttttctacgttacatcttctctcaggcggaccccagtccactgcttttttacctgtgtgcagaagtttatcagcaggcaagccccaaggattcccgaagcttggggaaagacatctggaatattttcctggagaaaaatgcgcctctgagagtgaagatccctgagatgctacaggctgaaattgactcgcgcctgcggaacagcgaagatgcccgtggtgttctctgtgaagctcaagaggcagccatgcctgagatccaagagcagatccacgactacagaacgaagcgcacactggggctgggcagcctgtatggtgaaaatgacctgctggacctggatggggaccctctccgagagcgccaagtggctgagaagcagctggctgcccttggagatattttgtccaagtatgaggaagacaggagcgcccccatggacttcgccctcaatacctacatgagccatgctgggatccgtcttcgagaggcacgaccttccaacacagctgaaaaggcccagtctgctcctgacaaggacaagtggctaccgttcttccctaagaccaagaagagcagcaattccaagaaagaaaaggatgccttggaggacaagaagcgaaaccctatcctcaaatacattgggaagcccaaaagctcttctcaaagcacatttcatattcccttgtcccctgtggaagtcaaaccaggcaatgtgaggaacatcattcagcactttgagaacaaccagcagtatgatgccccagaacctgggacacaacgactctcgaccggaagctttcctgaggacctgctggagagtgacagttcacgctcagagattcgcctgggccgctctgaaagcctcaagggccgggaagagatgaaacggtctcgaaaggcagagaacgtgccccgctctcgcagtgatgttgacatggatgctgctgcggaggctactcgcctgcaccagtcagcctcgtcctctacctccagcctctccaccaggtctcttgagaacccaacccctccattcactcccaaaatgggccgcaggagcattgagtcccccagtttggggttctgcacagataccctccttccccacctcctagaggatgatctgggccagctgtctgacctggagccagagccagatgcccaaaattggcagcatacagtgggcaaggatgtggtggctgggctaacccagcgggagattgaccggcaagaggtcatcaatgagctgtttgtgactgaagcttcccacctgcgcacactccgggtcctggacctgatcttctaccagcgaatgaagaaggagaacctgatgccccgggaggagctggcccggctcttcccgaacctgcctgaactcatagagattcacaattcctggtgtgaagccatgaagaagctccgggaggaaggccccatcatcaaagagatcagtgacctcatgctggcccggtttgatggccctgcccgagaggaactccagcaagtggctgcacagttctgttcctatcagtcaatagccctagagctaatcaagaccaagcaacgcaaggagagtcgattccagctcttcatgcaggaggctgagagccaccctcagtgtcggcggctgcagctgagagacctcatcatctctgagatgcagcggctcaccaagtacccgctgctgctggagagcatcatcaagcacacagagggtggcacctctgagcatgagaagctgtgccgggcccgggaccagtgccgggagattctcaagtatgtgaatgaagcggtaaaacaaacagagaaccgccaccgtttagagggctaccagaaacgcctggatgccaccgccctggagagggccagcaaccccctggcagcagagttcaagagcctggatcttacaaccagaaaaatgatccatgagggacccctgacctggaggatcagcaaggataagaccttggacctccacgtgctgctgctggaggacctcctagtgctgctacagaaacaggatgagaagctattgctgaagtgccacagcaagactgctgtgggctcctcagacagcaagcagaccttcagccccgtgctcaagctcaatgctgtgctcatccgctctgtggccacagataaacgggccttcttcatcatctgcacctccaagctgggcccaccccagatctatgagctggttgcattgacgtcatcagacaagaacacatggatggagctcttagaagaggccgtgcggaatgccaccaggcaccccggagctgccccaatgcccgtccatcctccacccccaggtccccgggagccagcccagcagggccccacacccagcagggtagaactggatgactcagacgtgttccatggtgaacctgaacctgaggagctgcctggaggcactgggtcccagcagagggtccaagggaagcaccaggtcctgctagaggaccctgagcaggagggcagtgcagaggaagaggaactgggtgtcctgccttgcccttccacatccctggatggagagaacaggggcatcaggacaaggaaccccatccacttggccttcccaggccctctgttcatggaagggctcgctgactccgctctggaagatgtggagaacctgcgacatctgatcctgtggagcctgctgccaggtcacaccatggaaactcaggctgcccaggagcccgaggacgacctgacacccacaccttctgtcatcagcgtcacctctcacccctgggacccaggctccccagggcaagcaccccctgggggtgaaggggacaacacccagcttgcagggctggagggggaacggccagagcaggaagacatgggtctctgttctctggaacacctacccccaaggaccagaaattctgggatatgggagtctccagaactggacaggaatctggctgaagatgcttcaagcacagaggcagcaggaggttacaaagttgtgagaaaagggaactgcttttatgtcagcatgccatcaggacccccggactcaagcaccgaccactcagaggcacccatgagcccccctcagcctgacagcctccctgcagggcagacagagcctcagcctcagctgcagggaggcaacgatgatccaagacgccccagccgctctcctccaagcctggccctcagggacgtgggcatgatcttccataccattgagcagctcactctcaagctcaacaggctcaaggatatggagctggcccacagagagctgctcaagtcccttgggggagagtcatctggtggcaccacgcctgtgggcagtttccacacagaagcagctagatggacagatggctccctctcacctcccgctaaggagcccctagcttctgactccaggaacagccatgaactggggccctgccctgaggatggctctgacgcccccctggaagacagcacacttgctgccaagctactccctccctccctggacttctcatcttcacaagatggggatcatgggggtttcttaccccacctatgtccccctcttccccaccctgtccctgtagaaaaccagtgaagcaggtacggagctgaggactgggccccaggaggtggggacaggggtctgaatgccgagtccctgaattcacccaggaccatccaaggggccaccgcagcattggccccatcaccacgtcctcacccaactctccctgatgaatagaatatacacactgtgctaggtgtatatatacatatatatatatataaatatatatataatatataaaatatagatatggaaatgactgttctgctgttaagataatgtatactcttttattttcttcctttcatggttaagattttttttttaagaaaagttaaatatccttcagtggtggtgtgtgtgtttcttggaatcgctgtgataaaaggtacggtgtttgttccctgtaagactggttaggattggatagtgggaacc

SEQ ID NO: 347287 - DNA, 6013 bp, Homo sapiens
aattggctcatttaagaatttcaaaacatttaatgtaaaagcttttttttttttaaggaagtccataaattttggttcccagggttgcactggacttggaaggagtgctgttgtgtacatactattgtatggttttatttattattttactgtacaaatcagccgaaagaatttttccaagtgccatttcggatttattaatccttttttttttcctttcctcaaagatatttgctgttgtcatattaagcattggagactagaaaattactttccccctttgagctagagggtctcttgccaacagaaggacagctgagaaagctggatttaaaggatggttttatctgtactttgcagttaacagtgatattttgaaggcacatttttctgtgattcatttttttttggccatagtgctaaccttgaagagattcgtggctgggtttttggtttctgagaaggtcgtagtttttcctcttttcctttttttttttcttttttcttttcttttctttttttttaaagcgggggaggggaagaggggctgagaaaggaaatcatgttcactggtagaagtagagtggagcatcagttaccagggtcctgagagctggaggagaaaggattctatcttcaagttgggaggccctcctctcaccttgctcaaaaattgcaagcgattcaatcctgatcaagacaccaaagctacaggattctggaaccgtggagacaccgagaaaccatgagtgtaaggttaccccagagtatagacaggttaagtagcctgtcttctctgggagattctgcaccagagcgcaagtccccttcccaccatcgccagccttcggatgcctctgagacaacaggtctcgttcaacgctgtgtcattatccaaaaggaccagcatggcttcggcttcacagtcagtggggatcgcattgttctggtgcagtctgtgcggcctggaggtgcagccatgaaggccggtgtgaaagagggcgaccggatcatcaaagtcaacggcaccatggtgaccaatagctcacacctggaagtggtaaagctgatcaaatctggcgcctatgtcgcactcaccctcctgggctcttcaccttcatccatgggcatctctgggctccagcaggacccatccccagcaggagctccccgaatcacgtcagtgatcccctcaccaccacctcctccacctctaccacctccacaacgcatcacaggacccaaacctctgcaggatcccgaagttcaaaaacatgccacccagatcctcaggaatatgctgaggcaggaagaaaaagaattacagcgtatctgtgaggtctatagccggaaccccgccagcctactggaagagcagatcgaaggtgcccggcggcgagtcactcagttacagctgaagatccagcaggagactggtggctcagtggacatacttccactatatggtgacaccagccagagaccatcagaaggccggctctctctggattcccaggagggggacagtggcttggactctgggacagaacgctttccttccctcagtgagtcattgatgaatcggaactcggtactgtcagaccctgggctagacagtcctcgaacctcccctgtgatcatggccagggtggcccagcaccacaggcggcagggctcggatgcagcagtcccctcaaccggtgaccagggtgtagatcaaagcccaaagcctttaattattggcccagaggaagactatgacccgggttatttcaacaacgagagcgacatcatattccaggatctggagaaactgaagtctcggccagctcacctgggggtttttctacgttacatcttctctcaggcggaccccagtccactgcttttttacctgtgtgcagaagtttatcagcaggcaagccccaaggattcccgaagcttggggaaagacatctggaatattttcctggagaaaaatgcgcctctgagagtgaagatccctgagatgctacaggctgaaattgactcgcgcctgcggaacagcgaagatgcccgtggtgttctctgtgaagctcaagaggcagccatgcctgagatccaagagcagatccacgactacagaacgaagcgcacactggggctgggcagcctgtatggtgaaaatgacctgctggacctggatggggaccctctccgagagcgccaagtggctgagaagcagctggctgcccttggagatattttgtccaagtatgaggaagacaggagcgcccccatggacttcgccctcaatacctacatgagccatgctgggatccgtcttcgagaggcacgaccttccaacacagctgaaaaggcccagtctgctcctgacaaggacaagtggctaccgttcttccctaagaccaagaagagcagcaattccaagaaagaaaaggatgccttggaggacaagaagcgaaaccctatcctcaaatacattgggaagcccaaaagctcttctcaaagcacatttcatattcccttgtcccctgtggaagtcaaaccaggcaatgtgaggaacatcattcagcactttgagaacaaccagcagtatgatgccccagaacctgggacacaacgactctcgaccggaagctttcctgaggacctgctggagagtgacagttcacgctcagagattcgcctgggccgctctgaaagcctcaagggccgggaagagatgaaacggtctcgaaaggcagagaacgtgccccgctctcgcagtgatgttgacatggatgctgctgcggaggctactcgcctgcaccagtcagcctcgtcctctacctccagcctctccaccaggtctcttgagaacccaacccctccattcactcccaaaatgggccgcaggagcattgagtcccccagtttggggttctgcacagataccctccttccccacctcctagaggatgatctgggccagctgtctgacctggagccagagccagatgcccaaaattggcagcatacagtgggcaaggatgtggtggctgggctaacccagcgggagattgaccggcaagaggtcatcaatgagctgtttgtgactgaagcttcccacctgcgcacactccgggtcctggacctgatcttctaccagcgaatgaagaaggagaacctgatgccccgggaggagctggcccggctcttcccgaacctgcctgaactcatagagattcacaattcctggtgtgaagccatgaagaagctccgggaggaaggccccatcatcaaagagatcagtgacctcatgctggcccggtttgatggccctgcccgagaggaactccagcaagtggctgcacagttctgttcctatcagtcaatagccctagagctaatcaagaccaagcaacgcaaggagagtcgattccagctcttcatgcaggaggctgagagccaccctcagtgtcggcggctgcagctgagagacctcatcatctctgagatgcagcggctcaccaagtacccgctgctgctggagagcatcatcaagcacacagagggtggcacctctgagcatgagaagctgtgccgggcccgggaccagtgccgggagattctcaagtatgtgaatgaagcggtaaaacaaacagagaaccgccaccgtttagagggctaccagaaacgcctggatgccaccgccctggagagggccagcaaccccctggcagcagagttcaagagcctggatcttacaaccagaaaaatgatccatgagggacccctgacctggaggatcagcaaggataagaccttggacctccacgtgctgctgctggaggacctcctagtgctgctacagaaacaggatgagaagctattgctgaagtgccacagcaagactgctgtgggctcctcagacagcaagcagaccttcagccccgtgctcaagctcaatgctgtgctcatccgctctgtggccacagataaacgggccttcttcatcatctgcacctccaagctgggcccaccccagatctatgagctggttgcattgacgtcatcagacaagaacacatggatggagctcttagaagaggccgtgcggaatgccaccaggcaccccggagctgccccaatgcccgtccatcctccacccccaggtccccgggagccagcccagcagggccccacacccagcagggtagaactggatgactcagacgtgttccatggtgaacctgaacctgaggagctgcctggaggcactgggtcccagcagagggtccaagggaagcaccaggtcctgctagaggaccctgagcaggagggcagtgcagaggaagaggaactgggtgtcctgccttgcccttccacatccctggatggagagaacaggggcatcaggacaaggaaccccatccacttggccttcccaggccctctgttcatggaagggctcgctgactccgctctggaagatgtggagaacctgcgacatctgatcctgtggagcctgctgccaggtcacaccatggaaactcaggctgcccaggagcccgaggacgacctgacacccacaccttctgtcatcagcgtcacctctcacccctgggacccaggctccccagggcaagcaccccctgggggtgaaggggacaacacccagcttgcagggctggagggggaacggccagagcaggaagacatgggtctctgttctctggaacacctacccccaaggaccagaaattctgggatatgggagtctccagaactggacaggaatctggctgaagatgcttcaagcacagaggcagcaggaggttacaaagttgtgagaaaagggaactgcttttatgtcagcatgccatcaggacccccggactcaagcaccgaccactcagaggcacccatgagcccccctcagcctgacagcctccctgcagggcagacagagcctcagcctcagctgcagggaggcaacgatgatccaagacgccccagccgctctcctccaagcctggccctcagggacgtgggcatgatcttccataccattgagcagctcactctcaagctcaacaggctcaaggatatggagctggcccacagagagctgctcaagtcccttgggggagagtcatctggtggcaccacgcctgtgggcagtttccacacagaagcagctagatggacagatggctccctctcacctcccgctaaggagcccctagcttctgactccaggaacagccatgaactggggccctgccctgaggatggctctgacgcccccctggaagacagcacagcagacgcagccgcgtcaccaggaccataaccgtacaaaccaccaaatcctctgcgtccccactcctccttcagggactggcctgagaccggggcacagggtaggggggatcccaacactcctccctgtggaggaggcagttagggaaactaggatccagccaaggcccggggggagacccgcatgttgcttggtctgctcaagtcggagtcaggtttcagtgtcttttccctcccttagcccaaccctccaaggcctcatgtctcctaagcatgctgactgcatccgaaaggcccccactcaccatggtctgccctcaccccacatatgtgtgtacacgcgcacgcctgtatgtgcgctgccctcagacatgcaagtgaaaggaggaggcttctgtgtaaatgcactttcttcctcccctcttttctccctgatgaatagaatatacacactgtgctaggtgtatatatacatatatatatatataaatatatatataatatataaaatatagatatggaaatgactgttctgctgttaagataatgtatactcttttattttcttcctttcatggttaagattttttttttaagaaaagttaaatatccttcagtggtggtgtgtgtgtttcttggaatcgctgtgataaaaggtacggtgtttgttccctgtaagactggttaggattggatagtgggaacc

SEQ ID NO: 347288 - DNA, 4493 bp, Homo sapiens
aattggctcatttaagaatttcaaaacatttaatgtaaaagcttttttttttttaaggaagtccataaattttggttcccagggttgcactggacttggaaggagtgctgttgtgtacatactattgtatggttttatttattattttactgtacaaatcagccgaaagaatttttccaagtgccatttcggatttattaatccttttttttttcctttcctcaaagatatttgctgttgtcatattaagcattggagactagaaaattactttccccctttgagctagagggtctcttgccaacagaaggacagctgagaaagctggatttaaaggatggttttatctgtactttgcagttaacagtgatattttgaaggcacatttttctgtgattcatttttttttggccatagtgctaaccttgaagagattcgtggctgggtttttggtttctgagaaggtcgtagtttttcctcttttcctttttttttttcttttttcttttcttttctttttttttaaagcgggggaggggaagaggggctgagaaaggaaatcatgttcactggtagaagtagagtggagcatcagttaccagggtcctgagagctggaggagaaaggattctatcttcaagttgggaggccctcctctcaccttgctcaaaaattgcaagcgattcaatcctgatcaagacaccaaagctacaggattctggaaccgtggagacaccgagaaaccatgagtgtaaggttaccccagagtatagacaggttaagtagcctgtcttctctgggagattctgcaccagagcgcaagtccccttcccaccatcgccagccttcggatgcctctgagacaacaggtctcgttcaacgctgtgtcattatccaaaaggaccagcatggcttcggcttcacagtcagtggggatcgcattgttctggtgcagtctgtgcggcctggaggtgcagccatgaaggccggtgtgaaagagggcgaccggatcatcaaagtcaacggcaccatggtgaccaatagctcacacctggaagtggtaaagctgatcaaatctggcgcctatgtcgcactcaccctcctgggctcttcaccttcatccatgggcatctctgggctccagcaggacccatccccagcaggagctccccgaatcacgtcagtgatcccctcaccaccacctcctccacctctaccacctccacaacgcatcacaggacccaaacctctgcaggatcccgaagttcaaaaacatgccacccagatcctcaggaatatgctgaggcaggaagaaaaagaattacagcgtatctgtgaggtctatagccggaaccccgccagcctactggaagagcagatcgaaggtgcccggcggcgagtcactcagttacagctgaagatccagcaggagactggtggctcagtggacatacttccactatatggtgacaccagccagagaccatcagaaggccggctctctctggattcccaggagggggacagtggcttggactctgggacagaacgctttccttccctcagtgagtcattgatgaatcggaactcggtactgtcagaccctgggctagacagtcctcgaacctcccctgtgatcatggccagggtggcccagcaccacaggcggcagggctcggatgcagcagtcccctcaaccggtgaccagggtgtagatcaaagcccaaagcctttaattattggcccagaggaagactatgacccgggttatttcaacaacgagagcgacatcatattccaggatctggagaaactgaagtctcggccagctcacctgggggtttttctacgttacatcttctctcaggcggaccccagtccactgcttttttacctgtgtgcagaagtttatcagcaggcaagccccaaggattcccgaagcttggggaaagacatctggaatattttcctggagaaaaatgcgcctctgagagtgaagatccctgagatgctacaggctgaaattgactcgcgcctgcggaacagcgaagatgcccgtggtgttctctgtgaagctcaagaggcagccatgcctgagatccaagagcagatccacgactacagaacgaagcgcacactggggctgggcagcctgtatggtgaaaatgacctgctggacctggatggggaccctctccgagagcgccaagtggctgagaagcagctggctgcccttggagatattttgtccaagtatgaggaagacaggagcgcccccatggacttcgccctcaatacctacatgagccatgctgggatccgtcttcgagaggcacgaccttccaacacagctgaaaaggcccagtctgctcctgacaaggacaagtggctaccgttcttccctaagaccaagaagagcagcaattccaagaaagaaaaggatgccttggaggacaagaagcgaaaccctatcctcaaatacattgggaagcccaaaagctcttctcaaagcacatttcatattcccttgtcccctgtggaagtcaaaccaggcaatgtgaggaacatcattcagcactttgagaacaaccagcagtatgatgccccagaacctgggacacaacgactctcgaccggaagctttcctgaggacctgctggagagtgacagttcacgctcagagattcgcctgggccgctctgaaagcctcaagggccgggaagagatgaaacggtctcgaaaggcagagaacgtgccccgctctcgcagtgatgttgacatggatgctgctgcggaggctactcgcctgcaccagtcagcctcgtcctctacctccagcctctccaccaggtctcttgagaacccaacccctccattcactcccaaaatgggccgcaggagcattgagtcccccagtttggggttctgcacagataccctccttccccacctcctagaggatgatctgggccagctgtctgacctggagccagagccagatgcccaaaattggcagcatacagtgggcaaggatgtggtggctgggctaacccagcgggagattgaccggcaagaggtcatcaatgagctgtttgtgactgaagcttcccacctgcgcacactccgggtcctggacctgatcttctaccagcgaatgaagaaggagaacctgatgccccgggaggagctggcccggctcttcccgaacctgcctgaactcatagagattcacaattcctggtgtgaagccatgaagaagctccgggaggaaggccccatcatcaaagagatcagtgacctcatgctggcccggtttgatggccctgcccgagaggaactccagcaagtggctgcacagttctgttcctatcagtcaatagccctagagctaatcaagaccaagcaacgcaaggagagtcgattccagctcttcatgcaggaggctgagagccaccctcagtgtcggcggctgcagctgagagacctcatcatctctgagatgcagcggctcaccaagtacccgctgctgctggagagcatcatcaagcacacagagggtggcacctctgagcatgagaagctgtgccgggcccgggaccagtgccgggagattctcaagtatgtgaatgaagcggtaaaacaaacagagaaccgccaccgtttagagggctaccagaaacgcctggatgccaccgccctggagagggccagcaaccccctggcagcagagttcaagagcctggatcttacaaccagaaaaatgatccatgagggacccctgacctggaggatcagcaaggataagaccttggacctccacgtgctgctgctggaggacctcctagtgctgctacagaaacaggatgagaagctattgctgaagtgccacagcaagactgctgtgggctcctcagacagcaagcagaccttcagccccgtgctcaagctcaatgctgtgctcatccgctctgtggccacagataaacgggccttcttcatcatctgcacctccaagctgggcccaccccagatctatgagctggttgcattgacgtcatcagacaagaacacatggatggagctcttagaagaggccgtgcggaatgccaccaggcaccccggagctgccccaatgcccgtccatcctccacccccaggtccccgggagccagcccagcagggccccacacccagcagggtagaactggatgactcagacgtgttccatggtgaacctgaacctgaggagctgcctggaggaggacagcagcaggaggaggacagcagcaggaggtcctcctcctgctgctaggggttggggaggcgggccctgtgtggttgtcagagacaaagagagatggcgatggcggcctggcaaggggtggaggttgggaggagagctgcccagcacgttggagatcaaagcccatgccggtaacaggtgtgtccacgggggccagagaagatgggttatgttcgggagaactgatcac

SEQ ID NO: 347289 - DNA, 2939 bp, Homo sapiens
aattggctcatttaagaatttcaaaacatttaatgtaaaagcttttttttttttaaggaagtccataaattttggttcccagggttgcactggacttggaaggagtgctgttgtgtacatactattgtatggttttatttattattttactgtacaaatcagccgaaagaatttttccaagtgccatttcggatttattaatccttttttttttcctttcctcaaagatatttgctgttgtcatattaagcattggagactagaaaattactttccccctttgagctagagggtctcttgccaacagaaggacagctgagaaagctggatttaaaggatggttttatctgtactttgcagttaacagtgatattttgaaggcacatttttctgtgattcatttttttttggccatagtgctaaccttgaagagattcgtggctgggtttttggtttctgagaaggtcgtagtttttcctcttttcctttttttttttcttttttcttttcttttctttttttttaaagcgggggaggggaagaggggctgagaaaggaaatcatgttcactggtagaagtagagtggagcatcagttaccagggtcctgagagctggaggagaaaggattctatcttcaagttgggaggccctcctctcaccttgctcaaaaattgcaagcgattcaatcctgatcaagacaccaaagctacaggattctggaaccgtggagacaccgagaaaccatgagtgtaaggttaccccagagtatagacaggttaagtagcctgtcttctctgggagattctgcaccagagcgcaagtccccttcccaccatcgccagccttcggatgcctctgagacaacaggtctcgttcaacgctgtgtcattatccaaaaggaccagcatggcttcggcttcacagtcagtggggatcgcattgttctggtgcagtctgtgcggcctggaggtgcagccatgaaggccggtgtgaaagagggcgaccggatcatcaaagtcaacggcaccatggtgaccaatagctcacacctggaagtggtaaagctgatcaaatctggcgcctatgtcgcactcaccctcctgggctcttcaccttcatccatgggcatctctgggctccagcaggacccatccccagcaggagctccccgaatcacgtcagtgatcccctcaccaccacctcctccacctctaccacctccacaacgcatcacaggacccaaacctctgcaggatcccgaagttcaaaaacatgccacccagatcctcaggaatatgctgaggcaggaagaaaaagaattacagcgtatctgtgaggtctatagccggaaccccgccagcctactggaagagcagatcgaaggtgcccggcggcgagtcactcagttacagctgaagatccagcaggagactggtggctcagtggacatacttccactatatggtgacaccagccagagaccatcagaaggccggctctctctggattcccaggagggggacagtggcttggactctgggacagaacgctttccttccctcagtgagtcattgatgaatcggaactcggtactgtcagaccctgggctagacagtcctcgaacctcccctgtgatcatggccagggtggcccagcaccacaggcggcagggctcggatgcagcagtcccctcaaccggtgaccagggtgtagatcaaagcccaaagcctttaattattggcccagaggaagactatgacccgggttatttcaacaacgagagcgacatcatattccaggatctggagaaactgaagtctcggccagctcacctgggggtttttctacgttacatcttctctcaggcggaccccagtccactgcttttttacctgtgtgcagaagtttatcagcaggcaagccccaaggattcccgaagcttggggaaagacatctggaatattttcctggagaaaaatgcgcctctgagagtgaagatccctgagatgctacaggctgaaattgactcgcgcctgcggaacagcgaagatgcccgtggtgttctctgtgaagctcaagaggcagccatgcctgagatccaagagcagatccacgactacagaacgaagcgcacactggggctgggcagcctgtatggtgaaaatgacctgctggacctggatggggaccctctccgagagcgccaagtggctgagaagcagctggctgcccttggagatattttgtccaagtatgaggaagacaggagcgcccccatggacttcgccctcaatacctacatgagccatgctgggatccgtcttcgagaggcacgaccttccaacacagctgaaaaggcccagtctgctcctgacaaggacaagtggctaccgttcttccctaagaccaagaagagcagcaattccaagaaagaaaaggatgccttggaggacaagaagcgaaaccctatcctcaaatacattgggaagcccaaaagctcttctcaaagcacatttcatattcccttgtcccctgtggaagtcaaaccaggcaatgtgaggaacatcattcagcactttgagaacaaccagcagtatgatgccccagaacctgggacacaacgactctcgaccggaagctttcctgaggacctgctggagagtgacagttcacgctcagagattcgcctgggccgctctgaaagcctcaagggccgggaagagatgaaacggtctcgaaaggcagagaacgtgccccgctctcgcagtgatgttgacatggatgctgctgcggaggctactcgcctgcaccagtcagcctcgtcctctacctccagcctctccaccaggtctctttgaggaacccaagcccatggcctccatgactttttcaaaaaggaaaaaaaagagcacagagagaaaaaaagaaaaaagaggg

SEQ ID NO: 347290 - DNA, 2901 bp, Homo sapiens
aattggctcatttaagaatttcaaaacatttaatgtaaaagcttttttttttttaaggaagtccataaattttggttcccagggttgcactggacttggaaggagtgctgttgtgtacatactattgtatggttttatttattattttactgtacaaatcagccgaaagaatttttccaagtgccatttcggatttattaatccttttttttttcctttcctcaaagatatttgctgttgtcatattaagcattggagactagaaaattactttccccctttgagctagagggtctcttgccaacagaaggacagctgagaaagctggatttaaaggatggttttatctgtactttgcagttaacagtgatattttgaaggcacatttttctgtgattcatttttttttggccatagtgctaaccttgaagagattcgtggctgggtttttggtttctgagaaggtcgtagtttttcctcttttcctttttttttttcttttttcttttcttttctttttttttaaagcgggggaggggaagaggggctgagaaaggaaatcatgttcactggtagaagtagagtggagcatcagttaccagggtcctgagagctggaggagaaaggattctatcttcaagttgggaggccctcctctcaccttgctcaaaaattgcaagcgattcaatcctgatcaagacaccaaagctacaggattctggaaccgtggagacaccgagaaaccatgagtgtaaggttaccccagagtatagacaggttaagtagcctgtcttctctgggagattctgcaccagagcgcaagtccccttcccaccatcgccagccttcggatgcctctgagacaacaggtctcgttcaacgctgtgtcattatccaaaaggaccagcatggcttcggcttcacagtcagtggggatcgcattgttctggtgcagtctgtgcggcctggaggtgcagccatgaaggccggtgtgaaagagggcgaccggatcatcaaagtcaacggcaccatggtgaccaatagctcacacctggaagtggtaaagctgatcaaatctggcgcctatgtcgcactcaccctcctgggctcttcaccttcatccatgggcatctctgggctccagcaggacccatccccagcaggagctccccgaatcacgtcagtgatcccctcaccaccacctcctccacctctaccacctccacaacgcatcacaggacccaaacctctgcaggatcccgaagttcaaaaacatgccacccagatcctcaggaatatgctgaggcaggaagaaaaagaattacagcgtatctgtgaggtctatagccggaaccccgccagcctactggaagagcagatcgaaggtgcccggcggcgagtcactcagttacagctgaagatccagcaggagactggtggctcagtggacatacttccactatatggtgacaccagccagagaccatcagaaggccggctctctctggattcccaggagggggacagtggcttggactctgggacagaacgctttccttccctcagtgagtcattgatgaatcggaactcggtactgtcagaccctgggctagacagtcctcgaacctcccctgtgatcatggccagggtggcccagcaccacaggcggcagggctcggatgcagcagtcccctcaaccggtgaccagggtgtagatcaaagcccaaagcctttaattattggcccagaggaagactatgacccgggttatttcaacaacgagagcgacatcatattccaggatctggagaaactgaagtctcggccagctcacctgggggtttttctacgttacatcttctctcaggcggaccccagtccactgcttttttacctgtgtgcagaagtttatcagcaggcaagccccaaggattcccgaagcttggggaaagacatctggaatattttcctggagaaaaatgcgcctctgagagtgaagatccctgagatgctacaggctgaaattgactcgcgcctgcggaacagcgaagatgcccgtggtgttctctgtgaagctcaagaggcagccatgcctgagatccaagagcagatccacgactacagaacgaagcgcacactggggctgggcagcctgtatggtgaaaatgacctgctggacctggatggggaccctctccgagagcgccaagtggctgagaagcagctggctgcccttggagatattttgtccaagtatgaggaagacaggagcgcccccatggacttcgccctcaatacctacatgagccatgctgggatccgtcttcgagaggcacgaccttccaacacagctgaaaaggcccagtctgctcctgacaaggacaagtggctaccgttcttccctaagaccaagaagagcagcaattccaagaaagaaaaggatgccttggaggacaagaagcgaaaccctatcctcaaatacattgggaagcccaaaagctcttctcaaagcacatttcatattcccttgtcccctgtggaagtcaaaccaggcaatgtgaggaacatcattcagcactttgagaacaaccagcagtatgatgccccagaacctgggacacaacgactctcgaccggaagctttcctgaggacctgctggagagtgacaggtagcactggctggatgggactcgccagctgctcgaagagtgggtcatgggcagggctgatgctagggtttaattccagctacttgacccctctccactagcttctaaggctccctttacagaacttcctccccacccccagtatcttcaggagacacattgtgtgccagtgaacaggccagtggaagagcaagcagatccccgacttccagcccaagaactacacacttt

SEQ ID NO: 347291 - DNA, 430 bp, Homo sapiens
gtctttgcagtctgagtcatctgttctttcttccattccaggtccaagtatgaggaagacaggaggtaagcaagtctatgatgtggatttgcagctttcaaggtggaaggagtggggttgagctactatgctttccatttctgacaatcacaggggagtccctcatgttgtacaaccatgaaggaccgtggttcctgaaagtctagcactcaggtgtctgtatgaccataacataggggtgatgaggcccacgcccctgatgctcagggatcactgcctggggatgtgggtctgctcctcagtgggaagacaccaagctgccatcgcttctcacagtcccatacctggtggcagcttctctacccagatgagccctttgtctctcttctcacgtctttcccttaaactacctcaagtagtaacagtaatc

SEQ ID NO: 347292 - DNA, 168 bp, Homo sapiens
ttctgactccaggaacagccatgaactggggccctgccctgaggatggtgagtgaagccaggtccctctcggttcctaccattgggggagaagtctgccaactcgtgaggacacatcactaagcagtgagagatggtggttctgagagtggtttccccttgagtgaaa

SEQ ID NO: 347293 - DNA, 490 bp, Homo sapiens
ggacctccctgagtaggtaacctcccaccaatccctggtgagaaaaagatctgtggacagcctgaaaccagcactggagttcaccccgaaagtacaatggtttccagacccttcccatggcactgctgtcagagattcacttctctctgtcagaaaggttctggcagttgagctcaaccccaggcatttctatttgttctcttcctgccccagattcctggtgtgaagccatgaagaagctccgggaggaaggccccatcatcaaagagatcagtgacctcatgctggcccgggtatggctccaaacttctccctcttggcaaggaggagattgggggaggcagggtctcattacccaaggccagagaatttggcaaaggcaggggtctggtcccaggcaggggtttgatgcctggccccgtgtccattctgcctcttcagtttgatggccctgcccgagaggaactccagcaagtggctgcacagttct

SEQ ID NO: 347294 - DNA, 319 bp, Homo sapiens
tgcgttgagggtcagggctttgagtcccactctgtcaccctggcccaggctgcagtcacacctgccatccctagtacagacccttctaccttcctttcctcacacagataaacgggccttcttcatcatctgcacctccaagctgggcccaccccagatctatgagctggttgcattgacgtcatcagacaagaacacgtgagaattgattgaggggttacccgtaactgtggtccctttcggaccagggtggtgtttatgaggacagtgggtagcaaggccaggtttgggccccaaagcagtccctggacaaggggtt

SEQ ID NO: 347295 - DNA, 253 bp, Homo sapiens
atctccctggagtgtgcagacctgactgcttctgctccacacttctgttttttagcctctgagagtgaagatccctgagatgctacaggctgaaattggtaagttggctcattggtcggtaagtctcttcttggtagctttcttgtcctgagctctcaggaggctccagaggacagaagggacatagtccctgtccttgggcaaccgtcctgtaatagaggaaaagacccatgggatgattgctccagaacac

SEQ ID NO: 347296 - DNA, 119 bp, Homo sapiens
tatatataatatataaaatatagatatggaaatgactgttctgctgttaagataatgtatactcttttattttcttcctttcatggttaagattttttttttaagaaaagttaaatatc

SEQ ID NO: 347297 - DNA, 6588 bp, Homo sapiens
aattggctcatttaagaatttcaaaacatttaatgtaaaagcttttttttttttaaggaagtccataaattttggttcccagggttgcactggacttggaaggagtgctgttgtgtacatactattgtatggttttatttattattttactgtacaaatcagccgaaagaatttttccaagtgccatttcggatttattaatccttttttttttcctttcctcaaagatatttgctgttgtcatattaagcattggagactagaaaattactttccccctttgagctagagggtctcttgccaacagaaggacagctgagaaagctggatttaaaggatggttttatctgtactttgcagttaacagtgatattttgaaggcacatttttctgtgattcatttttttttggccatagtgctaaccttgaagagattcgtggctgggtttttggtttctgagaaggtcgtagtttttcctcttttcctttttttttttcttttttcttttcttttctttttttttaaagcgggggaggggaagaggggctgagaaaggaaatcatgttcactggtagaagtagagtggagcatcagttaccagggtcctgagagctggaggagaaaggattctatcttcaagttgggaggccctcctctcaccttgctcaaaaattgcaagcgattcaatcctgatcaagacaccaaagctacaggattctggaaccgtggagacaccgagaaaccatgagtgtaaggttaccccagagtatagacaggttaagtagcctgtcttctctgggagattctgcaccagagcgcaagtccccttcccaccatcgccagccttcggatgcctctgagacaacaggtctcgttcaacgctgtgtcattatccaaaaggaccagcatggcttcggcttcacagtcagtggggatcgcattgttctggtgcagtctgtgcggcctggaggtgcagccatgaaggccggtgtgaaagagggcgaccggatcatcaaagtcaacggcaccatggtgaccaatagctcacacctggaagtggtaaagctgatcaaatctggcgcctatgtcgcactcaccctcctgggctcttcaccttcatccatgggcatctctgggctccagcaggacccatccccagcaggagctccccgaatcacgtcagtgatcccctcaccaccacctcctccacctctaccacctccacaacgcatcacaggacccaaacctctgcaggatcccgaagttcaaaaacatgccacccagatcctcaggaatatgctgaggcaggaagaaaaagaattacagcgtatctgtgaggtctatagccggaaccccgccagcctactggaagagcagatcgaaggtgcccggcggcgagtcactcagttacagctgaagatccagcaggagactggtggctcagtggacatacttccactatatggtgacaccagccagagaccatcagaaggccggctctctctggattcccaggagggggacagtggcttggactctgggacagaacgctttccttccctcagtgagtcattgatgaatcggaactcggtactgtcagaccctgggctagacagtcctcgaacctcccctgtgatcatggccagggtggcccagcaccacaggcggcagggctcggatgcagcagtcccctcaaccggtgaccagggtgtagatcaaagcccaaagcctttaattattggcccagaggaagactatgacccgggttatttcaacaacgagagcgacatcatattccaggatctggagaaactgaagtctcggccagctcacctgggggtttttctacgttacatcttctctcaggcggaccccagtccactgcttttttacctgtgtgcagaagtttatcagcaggcaagccccaaggattcccgaagcttggggaaagacatctggaatattttcctggagaaaaatgcgcctctgagagtgaagatccctgagatgctacaggctgaaattgactcgcgcctgcggaacagcgaagatgcccgtggtgttctctgtgaagctcaagaggcagccatgcctgagatccaagagcagatccacgactacagaacgaagcgcacactggggctgggcagcctgtatggtgaaaatgacctgctggacctggatggggaccctctccgagagcgccaagtggctgagaagcagctggctgcccttggagatattttgtccaagtatgaggaagacaggagcgcccccatggacttcgccctcaatacctacatgagccatgctgggatccgtcttcgagaggcacgaccttccaacacagctgaaaaggcccagtctgctcctgacaaggacaagtggctaccgttcttccctaagaccaagaagagcagcaattccaagaaagaaaaggatgccttggaggacaagaagcgaaaccctatcctcaaatacattgggaagcccaaaagctcttctcaaagcacatttcatattcccttgtcccctgtggaagtcaaaccaggcaatgtgaggaacatcattcagcactttgagaacaaccagcagtatgatgccccagaacctgggacacaacgactctcgaccggaagctttcctgaggacctgctggagagtgacagttcacgctcagagattcgcctgggccgctctgaaagcctcaagggccgggaagagatgaaacggtctcgaaaggcagagaacgtgccccgctctcgcagtgatgttgacatggatgctgctgcggaggctactcgcctgcaccagtcagcctcgtcctctacctccagcctctccaccaggtctcttgagaacccaacccctccattcactcccaaaatgggccgcaggagcattgagtcccccagtttggggttctgcacagataccctccttccccacctcctagaggatgatctgggccagctgtctgacctggagccagagccagatgcccaaaattggcagcatacagtgggcaaggatgtggtggctgggctaacccagcgggagattgaccggcaagaggtcatcaatgagctgtttgtgactgaagcttcccacctgcgcacactccgggtcctggacctgatcttctaccagcgaatgaagaaggagaacctgatgccccgggaggagctggcccggctcttcccgaacctgcctgaactcatagagattcacaattcctggtgtgaagccatgaagaagctccgggaggaaggccccatcatcaaagagatcagtgacctcatgctggcccggtttgatggccctgcccgagaggaactccagcaagtggctgcacagttctgttcctatcagtcaatagccctagagctaatcaagaccaagcaacgcaaggagagtcgattccagctcttcatgcaggaggctgagagccaccctcagtgtcggcggctgcagctgagagacctcatcatctctgagatgcagcggctcaccaagtacccgctgctgctggagagcatcatcaagcacacagagggtggcacctctgagcatgagaagctgtgccgggcccgggaccagtgccgggagattctcaagtatgtgaatgaagcggtaaaacaaacagagaaccgccaccgtttagagggctaccagaaacgcctggatgccaccgccctggagagggccagcaaccccctggcagcagagttcaagagcctggatcttacaaccagaaaaatgatccatgagggacccctgacctggaggatcagcaaggataagaccttggacctccacgtgctgctgctggaggacctcctagtgctgctacagaaacaggatgagaagctattgctgaagtgccacagcaagactgctgtgggctcctcagacagcaagcagaccttcagccccgtgctcaagctcaatgctgtgctcatccgctctgtggccacagataaacgggccttcttcatcatctgcacctccaagctgggcccaccccagatctatgagctggttgcattgacgtcatcagacaagaacacatggatggagctcttagaagaggccgtgcggaatgccaccaggcaccccggagctgccccaatgcccgtccatcctccacccccaggtccccgggagccagcccagcagggccccacacccagcagggtagaactggatgactcagacgtgttccatggtgaacctgaacctgaggagctgcctggaggcactgggtcccagcagagggtccaagggaagcaccaggtcctgctagaggaccctgagcaggagggcagtgcagaggaagaggaactgggtgtcctgccttgcccttccacatccctggatggagagaacaggggcatcaggacaaggaaccccatccacttggccttcccaggccctctgttcatggaagggctcgctgactccgctctggaagatgtggagaacctgcgacatctgatcctgtggagcctgctgccaggtcacaccatggaaactcaggctgcccaggagcccgaggacgacctgacacccacaccttctgtcatcagcgtcacctctcacccctgggacccaggctccccagggcaagcaccccctgggggtgaaggggacaacacccagcttgcagggctggagggggaacggccagagcaggaagacatgggtctctgttctctggaacacctacccccaaggaccagaaattctgggatatgggagtctccagaactggacaggaatctggctgaagatgcttcaagcacagaggcagcaggaggttacaaagttgtgagaaaagggaactgcttttatgtcagcatgccatcaggacccccggactcaagcaccgaccactcagaggcacccatgagcccccctcagcctgacagcctccctgcagggcagacagagcctcagcctcagctgcagggaggcaacgatgatccaagacgccccagccgctctcctccaagcctggccctcagggacgtgggcatgatcttccataccattgagcagctcactctcaagctcaacaggctcaaggatatggagctggcccacagagagctgctcaagtcccttgggggagagtcatctggtggcaccacgcctgtgggcagtttccacacagaagcagctagatggacagatggctccctctcacctcccgctaaggagcccctagcttctgactccaggaacagccatgaactggggccctgccctgaggatggctctgacgcccccctggaagacagcacagcagacgcagccgcgtcaccaggaccataaccgtacaaaccaccaaatcctctgcgtccccactcctccttcagggactggcctgagaccggggcacagggtaggggggatcccaacactcctccctgtggaggaggcagttagggaaactaggatccagccaaggcccggggggagacccgcatgttgcttggtctgctcaagtcggagtcaggtttcagtgtcttttccctcccttagcccaaccctccaaggcctcatgtctcctaagcatgctgactgcatccgaaaggcccccactcaccatggtctgccctcaccccacatatgtgtgtacacgcgcacgcctgtatgtgcgctgccctcagacatgcaagtgaaaggaggaggcttctgtgtaaatgcactttcttcctcccctctttctccataagaccccaggcagaggtgggtgcctcccctcccctctttgtcactttggtttcctataaatatgtatgtatcgtatgtgcatctttgctattgtaaataactttgaccttttttgttcctgttcctgaagtgctggaggcagttatggaaggagctgcttagggaagaggggtttcacttgtatctccttagttaacaacccagttccaggatcgagcctaaagcgggagccaggcctgagtgttcctgtccctgtgagtgggaaggtcttctggctccccatcccacctggctccagagcctgccctccacagcttgctgccaagctactccctccctccctggacttctcatcttcacaagatggggatcatgggggtttcttaccccacctatgtccccctcttccccaccctgtccctgtagaaaaccagtgaagcaggtacggagctgaggactgggccccaggaggtggggacaggggtctgaatgccgagtccctgaattcacccaggaccatccaaggggccaccgcagcattggccccatcaccacgtcctcacccaactctccctgatgaatagaatatacacactgtgctaggtgtatatatacatatatatatatataaatatatatataatatataaaatatagatatggaaatgactgttctgctgttaagataatgtatactcttttattttcttcctttcatggttaagattttttttttaagaaaagttaaatatccttcagtggtggtgtgtgtgtttcttggaatcgctgtgataaaaggtacggtgtttgttccctgtaagactggttaggattggatagtgggaacc

SEQ ID NO: 347298 - DNA, 6634 bp, Homo sapiens
aattggctcatttaagaatttcaaaacatttaatgtaaaagcttttttttttttaaggaagtccataaattttggttcccagggttgcactggacttggaaggagtgctgttgtgtacatactattgtatggttttatttattattttactgtacaaatcagccgaaagaatttttccaagtgccatttcggatttattaatccttttttttttcctttcctcaaagatatttgctgttgtcatattaagcattggagactagaaaattactttccccctttgagctagagggtctcttgccaacagaaggacagctgagaaagctggatttaaaggatggttttatctgtactttgcagttaacagtgatattttgaaggcacatttttctgtgattcatttttttttggccatagtgctaaccttgaagagattcgtggctgggtttttggtttctgagaaggtcgtagtttttcctcttttcctttttttttttcttttttcttttcttttctttttttttaaagcgggggaggggaagaggggctgagaaaggaaatcatgttcactggtagaagtagagtggagcatcagttaccagggtcctgagagctggaggagaaaggattctatcttcaagttgggaggccctcctctcaccttgctcaaaaattgcaagcgattcaatcctgatcaagacaccaaagctacaggattctggaaccgtggagacaccgagaaaccatgagtgtaaggttaccccagagtatagacaggttaagtagcctgtcttctctgggagattctgcaccagagcgcaagtccccttcccaccatcgccagccttcggatgcctctgagacaacaggtctcgttcaacgctgtgtcattatccaaaaggaccagcatggcttcggcttcacagtcagtggggatcgcattgttctggtgcagtctgtgcggcctggaggtgcagccatgaaggccggtgtgaaagagggcgaccggatcatcaaagtcaacggcaccatggtgaccaatagctcacacctggaagtggtaaagctgatcaaatctggcgcctatgtcgcactcaccctcctgggctcttcaccttcatccatgggcatctctgggctccagcaggacccatccccagcaggagctccccgaatcacgtcagtgatcccctcaccaccacctcctccacctctaccacctccacaacgcatcacaggacccaaacctctgcaggatcccgaagttcaaaaacatgccacccagatcctcaggaatatgctgaggcaggaagaaaaagaattacagcgtatctgtgaggtctatagccggaaccccgccagcctactggaagagcagatcgaaggtgcccggcggcgagtcactcagttacagctgaagatccagcaggagactggtggctcagtggacatacttccactatatggtgacaccagccagagaccatcagaaggccggctctctctggattcccaggagggggacagtggcttggactctgggacagaacgctttccttccctcagtgagtcattgatgaatcggaactcggtactgtcagaccctgggctagacagtcctcgaacctcccctgtgatcatggccagggtggcccagcaccacaggcggcagggctcggatgcagcagtcccctcaaccggtgaccagggtgtagatcaaagcccaaagcctttaattattggcccagaggaagactatgacccgggttatttcaacaacgagagcgacatcatattccaggatctggagaaactgaagtctcggccagctcacctgggggtttttctacgttacatcttctctcaggcggaccccagtccactgcttttttacctgtgtgcagaagtttatcagcaggcaagccccaaggattcccgaagcttggggaaagacatctggaatattttcctggagaaaaatgcgcctctgagagtgaagatccctgagatgctacaggctgaaattgactcgcgcctgcggaacagcgaagatgcccgtggtgttctctgtgaagctcaagaggcagccatgcctgagatccaagagcagatccacgactacagaacgaagcgcacactggggctgggcagcctgtatggtgaaaatgacctgctggacctggatggggaccctctccgagagcgccaagtggctgagaagcagctggctgcccttggagatattttgtccaagtatgaggaagacaggagcgcccccatggacttcgccctcaatacctacatgagccatgctgggatccgtcttcgagaggcacgaccttccaacacagctgaaaaggcccagtctgctcctgacaaggacaagtggctaccgttcttccctaagaccaagaagagcagcaattccaagaaagaaaaggatgccttggaggacaagaagcgaaaccctatcctcaaatacattgggaagcccaaaagctcttctcaaagcacatttcatattcccttgtcccctgtggaagtcaaaccaggcaatgtgaggaacatcattcagcactttgagaacaaccagcagtatgatgccccagaacctgggacacaacgactctcgaccggaagctttcctgaggacctgctggagagtgacagttcacgctcagagattcgcctgggccgctctgaaagcctcaagggccgggaagagatgaaacggtctcgaaaggcagagaacgtgccccgctctcgcagtgatgttgacatggatgctgctgcggaggctactcgcctgcaccagtcagcctcgtcctctacctccagcctctccaccaggtctcttgagaacccaacccctccattcactcccaaaatgggccgcaggagcattgagtcccccagtttggggttctgcacagataccctccttccccacctcctagaggatgatctgggccagctgtctgacctggagccagagccagatgcccaaaattggcagcatacagtgggcaaggatgtggtggctgggctaacccagcgggagattgaccggcaagaggtcatcaatgagctgtttgtgactgaagcttcccacctgcgcacactccgggtcctggacctgatcttctaccagcgaatgaagaaggagaacctgatgccccgggaggagctggcccggctcttcccgaacctgcctgaactcatagagattcacaattcctggtgtgaagccatgaagaagctccgggaggaaggccccatcatcaaagagatcagtgacctcatgctggcccggtttgatggccctgcccgagaggaactccagcaagtggctgcacagttctgttcctatcagtcaatagccctagagctaatcaagaccaagcaacgcaaggagagtcgattccagctcttcatgcaggaggctgagagccaccctcagtgtcggcggctgcagctgagagacctcatcatctctgagatgcagcggctcaccaagtacccgctgctgctggagagcatcatcaagcacacagagggtggcacctctgagcatgagaagctgtgccgggcccgggaccagtgccgggagattctcaagtatgtgaatgaagcggtaaaacaaacagagaaccgccaccgtttagagggctaccagaaacgcctggatgccaccgccctggagagggccagcaaccccctggcagcagagttcaagagcctggatcttacaaccagaaaaatgatccatgagggacccctgacctggaggatcagcaaggataagaccttggacctccacgtgctgctgctggaggacctcctagtgctgctacagaaacaggatgagaagctattgctgaagtgccacagcaagactgctgtgggctcctcagacagcaagcagaccttcagccccgtgctcaagctcaatgctgtgctcatccgctctgtggccacagataaacgggccttcttcatcatctgcacctccaagctgggcccaccccagatctatgagctggttgcattgacgtcatcagacaagaacacatggatggagctcttagaagaggccgtgcggaatgccaccaggcaccccggagctgccccaatgcccgtccatcctccacccccaggtccccgggagccagcccagcagggccccacacccagcagggtagaactggatgactcagacgtgttccatggtgaacctgaacctgaggagctgcctggaggcactgggtcccagcagagggtccaagggaagcaccaggtcctgctagaggaccctgagcaggagggcagtgcagaggaagaggaactgggtgtcctgccttgcccttccacatccctggatggagagaacaggggcatcaggacaaggaaccccatccacttggccttcccaggccctctgttcatggaagggctcgctgactccgctctggaagatgtggagaacctgcgacatctgatcctgtggagcctgctgccaggtcacaccatggaaactcaggctgcccaggagcccgaggacgacctgacacccacaccttctgtcatcagcgtcacctctcacccctgggacccaggctccccagggcaagcaccccctgggggtgaaggggacaacacccagcttgcagggctggagggggaacggccagagcaggaagacatgggtctctgttctctggaacacctacccccaaggaccagaaattctgggatatgggagtctccagaactggacaggaatctggctgaagatgcttcaagcacagaggcagcaggaggttacaaagttgtgagaaaagtcagagcctgggccacctgaagtggaaggcggaacaaaggctacggggaactgcttttatgtcagcatgccatcaggacccccggactcaagcaccgaccactcagaggcacccatgagcccccctcagcctgacagcctccctgcagggcagacagagcctcagcctcagctgcagggaggcaacgatgatccaagacgccccagccgctctcctccaagcctggccctcagggacgtgggcatgatcttccataccattgagcagctcactctcaagctcaacaggctcaaggatatggagctggcccacagagagctgctcaagtcccttgggggagagtcatctggtggcaccacgcctgtgggcagtttccacacagaagcagctagatggacagatggctccctctcacctcccgctaaggagcccctagcttctgactccaggaacagccatgaactggggccctgccctgaggatggctctgacgcccccctggaagacagcacagcagacgcagccgcgtcaccaggaccataaccgtacaaaccaccaaatcctctgcgtccccactcctccttcagggactggcctgagaccggggcacagggtaggggggatcccaacactcctccctgtggaggaggcagttagggaaactaggatccagccaaggcccggggggagacccgcatgttgcttggtctgctcaagtcggagtcaggtttcagtgtcttttccctcccttagcccaaccctccaaggcctcatgtctcctaagcatgctgactgcatccgaaaggcccccactcaccatggtctgccctcaccccacatatgtgtgtacacgcgcacgcctgtatgtgcgctgccctcagacatgcaagtgaaaggaggaggcttctgtgtaaatgcactttcttcctcccctctttctccataagaccccaggcagaggtgggtgcctcccctcccctctttgtcactttggtttcctataaatatgtatgtatcgtatgtgcatctttgctattgtaaataactttgaccttttttgttcctgttcctgaagtgctggaggcagttatggaaggagctgcttagggaagaggggtttcacttgtatctccttagttaacaacccagttccaggatcgagcctaaagcgggagccaggcctgagtgttcctgtccctgtgagtgggaaggtcttctggctccccatcccacctggctccagagcctgccctccacagcttgctgccaagctactccctccctccctggacttctcatcttcacaagatggggatcatgggggtttcttaccccacctatgtccccctcttccccaccctgtccctgtagaaaaccagtgaagcaggtacggagctgaggactgggccccaggaggtggggacaggggtctgaatgccgagtccctgaattcacccaggaccatccaaggggccaccgcagcattggccccatcaccacgtcctcacccaactctccctgatgaatagaatatacacactgtgctaggtgtatatatacatatatatatatataaatatatatataatatataaaatatagatatggaaatgactgttctgctgttaagataatgtatactcttttattttcttcctttcatggttaagattttttttttaagaaaagttaaatatccttcagtggtggtgtgtgtgtttcttggaatcgctgtgataaaaggtacggtgtttgttccctgtaagactggttaggattggatagtgggaacc

SEQ ID NO: 347299 - DNA, 2806 bp, Homo sapiens
attaccgaattcgaagccccggtaccctgtgccacttcagcaaatagcttctcatccctgttttctgtagcagcaactaggatgagaagctattgctgaagtgccacagcaagactgctgtgggctcctcagacagcaagcagaccttcagccccgtgctcaagctcaatgctgtgctcatccgctctgtggccacagataaacgggccttcttcatcatctgcacctccaagctgggcccaccccagatctatgagctggttgcattgacgtcatcagacaagaacacatggatggagctcttagaagaggccgtgcggaatgccaccaggcaccccggagctgccccaatgcccgtccatcctccacccccaggtccccgggagccagcccagcagggccccacacccagcagggtagaactggatgactcagacgtgttccatggtgaacctgaacctgaggagctgcctggaggcactgggtcccagcagagggtccaagggaagcaccaggtcctgctagaggaccctgagcaggagggcagtgcagaggaagaggaactgggtgtcctgccttgcccttccacatccctggatggagagaacaggggcatcaggacaaggaaccccatccacttggccttcccaggccctctgttcatggaagggctcgctgactccgctctggaagatgtggagaacctgcgacatctgatcctgtggagcctgctgccaggtcacaccatggaaactcaggctgcccaggagcccgaggacgacctgacacccacaccttctgtcatcagcgtcacctctcacccctgggacccaggctccccagggcaagcaccccctgggggtgaaggggacaacacccagcttgcagggctggagggggaacggccagagcaggaagacatgggtctctgttctctggaacacctacccccaaggaccagaaattctgggatatgggagtctccagaactggacaggaatctggctgaagatgcttcaagcacagaggcagcaggaggttacaaagttgtgagaaaagggaactgcttttatgtcagcatgccatcaggacccccggactcaagcaccgaccactcagaggcacccatgagcccccctcagcctgacagcctccctgcagggcagacagagcctcagcctcagctgcagggaggcaacgatgatccaagacgccccagccgctctcctccaagcctggccctcagggacgtgggcatgatcttccataccattgagcagctcactctcaagctcaacaggctcaaggatatggagctggcccacagagagctgctcaagtcccttgggggagagtcatctggtggcaccacgcctgtgggcagtttccacacagaagcagctagatggacagatggctccctctcacctcccgctaaggagcccctagcttctgactccaggaacagccatgaactggggccctgccctgaggatggctctgacgcccccctggaagacagcacagcagacgcagccgcgtcaccaggaccataaccgtacaaaccaccaaatcctctgcgtccccactcctccttcagggactggcctgagaccggggcacagggtaggggggatcccaacactcctccctgtggaggaggcagttagggaaactaggatccagccaaggcccggggggagacccgcatgttgcttggtctgctcaagtcggagtcaggtttcagtgtcttttccctcccttagcccaaccctccaaggcctcatgtctcctaagcatgctgactgcatccgaaaggcccccactcaccatggtctgccctcaccccacatatgtgtgtacacgcgcacgcctgtatgtgcgctgccctcagacatgcaagtgaaaggaggaggcttctgtgtaaatgcactttcttcctcccctctttctccataagaccccaggcagaggtgggtgcctcccctcccctctttgtcactttggtttcctataaatatgtatgtatcgtatgtgcatctttgctattgtaaataactttgaccttttttgttcctgttcctgaagtgctggaggcagttatggaaggagctgcttagggaagaggggtttcacttgtatctccttagttaacaacccagttccaggatcgagcctaaagcgggagccaggcctgagtgttcctgtccctgtgagtgggaaggtcttctggctccccatcccacctggctccagagcctgccctccacagcttgctgccaagctactccctccctccctggacttctcatcttcacaagatggggatcatgggggtttcttaccccacctatgtccccctcttccccaccctgtccctgtagaaaaccagtgaagcaggtacggagctgaggactgggccccaggaggtggggacaggggtctgaatgccgagtccctgaattcacccaggaccatccaaggggccaccgcagcattggccccatcaccacgtcctcacccaactctccctgatgaatagaatatacacactgtgctaggtgtatatatacatatatatatatataaatatatatataatatataaaatatagatatggaaatgactgttctgctgttaagataatgtatactcttttattttcttcctttcatggttaagattttttttttaagaaaagttaaatatccttcagtggtggtgtgtgtgtttcttggaatcgctgtgataaaaggtacggtgtttgttccctgtaagactggttaggattggatagtgggaacc

SEQ ID NO: 347300 - DNA, 1211 bp, Homo sapiens
aaccaccaaatcctctgcgtccctgaaggaggtaggggggatcccaacactcctccctgtggaggaggcagttagggaaactaggatccagccaaggcccggggggagacccgcatgttgcttggtctgctcaagtcggagtcaggtttcagtgtcttttccctcccttagcccaaccctccaaggcctcatgtctcctaagcatgctgactgcatccgaaaggcccccactcaccatggtctgccctcaccccacatatgtgtgtacacgcgcacgcctgtatgtgcgctgccctcagacatgcaagtgaaaggaggaggcttctgtgtaaatgcactttcttcctcccctctttctccataagaccccaggcagaggtgggtgcctcccctcccctctttgtcactttggtttcctataaatatgtatgtatcgtatgtgcatctttgctattgtaaataactttgaccttttttgttcctgttcctgaagtgctggaggcagttatggaaggagctgcttagggaagaggggtttcacttgtatctccttagttaacaacccagttccaggatcgagcctaaagcgggagccaggcctgagtgttcctgtccctgtgagtgggaaggtcttctggctccccatcccacctggctccagagcctgccctccacagcttgctgccaagctactccctccctccctggacttctcatcttcacaagatggggatcatgggggtttcttaccccacctatgtccccctcttccccaccctgtccctgtagaaaaccagtgaagcaggtacggagctgaggactgggccccaggaggtggggacaggggtctgaatgccgagtccctgaattcacccaggaccatccaaggggccaccgcagcattggccccatcaccacgtcctcacccaactctccctgatgaatagaatatacacactgtgctaggtgtatatatacatatatatatatataaatatatatataatatataaaatatagatatggaaatgactgttctgctgttaagataatgtatactcttttattttcttcctttcatggttaagattttttttttaagaaaagttaaatatccttcagtggtggtgtgtgtgtttcttggaatcgctgtgataaaaggtacggtgtttgttccctgtaagactggttaggattggatagtgggaacc

SEQ ID NO: 347301 - DNA, 4919 bp, Homo sapiens
aattggctcatttaagaatttcaaaacatttaatgtaaaagcttttttttttttaaggaagtccataaattttggttcccagggttgcactggacttggaaggagtgctgttgtgtacatactattgtatggttttatttattattttactgtacaaatcagccgaaagaatttttccaagtgccatttcggatttattaatccttttttttttcctttcctcaaagatatttgctgttgtcatattaagcattggagactagaaaattactttccccctttgagctagagggtctcttgccaacagaaggacagctgagaaagctggatttaaaggatggttttatctgtactttgcagttaacagtgatattttgaaggcacatttttctgtgattcatttttttttggccatagtgctaaccttgaagagattcgtggctgggtttttggtttctgagaaggtcgtagtttttcctcttttcctttttttttttcttttttcttttcttttctttttttttaaagcgggggaggggaagaggggctgagaaaggaaatcatgttcactggtagaagtagagtggagcatcagttaccagggtcctgagagctggaggagaaaggattctatcttcaagttgggaggccctcctctcaccttgctcaaaaattgcaagcgattcaatcctgatcaagacaccaaagctacaggattctggaaccgtggagacaccgagaaaccatgagtgtaaggttaccccagagtatagacaggttaagtagcctgtcttctctgggagattctgcaccagagcgcaagtccccttcccaccatcgccagccttcggatgcctctgagacaacaggtctcgttcaacgctgtgtcattatccaaaaggaccagcatggcttcggcttcacagtcagtggggatcgcattgttctggtgcagtctgtgcggcctggaggtgcagccatgaaggccggtgtgaaagagggcgaccggatcatcaaagtcaacggcaccatggtgaccaatagctcacacctggaagtggtaaagctgatcaaatctggcgcctatgtcgcactcaccctcctgggctcttcaccttcatccatgggcatctctgggctccagcaggacccatccccagcaggagctccccgaatcacgtcagtgatcccctcaccaccacctcctccacctctaccacctccacaacgcatcacaggacccaaacctctgcaggatcccgaagttcaaaaacatgccacccagatcctcaggaatatgctgaggcaggaagaaaaagaattacagcgtatctgtgaggtctatagccggaaccccgccagcctactggaagagcagatcgaaggtgcccggcggcgagtcactcagttacagctgaagatccagcaggagactggtggctcagtggacatacttccactatatggtgacaccagccagagaccatcagaaggccggctctctctggattcccaggagggggacagtggcttggactctgggacagaacgctttccttccctcagtgagtcattgatgaatcggaactcggtactgtcagaccctgggctagacagtcctcgaacctcccctgtgatcatggccagggtggcccagcaccacaggcggcagggctcggatgcagcagtcccctcaaccggtgaccagggtgtagatcaaagcccaaagcctttaattattggcccagaggaagactatgacccgggttatttcaacaacgagagcgacatcatattccaggatctggagaaactgaagtctcggccagctcacctgggggtttttctacgttacatcttctctcaggcggaccccagtccactgcttttttacctgtgtgcagaagtttatcagcaggcaagccccaaggattcccgaagcttggggaaagacatctggaatattttcctggagaaaaatgcgcctctgagagtgaagatccctgagatgctacaggctgaaattgactcgcgcctgcggaacagcgaagatgcccgtggtgttctctgtgaagctcaagaggcagccatgcctgagatccaagagcagatccacgactacagaacgaagcgcacactggggctgggcagcctgtatggtgaaaatgacctgctggacctggatggggaccctctccgagagcgccaagtggctgagaagcagctggctgcccttggagatattttgtccaagtatgaggaagacaggagcgcccccatggacttcgccctcaatacctacatgagccatgctgggatccgtcttcgagaggcacgaccttccaacacagctgaaaaggcccagtctgctcctgacaaggacaagtggctaccgttcttccctaagaccaagaagagcagcaattccaagaaagaaaaggatgccttggaggacaagaagcgaaaccctatcctcaaatacattgggaagcccaaaagctcttctcaaagcacatttcatattcccttgtcccctgtggaagtcaaaccaggcaatgtgaggaacatcattcagcactttgagaacaaccagcagtatgatgccccagaacctgggacacaacgactctcgaccggaagctttcctgaggacctgctggagagtgacagttcacgctcagagattcgcctgggccgctctgaaagcctcaagggccgggaagagatgaaacggtctcgaaaggcagagaacgtgccccgctctcgcagtgatgttgacatggatgctgctgcggaggctactcgcctgcaccagtcagcctcgtcctctacctccagcctctccaccaggtctcttgagaacccaacccctccattcactcccaaaatgggccgcaggagcattgagtcccccagtttggggttctgcacagataccctccttccccacctcctagaggatgatctgggccagctgtctgacctggagccagagccagatgcccaaaattggcagcatacagtgggcaaggatgtggtggctgggctaacccagcgggagattgaccggcaagaggtcatcaatgagctgtttgtgactgaagcttcccacctgcgcacactccgggtcctggacctgatcttctaccagcgaatgaagaaggagaacctgatgccccgggaggagctggcccggctcttcccgaacctgcctgaactcatagagattcacaattcctggtgtgaagccatgaagaagctccgggaggaaggccccatcatcaaagagatcagtgacctcatgctggcccggtttgatggccctgcccgagaggaactccagcaagtggctgcacagttctgttcctatcagtcaatagccctagagctaatcaagaccaagcaacgcaaggagagtcgattccagctcttcatgcaggaggctgagagccaccctcagtgtcggcggctgcagctgagagacctcatcatctctgagatgcagcggctcaccaagtacccgctgctgctggagagcatcatcaagcacacagagggtggcacctctgagcatgagaagctgtgccgggcccgggaccagtgccgggagattctcaagtatgtgaatgaagcggtaaaacaaacagagaaccgccaccgtttagagggctaccagaaacgcctggatgccaccgccctggagagggccagcaaccccctggcagcagagttcaagagcctggatcttacaaccagaaaaatgatccatgagggacccctgacctggaggatcagcaaggataagaccttggacctccacgtgctgctgctggaggacctcctagtgctgctacagaaacaggatgagaagctattgctgaagtgccacagcaagactgctgtgggctcctcagacagcaagcagaccttcagccccgtgctcaagctcaatgctgtgctcatccgctctgtggccacagataaacgggccttcttcatcatctgcacctccaagctgggcccaccccagatctatgagctggttgcattgacgtcatcagacaagaacacatggatggagctcttagaagaggccgtgcggaatgccaccaggcaccccggagctgccccaatgcccgtccatcctccacccccaggtccccgggagccagcccagcagggccccacacccagcagggtagaactggatgactcagacgtgttccatggtgaacctgaacctgaggagctgcctggaggcactgggtcccagcagagggtccaagggaagcaccaggtcctgctagaggaccctgagcaggagggcagtgcagaggaagaggaactgggtgtcctgccttgcccttccacatccctggatggagagaacaggggcatcaggacaaggaaccccatccacttggccttcccaggccctctgttcatggaagggctcgctgactccgctctggaagatgtggagaacctgcgacatctgatcctgtggagcctgctgccaggtcacaccatggaaactcaggctgcccaggagcccgaggacgacctgacacccacaccttctgtcatcagcgtcacctctcacccctgggacccaggctccccagggcaagcaccccctgggggtgaaggggacaacacccagcttgcagggctggagggggaacggccagagcaggaagacatgggtctctgttctctggaacacctacccccaaggaccagaaattctgggatatgggagtctccagaactggacaggaatctggctgaagatgcttcaagcacagaggcagcaggaggttacaaagttgtgagaaaagaggtaaaataaatgggagtgtccagtggggagacaagcacccttgctaggtgagataagtcttccgaacagctgcttc

SEQ ID NO: 347302 - DNA, 3700 bp, Homo sapiens
aattggctcatttaagaatttcaaaacatttaatgtaaaagcttttttttttttaaggaagtccataaattttggttcccagggttgcactggacttggaaggagtgctgttgtgtacatactattgtatggttttatttattattttactgtacaaatcagccgaaagaatttttccaagtgccatttcggatttattaatccttttttttttcctttcctcaaagatatttgctgttgtcatattaagcattggagactagaaaattactttccccctttgagctagagggtctcttgccaacagaaggacagctgagaaagctggatttaaaggatggttttatctgtactttgcagttaacagtgatattttgaaggcacatttttctgtgattcatttttttttggccatagtgctaaccttgaagagattcgtggctgggtttttggtttctgagaaggtcgtagtttttcctcttttcctttttttttttcttttttcttttcttttctttttttttaaagcgggggaggggaagaggggctgagaaaggaaatcatgttcactggtagaagtagagtggagcatcagttaccagggtcctgagagctggaggagaaaggattctatcttcaagttgggaggccctcctctcaccttgctcaaaaattgcaagcgattcaatcctgatcaagacaccaaagctacaggattctggaaccgtggagacaccgagaaaccatgagtgtaaggttaccccagagtatagacaggttaagtagcctgtcttctctgggagattctgcaccagagcgcaagtccccttcccaccatcgccagccttcggatgcctctgagacaacaggtctcgttcaacgctgtgtcattatccaaaaggaccagcatggcttcggcttcacagtcagtggggatcgcattgttctggtgcagtctgtgcggcctggaggtgcagccatgaaggccggtgtgaaagagggcgaccggatcatcaaagtcaacggcaccatggtgaccaatagctcacacctggaagtggtaaagctgatcaaatctggcgcctatgtcgcactcaccctcctgggctcttcaccttcatccatgggcatctctgggctccagcaggacccatccccagcaggagctccccgaatcacgtcagtgatcccctcaccaccacctcctccacctctaccacctccacaacgcatcacaggacccaaacctctgcaggatcccgaagttcaaaaacatgccacccagatcctcaggaatatgctgaggcaggaagaaaaagaattacagcgtatctgtgaggtctatagccggaaccccgccagcctactggaagagcagatcgaaggtgcccggcggcgagtcactcagttacagctgaagatccagcaggagactggtggctcagtggacatacttccactatatggtgacaccagccagagaccatcagaaggccggctctctctggattcccaggagggggacagtggcttggactctgggacagaacgctttccttccctcagtgagtcattgatgaatcggaactcggtactgtcagaccctgggctagacagtcctcgaacctcccctgtgatcatggccagggtggcccagcaccacaggcggcagggctcggatgcagcagtcccctcaaccggtgaccagggtgtagatcaaagcccaaagcctttaattattggcccagaggaagactatgacccgggttatttcaacaacgagagcgacatcatattccaggatctggagaaactgaagtctcggccagctcacctgggggtttttctacgttacatcttctctcaggcggaccccagtccactgcttttttacctgtgtgcagaagtttatcagcaggcaagccccaaggattcccgaagcttggggaaagacatctggaatattttcctggagaaaaatgcgcctctgagagtgaagatccctgagatgctacaggctgaaattgactcgcgcctgcggaacagcgaagatgcccgtggtgttctctgtgaagctcaagaggcagccatgcctgagatccaagagcagatccacgactacagaacgaagcgcacactggggctgggcagcctgtatggtgaaaatgacctgctggacctggatggggaccctctccgagagcgccaagtggctgagaagcagctggctgcccttggagatattttgtccaagtatgaggaagacaggagcgcccccatggacttcgccctcaatacctacatgagccatgctgggatccgtcttcgagaggcacgaccttccaacacagctgaaaaggcccagtctgctcctgacaaggacaagtggctaccgttcttccctaagaccaagaagagcagcaattccaagaaagaaaaggatgccttggaggacaagaagcgaaaccctatcctcaaatacattgggaagcccaaaagctcttctcaaagcacatttcatattcccttgtcccctgtggaagtcaaaccaggcaatgtgaggaacatcattcagcactttgagaacaaccagcagtatgatgccccagaacctgggacacaacgactctcgaccggaagctttcctgaggacctgctggagagtgacagttcacgctcagagattcgcctgggccgctctgaaagcctcaagggccgggaagagatgaaacggtctcgaaaggcagagaacgtgccccgctctcgcagtgatgttgacatggatgctgctgcggaggctactcgcctgcaccagtcagcctcgtcctctacctccagcctctccaccaggtctcttgagaacccaacccctccattcactcccaaaatgggccgcaggagcattgagtcccccagtttggggttctgcacagataccctccttccccacctcctagaggatgatctgggccagctgtctgacctggagccagagccagatgcccaaaattggcagcatacagtgggcaaggatgtggtggctgggctaacccagcgggagattgaccggcaagaggtcatcaatgagctgtttgtgactgaagcttcccacctgcgcacactccgggtcctggacctgatcttctaccagcgaatgaagaaggagaacctgatgccccgggaggagctggcccggctcttcccgaacctgcctgaactcatagagattcacaattcctggtgtgaagccatgaagaagctccgggaggaaggccccatcatcaaagagatcagtgacctcatgctggcccggtttgatggccctgcccgagaggaactccagcaagtggctgcacagttctgttcctatcagtcaatagccctagagctaatcaagaccaagcaacgcaaggagagtcgattccagctcttcatgcaggaggctgagagccaccctcagtgtcggcggctgcagctgagagacctcatcatctctgagatgcagcggctcaccaagtacccgctgctgctggagagcatcatcaagcacacagagggtagcacctggggaggggctggcatcacaggcagtgggcctcgtgccagaccctcattctgacactgctttgtgaccttagcaagtcactgtgccttgtggtctttggtgtcttcgtcctttttctgttgtggggtgtttcag

SEQ ID NO: 347303 - DNA, 1797 bp, Homo sapiens
aattggctcatttaagaatttcaaaacatttaatgtaaaagcttttttttttttaaggaagtccataaattttggttcccagggttgcactggacttggaaggagtgctgttgtgtacatactattgtatggttttatttattattttactgtacaaatcagccgaaagaatttttccaagtgccatttcggatttattaatccttttttttttcctttcctcaaagatatttgctgttgtcatattaagcattggagactagaaaattactttccccctttgagctagagggtctcttgccaacagaaggacagctgagaaagctggatttaaaggatggttttatctgtactttgcagttaacagtgatattttgaaggcacatttttctgtgattcatttttttttggccatagtgctaaccttgaagagattcgtggctgggtttttggtttctgagaaggtcgtagtttttcctcttttcctttttttttttcttttttcttttcttttctttttttttaaagcgggggaggggaagaggggctgagaaaggaaatcatgttcactggtagaagtagagtggagcatcagttaccagggtcctgagagctggaggagaaaggattctatcttcaagttgggaggccctcctctcaccttgctcaaaaattgcaagcgattcaatcctgatcaagacaccaaagctacaggattctggaaccgtggagacaccgagaaaccatgagtgtaaggttaccccagagtatagacaggttaagtagcctgtcttctctgggagattctgcaccagagcgcaagtccccttcccaccatcgccagccttcggatgcctctgagacaacaggtctcgttcaacgctgtgtcattatccaaaaggaccagcatggcttcggcttcacagtcagtggggatcgcattgttctggtgcagtctgtgcggcctggaggtgcagccatgaaggccggtgtgaaagagggcgaccggatcatcaaagtcaacggcaccatggtgaccaatagctcacacctggaagtggtaaagctgatcaaatctggcgcctatgtcgcactcaccctcctgggctcttcaccttcatccatgggcatctctgggctccagcaggacccatccccagcaggagctccccgaatcacgtcagtgatcccctcaccaccacctcctccacctctaccacctccacaacgcatcacaggacccaaacctctgcaggatcccgaagttcaaaaacatgccacccagatcctcaggaatatgctgaggcaggaagaaaaagaattacagcgtatctgtgaggtctatagccggaaccccgccagcctactggaagagcagatcgaaggtgcccggcggcgagtcactcagttacagctgaagatccagcaggagactggtggctcagtggacatacttccactatatggtgacaccagccagagaccatcagaaggccggctctctctggattcccaggagggggacagtggcttggactctgggacagaacgctttccttccctcagtgagtcattgatgaatcggaactcggtactgtcagaccctgggctagacagtcctcgaacctcccctgtgatcatggccagggtggcccagcaccacaggcggcagggctcggatgcagcagtcccctcaaccggtgaccaggtgagtgatctggagccaccctgcagttttccttttctcagaagtgagatttggaggcatgggtgttaccagtacatcgtcttggatca

SEQ ID NO: 347304 - DNA, 489 bp, Homo sapiens
gatgtcatcgtgtatgatcttgtgttcaccttgttcttcccattttctcctccccctgtccccacctcctgccctctctccttcctgttctctctcccttccctttccttgtgttttggtctctcctcttcctggtggtggtggtgtcggtgcagctgaggtggcaggcagcaaggttgtccctgcactaccagagagtggccagtcagagcctgggccacctgaagtggaaggcggaacaaaggctacgggtaataactttctccttggagctaaagacaggccaagactggagtgtggaacctgtgagggcagagtcggacccctgcccatggtcacacacacacccacaagctccctcagctgcctggaatggggaggaggaagatctggctctaaagacggggagatctggttctaaaggctggctgtccatccagccttaagaagccacctgtccaggctcctgttcagaatggcagggataaa

SEQ ID NO: 347305 - DNA, 385 bp, Homo sapiens
aagccattcctgggaggtttcaagcccccaaaggactattggaaaactgagacttcaggctggaattttagccatcctaagagttctgaacctggaatccatggatagaattctggagaccatgaaccagagctggtaaatacatctttatttaaattaacctttaacaccaagtgcggtggcactcacttataatcccaggtactttgaggcctccagcaagacccctgtctcaaaaaaaaaatcaacctttaaccaaaatccagcattttcttcacttatgaatgtaggtgatattccatctcaacacattgcagtcactggaaatatctcaaaatagcatttatttatttattttatttttattttattttttgagacagag

SEQ ID NO: 347306 - DNA, 501 bp, Homo sapiens
tcccgcctactcggggggctgaggtgggaggattgcttgggcctgggatgttgaggatgcagtgagctgtaattacaccactgcactctttctagcctgtgggacagagtgagatcctgtccaaaaaaaaaaaggaaggaaggaaggaaagaaggaagaaaggaaagaaaaagaaaagaaagtttatttttgggacatgctaaattttaaatgtgtttcggacttccaagtagaagggtctaatagtcaattaaatatatggatctggaacttggtagatgatgtagttatgtcctaacattttaacttgcatattaatattatatgtgctgcacgaatggtatctgttttgattttggcaatgtcacagattatcaacaaaagtaattgttaaaaagaattagtcaataagttgttccattatgttgctttatgtcttcctagaaaattctttgaaaaatgcataaaaggaaatattaaaatcagccaaaacaaaatatt

SEQ ID NO: 347307 - DNA, 597 bp, Homo sapiens
tgtcgaggctggcttatgagtggtagttgcatccatttcttttttcgtgggagtgttctttcatgttcagttcttctatgttttggtttaaattttaacccaagaatgttaggctagggtattttaatcatatgtcattattgcttatgatttaagtttgaaataaacaccctgagtttattgttcttaaagctaaaaaacaatgtagaatgaaaactggaaacgcttatgatttaccaggacaattagaaaataatggccttttcagagtatttctacaaatagcaaatgcacaagattgttgttgtcacagtgtttttctgaaaatgtcccataatccaaatgccagtaatcccagccggcctctccctatcgtcctacatgttggaaccactctccaccattacacgttctctgtaaagcattcctttatttcattactgtttaagcatggtcaggaaagaaatcatatgtagtgtagaatgattgctcccaaagctgtctctcacctcctcacccctagtactcactgtcgcagctgctcatcttagtgcttcgcatataggaacttgtttagttctcacgcaacccttagag

SEQ ID NO: 347308 - DNA, 412 bp, Homo sapiens
cacagccctccagtagagggcacacgagagcaggctatctgtggagatagcctgttggcacaggggtgaagatgacagaggcgaacccaagcaaagagagttaattagcagagtttgccctccaggctcggagggcaagtcagcctggggacctggagttagttcccttttcagctgtgaccattgaagacattcatcaagttctctggctccgggatgtcagctgtggtagtgacttgcatgggaggttatccgacatacctcacacactttaactccacctcttcagagtttgtggccaagaatggagccaggtggctattttttttttttaaatttatgtaataacaaacattcgcatttattgaaaacttaaagtataataaaaaaataaataaaataaaaaaaaaaa

SEQ ID NO: 347309 - DNA, 502 bp, Homo sapiens
agagaagcctgtgttcttggctgttccattttggagtagagtttctgtccagctgatctggaaaaggggtgatgaaaggcatgggtcttggtttaagtatccaagcttttgcagtttttactaagtataatagatttctttgaataagtggtttttttttcatttgctatatacaattttctgaaaacttcaatgttgtttttatttataatactcactagtttcactagggagtggacccatggagctcctcacagtgatatcagaagaggagctcccattttcctccctgttgaagtacatataaagagaatcacatagaggtacttttgtgatatctgcttcttttactgagcattatgcatctgagatactattatgctgttatgtatagcaataattttttctctttcattccaatataatacttcatggtatgaatacgccataacaagtcattgttctcttcagtgtcatttggatcattttcagtttgggggta

SEQ ID NO: 347310 - DNA, 408 bp, Homo sapiens
aggttatgtgactcttctgcttgtgctcttcccatgtgggtcattgtgacatattgctctgtcacacacccaggtgaggtaaccatactgcctaggtcctgcctacagaggacattgtgacatccctgcacccatcacacaggtctccctctgatgccgagccgaagctggactgtactgctgccatctctgctcactgcaacctccctgcctgattctcctgcctcagcctgccgagtgcctgcgattgcaggtgcgcgcagccatgcctgactggtttttgtatttttttcgtgaagacggggtttcgctgtgttggccgggctggtctccagctcctaaccgagagtgatctgccagcctcggcctcctgaggtgctgggattgcagatggagtcccgttcactc

SEQ ID NO: 347311 - DNA, 407 bp, Homo sapiens
tgctgttatgaactgaatataaatgtttttgtgtggacatgtttttagttctcttggatagatacctaggagtgaaatttctgagtcatatcttaactctatgtttaatcgttcaagaaactctcagattgtttgccaaagcagctgccctacatcatacactcagtgtatgatggattcacgttcactgcatccctgccaacacttgttattgtgtctttctagtaatatcattctagtgagtacgaagtgttatctcactgtacttttgatgagcacttccctgatggctaatgatgttgagaatattctcatgtggttattggccatttttatatcttgtttagagtgatgtttattcaaatttgtacccattttcaaatcagtaaacatttgcctgtctatga

SEQ ID NO: 347312 - DNA, 716 bp, Homo sapiens
caattctcctgtctcagcctcccaagtagctgggactgcaggcgtatgctaccacgcctggctgattttttgtatttttagtagagatggggtttcaccctgttagccaggatggtcttgatgggaccagcgtcatgtatgccgtctgttattgccaggagcatcatgatgtgaggcgtggctgtacgtggaggctgacagtttgagggtaggggctctcctttaaatagaggttaacatgcataaaaattcttggaggggacataatttatatacaataaaatgtcccccttgtaagtgcacagattgaggatgtctacccccatttcgttcagccccccagagggtctgcttgtgccctctgctgtcggcccacagccctggacgggaaggtgttctctgggccgcctctcgccgtcggtgtggatctgtcctttggagcgctcaggtcgctgaaaccccagttgtgtgctccctggtgtccggcttcctactcagagtacttggaggggcatcgtgtgcaacacgtgtccacagtttgttatttttatggggaatggtttctgtttggatgtacgctatacatttgccagctgaggagtctggcatgtttccagtttttggctattacgaataaagcttctttttgtacatttgtgttcaagcctttgtgcgaacatacgtgtagacgtccatttcttttgggtaaatgttag

SEQ ID NO: 347313 - DNA, 348 bp, Homo sapiens
tgaccttggtttctaggtgtggttcttgagctgagcaagtcacataacctcttcagacctcagttttttatatttcgaacagaagaattgtactaagaagattgtctaagggaccttctagtgcaaaaatgccattttattattagactttttgtgtttatctttttttttaaggaatatgaatttacctatgttatttccagaaattaatttcttttttttttgagacggagtctcgctttgtcacccaggctggagtgcagtgagccgagatcacgccattacaatccagcctgggtgacatagtgagaccccatctcagaaataaataaataaataaagtaaaaa

SEQ ID NO: 347314 - DNA, 521 bp, Homo sapiens
gaaggaaagaaggaaggagagagagagaaagaaaagaaagaaaggctgctttaggactaagaggtaacgggagatagctgctttaggactaaggtaactggagatatcagatatcagaggtcatatgtgggtagatggagtagttccaactcaataaaagtagagagttcttgctgagcccctctggcattcagttaaataagattccagaaaagcaacatcttaaaaataagaactacacccttgaaaaggagccctgccctaaaattacaaataaagctagaagaggatacctactcctaacaaagtactgaaacaagcctaacaggttcaagatcctttagtaatttaattgcctgccagaacaaagctcataacttttaaagaaaggtaacataattcataaccctacaaaatgtatcacacacaagtacagcacataatcaaaactctctagacatgtgaaacaggaaaatgtgacccaaaataaaaacatggtaaccagatattgatattagcag

SEQ ID NO: 347315 - DNA, 493 bp, Homo sapiens
ggccacttctcttcccttcattcttcgccaggctctctgctgactcaagttcttcagttcacgatcttctagttgcagcgatgagtgcacgagtgagatcaagatccagaggaagaggagatggtcaggaggctcccgatgtggttgcattcgtggctcccggtgaatctcagcaagaggaaccaccaactgacaatcaggatattgaacctggacaagagagagaaggaacacctccgatcgaagaacgtaaagtagaaggtgattgccaggaaatggatctggaaaagactcggagtgagcgtggagatggctctgatgtaaaagagaagactccacctaatcctaagcatgctaagactaaagaagcaggagatgggcagccataagttaaaaagaagacaagctgaagctacacacatggctgatgtcacattgaaaatgtgactgaaaatttgaaaattctctcaataaagtttgagttttctctgaa

SEQ ID NO: 347316 - DNA, 920 bp, Homo sapiens
ggtcgaccttcgccaggctctctgctgactcaagttcttcagttcacgatcttctagttgcagcgatgagtgcacgagtgagatcaagatccagaggaagaggagatggtcaggaggctcccgatgtggttgcattcgtggctcccggtgaatctcagcaagaggaaccaccaactgacaatcaggatattgaacctggacaagagagagaaggaacacctccgatcgaagaacgtaaagtagaaggtgattgccaggaaatggatctggaaaagactcggagtgagcgtggagatggctctgatgtaaaagagaagactccacctaatcctaagcatgctaagactaaagaagcaggagatgggcagccataagttaaaaagaagacaagctgaagctacacacatggctgatgtcacattgaaaatgtgactgaaaatttgaaaattctctcaataaagtttgagttttctctgaaaaaaaaaaaaaaaaaaaaaaattttgggggggcggggcccggaaaaaagtttttaaaccccaattgggggggggggggggccccgggttagggggacctgccaaggggcgcccaggaggaaagccggccagcaccaggggtctgtttcccccccaacaaaaaaggccggcgcgggaccgaggcgtcgcgaacacaccgaaggggtctggggggctccagggctccaacacgggaccgaggaatgtaaattgaccccgcgcgggaaaaaccaacacggacaccagaaacacagagcacgagaacaagcaaacagtggatatcataccatcctagaggcaatagccgacaagcaaccacgacacagacgggcactgagcaagcacgcagacgagagagacgagggacgaccacaccacagagcagagatagcgtcccaaccgga

SEQ ID NO: 347317 - DNA, 655 bp, Homo sapiens
ggccacttctcttcccttcattcttcgccaggctctctgctgactcaagttcttcagttcacgatcttctagttgcagcgatgagtgcacgagtgagatcaagatccagaggaagaggagatggtcaggaggctcccgatgtggttgcattcgtggctcccggtgaatctcagcaagaggaaccaccaactgacaatcaggatattgaacctggacaagagagagaaggaacacctccgatcgaagaacgtaaagtagaaggtgattgccaggaaatggatctggaaaagactcggagtgagcgtggagatggctctgatgtaaaagagaagactccacctaatcctaagcatgctaagactaaagaagcaggagatgggcagccataagttaaaaagaagacaagctgaagctacacacatggctgatgtcacattgaaaatgtgactgaaaatttgaaaattctctcaataaagtttgagttttctctgaaccccaaaaaacaagattaccatgcaagtatataagaagatctactctgtattaaggaacaaaactcgggggggggcgcgggcacccaattcgccctatagggatgggtttacgcccccctcctggccggcgttttaaaacctcgggcatgggaaaaaacctg

SEQ ID NO: 347318 - DNA, 455 bp, Homo sapiens
ctgcatatgtatgtttttaagagtctggaaatagtcttatgactttcctatcatgcttattaataaataatacagcccagagaagatgaaaatgggttccagaattattggtccttgcagcccggtgaatctcagcaagaggaaccaccaactgacaatcaggatattgaacctggacaagagagagaaggaacacctccgatcgaagaacgtaaagtagaaggtgattgccaggaaatggatctggaaaagactcggagtgagcgtggagatggctctgatgtaaaagagaagactccacctaatcctaagcatgctaagactaaagaagcaggagatgggcagccataagttaaaaagaagacaagctgaagctacacacatggctgatgtcacattgaaaatgtgactgaaaatttgaaaattctctcaataaagtttgagttttctctgaa

SEQ ID NO: 347319 - DNA, 541 bp, Homo sapiens
cttagctaatatataattagcagaaagtttttagtcaatacatttgagtgacactgtgtttgcttgcttgttttttgcttcttggactttttgtttgattaaaaaatcaaaacaaaacaaaactgaaatcagtggctgtttttgccctctacttaaaatgatctttaaatgggctcatagcatttaatctgttctggcttgagaagtctttgtttccttgtaccactagagtgaggcattttaaaaattagtacacatatgcctgaaaatgtacattagcatagaagtctatgcagtggttagcgttctggttttaatttcatcttaagaaaccaaaactagtgttctttgtgtgcttttagtgtcatctcagtaaagttctgctaagtaatgaactcaactgttatgtttatattttaggagatgggcagccataagttaaaaagaagacaagctgaagctacacacatggctgatgtcacattgaaaatgtgactgaaaatttgaaaattctctcaataaagtttgagttttctctgaa

SEQ ID NO: 347320 - DNA, 387 bp, Homo sapiens
ggccacttctcttcccttcattcttcgccaggctctctgctgactcaagttcttcagttcacgatcttctagttgcagcgatgagtgcacgagtgagatcaagatccagaggaagaggagatggtcaggaggctcccgatgtggttgcattcgtggctcccggtgaatctcagcaagaggaaccaccaactgacaatcaggatattgaacctggacaagagagagaaggaacacctccgatcgaagaacgtaaagtagaaggtgattgccaggaaatggatctggaaaagactcggagtgagcgtggagatggctctgatgtaaaagcagtcacgccgtcgtatcctgtccatcagcaggctagaatgccaacttatgtcctgctct

SEQ ID NO: 347321 - DNA, 791 bp, Homo sapiens
ggccacttctcttcccttcattcttcgccaggctctctgctgactcaagttcttcagttcacgatcttctagttgcagcgatgagtgcacgagtgagatcaagatccagaggaagaggagatggtcaggaggctcccgatgtggttgcattcgtggctcccggtgaatctcagcaagaggaaccaccaactgacaatcaggatattgaacctggacaagagagagaaggaacacctccgatcgaagaacgtaaagtagaaggtgattgccaggaaatggatctggaaaagactcggagtgagcgtggagatggctctgatgtaaaagagaagactccacctaatcctaagcatgctaagactaaagaagcaggagatgggcagccataagttaaaaagaagacaagctgaagctacacacatggctgatgtcacattgaaaatgtgactgaaaatttgaaaattctctcaataaagtttgagttttctctgaagaagtcatgcgtgtcttttgtaaaatttattcctaggaaattgacactattgtaaatggtatctttaaaaaatccttgtgttctgtttagagctggtatatatttttgtatactgattttgtgttgggcaacattgctaaacttgcctattctgttggtttatccctacgtccttttggattttctccatacacaatcataccacatgtaaataatgataattctgttttttccttttgaggctttgtactttcatttctggtccttatgacactggccagacccctccagtacaatg

SEQ ID NO: 347322 - DNA, 552 bp, Homo sapiens
  misc_feature (500)..(500): n is a, c, g, or t
  misc_feature (502)..(502): n is a, c, g, or t
  misc_feature (505)..(505): n is a, c, g, or t
  misc_feature (513)..(513): n is a, c, g, or t
  misc_feature (517)..(517): n is a, c, g, or t
  misc_feature (525)..(525): n is a, c, g, or t
ggccacttctcttcccttcattcttcgccaggctctctgctgactcaagttcttcagttcacgatcttctagttgcagcgatgagtgcacgagtgagatcaagatccagaggaagaggagatggtcaggaggctcccgatgtggttgcattcgtggctcccggtgaatctcagcaagaggaaccaccaactgacaatcaggatattgaacctggacaagagagagaaggaacacctccgatcgaagaacgtaaagtagaaggtgattgccaggaaatggatctggaaaagactcggagtgagcgtggagatggctctgatgtaaaagagaagactccacctaatcctaagcatgctaagactaaagaagcaggagatgggcagccataagttaaaaagaagacaagctgaagctacacacatggctgatgtcacattgaaaatgtgactgaaaatttgaaaattctctcaataaagtttgagttttctctgaaaacaaantnccnaccccccncctnccaatctnacctctttttaaaacaactaaaaaact

SEQ ID NO: 347323 - DNA, 330 bp, Homo sapiens
aacctaaaaatctgggctgacttcttgaaaaataaaatgtttatgttgtaaacaaggttgaataatgcacatgtgttcatcacatccatgaacaaagcctctaacatcagtgatactcattaataagggtgggataatgtctgccatcaacatgccaattttctatcgatttagttaattagaaaatcggagactggcttctttttaagtttctcagatcaatcataccagagtatcttttcttagcggtgtcttgggcgggctccacatcctaatgtcacgttcagtcatttcttctttttttttgagaacaagtcttactctgtcacc

SEQ ID NO: 347324 - DNA, 947 bp, Homo sapiens
ttcctttattcatccctatttgctttctgtctgtaatcctttgtaattccctggtttcatgatgtaattctaatggaaataaacccgaacctttcaaaattatgtaattaattgcattcagcttcaatgacaatgactaattatagtgatacctggtggcaaggcaggtacctactgctggggggctcctgtctgcttggtactaggactgccacttctgggcgcgtcggagcggctgcacagggggtcagctggctgtcctgtggcctgctccggtgcctctggtccccatcttaccaggagcagcgccatggccatgcagggaggggccggagagggaggtggtgtgcagggaggagctgcttaggggtgggagggcttggacttgtctgcaggttaaagagaagtcttgctgggaaagtaacttcggggctggttccctgagagcattcttctctgattcatgtattttcctgagaaaaagggaggagggtgcgttcgactgaacgtgaagcgttcaaggatcggaaaggcaagccaggtacagtggcttacacctgtaataccaacactttgggaggctgaggcaggaggatcacttgagagcccaggagttcaagaccagcctgggcagcacagtgagaccccatctctacagaaaaaaaaaaagaaaagaaaagaaattagcccagcatggtggctcacacctgtgataccaatactttaggaggtcaaggcggaaggattgcttgagcccagttgttcaagaccagcatgggcaacagtgagaccctgtctctacagaaaaaaaaaaaagaaagaaattagctgagcgtgatggtgcacacctgtgatcctggctgctcaggaggctgaggcaggaggatcgcttgagcccaggagttggaagctgcagtgacgtatgacagtgccattccactccagcc

SEQ ID NO: 347325 - DNA, 301 bp, Homo sapiens
ttgcagtgagccaagatcgtgccattgcactccaacctgggcaacaagagcaatactccatgtcaaaaaaaagaaaaaaaaaaaagttcaagtggattgtttaggaagcaatcccagaaagtatctgcaggggattggggaggtgtgacaggaagaaaagtgcccatgtggggaacagaatcaaggaagttactgctgtgggtaactggtgcttaatcaccctgggccctctaggaggcagtacagcacacgtctcagagttatcccactgcagatgcataggacactggtcgacgcaact

SEQ ID NO: 347326 - DNA, 324 bp, Homo sapiens
aaacatagtcacataaaacaaaaacaatctattttgctcacaaatctgcagtttggacagggcttgagagggacatcactgctcagtggaggttatgtgaagtctccaccgagatttaaatggctgggggctaggatgatctggaggtgtttttcactcacatgtctggcacttgggctgagataactgagacgctgaccacagttgggactgtcacaggagtgcctgtggttggcttatacatgtattttaagcttcatcacagcatcacagcatcacatcctcaaggtagtcaaacttctttttgttttttttttgagacag

SEQ ID NO: 347327 - DNA, 519 bp, Homo sapiens
tcttgagagaattattttttaatctgagagtagagaagatctttctaaacatgacatgaaatttaaaagccataaaagaaaaacaaaggaaaatatctagtaagagagtaaagctgtgatacctttttttaacctattagttaacctattagttaccagagatcaaaaagtttgattccttatgttggcaaaggtatattgtagtagggaattataaatggatcagtgagtgtctgaattggtataacctttcagagggcaatttggcaatgttatcaatccagttctagaagtttatcttacagatacgtgcatgtttacaaagccatgtatacaaggatattttatacagcactatttgtagcagcaaaaaactggaaacaagctaaatgatcacccatgagcctggctgaataaattaaggcacatctatgtaataaaacatgatgcagctgttaaaacaacaagcagctctggatgtatccccaagatattttaagagaaaaaagcatggtgctg

SEQ ID NO: 347328 - DNA, 405 bp, Homo sapiens
tgcactccagcctgggaaagagaacaaaaccctatctcttttaaaaaaaaaaaaaagtgtgttgtattcatttattccacatgcttgagaagtctactgatacctgattatattgaaattacaaagataacattatgggcagcctatgtcagaaccttagcaaaccagtgtttttacaaagatactcacctgtagcaccaatttaaactattttctgaaaactgtattcaaaaattccttgttaaaactactgggaaataatgagacctccaaaggaggctttcctttagctggaaatatactgaataaaaaacaaaaacttcttttttttttgagacggagtctcactctgtcgcccaggctggagtgcagtggtgcgatcttggctcactgcaagctccgcct

SEQ ID NO: 347329 - DNA, 358 bp, Homo sapiens
tctcacaaaccatccattgtgactttgccaggggatcctgatcttaagacaattaaacaattaaaaaagatcagttaaaaaaaaatccttcttctctgctccttatgctgttggctgcttaagctgtttgctttcatcctcagctcttgtgtgaattatacatgtttttgtaaactcaaacttaaaacccagtatgtctttagatagctttttgcactgcaccctttaatgtgggttatttttcacatgcactggggtgattttgcttgtgcatagaagggcggtggcttgcttcaagtatcggttaattgcacttacattcattggtttgttcctgttacaaacagaaaagaaaaaa

SEQ ID NO: 347330 - DNA, 369 bp, Homo sapiens
ggttccagcactgtctctccacgtctcaaaaaaaaaaaaagaaaagaaaagaaaaaaaagaatttaaaattctgttttagtggagtcatttgaacttaagtctaagtttataacaacactggcttccacagcacaggaggtgagcatgtgttaatatttaagattggcataactccctttaggtgcaagtgttcaggccaaaatgttcctgaggcattttgattcctcctcctgctgcccatctataccaagcccagaaactgtctggaatatattttagtttcctgaatgacaccaagaagtagaacagtcttttcaaaaatgtattttaataagctgaatctcaagaatctgatctatagtttgctg

SEQ ID NO: 347331 - DNA, 599 bp, Homo sapiens
agagcgagaggtctgggctgccttccaagccagccagcctgccccagatggccgtccccagccgccaagcagacagtctcgagtggacctgcatctcccagcagatgggatatgagcattggcagtgccaggctccccaccaaggcaggaacagacttggagctgggctttggcactgcttgtccaaaccccagagagcctggacagggtgagcgccaggccagggctgccctgtctcaggtccctttggcactgtctcacccaggacactggggacagagtggggatggcaaccagccaggaactgtgtggcacccccccacaaggcccagtggttctcattggcctagaacacgtgatttttgacaggctttagttctgatagggttagagatttgggtttttattttattggtttttcttttttatttaaaaagtaccaaacgctcattattaagaacttagacaatacataagtatgcaaagtagaaaaaggaaagtttcattagtgaaaaaagcaagtgtgaccccgtttttgttcaataggtacatctgactgtgtgtgtgtctgtgtgtatttgcttatttatttttgagac

SEQ ID NO: 347332 - DNA, 825 bp, Homo sapiens
ttggtggaattatggcaaataatatgctatcccacagtagaatacttggtaaacattttcagaaattaatttgagtcaggatttcggtctcttgaaacccccttcagctggtctgtagtgtgtaatatcagtggaagttattctaatggcttaatttaccaaaatatcaaatccaggaccagttaaaagccatttattctcctaaataattgtggcaacgtagtttttttaatgcatttagaatttcagagtagtcaggtatgatcattcagaaaaaagtaatttaaatgagttatgaaggctatatttaatatatcctaatatgagaggcttaaatctaaaccagtgatttctaatttttttggtggggttttataattctctttgagaattcaatatacacaatttctgggggtttgtgaaattctcctactctcctgttggcacactaagggcccagaggcccagaaatgtcaatgtgaatctattccattaatctagagtttaatgaatatagagttcagtaaagttgacaaatcacaaaatgtcatagctcttattggaagctacagtcttcaggctgtggaattggtgggactttatctggagttgctgcagtgggaagctgaaaagcattgggaaacatgtctgatctgcctggacttcctcaaggagctgggtccctggaaacttttaggaagaatcataccactctcacaggtctcctgtgttgtgggtgaaatcctgtgttgaaggctagggaagtgtctgaggacacttagcaagttgaggctgctgaagaactttaaactcatgtaaacatgc

SEQ ID NO: 347333 - DNA, 771 bp, Homo sapiens
ttggtggaattatggcaaataatatgctatcccacagtagaatacttggtaaacattttcagaaattaatttgagtcaggatttcggtctcttgaaacccccttcagctggtctgtagtgtgtaatatcagtggaagttattctaatggcttaatttaccaaaatatcaaatccaggaccagttaaaagccatttattctcctaaataattgtggcaacgtagtttttttaatgcatttagaatttcagagtagtcaggtatgatcattcagaaaaaagtaatttaaatgagttatgaaggctatatttaatatatcctaatatgagaggcttaaatctaaaccagtgatttctaatttttttggtggggttttataattctctttgagaattcaatatacacaatttctgggggtttgtgaaattctcctactctcctgttggcacactaagggcccagaggcccagaaatgtcaatgtgaatctattccattaatctagagtttaatgaatatagagttcagtaaagttgacaaatcacaaaatgtcatagctcttattggaagctacagtcttcaggctgtggaattggtgggactttatctggagttgctgcagtgggaagctgcctggaaacttttaggaagaatcataccactctcacaggtctcctgtgttgtgggtgaaatcctgtgttgaaggctagggaagtgtctgaggacacttagcaagttgaggctgctgaagaactttaaactcatgtaaacatgc

SEQ ID NO: 347334 - DNA, 986 bp, Homo sapiens
gcaaatgaattctcagaggaagtggtctatgtctgcatgaactgctctcaaaccaacaaacaggcttctcttggcaactgactcgtgacaaaggggcaggggttacaaccattcaacaggaatctgggaccgtgactaattccaagcaagggcagaaaaccctgcacttgggcagttcctggagccagcctactgcttccaagcaaggtggcaaggacattcctgagctggtttgcaggaaacacaggaggtagctgaagacgccgtgttccctggggcctgacctcaccgtgcagtggccacgcacagagaggagagacccacacatgctcttttctgcagaaacagctgaagggacaggcaccctcagtgcgtgagcccaagcccctccccactcacttggtgaccacagcaatcttgactccgaagacccctgtctgttttcgggacggcatcctcttcaagctgaacttcctgctgttgaacttgaccgagagctttacttcgatctacagtggggagaaggggcacagtcctctaatccttctggtcctcatagcccaaggtcccaaggacccctgggagtctcatcaaatatttccacccccaaggcatgcagaggtctcagcatgaggtggagccgcccctcggggaagcccctagtctacttcagcaagagccaggattgttgaagatgatgtaaacgactggtttctgcagaagcacctcctaaaatccccgctgcttctcttgcttgcttacttttttttaagatatgggatcttgcaatgttgcccaggctgtaatcaaactcttgggctccagtgattctcctggttcagcctccagagtagctgagattatagtgtactgtgaccagctttctcttagtaacaattaaaaattaagtaggaaagacagaataatgtaagaaaaagccaagaatctcaaatattaacattttaccatttatacccggaaaaaaa

SEQ ID NO: 347335 - DNA, 526 bp, Homo sapiens
caatggacaattccaatacctccacacaggacactagagtaagaatccttcacagttagaacgcagtgctgtgcggaggccttaacttgagttctgttttgcacctggatttaccagcacatcaaagctgcttcgcaagccccctcattagcagggcttatctgggggagctgctgatggagtcctcgctgctcatgcccacagccctcccagagtgctatgcgagtgggggtggggcgtggtgtttagacacagataggagtccagggtatgactgatggaggccccggcccacgtgaccagcaaggtcagaggcccagccagattccatcctagggaggcaaatgaattctcagaggaagtggtctatgtctgcatgaactgctctcaaaccaacaaacaggcttctcttggcaactgactcgtgacaaaggggcaggggttacaaccattcaacaggaatctgggaccgtgactaattccaagcaagggcagaaaaccctgcacttgggcagttcctggagcc

SEQ ID NO: 347336 - DNA, 1025 bp, Homo sapiens
gatttaaacaataaattgtggaatcacaaaacaaagacaagagaaaaaacaaacaggtagctaccagcgtgatataaagacgagctttcctgccagaagagatgcatagaaatacaatgagctatcttcaaatgtgccgagttctctagagctagaaaaattccaatagactttcaatacctcttgtcaaaacacgatgaggaagattcctatgttaggaaggtgagagaaggccatggctccaagacacttcccaacgtctttctagaagtttttgcaggaaggggttgaaaaggatgttttgtggtggcaccgggctagaagaacaaattgactaaatcttaaaagtaataaagaacttcaaacaaaagcacatcatgaaaaatgagtatatttgtcttatttcataagaactatggagtacaaagaagtctagaaatcttttttataatggcttggccttctcctatagagagaaatattaggtaaattgcttttctatgtgtcactgcagagtataaataattatatgaaacgaaagaataactgtgggaaggaataaaaatgtgtgcgaggtctctggtgacagagtaatggctcgccgacatccacccactcttccccttgatggccagtgcctccatctacccaagaagcagcttgatttgtcaggaaattatgctctgaaagggtatttcaaatggcccaccgcccccacgctcctccactgtgtcctctggaaatgacttattgactgtcacaatctttgctggacagctgcccaccatacagtgttctcaaggtgctgtctgcaagaggagcagactacactagaaaaatggtccaaatgacagcatcatttttacttaatacttgaatcgatttttctctttttcccctgaagcattttctctcttgctatctttcctcataaagcccttgagacttgtttgggaaatgttttacaaataaggaaacgtatacagggaaattaggcatcaaataagtggaattcaactctctcc

SEQ ID NO: 347337 - DNA, 763 bp, Homo sapiens
aaaaaaaaaggcttgtgaaaaactaacacagatgtcacatggctctaagaaaatcctttaattctatttttcaagtctttatttaccaactttttttcaagtttttttgcctttagaagttagacagattcacctctagaaagtacactgctacatacaaaaagtgacaagcctgataagatgaaggagtcagaaacattctaaaatcaaaataaaatgaaacagaaaaacccaacagccaaagactatggcacatagcattatatacagagtgacctttgggagcctcaccactttacaacacagtgccataattattgttaagaatggtaattctgagttatacagacaggagttggatcatgatgaagatagtctttaagaaagtaggcagtgaataataccatttcatgaaggttttcattctaattttcgaaagtaagaaaaattggtacttcaaaggggaatatcaaatatcttaaaatttacttacatgaaactgtatctcattaggatttgtaaggatttataatgcatttgtggattaaggaggtagaatgtggttctggcaatgtggatcatatgagatcttgaaatcttgattgtctcaccaatcagtttggctactcaatgcttctgggctagcctgtcaattgaccttccatgggaatgaactatgctaattctcaatcacatagaagaagcagaatagaagcaacacagttattttagcagcaatactaacattagtagtagcagcagc

SEQ ID NO: 347338 - DNA, 659 bp, Homo sapiens
ctcacttagggaatttggccctcaagcccagaattcggcacgagagattttggctcctttttgcacccttaaatgtaaaaatgttgcagaagaaaatacaagggtactctattccttatatggagttgttgaacacagtggtactatgaggtcggggcattacactgcctatgccaaggcaagaaccgcaaatagtcatctctctaatcttgttcttcacggtgatattccacaagattttgaaatggaatcaaaagggcagtggtttcacatcagcgacacacatgtgcaagctgtgcctacaactaaagtactaaactcacaagcgtacctcctattttatgagagaatactgtaataatatcaaaagcactttttctggaaacacatttatggcttttataatggctgaaataacgataaaaaaagactaattaaaatcatgttcacttaacattaaatacatgccagaagaaatcatgtttatttaaatattgaagggaaaaatacctaaaaatgtacaaaggttttatattgtcatagtggtttttattcctgctttgtttctggaaaggaaatcctgaattacttaagtactttgtgtttaatatatctgggtgatggatcacaacacatcaataaactgacttaccctaaaa

SEQ ID NO: 347339 - DNA, 714 bp, Homo sapiens
aattcgtcgcgagtgagtcaacggacgtgtattcctggctactcaggaaggcctaatgaaagcggatgcgatagctgtgagtctgtgagtgcgaaaagtgattgggtgtcatagagtgatccagttacatctgccaacatgggaaagaaacggacaaagggaaaaactgttccaatcgatgattcctctgaaactttagaacctgtgtgcagacacattagaaaaggattggaacaaggtaatttgaaaaaggctttagtgaatgtggaatggaatatctgccaagactgtaagactgacaataaagtgaaagataaagctgaagaagaaacagaagaaaagccttcagtttggctgtgtcttaaatgtggccatcagggctgtggcagaaattctcaggagcagcatgccttgaagcactatctgacgccaagatctgaacctcactgtctggttcttagtttggacaactggagtgtatggtgttacgtatgtgataatgaggtccagtattgtagttcaaaccagttgggtcaagtggttgattatgtcagaaaacaagccagcattacaactccaaagccagcagagaaagatatggagatttgactttggaaataaaaattagaaacggagtagaatgaacgagagagaaagaaggaatggtaaagatctccatgaatttctgcaatacggaaggctagattgaaacat

SEQ ID NO: 347340 - DNA, 3251 bp, Homo sapiens
tagccacttcccataatgccgcgttccggaagttattgctttccaggggtcactctggcttcgactccgtcgctctcaattcgtcaccaggaggaagacggagctggctgcccagcccaaaggcccatgaggggatgcagttatgggctctgtcgccgtgggtgagttctggtcccactgcctggcagtcgtcgctcgcctggctttctgcgctgggagagctcctgttttccgccccaacttcgttctcttcttgaaggccgctctccttaagcacgtaacccggctactttccggtactgcgatctcattggctgcatgttctgtcagttccagaagctggccaatgagatgccgctgctggcggccttctcgaccccgtggacccagaggttcccccgtgggatcggagcagttagaaggggaggagagggaagattgttattttgtgtcagtaagtaatccataaagtgccaacatgggaaagaaacggacaaagggaaaaactgttccaatcgatgattcctctgaaactttagaacctgtgtgcagacacattagaaaaggattggaacaaggtaatttgaaaaaggctttagtgaatgtggaatggaatatctgccaagactgtaagactgacaataaagtgaaagataaagctgaagaagaaacagaagaaaagccttcagtttggctgtgtcttaaatgtggccatcagggctgtggcagaaattctcaggagcagcatgccttgaagcactatctgacgccaagatctgaacctcactgtctggttcttagtttggacaactggagtgtatggtgttacgtatgtgataatgaggtccagtattgtagttcaaaccagttgggtcaagtggttgattatgtcagaaaacaagccagcattacaactccaaagccagcagagaaagataatggaaatattgaacttgaaaataaaaaattagaaaaagagagtaagaatgaacaagagagagaaaagaaggaaaacatggctaaagagaatcctcccatgaattctccttgccaaataaccgtgaaaggactcagtaatttgggaaacacatgtttcttcaatgcagttatgcagaacttgtcacaaacaccagtgcttagagaactactaaaagaagtgaaaatgtctggaacaattgtaaaaattgaaccacctgatttggcattaacagaaccattagaaataaaccttgagcctccaggccctcttactttagccatgagccagtttcttaatgagatgcaagagaccaaaaagggggttgtgacaccgaaagaactcttttctcaggtctgtaaaaaagcagtgcggtttaaaggctatcagcagcaagacagccaggagctgcttcgctacttattggatgggatgagagcagaagaacaccaaagagtgagtaaaggaatacttaaagcatttggtaattctactgaaaagttggatgaagaactaaaaaataaagttaaagattatgagaagaaaaaatcaatgccaagttttgttgaccgcatctttggtggtgaactaactagtatgatcatgtgtgatcaatgcagaactgtctccttggttcatgaatctttccttgatttgtccctcccagttttagatgatcagagtggtaagaaaagtgtaaatgataaaaatctgaaaaagacagtggaggatgaagatcaagatagtgaggaagaaaaagataacgacagttacataaaagagagaagtgatattccttctggaacaagtaagcacttacagaaaaaagcaaagaaacaagccaaaaagcaagccaagaaccaacgaagacaacaaaaaattcaaggaaaagttcttcatttaaatgatatttgtactattgaccatcctgaagacagtgaatatgaagctgaaatgtcacttcaaggagaagtaaatattaaatccaaccatatttcacaagagggtgttatgcataaagaatattgtgtcaaccagaaagatttgaatggccaagcaaaaatgatcgaaagtgtaactgacaatcaaaaatccacagaggaagtagatatgaaaaatatcaacatggataatgatctggaggttttaacatcttctcccactaggaatttaaatggtgcctacctaacggaagggagcaatggagaagtggacatttccaatggtttcaaaaacctaaatttgaatgctgctcttcatcctgatgaaataaatatagagattctgaatgatagtcatactcctggaacaaaggtgtatgaggttgtaaatgaagatccagaaactgctttctgtactcttgcaaacagggaagttttcaatactgatgagtgttcaatccaacattgtttatatcagttcacccgtaatgagaaacttcgagatgcgaataaactgctttgtgaagtatgcacacggagacagtgtaatggaccaaaggcaaatataaaaggtgaaaggaagcatgtttacaccaatgccaaaaagcagatgctaatttctcttgctcctcctgttcttactcttcatttaaagagatttcagcaggctggttttaacctacgcaaagttaacaaacacataaagtttccggaaatcttagatttggctcctttttgcacccttaaatgtaagaatgttgcagaagaaaatacaagggtactctattccttatatggagttgttgaacacagtggtactatgaggtcggggcattacactgcctatgccaaggcaagaaccgcaaatagtcatctctctaatcttgttcttcacggtgatattccacaagattttgaaatggaatcaaaagggcagtggtttcacatcagcgacacacatgtgcaagctgtgcctacaactaaagtactaaactcacaagcgtacctcctattttatgagagaatactgtaataatatcaaaagcactttttctggaaacacatttatggcttttataatggctgaaataacgataaaaaaagactaattaaaatcatgttcacttaacattaaatacatgccagaagaaatcatgtttatttaaatattgaagggaaaaatacctaaaaatgtacaaaggttttatattgtcatagtggtttttattcctgctttgtttctggaaaggaaatcctgaattacttaagtactttgtgtttaatatatctgggtgatggatcacaacacatcaataaactgacttaccctaaaa

SEQ ID NO: 347341 - DNA, 2935 bp, Homo sapiens
tagccacttcccataatgccgcgttccggaagttattgctttccaggggtcactctggcttcgactccgtcgctctcaattcgtcaccaggaggaagacggagctggctgcccagcccaaaggcccatgaggggatgcagttatgggctctgtcgccgtggattgttattttgtgtcagtaagtaatccataaagtgccaacatgggaaagaaacggacaaagggaaaaactgttccaatcgatgattcctctgaaactttagaacctgtgtgcagacacattagaaaaggattggaacaaggtaatttgaaaaaggctttagtgaatgtggaatggaatatctgccaagactgtaagactgacaataaagtgaaagataaagctgaagaagaaacagaagaggctgtggcagaaattctcaggagcagcatgccttgaagcactatctgacgccaagatctgaacctcactgtctggttcttagtttggacaactggagtgtatggtgttacgtatgtgataatgaggtccagtattgtagttcaaaccagttgggtcaagtggttgattatgtcagaaaacaagccagcattacaactccaaagccagcagagaaagataatggaaatattgaacttgaaaataaaaaattagaaaaagagagtaagaatgaacaagagagagaaaagaaggaaaacatggctaaagagaatcctcccatgaattctccttgccaaataaccgtgaaaggactcagtaatttgggaaacacatgtttcttcaatgcagttatgcagaacttgtcacaaacaccagtgcttagagaactactaaaagaagtgaaaatgtctggaacaattgtaaaaattgaaccacctgatttggcattaacagaaccattagaaataaaccttgagcctccaggccctcttactttagccatgagccagtttcttaatgagatgcaagagaccaaaaagggggttgtgacaccgaaagaactcttttctcaggtctgtaaaaaagcagtgcggtttaaaggctatcagcagcaagacagccaggagctgcttcgctacttattggatgggatgagagcagaagaacaccaaagagtgagtaaaggaatacttaaagcatttggtaattctactgaaaagttggatgaagaactaaaaaataaagttaaagattatgagaagaaaaaatcaatgccaagttttgttgaccgcatctttggtggtgaactaactagtatgatcatgtgtgatcaatgcagaactgtctccttggttcatgaatctttccttgatttgtccctcccagttttagatgatcagagtggtaagaaaagtgtaaatgataaaaatctgaaaaagacagtggaggatgaagatcaagatagtgaggaagaaaaagataacgacagttacataaaagagagaagtgatattccttctggaacaagtaagcacttacagaaaaaagcaaagaaacaagccaaaaagcaagccaagaaccaacgaagacaacaaaaaattcaaggaaaagttcttcatttaaatgatatttgtactattgaccatcctgaagacagtgaatatgaagctgaaatgtcacttcaaggagaagtaaatattaaatccaaccatatttcacaagagggtgttatgcataaagaatattgtgtcaaccagaaagatttgaatggccaagcaaaaatgatcgaaagtgtaactgacaatcaaaaatccacagaggaagtagatatgaaaaatatcaacatggataatgatctggaggttttaacatcttctcccactaggaatttaaatggtgcctacctaacggaagggagcaatggagaagtggacatttccaatggtttcaaaaacctaaatttgaatgctgctcttcatcctgatgaaataaatatagagattctgaatgatagtcatactcctggaacaaaggtgtatgaggttgtaaatgaagatccagaaactgctttctgtactcttgcaaacagggaagttttcaatactgatgagtgttcaatccaacattgtttatatcagttcacccgtaatgagaaacttcgagatgcgaataaactgctttgtgaagtatgcacacggagacagtgtaatggaccaaaggcaaatataaaaggtgaaaggaagcatgtttacaccaatgccaaaaagcagatgctaatttctcttgctcctcctgttcttactcttcatttaaagagatttcagcaggctggttttaacctacgcaaagttaacaaacacataaagtttccggaaatcttagatttggctcctttttgcacccttaaatgtaagaatgttgcagaagaaaatacaagggtactctattccttatatggagttgttgaacacagtggtactatgaggtcggggcattacactgcctatgccaaggcaagaaccgcaaatagtcatctctctaatcttgttcttcacggtgatattccacaagattttgaaatggaatcaaaagggcagtggtttcacatcagcgacacacatgtgcaagctgtgcctacaactaaagtactaaactcacaagcgtacctcctattttatgagagaatactgtaataatatcaaaagcactttttctggaaacacatttatggcttttataatggctgaaataacgataaaaaaagactaattaaaatcatgttcacttaacattaaatacatgccagaagaaatcatgtttatttaaatattgaagggaaaaatacctaaaaatgtacaaaggttttatattgtcatagtggtttttattcctgctttgtttctggaaaggaaatcctgaattacttaagtactttgtgtttaatatatctgggtgatggatcacaacacatcaataaactgacttaccctaaaa

SEQ ID NO: 347342 - DNA, 3869 bp, Homo sapiens
tagccacttcccataatgccgcgttccggaagttattgctttccaggggtcactctggcttcgactccgtcgctctcaattcgtcaccaggaggaagacggagctggctgcccagcccaaaggcccatgaggggatgcagttatgggctctgtcgccgtggattgttattttgtgtcagtaagtaatccataaagtgccaacatgggaaagaaacggacaaagggaaaaactgttccaatcgatgattcctctgaaactttagaacctgtgtgcagacacattagaaaaggattggaacaaggtaatttgaaaaaggctttagtgaatgtggaatggaatatctgccaagactgtaagactgacaataaagtgaaagataaagctgaagaagaaacagaagaaaagccttcagtttggctgtgtcttaaatgtggccatcagggctgtggcagaaattctcaggagcagcatgccttgaagcactatctgacgccaagatctgaacctcactgtctggttcttagtttggacaactggagtgtatggtgttacgtatgtgataatgaggtccagtattgtagttcaaaccagttgggtcaagtggttgattatgtcagaaaacaagccagcattacaactccaaagccagcagagaaagataatggaaatattgaacttgaaaataaaaaattagaaaaagagagtaagaatgaacaagagagagaaaagaaggaaaacatggctaaagagaatcctcccatgaattctccttgccaaataaccgtgaaaggactcagtaatttgggaaacacatgtttcttcaatgcagttatgcagaacttgtcacaaacaccagtgcttagagaactactaaaagaagtgaaaatgtctggaacaattgtaaaaattgaaccacctgatttggcattaacagaaccattagaaataaaccttgagcctccaggccctcttactttagccatgagccagtttcttaatgagatgcaagagaccaaaaagggggttgtgacaccgaaagaactcttttctcaggtctgtaaaaaagcagtgcggtttaaaggctatcagcagcaagacagccaggagctgcttcgctacttattggatgggatgagagcagaagaacaccaaagagtgagtaaaggaatacttaaagcatttggtaattctactgaaaagttggatgaagaactaaaaaataaagttaaagattatgagaagaaaaaatcaatgccaagttttgttgaccgcatctttggtggtgaactaactagtatgatcatgtgtgatcaatgcagaactgtctccttggttcatgaatctttccttgatttgtccctcccagttttagatgatcaggtaagactattgaatttattttattcaagtagattttttttcctgtaagattttgtggggggaagccttgttactctttttaagtttgtatattactagcccatgcagaaatttttcttaatttgaggtagaatgcattttaggatttgaataaagaacagggtaactactttaaaaacaaggatggaaaaaaagatgatgtattcagaattctgtacaagtaattagtttgattggtttccatacagtgaagtattttccttatattaaaattaatacttatttttgttatttaagactaatcacgaatcccttgcacacctaagttcataaatgttaaagagtattattttgttttaatttggttccttttaaatagtagtaggaaaaaagaagagatgttatgagtattggataaatcattcttcaacttcatatgaattatgagacccttggcttgttaacttggcaattaaagtctcaccaaattttattttctgtttttctgaaactgtcatatgcatgcaaagaaagaaaagaataaaaaagaatacaccgtggtgacttacataagtcacttagaaaatgtatttggaaatggacgtatttacagtgtgacacagcatgtatctaataaatttcgttatatttctattacacttacatgtgatgttgccttttgctgttttgttggtttgcttgttttctcattatgtgaagattgctttctagtgtatgagataaacgaattttgtctcatctattttcaaatattgtggaaaaaaaaagctaatacataatagaagtagaaaaatatttacatagtgtggattttttttcaccaaatggtagttgtaaaattttgtttttgacctatgttatctatattttaagagtggtaagaaaagtgtaaatgataaaaatctgaaaaagacagtggaggatgaagatcaagatagtgaggaagaaaaagataacgacagttacataaaagagagaagtgatattccttctggaacaagtaagcacttacagaaaaaagcaaagaaacaagccaaaaagcaagccaagaaccaacgaagacaacaaaaaattcaaggaaaagttcttcatttaaatgatatttgtactattgaccatcctgaagacagtgaatatgaagctgaaatgtcacttcaaggagaagtaaatattaaatccaaccatatttcacaagagggtgttatgcataaagaatattgtgtcaaccagaaagatttgaatggccaagcaaaaatgatcgaaagtgtaactgacaatcaaaaatccacagaggaagtagatatgaaaaatatcaacatggataatgatctggaggttttaacatcttctcccactaggaatttaaatggtgcctacctaacggaagggagcaatggagaagtggacatttccaatggtttcaaaaacctaaatttgaatgctgctcttcatcctgatgaaataaatatagagattctgaatgatagtcatactcctggaacaaaggtgtatgaggttgtaaatgaagatccagaaactgctttctgtactcttgcaaacagggaagttttcaatactgatgagtgttcaatccaacattgtttatatcagttcacccgtaatgagaaacttcgagatgcgaataaactgctttgtgaagtatgcacacggagacagtgtaatggaccaaaggcaaatataaaaggtgaaaggaagcatgtttacaccaatgccaaaaagcagatgctaatttctcttgctcctcctgttcttactcttcatttaaagagatttcagcaggctggttttaacctacgcaaagttaacaaacacataaagtttccggaaatcttagatttggctcctttttgcacccttaaatgtaagaatgttgcagaagaaaatacaagggtactctattccttatatggagttgttgaacacagtggtactatgaggtcggggcattacactgcctatgccaaggcaagaaccgcaaatagtcatctctctaatcttgttcttcacggtgatattccacaagattttgaaatggaatcaaaagggcagtggtttcacatcagcgacacacatgtgcaagctgtgcctacaactaaagtactaaactcacaagcgtacctcctattttatgagagaatactgtaataatatcaaaagcactttttctggaaacacatttatggcttttataatggctgaaataacgataaaaaaagactaattaaaatcatgttcacttaacattaaatacatgccagaagaaatcatgtttatttaaatattgaagggaaaaatacctaaaaatgtacaaaggttttatattgtcatagtggtttttattcctgctttgtttctggaaaggaaatcctgaattacttaagtactttgtgtttaatatatctgggtgatggatcacaacacatcaataaactgacttaccctaaaa

SEQ ID NO: 347343 - DNA, 1647 bp, Homo sapiens
tagccacttcccataatgccgcgttccggaagttattgctttccaggggtcactctggcttcgactccgtcgctctcaattcgtcaccaggaggaagacggagctggctgcccagcccaaaggcccatgaggggatgcagttatgggctctgtcgccgtggattgttattttgtgtcagtaagtaatccataaagtgccaacatgggaaagaaacggacaaagggaaaaactgttccaatcgatgattcctctgaaactttagaacctgtgtgcagacacattagaaaaggattggaacaaggtaatttgaaaaaggctttagtgaatgtggaatggaatatctgccaagactgtaagactgacaataaagtgaaagataaagctgaagaagaaacagaagaaaagccttcagtttggctgtgtcttaaatgtggccatcagggctgtggcagaaattctcaggagcagcatgccttgaagcactatctgacgccaagatctgaacctcactgtctggttcttagtttggacaactggagtgtatggtgttacgtatgtgataatgaggtccagtattgtagttcaaaccagttgggtcaagtggttgattatgtcagaaaacaagccagcattacaactccaaagccagcagagaaagataatggaaatattgaacttgaaaataaaaaattagaaaaagagagtaagaatgaacaagagagagaaaagaaggaaaacatggctaaagagaatcctcccatgaattctccttgccaaataaccgtgaaaggactcagtaatttgggaaacacatgtttcttcaatgcagttatgcagaacttgtcacaaacaccagtgcttagagaactactaaaagaagtgaaaatgtctggaacaattgtaaaaattgaaccacctgatttggcattaacagaaccattagaaataaaccttgagcctccaggccctcttactttagccatgagccagtttcttaatgagatgcaagagaccaaaaagggggttgtgacaccgaaagaactcttttctcaggtctgtaaaaaagcagtgcggtttaaaggctatcagcagcaagacagccaggagctgcttcgctacttattggatgggatgagagcagaagaacaccaaagagtgagtaaaggaatacttaaagcatttggtaattctactgaaaagttggatgaagaactaaaaaataaagttaaagattatgagaagaaaaaatcaatgccaagttttgttgaccgcatctttggtggtgaactaactagtatgatcatgtgtgatcaatgcagaactgtctccttggttcatgaatctttccttgatttgtccctcccagttttagatgatcagagtggtaagaaaagtgtaaatgataaaaatctgaaaaagacagtggaggatgaagatcaagatagtgaggaagaaaaagataacgacagttacataaaagagagaagtgatattccttctggaacaagtaagcacttacagaaaaaagcaaagaaacaagccaaaaagcaagccaagccagcagagaaagataatggaaatattgaacttgaaaataaaaaattagaaaaagagagtaaatattgaacttgaaaataaaaaattag

SEQ ID NO: 347344 - DNA, 1525 bp, Homo sapiens
ttcaaacaattggttagttctaaaactaagactcggtggacacggcggctcatgcctataatcccagcactttgggaggcccaggtgggaggatcacttgagcctcagtgagctatgagcttgaggctgcagtgggctatgatggtactactgccctccagcctgggcgacagagtagggccctttatctaaaaacaaaaacaaaaaacttcttaaatctctcctgatgggacgaagatgcgatcagcaaaggctccgaggtgccagaggcatagtgagttctccgatccctggctggtggagggaagctgggaagggcctggctgtccagggtggtgggaggaggctagagtagccagaccagatattttgggttgtctctgatgggagaagactggcgcatcttctcccactaggaatttaaatggtgcctacctaacggaagggagcaatggagaagtggacatttccaatggtttcaaaaacctaaatttgaatgctgctcttcatcctgatgaaataaatatagagattctgaatgatagtcatactcctggaacaaaggtgtatgaggttgtaaatgaagatccagaaactgctttctgtactcttgcaaacagggaagttttcaatactgatgagtgttcaatccaacattgtttatatcagttcacccgtaatgagaaacttcgagatgcgaataaactgctttgtgaagtatgcacacggagacagtgtaatggaccaaaggcaaatataaaaggtgaaaggaagcatgtttacaccaatgccaaaaagcagatgctaatttctcttgctcctcctgttcttactcttcatttaaagagatttcagcaggctggttttaacctacgcaaagttaacaaacacataaagtttccggaaatcttagatttggctcctttttgcacccttaaatgtaagaatgttgcagaagaaaatacaagggtactctattccttatatggagttgttgaacacagtggtactatgaggtcggggcattacactgcctatgccaaggcaagaaccgcaaatagtcatctctctaatcttgttcttcacggtgatattccacaagattttgaaatggaatcaaaagggcagtggtttcacatcagcgacacacatgtgcaagctgtgcctacaactaaagtactaaactcacaagcgtacctcctattttatgagagaatactgtaataatatcaaaagcactttttctggaaacacatttatggcttttataatggctgaaataacgataaaaaaagactaattaaaatcatgttcacttaacattaaatacatgccagaagaaatcatgtttatttaaatattgaagggaaaaatacctaaaaatgtacaaaggttttatattgtcatagtggtttttattcctgctttgtttctggaaaggaaatcctgaattacttaagtactttgtgtttaatatatctgggtgatggatcacaacacatcaataaactgacttaccctaaaa

SEQ ID NO: 347345 - DNA, 1125 bp, Homo sapiens
tagatgagcatttgcaaatgatttgatgtgatggaatatactaaactttcaacctcattaaccaaaatattgtgtctctccacagtaattcaattttgctctgattgtaatcattctcagttattactgtattttgatttcatcagtaagaatttatggacattttaatctcataaatacctataaaatatctttgattttgcctcttactccacaaattctacaatatttgttatctagtacttcatagaaaaagtttactgatccttgctttagatgtttggaatgattttatagcaaatctgaatgctttaggggtctaaaatgattttctccctgttaaaaatttcttcttttctttaggtgaaaggaagcatgtttacaccaatgccaaaaagcagatgctaatttctcttgctcctcctgttcttactcttcatttaaagagatttcagcaggctggttttaacctacgcaaagttaacaaacacataaagtttccggaaatcttagatttggctcctttttgcacccttaaatgtaagaatgttgcagaagaaaatacaagggtactctattccttatatggagttgttgaacacagtggtactatgaggtcggggcattacactgcctatgccaaggcaagaaccgcaaatagtcatctctctaatcttgttcttcacggtgatattccacaagattttgaaatggaatcaaaagggcagtggtttcacatcagcgacacacatgtgcaagctgtgcctacaactaaagtactaaactcacaagcgtacctcctattttatgagagaatactgtaataatatcaaaagcactttttctggaaacacatttatggcttttataatggctgaaataacgataaaaaaagactaattaaaatcatgttcacttaacattaaatacatgccagaagaaatcatgtttatttaaatattgaagggaaaaatacctaaaaatgtacaaaggttttatattgtcatagtggtttttattcctgctttgtttctggaaaggaaatcctgaattacttaagtactttgtgtttaatatatctgggtgatggatcacaacacatcaataaactgacttaccctaaaa

SEQ ID NO: 347346 - DNA, 164 bp, Homo sapiens
tcccgctctttctttttctttattttttgatgccgtatactttttacccagaaccaacgaagacaacaaaaaattcaaggaaaagttcttcatttaaatgatatttgtactattgaccatcctgaagacagtgaatatgaagctgaaatgtcacttcaaggaga

SEQ ID NO: 347347 - DNA, 419 bp, Homo sapiens
aaggctatcagcagcaagacagccaggagctgcttcgctacttattggatgggatgagagcagaagaacaccaagttagcatgttatgaccattgtattttatgatcttatcttcataagctttctgtctcatttgatatcttacgagttaaaacaatgaaagctagttattaaggccatcatactttaaaattttttcttacaccagctttttcaactagtatgttttcaccattagaatgaatccagagaattagcagtaattctctttctcatgatggcttaagtttagttgatgtttacagcattaatgttctttaaagattctgttgtactaacctatacgaagagagctgccaaatattggaaattgtttctcccaaacccaggtgcagcacacccttacttttaattctgag

SEQ ID NO: 347348 - DNA, 488 bp, Homo sapiens
caaaaccaaaaagtaatcaacttgaatctttccatttatgtttgatttttcattttctcatgacagattttgaaatggaatcaaaagggcagtggtttcacatcagcgacacacatgtgcaagctgtgcctacaactaaagtactaaactcacaagcgtacctcctattttatgagagaatactgtaataatatcaaaagcactttttctggaaacacatttatggcttttataatggctgaaataacgataaaaaaagactaattaaaatcatgttcacttaacattaaatacatgccagaagaaatcatgtttatttaaatattgaagggaaaaatacctaaaaatgtacaaaggttttatattgtcatagtggtttttattcctgctttgtttctggaaaggaaatcctgaattacttaagtactttgtgtttaatatatctgggtgatggatcacaacacatcaataaactgacttaccctaaa

SEQ ID NO: 347349 - DNA, 357 bp, Homo sapiens
ttaggtgaaaggaagcatgtttacaccaatgccaaaaagcagatgctaatttctcttgctcctcctgttcttactcttcatttaaagagatttcagcaggtactccttgttacccaaaatttgttttaaatatgtaacacctactttattacctatttttttcattactgtctcaacatactactttgtttctttggttttctgttgtttcttaactgtaatgtcaatgaagtcagaaagggaaaaacataggggctaggcagaggcgcatgtgaagatggaggcacaatctcctcagatttcctagaactcatttatgtccctctttttagtacgattggcatcttacttttattt

SEQ ID NO: 347350 - DNA, 2975 bp, Homo sapiens
tagccacttcccataatgccgcgttccggaagttattgctttccaggggtcactctggcttcgactccgtcgctctcaattcgtcaccaggaggaagacggagctggctgcccagcccaaaggcccatgaggggatgcagttatgggctctgtcgccgtggattgttattttgtgtcagtaagtaatccataaagtgccaacatgggaaagaaacggacaaagggaaaaactgttccaatcgatgattcctctgaaactttagaacctgtgtgcagacacattagaaaaggattggaacaaggtaatttgaaaaaggctttagtgaatgtggaatggaatatctgccaagactgtaagactgacaataaagtgaaagataaagctgaagaagaaacagaagaaaagccttcagtttggctgtgtcttaaatgtggccatcagggctgtggcagaaattctcaggagcagcatgccttgaagcactatctgacgccaagatctgaacctcactgtctggttcttagtttggacaactggagtgtatggtgttacgtatgtgataatgaggtccagtattgtagttcaaaccagttgggtcaagtggttgattatgtcagaaaacaagccagcattacaactccaaagccagcagagaaagataatggaaatattgaacttgaaaataaaaaattagaaaaagagagtaagaatgaacaagagagagaaaagaaggaaaacatggctaaagagaatcctcccatgaattctccttgccaaataaccgtgaaaggactcagtaatttgggaaacacatgtttcttcaatgcagttatgcagaacttgtcacaaacaccagtgcttagagaactactaaaagaagtgaaaatgtctggaacaattgtaaaaattgaaccacctgatttggcattaacagaaccattagaaataaaccttgagcctccaggccctcttactttagccatgagccagtttcttaatgagatgcaagagaccaaaaagggggttgtgacaccgaaagaactcttttctcaggtctgtaaaaaagcagtgcggtttaaaggctatcagcagcaagacagccaggagctgcttcgctacttattggatgggatgagagcagaagaacaccaaagagtgagtaaaggaatacttaaagcatttggtaattctactgaaaagttggatgaagaactaaaaaataaagttaaagattatgagaagaaaaaatcaatgccaagttttgttgaccgcatctttggtggtgaactaactagtatgatcatgtgtgatcaatgcagaactgtctccttggttcatgaatctttccttgatttgtccctcccagttttagatgatcagagtggtaagaaaagtgtaaatgataaaaatctgaaaaagacagtggaggatgaagatcaagatagtgaggaagaaaaagataacgacagttacataaaagagagaagtgatattccttctggaacaagtaagcacttacagaaaaaagcaaagaaacaagccaaaaagcaagccaagaaccaacgaagacaacaaaaaattcaaggaaaagttcttcatttaaatgatatttgtactattgaccatcctgaagacagtgaatatgaagctgaaatgtcacttcaaggagaagtaaatattaaatccaaccatatttcacaagagggtgttatgcataaagaatattgtgtcaaccagaaagatttgaatggccaagcaaaaatgatcgaaagtgtaactgacaatcaaaaatccacagaggaagtagatatgaaaaatatcaacatggataatgatctggaggttttaacatcttctcccactaggaatttaaatggtgcctacctaacggaagggagcaatggagaagtggacatttccaatggtttcaaaaacctaaatttgaatgctgctcttcatcctgatgaaataaatatagagattctgaatgatagtcatactcctggaacaaaggtgtatgaggttgtaaatgaagatccagaaactgctttctgtactcttgcaaacagggaagttttcaatactgatgagtgttcaatccaacattgtttatatcagttcacccgtaatgagaaacttcgagatgcgaataaactgctttgtgaagtatgcacacggagacagtgtaatggaccaaaggcaaatataaaaggtgaaaggaagcatgtttacaccaatgccaaaaagcagatgctaatttctcttgctcctcctgttcttactcttcatttaaagagatttcagcaggctggttttaacctacgcaaagttaacaaacacataaagtttccggaaatcttagatttggctcctttttgcacccttaaatgtaagaatgttgcagaagaaaatacaagggtactctattccttatatggagttgttgaacacagtggtactatgaggtcggggcattacactgcctatgccaaggcaagaaccgcaaatagtcatctctctaatcttgttcttcacggtgatattccacaagattttgaaatggaatcaaaagggcagtggtttcacatcagcgacacacatgtgcaagctgtgcctacaactaaagtactaaactcacaagcgtacctcctattttatgagagaatactgtaataatatcaaaagcactttttctggaaacacatttatggcttttataatggctgaaataacgataaaaaaagactaattaaaatcatgttcacttaacattaaatacatgccagaagaaatcatgtttatttaaatattgaagggaaaaatacctaaaaatgtacaaaggttttatattgtcatagtggtttttattcctgctttgtttctggaaaggaaatcctgaattacttaagtactttgtgtttaatatatctgggtgatggatcacaacacatcaataaactgacttaccctaaaa

SEQ ID NO: 347351 - DNA, 343 bp, Homo sapiens
tagccacttcccataatgccgcgttccggaagttattgctttccaggggtcactctggcttcgactccgtcgctctcaattcgtcaccaggaggaagacggagctggctgcccagcccaaaggcccatgaggggatgcagttatgggctctgtcgccgtggattgttattttgtgtcagtaagtaatccataaagtgccaacatgggaaagaaacggacaaagggaaaaactgttccaatcgatgattcctctgaaactttaggaaacctgtgtgcagacacacttacgaacacgggacttggacaccaaggtacatcttgacacagcacacggctttagtga

SEQ ID NO: 347352 - DNA, 3038 bp, Homo sapiens
tagccacttcccataatgccgcgttccggaagttattgctttccaggggtcactctggcttcgactccgtcgctctcaattcgtcaccaggaggaagacggagctggctgcccagcccaaaggcccatgaggggatgcagttatgggctctgtcgccgtggaacttgtttgcttcattcttatgtacctacctttgcaccttgtaatcatcctttatgcctcagattgttattttgtgtcagtaagtaatccataaagtgccaacatgggaaagaaacggacaaagggaaaaactgttccaatcgatgattcctctgaaactttagaacctgtgtgcagacacattagaaaaggattggaacaaggtaatttgaaaaaggctttagtgaatgtggaatggaatatctgccaagactgtaagactgacaataaagtgaaagataaagctgaagaagaaacagaagaaaagccttcagtttggctgtgtcttaaatgtggccatcagggctgtggcagaaattctcaggagcagcatgccttgaagcactatctgacgccaagatctgaacctcactgtctggttcttagtttggacaactggagtgtatggtgttacgtatgtgataatgaggtccagtattgtagttcaaaccagttgggtcaagtggttgattatgtcagaaaacaagccagcattacaactccaaagccagcagagaaagataatggaaatattgaacttgaaaataaaaaattagaaaaagagagtaagaatgaacaagagagagaaaagaaggaaaacatggctaaagagaatcctcccatgaattctccttgccaaataaccgtgaaaggactcagtaatttgggaaacacatgtttcttcaatgcagttatgcagaacttgtcacaaacaccagtgcttagagaactactaaaagaagtgaaaatgtctggaacaattgtaaaaattgaaccacctgatttggcattaacagaaccattagaaataaaccttgagcctccaggccctcttactttagccatgagccagtttcttaatgagatgcaagagaccaaaaagggggttgtgacaccgaaagaactcttttctcaggtctgtaaaaaagcagtgcggtttaaaggctatcagcagcaagacagccaggagctgcttcgctacttattggatgggatgagagcagaagaacaccaaagagtgagtaaaggaatacttaaagcatttggtaattctactgaaaagttggatgaagaactaaaaaataaagttaaagattatgagaagaaaaaatcaatgccaagttttgttgaccgcatctttggtggtgaactaactagtatgatcatgtgtgatcaatgcagaactgtctccttggttcatgaatctttccttgatttgtccctcccagttttagatgatcagagtggtaagaaaagtgtaaatgataaaaatctgaaaaagacagtggaggatgaagatcaagatagtgaggaagaaaaagataacgacagttacataaaagagagaagtgatattccttctggaacaagtaagcacttacagaaaaaagcaaagaaacaagccaaaaagcaagccaagaaccaacgaagacaacaaaaaattcaaggaaaagttcttcatttaaatgatatttgtactattgaccatcctgaagacagtgaatatgaagctgaaatgtcacttcaaggagaagtaaatattaaatccaaccatatttcacaagagggtgttatgcataaagaatattgtgtcaaccagaaagatttgaatggccaagcaaaaatgatcgaaagtgtaactgacaatcaaaaatccacagaggaagtagatatgaaaaatatcaacatggataatgatctggaggttttaacatcttctcccactaggaatttaaatggtgcctacctaacggaagggagcaatggagaagtggacatttccaatggtttcaaaaacctaaatttgaatgctgctcttcatcctgatgaaataaatatagagattctgaatgatagtcatactcctggaacaaaggtgtatgaggttgtaaatgaagatccagaaactgctttctgtactcttgcaaacagggaagttttcaatactgatgagtgttcaatccaacattgtttatatcagttcacccgtaatgagaaacttcgagatgcgaataaactgctttgtgaagtatgcacacggagacagtgtaatggaccaaaggcaaatataaaaggtgaaaggaagcatgtttacaccaatgccaaaaagcagatgctaatttctcttgctcctcctgttcttactcttcatttaaagagatttcagcaggctggttttaacctacgcaaagttaacaaacacataaagtttccggaaatcttagatttggctcctttttgcacccttaaatgtaagaatgttgcagaagaaaatacaagggtactctattccttatatggagttgttgaacacagtggtactatgaggtcggggcattacactgcctatgccaaggcaagaaccgcaaatagtcatctctctaatcttgttcttcacggtgatattccacaagattttgaaatggaatcaaaagggcagtggtttcacatcagcgacacacatgtgcaagctgtgcctacaactaaagtactaaactcacaagcgtacctcctattttatgagagaatactgtaataatatcaaaagcactttttctggaaacacatttatggcttttataatggctgaaataacgataaaaaaagactaattaaaatcatgttcacttaacattaaatacatgccagaagaaatcatgtttatttaaatattgaagggaaaaatacctaaaaatgtacaaaggttttatattgtcatagtggtttttattcctgctttgtttctggaaaggaaatcctgaattacttaagtactttgtgtttaatatatctgggtgatggatcacaacacatcaataaactgacttaccctaaaa

SEQ ID NO: 347353 - DNA, 3169 bp, Homo sapiens
tagccacttcccataatgccgcgttccggaagttattgctttccaggggtcactctggcttcgactccgtcgctctcaattcgtcaccaggaggaagacggagctggctgcccagcccaaaggcccatgaggggatgcagttatgggctctgtcgccgtggattgttattttgtgtcagtaagtaatccataaagtgccaacatgggaaagaaacggacaaagggaaaaactgttccaatcgatgattcctctgaaactttagaacctgtgtgcagacacattagaaaaggattggaacaaggtaatttgaaaaaggctttagtgaatgtggaatggaatatctgccaagactgtaagactgacaataaagtgaaagataaagctgaagaagaaacagaagaaaagccttcagtttggctgtgtcttaaatgtggccatcagggctgtggcagaaattctcaggagcagcatgccttgaagcactatctgacgccaagatctgaacctcactgtctggttcttagtttggacaactggagtgtatggtgttacgtatgtgataatgaggtccagtattgtagttcaaaccagttgggtcaagtggttgattatgtcagaaaacaagccagcattacaactccaaagccagcagagaaagataatggaaatattgaacttgaaaataaaaaattagaaaaagagagtaagaatgaacaagagagagaaaagaaggaaaacatggctaaagagaatcctcccatgaattctccttgccaaataaccgtgaaaggactcagtaatttgggaaacacatgtttcttcaatgcagttatgcagaacttgtcacaaacaccagtgcttagagaactactaaaagaagtgaaaatgtctggaacaattgtaaaaattgaaccacctgatttggcattaacagaaccattagaaataaaccttgagcctccaggccctcttactttagccatgagccagtttcttaatgagatgcaagagaccaaaaagggggttgtgacaccgaaagaactcttttctcaggtctgtaaaaaagcagtgcggtttaaaggctatcagcagcaagacagccaggagctgcttcgctacttattggatgggatgagagcagaagaacaccaaagagtgagtaaaggaatacttaaagcatttggtaattctactgaaaagttggatgaagaactaaaaaataaagttaaagattatgagaagaaaaaatcaatgccaagttttgttgaccgcatctttggtggtgaactaactagtatgatcatgtgtgatcaatgcagaactgtctccttggttcatgaatctttccttgatttgtccctcccagttttagatgatcagagtggtaagaaaagtgtaaatgataaaaatctgaaaaagacagtggaggatgaagatcaagatagtgaggaagaaaaagataacgacagttacataaaagagagaagtgatattccttctggaacaagtaagcacttacagaaaaaagcaaagaaacaagccaaaaagcaagccaagaaccaacgaagacaacaaaaaattcaaggaaaagttcttcatttaaatgatatttgtactattgaccatcctgaagacagtgaatatgaagctgaaatgtcacttcaaggagaagtaaatattaaatccaaccatatttcacaagagggtgttatgcataaagaatattgtgtcaaccagaaagatttgaatggccaagcaaaaatgatcgaaagtgtaactgacaatcaaaaatccacagaggaagtagatatgaaaaatatcaacatggataatgatctggaggttttaacatcttctcccactaggaatttaaatggtgcctacctaacggaagggagcaatggagaagtggacatttccaatggtttcaaaaacctaaatttgaatgctgctcttcatcctgatgaaataaatatagagattctgaatgatagtcatactcctggaacaaaggtgtatgaggttgtaaatgaagatccagaaactgctttctgtactcttgcaaacagggaagttttcaatactgatgagtgttcaatccaacattgtttatatcagttcacccgtaatgagaaacttcgagatgcgaataaactgctttgtgaagtatgcacacggagacagtgtaatggaccaaaggcaaatataaaaggtgaaaggaagcatgtttacaccaatgccaaaaagcagatgctaatttctcttgctcctcctgttcttactcttcatttaaagagatttcagcaggctggttttaacctacgcaaagttaacaaacacataaagtttccggaaatcttagatttggctcctttttgcacccttaaatgtaagaatgttgcagaagaaaatacaagggtactctattccttatatggagttgttgaacacagtggtactatgaggtcggggcattacactgcctatgccaaggcaagaaccgcaaatagtcatctctctaatcttgttcttcacggtgatattccacaagattttgaaatggaatcaaaagggcagtggtttcacatcagcgacacacatgtgcaagctgtgcctacaactaaagtactaaactcacaagcgtacctcctattttatgagagaatactgtaataatatcaaaagcactttttctggaaacacatttatggcttttataatggctgaaataacgataaaaaaagactaattaaaatcatgttcacttaacattaaatacatgccagaagaaatcatgtttatttaaatattgaagggaaaaatacctaaaaatgtacaaaggttttatattgtcatagtggtttttattcctgctttgtttctggaaaggaaatcctgaattacttaagtactttgtgtttaatatatctgggtgatggatcacaacacatcaataaactgacttaccctaaaaaaaaaaaaaaaaaaaaaaaacacaaaacaacaaaaaaaaaaacaaacccaaaaaaaaaaacaaaacacaacaaaaaaaagttttggggggcgcgcgcccccaaaaaaatttttcaaaccccctttgttgtggggggccggcccaatttttattacacctgtgtcaaatggttcccaaaaaacccgggcacacag

SEQ ID NO: 347354 - DNA, 816 bp, Homo sapiens
tagccacttcccataatgccgcgttccggaagttattgctttccaggggtcactctggcttcgactccgtcgctctcaattcgtcaccaggaggaagacggagctggctgcccagcccaaaggcccatgaggggatgcagttatgggctctgtcgccgtgggtgagttctggtcccactgcctggcagtcgtcgctcgcctggctttctgcgctgggagagctcctgttttccgccccaacttcgttctcttcttgaaggccgctctccttaagcacgtaacccggctactttccggtactgcgatctcattggctgcatgttctgtcagttccagaagctggccaatgagatgccgctgctggcggccttctcgaccccgtggacccagaggttcccccgtgggatcggagcagttagaaggggaggagagggaaggtgtggcaggcgccgagcaaatgggtgggtggcgcgtggcagggacttccctatgggttggagctggatttgcagccgtgttcatacggctggtaggaaaagcaggatctgtcacttatccaattgactatatctaggaggggattgatatacgcaaaacttgaaagccacgttaacacctgctgacaaagttttccacacgcttacatttttaatggaaccgagtaggcaggggaagactgggagggcagagagtgaagagacttggaataatatgagaaccggcaagactatctttgatttagattttgtatggagtcctgcgaagagtcatttcactaagacgttaatgctcatccgatgacactacttgaaaagt

SEQ ID NO: 347355 - DNA, 703 bp, Homo sapiens
ctcacacgatcacttaagtttaggagttcaagaccagtctgagaaacatagcaagacctcgctcctatctactaaataaataaataataaacattagccaggcatggtggcacatgcttgtagttcagctactcaggaggctgaagccggaggatcacttgagcccaggaggttgaggctgcagtgagccatgactgtgccactgcactctagcctaggcatgagcaagaccctgtctcaatcaatcaatcaatcaataaagcattttgtatttgtctctctgctctccctatgctgactagaagcatgacactctccctcttggtacagcactgaggccgtcagtcaccagaatctggtgactcctctatcctcagctcctctgttactcgtctgatctacagtcctttaatccatcatctctgtctggcgcgggttgtttcccaagcctcccagttgcttggccagctttggcactcctacccctatcctctttctcaactagcagccagagttttcctattaaaagctaagccaggtcaagtcactcttggcgctggagtggcttcccatctcgttcagagtgaaagctggtgttcacagtagcctacaaggccctgagtgctctgacctgtcttcttctctgatcctctggagtctttctcctgacagcttgctgggtgggtgggggttgcttccctcc

SEQ ID NO: 347356 - DNA, 272 bp, Homo sapiens
ttgagccactgggcacaaggcagttgggtattccttttgattagcttttgttagctcaggaggaagcctttcatcacttccccctttgggggctcagcttcctcaccaggcattctgggccttcactctctccctctgtactcccttctttgacaaaggtttccttttcctgttcccttagctttgtcctttttgcactttctgtaatcccaccagcagcagtgttcccttttgtttggaaataaggacgagaaagaaagggaggtggagaa

SEQ ID NO: 347357 - DNA, 1290 bp, Homo sapiens
ggcatggcagcagcatctggtggggttctgtgctacattaccccatggtggaagggcagagggcagagggcagaagaggaaaggcagaagagaaagacagcatgggagacagcaagaaaatggaggccaaaacttatccttttatcaggaatccactcccacacatgtttgtaaacaatgccatcaggaataaaagtgtttgaagctgaagctgggtcttccatccaaatgtggaaagcgtgccagaggactgtctttcccattcccgccccacctgcacagccatagacaaagctcagctccgggataagaggaaaaagcactgcctggacctgtccaccagcaagcggacattgctttgcataaacaggcagaggggcaggcacctcaagggactcgcagaagtgcctgggtatttttaaatacttgaggagaacacaaggatgcctgtcggacatctcaggaactgctagctccagcaaaattcactgcaggataggccaggtgatgctgtggtgacaaacaacttcccaaattgctgcaattcacatacaaagtttcctgctcactcacgtaatatgccgtccaagatctgcagggattctgcttcaagctgtctgcattcttactctgggactctgagatgtgggttgatggaacagctaccatctgaaacattgtcagtgatgatgacacaggaaagagtgtgaagcaaaggttctcctggccctcaaagccttcacctataagtgatactctttcctgcttgcatttcgttacccatatgagatatatgaataagccaaattgcaaagaggtcttgggtgttggagaacaatagcacagccagcccagcacacacaccctgttacacattgtattctgtgcttcacactggagctagagccagacttggtcttacctccacaggtctacagtctagtgaaaatacaaacaagagacccctctgtgctgagattccctgcctgcctggtgggtgggcagagccagcagaaggatgtcactatgacaagtagcccagcccaggaaacctctttgtccccactggcctgagattcccatcctactccaagagacactccatagcccaacctgggagaacctgttccgtccctcaaacagcaccagcagggagtgggattcccagccctcatagataaacaaagaccaaagtctctgaaatataactgatttaaaaccacagcccacaaaagtaatccaggacctgagtgcttaacctaaacagagtgactgccagctaaaataaaa

SEQ ID NO: 347358 - DNA, 430 bp, Homo sapiens
agaatgctggtccctgtggctcagcacaacaggtgtctgcctcacaggaaatccttgccttttaggcatctttcaacatatgccattgttaaaatcctgtttcttcaagttttacaattcgtatgttgtaatttgaacagctcagcttccatgctcattagatcatatattatgtgtattttatacattcattccttaggacttacttctattatatataatttatatattacataatatataacatgtaatacatgaataatagtagatcttgtgtcttcagggaaaagagtatcttcttttactcaaaggctgggagaatgttacatccattatcacatagtttaccattctcaaaagaatggggcttctgtatttaaaaatatctttacattttattttattcttttttagagatagagtgtcactc

SEQ ID NO: 347359 - DNA, 909 bp, Homo sapiens
cacttaatcctcacaatactataaggtagacattattatcttcattttcaaaaagtgaaactgaggtaaaatatcccatgactagtaagtgatgaagttaggatttcaatccaggcagtctgattccagagcccatcttcttactcacaaatgaagattgttatacatttatgtatttttttccatgaatattttctgatcatgtactcatggtgcctagtataggagctggggatagagtaggcagcaatcagaatctctgctaccatggagcttatatttctagtcaggggaaataggaaataaataagtatttatatgaagtggtaataagtgctgtggagagaagtaatgcaagtaaagaggataaggatgttggggagagagttgctattttctgttgggcagttagggaagaactcactaataaggtgacatttgagcagagaattgagagagtaagccttgagagcatcttgaagaagtgttcactcttctactgttcaactagttgtgtaaaccactagtggtcctctagtatccattgtctcctttctttatgtaaagaacctctaaattttctgttggcatatgaccactgaaaatgaagattagattttgtagctttccttacagctaggcttggtcatgtgattgatgtgtgcagttgccaggctgtgcccttaaaagaaagggtatgccttctcctttccttttccctccatctcactagttgggatgggacgtggcacacatggtggtaaattattttggaccttaaagatgaggactacttccttggagaaggcagaacaactgaaggctaccgtggtagcctcagagtacttatatttggatggttatgtgagagaaaaaaataaactatcatgtttaagccatgatattttg

SEQ ID NO: 347360 - DNA, 82 bp, Homo sapiens
ttttgttgtttgtttgttcttaacaacatggcctaaagttgtttggtaagttcattctggatctagagattgattcaccagt

SEQ ID NO: 347361 - DNA, 270 bp, Homo sapiens
ataatatgggcaaaacctcagctgaatacttgatgagctgaccgtattattaacaaagtactgccagatgttaagttttaagacctatatgtgggtaacctctgaaagttgtctgcaccacagccttgaacttttctactgaatgtaaagagtaaagtccatcatgaagacaggaaaatggaaatcaaagctccctcctgatacttggcacccaaaggctccacaaatctgtcaatccaagtaacttttactttgcaagcaacagggtgt

SEQ ID NO: 347362 - DNA, 380 bp, Homo sapiens
aagctcaagtgcagtgttgtggtcatagctcactgtaacctcaaactccttggctcaagcagtcttccctgtttagcctcctgagtagctgggactacaggcatgtaccaccacacctggctaactttttaatttttctgtaaagatgagatcttgccatgttgcctaggctgatcttgaattcctggccccaagtgatgctcctgtctcagcttcccaaagggattacaggcttgagccatcacacctggcttctcttgatattttttgaacttgtgatattttgtgaatatatatgcctttgcaaacatgcatgtctatttttctgttaaaatatgttattttacaaaaaacattataaccaaattattggaaatgca

SEQ ID NO: 347363 - DNA, 273 bp, Homo sapiens
tgcttaatgttatatttttatttttcagtattttcataaagttgctggccagcttttacctcttgcatataatctgttgaagaggaatctgtttgcagaaattatgaaggatcatctggcaaacagaagaaaagagaacatagaccaatttgctgcatgagtaaggtggtttgtttggtgtataatatttcaaaggactagtattaaacttgtaatttttgttttgtttttaaggaatacaaaaaaataaacatttactaaaaacgttaaaaa

SEQ ID NO: 347364 - DNA, 937 bp, Homo sapiens
attcggctggcgctgcagctgcagaatggtgggcggtggctggaagcgcaggcccggcgcgggggcggggccgcagatactgccagaaaggctgtgggggctacgcaggtggctttggatgacagccagggtaccaggaggcagcgcgtttcattcatgcagtgactattaagcttgctgtgtgtccggggtctgcggtttgctgcggggaccctgcccaggtcgctgtttcgcgctctgtaggggattggaccagtgtgaaaaaacagttgatgtgaagaaaagtaaattctgtgaagctgatgtctccagtgaccttcgaaaagaagtagaaaatcattatacgctctctttacctgaagatttctatcacttctggaagttctgtgaagaacttgattctgaaaaaccagctgggattctcctgatgaacttcctgtatatgttggtataaatgaagcaaagaaaaattgtataattgttccaaatggagataatgtatttgctgcagtcaactgacctcaagagaatttgcaagacaatagttgaggctgcaagtgatgatgagagacgaaaagcttttgctcccattcaggaaatgatgacttttgtgcagtttgctaatgatgaatgtgattatggtatggggcttgagttgggaatggacctcttttgctatggctcacattattttcataaagttgctggccagcttttacctcttgcatataatctgttgaagaggaatctgtttgcagaaattatgaaggatcatctggcaaacagaagaaaagagaacatagaccaatttgctgcatgagtaaggtggtttgtttggtgtataatatttcaaaggactagtattaaacttgtaatttttgttttgtttttaaggaatacaaaaaaataaacatttactaaaaacgttaaaaaggtt

SEQ ID NO: 347365 - DNA, 1285 bp, Homo sapiens
attcggctggcgctgcagctgcagaatggtgggcggtggctggaagcgcaggcccggcgcgggggcggggccgcagatactgccagaaaggctgtgggggctacgcaggtggctttggatgacagccagggtaccaggaggcagcgcgtttcattcatgcagtgactattaagcttgctgtgtgtccggggtctgcggtttgctgcggggaccctgcccaggtcgctgtttcgcgctctgtaggggattggaccagtgtgaaaaaacagttgatgtgaagaaaagtaaattctgtgaagctgatgtctccagtgaccttcgaaaagaagtagaaaatcattatacgctctctttacctgaagatttctatcacttctggaagttctgtgaagaacttgattctgaaaaaccagctgagatccactttctgcaagccttggacttcaattagttgatccttataatatccttgctggaaaacataaaatgaagaaaaaatcaacagtcccgaattttaaccttcattggaggttttactatgatcctcctgagttccagaccattattattagagataaactcagtgccacatggggtatttcagggattctcctgatgaacttcctgtatatgttggtataaatgaagcaaagaaaaattgtataattgttccaaatggagataatgtatttgctgcagtcaactcctcctccctgccccagctgtttcttttttcatgtggatactggaaaaaatgtagcctgtattatattacacttggacaggctgatctgtcctatatctcctctttgaagccagaggcaattagtctctgatgggaccagtgtgggctctagctactgctgacctcaagagaatttgcaagacaatagttgaggctgcaagtgatgatgagagacgaaaagcttttgctcccattcaggaaatgatgacttttgtgcagtttgctaatgatgaatgtgattatggtatggggcttgagttgggaatggacctcttttgctatggctcacattattttcataaagttgctggccagcttttacctcttgcatataatctgttgaagaggaatctgtttgcagaaattatgaaggatcatctggcaaacagaagaaaagagaacatagaccaatttgctgcatgagtaaggtggtttgtttggtgtataatatttcaaaggactagtattaaacttgtaatttttgttttgtttttaaggaatacaaaaaaataaacatttactaaaaacgttaaaaaggtt

SEQ ID NO: 347366 - DNA, 928 bp, Homo sapiens
tgcagtcatggaataaggccataccctgtgggtagggtataaaggtttccctctatatagtaggtgttcttattatcagtcattcaaagaaaaagagaatcctcaccagaaaatcttggaacatagaacagatggaaggtggcacttctggatatgcctttttacatctgaacttggaagagttaagaattgttgaaggcccttctcactgatcaggggaaatagcttctgtcacagagctgcctactccaggagaaccaaaaatgaaagtaaacactcatattttgtaagtctgttcctcaacttccatcaatcaagtttaatctaaatcaaggattcaaactgagaagcatttaaggaccaagaaaaagttaattagcccagtataagtcaacaagaaatggtaagcagtatggaggaaaagaagtgccacacccttctaggcatccaaattcaagcatttacaatgtacttcatgaagcagtaccctatacagcactaataacagcccaaacttgcttgacatttctacataacacattattcattaattcagaagaaaaatagaattcttaaaactcctaactttatttttaattaatataaaggaggaaccaacaacaacaaaaaattgtgtgggagttagaaaataaggactaggcgcctgggcgcggtggctcacgcctgtaatcccagcactttgggaggccgcggtgggcagaacacgaggtcaggagattgaggccatcctggctaacacggtgaaaccccgtctttactaaaaaatagaaaaaattagctgggcgtggtggcgggcgcctgtagtcgcagctactctggaggcttgaggcaggagaatggcgtgaacctgggaggcggagcttgcagtgagccaagatcgcgccactacactccagcctgggcgaca

SEQ ID NO: 347367 - DNA, 2897 bp, Homo sapiens
tgggcgtcgtaggggagaggaggggcggggccgctccgctgcaacagcaaagttttgagcaaagccttagcgactcgcagcgccggtcccgcagtttcacctcttttttttttaactccgccagaggaccccgacccacaggtcccggttgctccgctggtcaaagtgcgtgcggagtagttggcaaagttgagagcggagacgtctctgggaacagctgtttgcgttccgggcggaggcggcgcgctgagctccttggccttgagccagcgagcctagaaggaggatggaggttttgggccccaggggaggacacagagacggcgggatggcgcagggacttgaggcttgagatcccgtccttcagctcaggtcccgtcgcgcttttaccccttcccggtgacctcaacccctttataccgaccccacctctttggagccgggagtaccgcccctgtagggggaggggagaggaggcgatttcgaacgcggattggatcgtctgggcacccgtagttgggaacagcggaacgctggtcccggggactgagtaaggtgtctggatcggagggaggttcgggtgggcatcgggcggctggaagagctcgactcgtcccgctgggaaagcgcgagtctgagtggaaccctggacgacttgcagagcggctggcgcagtcatggcggactactggaagtcacagccaaagaaattctgtgattactgcaagtgctggatagcagacaataggcctagtgttgaatttcatgaaagaggaaagaatcataaggaaaatgtggcaaaaaggatcagtgagattaaacagaaaagcctggataaggcaaaggaagaagaaaaggcatcaaaggagtttgctgcaatggaggcagctgccctgaaagcataccaagaggatttgaaaagacttggcttagagtcagaaattttggagccaagcataacaccagtaaccagcactatcccacctacctcgacatcaaatcaacagaaagaaaagaaagaaaagaagaaaagaaaaaaagatccttcaaagggcagatgggtagaaggcataacctctgagggttaccattactattatgatcttatctcaggagcatctcagtgggagaaacctgaaggatttcaaggagacttaaaaaagacagcagtgaagaccgtttgggtagaaggtttaagtgaagatggttttacctattactataatacagaaacaggagaatccagatgggagaaacctgatgatttcattccacacactagtgatctgccttctagtaaggtcaatgaaaattcacttggcaccctagatgaatccaaatcatcagattcgcatagtgattctgatggggaacaggaagcagaagaaggaggggtctctacagagacagaaaagccaaaaataaagtttaaggaaaaaaataaaaatagtgatggaggaagtgacccagaaacacagaaagaaaaaagtattcagaaacagaattcattaggttcaaatgaagaaaaatcgaaaactcttaagaaatcaaacccatatggagaatggcaagaaattaaacaagaggttgagtctcatgaggaggtagatttggaacttccaagcactgaaaatgagtatgtatcaacttcagaagctgatggtggcggagaacccaaagtggtatttaaagaaaaaacagtcacttctcttggagttatggcagatggagtggccccagtcttcaaaaagagaagaactgaaaatggaaaatctagaaatttaaggcaacgaggtgatgatcaatagttgcaggagagctttttgtacatgcttttaggacagaatggagacttatacacccaaagtttatctgtgtttgtttgtaagtattatgatgctaaaaatttagatttattctaaatgtatttgatgtgaattaaaataaatattttttcatgtgaaatttattttggttcctaaaatggaagcctaccacattgcattgtaatacagtgtattatgttcagtgtctaaaaactgctaattaagtcataatttaagatgctatgtatctgttatttaaaacatggagaaacagggcctttattccattcatattcataagagcatatttatcctgcattgaaaatgcattacttttgcacattgatattaactgttgtccaacaaataagtatcggagtacgtgagaatattcccagcccagtgatgatttggttctgaggctgatgtgagaaagctgatgtaaaaaatgtatgcatattggcttaccttactcaatttaaagtcaaaagccaacagccaggagcagctcaggtacttcagatgtgcttaatatggagtgaaaactggaccagaggtggaaagatgtatttgccccagttcacttcaaagcagcaaacgttgtttaagcattttagtttgaaccaggcattgtgttaggaatccagggataaagatgaatgaaatgtatttctgttcttcaggagttcacattctagcatatgccttttttcccccagtcatgcactctttttagcagtcttatatgtactagaaaagattttttaaagtttatttaaagctgtgtagatgaaggcttgatctaaaatagtataaggtctccagcttcagtaaaagtttttagtgtttacttaaattagtaatttctcactttctgtctggttaaaatgtcttaaaaagtagaattttcttctttaatccgtttagtagttacctcccttttacttttcaaattcacaaaattacatttctcataaattgtatagtatttaacttataatagttaatatttgtctttttaagatgactgtacatgtaagaaaaaagcttattaaaaacttgatcaaagaa

SEQ ID NO: 347368 - DNA, 1191 bp, Homo sapiens
taacaatcttactgtaatgactattatcattaggatcataattacctttggactatgtagaaatattaatccgttagagtttgcactgagctttaagtgacatgcatattgtagtttagcaatgaagatatcataaatgattatgtactagcaattagaagtctttctcaaatttacttataaactgttatttcatttctcccttccaatgcttattgcttgcctctctttttcagcatcctactttatatactcttcctctccatgatacatgtttttaatttctgcatactagttgttcctcttctgagttcttattcagtttatctctcactctcccttgccccaagatatcaaaaggcctttgaaacttatcagacctgaattctgtgaaacctttatgagaagccctgcctggctctaaaattcctgtggaagttccagtaacttctaatccctcgttctgtcctttcttcttggttacgtagcattcacatatattgtctgcacagtactgggatgtatgttctgttttatttttcaaatatgttttaaattgtagacctgtagtgttttgtacataatgactgtaaattttgtccaaattttttggaaagtatttttttaaagcaaaaagattttataaatgcaatatattttgctttaagcatctcagtgggagaaacctgaaggatttcaaggagacttaaaaaaggtaattgaagcatattaatagtgtttttgttttattctttacagtgattcgtttcttaggtttttgtagagttttgctaagcaactttatttacaaatactccactccctccacccccaaactgtgtccttttttttcccataatgcttttgttagaaggctggatggagatgaaatagtgatatctggctgggtgcagtggctcatgcctgtaatcccagcactttgggaggctgaggcatgtggatcacaaggtcaggagttaaagaccagcctggccaagatggtgaaaccctatctctcctaaaaactacaaaaaaattagccaggcgcagtcgcagttgcctgtaatcccagctactcaggaggctgagtcaggggaatcactgggacctggggcggcagaggttaacagtgagccgagattgcaccaccgcactccagcctggataacaaagtaagactccgtctcaaaa

SEQ ID NO: 347369 - DNA, 2252 bp, Homo sapiens
ggggtagaaatgttaccccgctgaacgccctgggggcggactactggaagtcacagccaaagaaattctgtgattactgcaagtgctggatagcagacaataggcctagtgttgaatttcatgaaagaggaaagaatcataaggaaaatgtggcaaaaaggatcagtgagattaaacagaaaagcctggataaggcaaaggaagaagaaaaggcatcaaaggagtttgctgcaatggaggcagctgccctgaaagcataccaagaggatttgaaaagacttggcttagagtcagaaattttggagccaagcataacaccagtaaccagcactatcccacctacctcgacatcaaatcaacagaaagaaaagaaagaaaagaagaaaagaaaaaaagatccttcaaagggcagatgggtagaaggcataacctctgagggttaccattactattatgatcttatctcaggagcatctcagtgggagaaacctgaaggatttcaaggagacttaaaaaagacagcagtgaagaccgtttgggtagaaggtttaagtgaagatggttttacctattactataatacagaaacaggagaatccagatgggagaaacctgatgatttcattccacacactagtgatctgccttctagtaaggtcaatgaaaattcacttggcaccctagatgaatccaaatcatcagattcgcatagtgattctgatggggaacaggaagcagaagaaggaggggtctctacagagacagaaaagccaaaaataaagtttaaggaaaaaaataaaaatagtgatggaggaagtgacccagaaacacagaaagaaaaaagtattcagaaacagaattcattaggttcaaatgaagaaaaatcgaaaactcttaagaaatcaaacccatatggagaatggcaagaaattaaacaagaggttgagtctcatgaggaggtagatttggaacttccaagcactgaaaatgagtatgtatcaacttcagaagctgatggtggcggagaacccaaagtggtatttaaagaaaaaacagtcacttctcttggagttatggcagatggagtggccccagtcttcaaaaagagaagaactgaaaatggaaaatctagaaatttaaggcaacgaggtgatgatcaatagttgcaggagagctttttgtacatgcttttaggacagaatggagacttatacacccaaagtttatctgtgtttgtttgtaagtattatgatgctaaaaatttagatttattctaaatgtatttgatgtgaattaaaataaatattttttcatgtgaaatttattttggttcctaaaatggaagcctaccacattgcattgtaatacagtgtattatgttcagtgtctaaaaactgctaattaagtcataatttaagatgctatgtatctgttatttaaaacatggagaaacagggcctttattccattcatattcataagagcatatttatcctgcattgaaaatgcattacttttgcacattgatattaactgttgtccaacaaataagtatcggagtacgtgagaatattcccagcccagtgatgatttggttctgaggctgatgtgagaaagctgatgtaaaaaatgtatgcatattggcttaccttactcaatttaaagtcaaaagccaacagccaggagcagctcaggtacttcagatgtgcttaatatggagtgaaaactggaccagaggtggaaagatgtatttgccccagttcacttcaaagcagcaaacgttgtttaagcattttagtttgaaccaggcattgtgttaggaatccagggataaagatgaatgaaatgtatttctgttcttcaggagttcacattctagcatatgccttttttcccccagtcatgcactctttttagcagtcttatatgtactagaaaagattttttaaagtttatttaaagctgtgtagatgaaggcttgatctaaaatagtataaggtctccagcttcagtaaaagtttttagtgtttacttaaattagtaatttctcactttctgtctggttaaaatgtcttaaaaagtagaattttcttctttaatccgtttagtagttacctcccttttacttttcaaattcacaaaattacatttctcataaattgtatagtatttaacttataatagttaatatttgtctttttaagatgactgtacatgtaagaaaaaagcttattaaaaacttgatcaaagaa

SEQ ID NO: 347370 - DNA, 2449 bp, Homo sapiens
taacaatcttactgtaatgactattatcattaggatcataattacctttggactatgtagaaatattaatccgttagagtttgcactgagctttaagtgacatgcatattgtagtttagcaatgaagatatcataaatgattatgtactagcaattagaagtctttctcaaatttacttataaactgttatttcatttctcccttccaatgcttattgcttgcctctctttttcagcatcctactttatatactcttcctctccatgatacatgtttttaatttctgcatactagttgttcctcttctgagttcttattcagtttatctctcactctcccttgccccaagatatcaaaaggcctttgaaacttatcagacctgaattctgtgaaacctttatgagaagccctgcctggctctaaaattcctgtggaagttccagtaacttctaatccctcgttctgtcctttcttcttggttacgtagcattcacatatattgtctgcacagtactgggatgtatgttctgttttatttttcaaatatgttttaaattgtagacctgtagtgttttgtacataatgactgtaaattttgtccaaattttttggaaagtatttttttaaagcaaaaagattttataaatgcaatatattttgctttaagcatctcagtgggagaaacctgaaggatttcaaggagacttaaaaaagacagcagtgaagaccgtttgggtagaaggtttaagtgaagatggttttacctattactataatacagaaacaggagaatccagatgggagaaacctgatgatttcattccacacactagtgatctgccttctagtaaggtcaatgaaaattcacttggcaccctagatgaatccaaatcatcagattcgcatagtgattctgatggggaacaggaagcagaagaaggaggggtctctacagagacagaaaagccaaaaataaagtttaaggaaaaaaataaaaatagtgatggaggaagtgacccagaaacacagaaagaaaaaagtattcagaaacagaattcattaggttcaaatgaagaaaaatcgaaaactcttaagaaatcaaacccatatggagaatggcaagaaattaaacaagaggttgagtctcatgaggaggtagatttggaacttccaagcactgaaaatgagtatgtatcaacttcagaagctgatggtggcggagaacccaaagtggtatttaaagaaaaaacagtcacttctcttggagttatggcagatggagtggccccagtcttcaaaaagagaagaactgaaaatggaaaatctagaaatttaaggcaacgaggtgatgatcaatagttgcaggagagctttttgtacatgcttttaggacagaatggagacttatacacccaaagtttatctgtgtttgtttgtaagtattatgatgctaaaaatttagatttattctaaatgtatttgatgtgaattaaaataaatattttttcatgtgaaatttattttggttcctaaaatggaagcctaccacattgcattgtaatacagtgtattatgttcagtgtctaaaaactgctaattaagtcataatttaagatgctatgtatctgttatttaaaacatggagaaacagggcctttattccattcatattcataagagcatatttatcctgcattgaaaatgcattacttttgcacattgatattaactgttgtccaacaaataagtatcggagtacgtgagaatattcccagcccagtgatgatttggttctgaggctgatgtgagaaagctgatgtaaaaaatgtatgcatattggcttaccttactcaatttaaagtcaaaagccaacagccaggagcagctcaggtacttcagatgtgcttaatatggagtgaaaactggaccagaggtggaaagatgtatttgccccagttcacttcaaagcagcaaacgttgtttaagcattttagtttgaaccaggcattgtgttaggaatccagggataaagatgaatgaaatgtatttctgttcttcaggagttcacattctagcatatgccttttttcccccagtcatgcactctttttagcagtcttatatgtactagaaaagattttttaaagtttatttaaagctgtgtagatgaaggcttgatctaaaatagtataaggtctccagcttcagtaaaagtttttagtgtttacttaaattagtaatttctcactttctgtctggttaaaatgtcttaaaaagtagaattttcttctttaatccgtttagtagttacctcccttttacttttcaaattcacaaaattacatttctcataaattgtatagtatttaacttataatagttaatatttgtctttttaagatgactgtacatgtaagaaaaaagcttattaaaaacttgatcaaagaa

SEQ ID NO: 347371 - DNA, 1777 bp, Homo sapiens
atagtatgaaatacatacagtattgtcatttaataattgtaagtgataaatgttatgttgaaattacatctgaatagaattaataactaaataacatgactttaaaatgtgttgagcagaatccagatgggagaaacctgatgatttcattccacacactagtgatctgccttctagtaaggtcaatgaaaattcacttggcaccctagatgaatccaaatcatcagattcgcatagtgattctgatggggaacaggaagcagaagaaggaggggtctctacagagacagaaaagccaaaaataaagtttaaggaaaaaaataaaaatagtgatggaggaagtgacccagaaacacagaaagaaaaaagtattcagaaacagaattcattaggttcaaatgaagaaaaatcgaaaactcttaagaaatcaaacccatatggagaatggcaagaaattaaacaagaggttgagtctcatgaggaggtagatttggaacttccaagcactgaaaatgagtatgtatcaacttcagaagctgatggtggcggagaacccaaagtggtatttaaagaaaaaacagtcacttctcttggagttatggcagatggagtggccccagtcttcaaaaagagaagaactgaaaatggaaaatctagaaatttaaggcaacgaggtgatgatcaatagttgcaggagagctttttgtacatgcttttaggacagaatggagacttatacacccaaagtttatctgtgtttgtttgtaagtattatgatgctaaaaatttagatttattctaaatgtatttgatgtgaattaaaataaatattttttcatgtgaaatttattttggttcctaaaatggaagcctaccacattgcattgtaatacagtgtattatgttcagtgtctaaaaactgctaattaagtcataatttaagatgctatgtatctgttatttaaaacatggagaaacagggcctttattccattcatattcataagagcatatttatcctgcattgaaaatgcattacttttgcacattgatattaactgttgtccaacaaataagtatcggagtacgtgagaatattcccagcccagtgatgatttggttctgaggctgatgtgagaaagctgatgtaaaaaatgtatgcatattggcttaccttactcaatttaaagtcaaaagccaacagccaggagcagctcaggtacttcagatgtgcttaatatggagtgaaaactggaccagaggtggaaagatgtatttgccccagttcacttcaaagcagcaaacgttgtttaagcattttagtttgaaccaggcattgtgttaggaatccagggataaagatgaatgaaatgtatttctgttcttcaggagttcacattctagcatatgccttttttcccccagtcatgcactctttttagcagtcttatatgtactagaaaagattttttaaagtttatttaaagctgtgtagatgaaggcttgatctaaaatagtataaggtctccagcttcagtaaaagtttttagtgtttacttaaattagtaatttctcactttctgtctggttaaaatgtcttaaaaagtagaattttcttctttaatccgtttagtagttacctcccttttacttttcaaattcacaaaattacatttctcataaattgtatagtatttaacttataatagttaatatttgtctttttaagatgactgtacatgtaagaaaaaagcttattaaaaacttgatcaaagaa

SEQ ID NO: 347372 - DNA, 1639 bp, Homo sapiens
tgggcgtcgtaggggagaggaggggcggggccgctccgctgcaacagcaaagttttgagcaaagccttagcgactcgcagcgccggtcccgcagtttcacctcttttttttttaactccgccagaggaccccgacccacaggtcccggttgctccgctggtcaaagtgcgtgcggagtagttggcaaagttgagagcggagacgtctctgggaacagctgtttgcgttccgggcggaggcggcgcgctgagctccttggccttgagccagcgagcctagaaggaggatggaggttttgggccccaggggaggacacagagacggcgggatggcgcagggacttgaggcttgagatcccgtccttcagctcaggtcccgtcgcgcttttaccccttcccggtgacctcaacccctttataccgaccccacctctttggagccgggagtaccgcccctgtagggggaggggagaggaggcgatttcgaacgcggattggatcgtctgggcacccgtagttgggaacagcggaacgctggtcccggggactgagtaaggtgtctggatcggagggaggttcgggtgggcatcgggcggctggaagagctcgactcgtcccgctgggaaagcgcgagtctgagtggaaccctggacgacttgcagagcggctggcgcagtcatggcggactactggaagtcacagccaaagaaattctgtgattactgcaagtgctggatagcagacaataggcctagtgttgaatttcatgaaagaggaaagaatcataaggaaaatgtggcaaaaaggatcagtgagattaaacagaaaagcctggataaggcaaaggaagaagaaaaggcatcaaaggagtttgctgcaatggaggcagctgccctgaaagcataccaagaggatttgaaaagacttggcttagagtcagaaattttggagccaagcataacaccagtaaccagcactatcccacctacctcgacatcaaatcaacagaaagaaaagaaagaaaagaagaaaagaaaaaaagatccttcaaagggcagatgggtagaaggcataacctctgagggttaccattactattatgatcttatctcaggagcatctcagtgggagaaacctgaaggatttcaaggagacttaaaaaaggtaattgaagcatattaatagtgtttttgttttattctttacagtgattcgtttcttaggtttttgtagagttttgctaagcaactttatttacaaatactccactccctccacccccaaactgtgtccttttttttcccataatgcttttgttagaaggctggatggagatgaaatagtgatatctggctgggtgcagtggctcatgcctgtaatcccagcactttgggaggctgaggcatgtggatcacaaggtcaggagttaaagaccagcctggccaagatggtgaaaccctatctctcctaaaaactacaaaaaaattagccaggcgcagtcgcagttgcctgtaatcccagctactcaggaggctgagtcaggggaatcactgggacctggggcggcagaggttaacagtgagccgagattgcaccaccgcactccagcctggataacaaagtaagactccgtctcaaaa

SEQ ID NO: 347373 - DNA, 410 bp, Homo sapiens
gccaaagaaattctgtgattactgcaagtgctggatagcagacaataggcctgtatgataattccgctgttagagattctaataataattgtgttgaatgaagtgctcctttttgatgtaaactcagtttacaaagcacttttatgtacattgctcttgcattttcaaaacatcagaagatttctgtcttctcagtcccctatgaaagctgtgagccttcttccttttcatcaacctgactttgattatatattaaattatttctctgtggccttttgggaaatgggcaatgagttggtcatatcattcatgttatgaagcacctatattataatggtggtgttcataatactgtcatacccaaagaattgtggaaagcccttaaaaaataaaagcaacatgtttagttt

SEQ ID NO: 347374 - DNA, 287 bp, Homo sapiens
ctgctttacccttctctcatctctttagaaattttggagccaagcataacaccagtaaccagcactatcccacctacctcgacatcaaatcaacagaaagaaaagaaagaaaagaagaaaagaaaaaaagatccttcaaagggcagatgggtagaaggcataacctctgagggttaccattactattatgatcttatctcaggaggtaagtcatttaggcataaaactggtaaagaacagtgtcactagtagaatagaacaatttattttatgttaggatttttatc

SEQ ID NO: 347375 - DNA, 1271 bp, Homo sapiens
tgggcgtcgtaggggagaggaggggcggggccgctccgctgcaacagcaaagttttgagcaaagccttagcgactcgcagcgccggtcccgcagtttcacctcttttttttttaactccgccagaggaccccgacccacaggtcccggttgctccgctggtcaaagtgcgtgcggagtagttggcaaagttgagagcggagacgtctctgggaacagctgtttgcgttccgggcggaggcggcgcgctgagctccttggccttgagccagcgagcctagaaggaggatggaggttttgggccccaggggaggacacagagacggcgggatggcgcagggacttgaggcttgagatcccgtccttcagctcaggtcccgtcgcgcttttaccccttcccggtgacctcaacccctttataccgaccccacctctttggagccgggagtaccgcccctgtagggggaggggagaggaggcgatttcgaacgcggattggatcgtctgggcacccgtagttgggaacagcggaacgctggtcccggggactgagtaaggtgtctggatcggagggaggttcgggtgggcatcgggcggctggaagagctcgactcgtcccgctgggaaagcgcgagtctgagtggaaccctggacgacttgcagagcggctggcgcagtcatggcggactactggaagtcacagccaaagaaattctgtgattactgcaagtgctggatagcagacaataggcctagtgttgaatttcatgaaagaggaaagaatcataaggaaaatgtggcaaaaaggatcagtgagattaaacagaaaagcctggataaggcaaaggaagaagaaaaggcatcaaaggagtttgctgcaatggaggcagctgccctgaaagcataccaagaggatttgaaaagacttggcttagagtcagaaattttggagccaagcataacaccagtaaccagcactatcccacctacctcgacatcaaatcaacagaaagaaaagaaagaaaagaagaaaagaaaaaaagatccttcaaagggcagatgggtagaaggcataacctctgagggttaccattactattatgatcttatctcaggagcatctcagtggcagaaacctgaaggttttcacggagacttcacgacagcactgaagaccggttggctgaaggtttaagctcacgacgcttttacctatcctattcctctgctccggtgcaatccactgcacgcccgagcactcattcccacctct

SEQ ID NO: 347376 - DNA, 1963 bp, Homo sapiens
tgggcgtcgtaggggagaggaggggcggggccgctccgctgcaacagcaaagttttgagcaaagccttagcgactcgcagcgccggtcccgcagtttcacctcttttttttttaactccgccagaggaccccgacccacaggtcccggttgctccgctggtcaaagtgcgtgcggagtagttggcaaagttgagagcggagacgtctctgggaacagctgtttgcgttccgggcggaggcggcgcgctgagctccttggccttgagccagcgagcctagaaggaggatggaggttttgggccccaggggaggacacagagacggcgggatggcgcagggacttgaggcttgagatcccgtccttcagctcaggtcccgtcgcgcttttaccccttcccggtgacctcaacccctttataccgaccccacctctttggagccgggagtaccgcccctgtagggggaggggagaggaggcgatttcgaacgcggattggatcgtctgggcacccgtagttgggaacagcggaacgctggtcccggggactgagtaaggtgtctggatcggagggaggttcgggtgggcatcgggcggctggaagagctcgactcgtcccgctgggaaagcgcgagtctgagtggaaccctggacgacttgcagagcggctggcgcagtcatggcggactactggaagtcacagccaaagaaattctgtgattactgcaagtgctggatagcagacaataggcctagtgttgaatttcatgaaagaggaaagaatcataaggaaaatgtggcaaaaaggatcagtgagattaaacagaaaagcctggataaggcaaaggaagaagaaaaggcatcaaaggagtttgctgcaatggaggcagctgccctgaaagcataccaagaggatttgaaaagacttggcttagagtcagaaattttggagccaagcataacaccagtaaccagcactatcccacctacctcgacatcaaatcaacagaaagaaaagaaagaaaagaagaaaagaaaaaaagatccttcaaagggcagatgggtagaaggcataacctctgagggttaccattactattatgatcttatctcaggagcatctcagtgggagaaacctgaaggatttcaaggagacttaaaaaagacagcagtgaagaccgtttgggtagaaggtttaagtgaagatggttttacctattactataatacagaaacaggagaatccagatgggagaaacctgatgatttcattccacacactagtgatctgccttctagtaaggtcaatgaaaattcacttggcaccctagatgaatccaaatcatcagattcgcatagtgattctgatggggaacaggaagcagaagaaggaggggtctctacagagacagaaaagccaaaaataaagtttaaggaaaaaaataaaaatagtgatggaggaagtgacccagaaacacagaaagaaaaaagtattcagaaacagaattcattaggttcaaatgaagaaaaatcgaaaactcttaagaaatcaaacccatatggagaatggcaagaaattaaacaagaggttgagtctcatgaggaggtagatttggaacttccaagcactgaaaatgagtatgtatcaacttcagaagctgatggtggcggagaacccaaagtggtatttaaagaaaaaacagtcacttctcttggagttatggcagatggagtggccccagtcttcaaaaagagaagaactgaaaatggaaaatctagaaatttaaggcaacgaggtgatgatcaatagttgcaggagagctttttgtacatgcttttaggacagaatggagacttatacacccaaagtttatctgtgtttgtttgtaagtattatgatgctaaaaatttagatttattctaaatgtatttgatgtgaattaaaataaatattttttcatgtga

SEQ ID NO: 347377 - DNA, 1173 bp, Homo sapiens
tgggcgtcgtaggggagaggaggggcggggccgctccgctgcaacagcaaagttttgagcaaagccttagcgactcgcagcgccggtcccgcagtttcacctcttttttttttaactccgccagaggaccccgacccacaggtcccggttgctccgctggtcaaagtgcgtgcggagtagttggcaaagttgagagcggagacgtctctgggaacagctgtttgcgttccgggcggaggcggcgcgctgagctccttggccttgagccagcgagcctagaaggaggatggaggttttgggccccaggggaggacacagagacggcgggatggcgcagggacttgaggcttgagatcccgtccttcagctcaggtcccgtcgcgcttttaccccttcccggtgacctcaacccctttataccgaccccacctctttggagccgggagtaccgcccctgtagggggaggggagaggaggcgatttcgaacgcggattggatcgtctgggcacccgtagttgggaacagcggaacgctggtcccggggactgagtaaggtgtctggatcggagggaggttcgggtgggcatcgggcggctggaagagctcgactcgtcccgctgggaaagcgcgagtctgagtggaaccctggacgacttgcagagcggctggcgcagtcatggcggactactggaagtcacagccaaagaaattctgtgattactgcaagtgctggatagcagacaataggcctagtgttgaatttcatgaaagaggaaagaatcataaggaaaatgtggcaaaaaggatcagtgagattaaacagaaaagcctggataaggcaaaggaagaagaaaaggcatcaaaggagtttgctgcaatggaggcagctgccctgaaagcataccaagaggatttgaaaagacttggcttagagtcagaaattttggagccaagcataacaccagtaaccagcactatcccacctacctcgacatcaaatcaacagaaagaaaagaaagaaaagaagaaaagaaaaaaagatccttcaaagggcagatgggagcagatgcgcccatcagggaaatgcctcttattcctggttccccctcactgcctttttcacccttgtactgatctgggtggaagtgactcctgatggacgaaggcggtcc

SEQ ID NO: 347378 - DNA, 432 bp, Homo sapiens
ttttcttttgaattatgtaagtaatgtgggcaatcattgtgaagtcttattgagggtcttttagcaagacagtgacatgatgacttgtcttagaaaggtaattttggcagctgtggtgaagatttgaaaggagacactggagctggaagagcaatttcagagtctctgagaggccaggtgtaatggttcacacttgtaatcccagcactttgggaggtcaaggtgggaggattgcttgtggctgggagcttaaggctaccctgagcaacagggcaagaccctgtctctaccaaaaaaaaaaaaaatttctgggcatgatggcatgcctgtggtcccagctatttgggaagctgagtgggaggatcttgagctgaagagttcatgttgcagtgagttatgattatgccactgtagtccagcctgactgtctca

SEQ ID NO: 347379 - DNA, 431 bp, Homo sapiens
tgatggtgcccggctggcagagctgtgatgaggattagaggtgcaagcagctcagctcatggaaaagactcagggctgatgggtggagacacatccatggaccccgcagaccctgccaggagcttgcacagaccccaccaggagccttgggggcaggttggagtggcccaggtgcttggacagctctgggttggcagctcacttggaggtggaagtgctggaggaggggaggccccagatgtgccccaaccccaccccaggccccgtccccagcgaggaggagagtgaagggccgtcggccctccctgagcgggcacctcccactcctgcgggcctggtggtgaattatagagaaaatgtgctctcggcctgactgttagctttgagctgctctggttgggaattgagtttcttaataaacaggaaaatga

SEQ ID NO: 347380 - DNA, 680 bp, Homo sapiens
tttcattttacagatgagaaagttgaggcttagtgagattaaatctcgggtctctcatgaagagctgtcttcctcttgctattccagacagaacaaagggaaaagggcttttcttaggcacaggcttgtaactgcccctgccccccacccaccaaagctgagaagaggcaattccagcagcaaggcttattaatggctctctcaacacattcccagactccactcagccagacagaaaaaggtgcagggtgatgatgcagtgccacgcaagtctcggtgggactccggcatccagtatcctcaggaatcatgccttgcctggaccttttggctgttgtgaataatgctgctatgaacatggctgtataagtaaccatttcatttcctgccttcagttcttttgagtgtacaattgtcccttggtgtccttgggggactggtttgaggtccttcctcccacagatatgaaaatctgtgaatgcccaagtccctgatataaaaatggcatagtatttgcacataacctatgcacgctctcccatatactttcaatcatttctggattacttgtaatacctaatacaatgtaaatactatgtaaatagttatactctattgtttagggaataataacaaggaaaaaaagcctatacatcttcagtacaggcagtttttttttt

SEQ ID NO: 347381 - DNA, 656 bp, Homo sapiens
tttcattttacagatgagaaagttgaggcttagtgagattaaatctcgggtctctcatgaagagctgtcttcctcttgctattccagacagaacaaagggaaaagggcttttcttaggcacaggcttgtaactgcccctgccccccacccaccaaagctgagaagaggcaattccagcagcaaggcttattaatggctctctcaacacattcccagactccactcagccagacagaaaaaggtgcagggtgatgatgcagtgccacgcaagtctcggtgggactccggcatccagtatcctcaggaatcatgccttgcctgggattggattgtggataggaaaactttgtttaaaatatgctggagagggctgggcacagtgggtcacacctgtaatcccagcactttgggaggccaagatgggcagatcacttgaggtcaggagttcaagaccagcctggccaacatggtgaaactccatctctactaaaaatattaaaaaattagctgggcatggtggtgtacacctgtaatcccagctactccagaaggtgaggtaggagaatcgcttgaatccaggaggcagaggttccagtgagccaagattgtgccattgcactccagcctgggtgacagagtgagactcggtctcaaaa

SEQ ID NO: 347382 - DNA, 2870 bp, Homo sapiens
cggggcggcaaaacgtccgcccgggcccgaggcgggcggaggcagctgtggttacgtgcggggggccggtgacgcagtcgcggggcgctgggacgcggcttgcggagccggccggcgagcgcaggccccaggctcgggcgcggcggcgggacagcacctaccttcccggcttcgggtccgggagtgcggggcgcggagccgccggagcgctgcctccctccttcctcctcccctcgcccccgccccgcggcgcgacacacaatactcgccggaagcggaagccgcgccgaggctcgtgtcagtggaagctggggtgtcggcgggcggccgcggccgggtctagcggtgcctgcggaagaaggaggaggagggctggcgatgagaagcagcagggggaatcaagggcaagaagggacccagaggggcaggtggctgagatgctggcgtccaggtgacccgaggaatcctctggagatacaggcccgcgcatgcgcgtgctcgagcgctgaagcccattgcccgcagggcgctggactggcgccccggccggcgaggctgtctagtccaggctccaggccccggctctggccaggcgccgccgcctcccggtgcagctgaaagtcgacgaagagggcggggcgggggcggcttgtggacttccacacttttcctctcttcgggccagtctggggagagggtggctagctgtggcggcggccaattacgtggcggacctgcggggctaagctggcacgtcacttccgactagtggagtttttagccttttaacattcaaggattaggtaagttctccccgcggtagacttcaaatactctttgtcctgcccctgcttggcgaaatttaccgaaattatctacctatcccgctggagtgggagccgggggagagctggaaccgcgtctctgctgctcacctttgtgtccttagctccttcgcatggggtccgaccgcaacacgtgcgctggataaacgcttgttaactgggtaaaagtcttgcagtgaaaaacccgaggacccttaccgcaagtgtcttttgctcccagctactgatactggattccactcgtgattctccctttcttagcgcattcatgatatagacatcagtctctgagctggaggaggacaaaggcagcggtcctgtgaattctatgctctagcttgggttaagggatttggaattgcacttgtttcagagagctccctctttgcccactagcagggcattagctggtgctgaagacagtggctgcttggcgagcctggatctccaagtgaccccctcagcaactcctgatgaacaggactgaagccaatattaaagcaagtcaaccaaaggttctctggtgtagacaagacagcaaaaggacagactaccttgtggaacctagcattgttctccttctgcagcactaagtaacatttgttctccgttaagatctttgcaaaccacacacaagaattgctggtcatcctgccaatagatgctgctcacagaaccaaatttcctgtgctgaattgtcactcatgggcttgagagtaggagactggagaccaaggtggctagaatccagttgggcctgatgtctccctgttgaaagggctccttgtggaatgaatagcacatggctcctgtggtggatctgatagtggcatagcaccaagtgatgcaggcctgccaggggccacagacacagaagatgctcccggggtcccccatgtactccagacacactgcaggccacctctcccagcaggttgccagtcatgggccccatcatcatgacttctgtccaaggtactgtgtgcagaaatgtgattgagattcaagtcagggcctctctgcccttttccctccagaaacaaaaccaagataatttatcctgaacacggtgaaaaaaggaagggagggaggagaaaaagtccgggtctcacctgggattctctgtctcctgcaacatgaaggatttagcctgggaggaggtggtgagaactctgggagagaaaaaagaaggaaagaatagttttacccatgctgaagttaatttaaaccttcacctagagaagcaaaaaaaaaaacccacactttcccattttgtgcctcccttcctagagttttagccaaaggtttagctaagtaattggttttaccagggcactcactcctcctatcccaagtctgtttgactccctccccatcatcctcctcacctcttttcaggcagggtggggatagcagcaggaggagattttgggagcctggcaactcctgcaaggaccgcaggacagcccctctgtggggatgcgtggtgccccatctgccgcccttctgaagaatgcactgccttcactttttactgtgttagagtccatccagactgttctatccaaaaaagtttctttttcccccacaggcaatcaggaaatgattcctttcccgactgcttctgtctagtgcctgggaatcttgagtcaatccctcagtaagtcagtgactagggaaatccctctctgagcctcccagttcatgttgcttagggaacctgatattttcgtgaaacctgcctacacatgggcagcccaacagcagaacaaatggtggtgaccaaagtgaacaaagaagtatagttgtgccagcttcgtagttgcccatgtggacaagtcagcaggatcaggacacgaggaagagtaaatgtgagacagtcaatgtgacttctgcgataaacagatttttaaaccccgaaattttgcaaaattttggtgaaacctgaactttcttcgttgcatatactggcactatctgtaccatcatacaactgtctcacattaaagctatttttcttgggca

SEQ ID NO: 347383 - DNA, 2656 bp, Homo sapiens
cggggcggcaaaacgtccgcccgggcccgaggcgggcggaggcagctgtggttacgtgcggggggccggtgacgcagtcgcggggcgctgggacgcggcttgcggagccggccggcgagcgcaggccccaggctcgggcgcggcggcgggacagcacctaccttcccggcttcgggtccgggagtgcggggcgcggagccgccggagcgctgcctccctccttcctcctcccctcgcccccgccccgcggcgcgacacacaatactcgccggaagcggaagccgcgccgaggctcgtgtcagtggaagctggggtgtcggcgggcggccgcggccgggtctagcggtgcctgcggaagaaggaggaggagggctggcgatgagaagcagcagggggaatcaagggcaagaagggacccagaggggcaggtggctgagatgctggcgtccaggtgacccgaggaatcctctggagatacaggcccgcgcatgcgcgtgctcgagcgctgaagcccattgcccgcagggcgctggactggcgccccggccggcgaggctgtctagtccaggctccaggccccggctctggccaggcgccgccgcctcccggtgcagctgaaagtcgacgaagagggcggggcgggggcggcttgtggacttccacacttttcctctcttcgggccagtctggggagagggtggctagctgtggcggcggccaattacgtggcggacctgcggggctaagctggcacgtcacttccgactagtggagtttttagccttttaacattcaaggattaggtaagttctccccgcggtagacttcaaatactctttgtcctgcccctgcttggcgaaatttaccgaaattatctacctatcccgctggagtgggagccgggggagagctggaaccgcgtctctgctgctcacctttgtgtccttagctccttcgcatggggtccgaccgcaacacgtgcgctggataaacgcttgttaactggagctccctctttgcccactagcagggcattagctggtgctgaagacagtggctgcttggcgagcctggatctccaagtgaccccctcagcaactcctgatgaacaggactgaagccaatattaaagcaagtcaaccaaaggttctctggtgtagacaagacagcaaaaggacagactaccttgtggaacctagcattgttctccttctgcagcactaagtaacatttgttctccgttaagatctttgcaaaccacacacaagaattgctggtcatcctgccaatagatgctgctcacagaaccaaatttcctgtgctgaattgtcactcatgggcttgagagtaggagactggagaccaaggtggctagaatccagttgggcctgatgtctccctgttgaaagggctccttgtggaatgaatagcacatggctcctgtggtggatctgatagtggcatagcaccaagtgatgcaggcctgccaggggccacagacacagaagatgctcccggggtcccccatgtactccagacacactgcaggccacctctcccagcaggttgccagtcatgggccccatcatcatgacttctgtccaaggtactgtgtgcagaaatgtgattgagattcaagtcagggcctctctgcccttttccctccagaaacaaaaccaagataatttatcctgaacacggtgaaaaaaggaagggagggaggagaaaaagtccgggtctcacctgggattctctgtctcctgcaacatgaaggatttagcctgggaggaggtggtgagaactctgggagagaaaaaagaaggaaagaatagttttacccatgctgaagttaatttaaaccttcacctagagaagcaaaaaaaaaaacccacactttcccattttgtgcctcccttcctagagttttagccaaaggtttagctaagtaattggttttaccagggcactcactcctcctatcccaagtctgtttgactccctccccatcatcctcctcacctcttttcaggcagggtggggatagcagcaggaggagattttgggagcctggcaactcctgcaaggaccgcaggacagcccctctgtggggatgcgtggtgccccatctgccgcccttctgaagaatgcactgccttcactttttactgtgttagagtccatccagactgttctatccaaaaaagtttctttttcccccacaggcaatcaggaaatgattcctttcccgactgcttctgtctagtgcctgggaatcttgagtcaatccctcagtaagtcagtgactagggaaatccctctctgagcctcccagttcatgttgcttagggaacctgatattttcgtgaaacctgcctacacatgggcagcccaacagcagaacaaatggtggtgaccaaagtgaacaaagaagtatagttgtgccagcttcgtagttgcccatgtggacaagtcagcaggatcaggacacgaggaagagtaaatgtgagacagtcaatgtgacttctgcgataaacagatttttaaaccccgaaattttgcaaaattttggtgaaacctgaactttcttcgttgcatatactggcactatctgtaccatcatacaactgtctcacattaaagctatttttcttgggca

SEQ ID NO: 347384 - DNA, 2453 bp, Homo sapiens
cggggcggcaaaacgtccgcccgggcccgaggcgggcggaggcagctgtggttacgtgcggggggccggtgacgcagtcgcggggcgctgggacgcggcttgcggagccggccggcgagcgcaggccccaggctcgggcgcggcggcgggacagcacctaccttcccggcttcgggtccgggagtgcggggcgcggagccgccggagcgctgcctccctccttcctcctcccctcgcccccgccccgcggcgcgacacacaatactcgccggaagcggaagccgcgccgaggctcgtgtcagtggaagctggggtgtcggcgggcggccgcggccgggtctagcggtgcctgcggaagaaggaggaggagggctggcgatgagaagcagcagggggaatcaagggcaagaagggacccagaggggcaggtggctgagatgctggcgtccaggtgacccgaggaatcctctggagatacaggcccgcgcatgcgcgtgctcgagcgctgaagcccattgcccgcagggcgctggactggcgccccggccggcgaggctgtctagtccaggctccaggccccggctctggccaggcgccgccgcctcccggtgcagctgaaagtcgacgaagagggcggggcgggggcggcttgtggacttccacacttttcctctcttcgggccagtctggggagagggtggctagctgtggcggcggccaattacgtggcggacctgcggggctaagctggcacgtcacttccgactagtggagtttttagccttttaacattcaaggattagagctccctctttgcccactagcagggcattagctggtgctgaagacagtggctgcttggcgagcctggatctccaagtgaccccctcagcaactcctgatgaacaggactgaagccaatattaaagcaagtcaaccaaaggttctctggtgtagacaagacagcaaaaggacagactaccttgtggaacctagcattgttctccttctgcagcactaagtaacatttgttctccgttaagatctttgcaaaccacacacaagaattgctggtcatcctgccaatagatgctgctcacagaaccaaatttcctgtgctgaattgtcactcatgggcttgagagtaggagactggagaccaaggtggctagaatccagttgggcctgatgtctccctgttgaaagggctccttgtggaatgaatagcacatggctcctgtggtggatctgatagtggcatagcaccaagtgatgcaggcctgccaggggccacagacacagaagatgctcccggggtcccccatgtactccagacacactgcaggccacctctcccagcaggttgccagtcatgggccccatcatcatgacttctgtccaaggtactgtgtgcagaaatgtgattgagattcaagtcagggcctctctgcccttttccctccagaaacaaaaccaagataatttatcctgaacacggtgaaaaaaggaagggagggaggagaaaaagtccgggtctcacctgggattctctgtctcctgcaacatgaaggatttagcctgggaggaggtggtgagaactctgggagagaaaaaagaaggaaagaatagttttacccatgctgaagttaatttaaaccttcacctagagaagcaaaaaaaaaaacccacactttcccattttgtgcctcccttcctagagttttagccaaaggtttagctaagtaattggttttaccagggcactcactcctcctatcccaagtctgtttgactccctccccatcatcctcctcacctcttttcaggcagggtggggatagcagcaggaggagattttgggagcctggcaactcctgcaaggaccgcaggacagcccctctgtggggatgcgtggtgccccatctgccgcccttctgaagaatgcactgccttcactttttactgtgttagagtccatccagactgttctatccaaaaaagtttctttttcccccacaggcaatcaggaaatgattcctttcccgactgcttctgtctagtgcctgggaatcttgagtcaatccctcagtaagtcagtgactagggaaatccctctctgagcctcccagttcatgttgcttagggaacctgatattttcgtgaaacctgcctacacatgggcagcccaacagcagaacaaatggtggtgaccaaagtgaacaaagaagtatagttgtgccagcttcgtagttgcccatgtggacaagtcagcaggatcaggacacgaggaagagtaaatgtgagacagtcaatgtgacttctgcgataaacagatttttaaaccccgaaattttgcaaaattttggtgaaacctgaactttcttcgttgcatatactggcactatctgtaccatcatacaactgtctcacattaaagctatttttcttgggca

SEQ ID NO: 347385 - DNA, 2667 bp, Homo sapiens
cggggcggcaaaacgtccgcccgggcccgaggcgggcggaggcagctgtggttacgtgcggggggccggtgacgcagtcgcggggcgctgggacgcggcttgcggagccggccggcgagcgcaggccccaggctcgggcgcggcggcgggacagcacctaccttcccggcttcgggtccgggagtgcggggcgcggagccgccggagcgctgcctccctccttcctcctcccctcgcccccgccccgcggcgcgacacacaatactcgccggaagcggaagccgcgccgaggctcgtgtcagtggaagctggggtgtcggcgggcggccgcggccgggtctagcggtgcctgcggaagaaggaggaggagggctggcgatgagaagcagcagggggaatcaagggcaagaagggacccagaggggcaggtggctgagatgctggcgtccaggtgacccgaggaatcctctggagatacaggcccgcgcatgcgcgtgctcgagcgctgaagcccattgcccgcagggcgctggactggcgccccggccggcgaggctgtctagtccaggctccaggccccggctctggccaggcgccgccgcctcccggtgcagctgaaagtcgacgaagagggcggggcgggggcggcttgtggacttccacacttttcctctcttcgggccagtctggggagagggtggctagctgtggcggcggccaattacgtggcggacctgcggggctaagctggcacgtcacttccgactagtggagtttttagccttttaacattcaaggattaggtaaaagtcttgcagtgaaaaacccgaggacccttaccgcaagtgtcttttgctcccagctactgatactggattccactcgtgattctccctttcttagcgcattcatgatatagacatcagtctctgagctggaggaggacaaaggcagcggtcctgtgaattctatgctctagcttgggttaagggatttggaattgcacttgtttcagagagctccctctttgcccactagcagggcattagctggtgctgaagacagtggctgcttggcgagcctggatctccaagtgaccccctcagcaactcctgatgaacaggactgaagccaatattaaagcaagtcaaccaaaggttctctggtgtagacaagacagcaaaaggacagactaccttgtggaacctagcattgttctccttctgcagcactaagtaacatttgttctccgttaagatctttgcaaaccacacacaagaattgctggtcatcctgccaatagatgctgctcacagaaccaaatttcctgtgctgaattgtcactcatgggcttgagagtaggagactggagaccaaggtggctagaatccagttgggcctgatgtctccctgttgaaagggctccttgtggaatgaatagcacatggctcctgtggtggatctgatagtggcatagcaccaagtgatgcaggcctgccaggggccacagacacagaagatgctcccggggtcccccatgtactccagacacactgcaggccacctctcccagcaggttgccagtcatgggccccatcatcatgacttctgtccaaggtactgtgtgcagaaatgtgattgagattcaagtcagggcctctctgcccttttccctccagaaacaaaaccaagataatttatcctgaacacggtgaaaaaaggaagggagggaggagaaaaagtccgggtctcacctgggattctctgtctcctgcaacatgaaggatttagcctgggaggaggtggtgagaactctgggagagaaaaaagaaggaaagaatagttttacccatgctgaagttaatttaaaccttcacctagagaagcaaaaaaaaaaacccacactttcccattttgtgcctcccttcctagagttttagccaaaggtttagctaagtaattggttttaccagggcactcactcctcctatcccaagtctgtttgactccctccccatcatcctcctcacctcttttcaggcagggtggggatagcagcaggaggagattttgggagcctggcaactcctgcaaggaccgcaggacagcccctctgtggggatgcgtggtgccccatctgccgcccttctgaagaatgcactgccttcactttttactgtgttagagtccatccagactgttctatccaaaaaagtttctttttcccccacaggcaatcaggaaatgattcctttcccgactgcttctgtctagtgcctgggaatcttgagtcaatccctcagtaagtcagtgactagggaaatccctctctgagcctcccagttcatgttgcttagggaacctgatattttcgtgaaacctgcctacacatgggcagcccaacagcagaacaaatggtggtgaccaaagtgaacaaagaagtatagttgtgccagcttcgtagttgcccatgtggacaagtcagcaggatcaggacacgaggaagagtaaatgtgagacagtcaatgtgacttctgcgataaacagatttttaaaccccgaaattttgcaaaattttggtgaaacctgaactttcttcgttgcatatactggcactatctgtaccatcatacaactgtctcacattaaagctatttttcttgggca

SEQ ID NO: 347386 - DNA, 2085 bp, Homo sapiens
ggagaggatagagagagagatacccgacagagagacgacagagtacatcaatgatacgtgaccctgcttggcgaaatttaccgaaattatctacctatcccgctggagtgggagccgggggagagctggaaccgcgtctctgctgctcacctttgtgtccttagctccttcgcatggggtccgaccgcaacacgtgcgctggataaacgcttgttaactgggtaaaagtcttgcagtgaaaaacccgaggacccttaccgcaagtgtcttttgctcccagctactgatactggattccactcgtgattctccctttcttagcgcattcatgatatagacatcagtctctgagctggaggaggacaaaggcagcggtcctgtgaattctatgctctagcttgggttaagggatttggaattgcacttgtttcagagagctccctctttgcccactagcagggcattagctggtgctgaagacagtggctgcttggcgagcctggatctccaagtgaccccctcagcaactcctgatgaacaggactgaagccaatattaaagcaagtcaaccaaaggttctctggtgtagacaagacagcaaaaggacagactaccttgtggaacctagcattgttctccttctgcagcactaagtaacatttgttctccgttaagatctttgcaaaccacacacaagaattgctggtcatcctgccaatagatgctgctcacagaaccaaatttcctgtgctgaattgtcactcatgggcttgagagtaggagactggagaccaaggtggctagaatccagttgggcctgatgtctccctgttgaaagggctccttgtggaatgaatagcacatggctcctgtggtggatctgatagtggcatagcaccaagtgatgcaggcctgccaggggccacagacacagaagatgctcccggggtcccccatgtactccagacacactgcaggccacctctcccagcaggttgccagtcatgggccccatcatcatgacttctgtccaaggtactgtgtgcagaaatgtgattgagattcaagtcagggcctctctgcccttttccctccagaaacaaaaccaagataatttatcctgaacacggtgaaaaaaggaagggagggaggagaaaaagtccgggtctcacctgggattctctgtctcctgcaacatgaaggatttagcctgggaggaggtggtgagaactctgggagagaaaaaagaaggaaagaatagttttacccatgctgaagttaatttaaaccttcacctagagaagcaaaaaaaaaaacccacactttcccattttgtgcctcccttcctagagttttagccaaaggtttagctaagtaattggttttaccagggcactcactcctcctatcccaagtctgtttgactccctccccatcatcctcctcacctcttttcaggcagggtggggatagcagcaggaggagattttgggagcctggcaactcctgcaaggaccgcaggacagcccctctgtggggatgcgtggtgccccatctgccgcccttctgaagaatgcactgccttcactttttactgtgttagagtccatccagactgttctatccaaaaaagtttctttttcccccacaggcaatcaggaaatgattcctttcccgactgcttctgtctagtgcctgggaatcttgagtcaatccctcagtaagtcagtgactagggaaatccctctctgagcctcccagttcatgttgcttagggaacctgatattttcgtgaaacctgcctacacatgggcagcccaacagcagaacaaatggtggtgaccaaagtgaacaaagaagtatagttgtgccagcttcgtagttgcccatgtggacaagtcagcaggatcaggacacgaggaagagtaaatgtgagacagtcaatgtgacttctgcgataaacagatttttaaaccccgaaattttgcaaaattttggtgaaacctgaactttcttcgttgcatatactggcactatctgtaccatcatacaactgtctcacattaaagctatttttcttgggca

SEQ ID NO: 347387 - DNA, 1677 bp, Homo sapiens
  misc_feature (11)..(11): n is a, c, g, or t
ctagtcatagntacgaggctgggtgggagctccctctttgcccactagcagggcattagctggtgctgaagacagtggctgcttggcgagcctggatctccaagtgaccccctcagcaactcctgatgaacaggactgaagccaatattaaagcaagtcaaccaaaggttctctggtgtagacaagacagcaaaaggacagactaccttgtggaacctagcattgttctccttctgcagcactaagtaacatttgttctccgttaagatctttgcaaaccacacacaagaattgctggtcatcctgccaatagatgctgctcacagaaccaaatttcctgtgctgaattgtcactcatgggcttgagagtaggagactggagaccaaggtggctagaatccagttgggcctgatgtctccctgttgaaagggctccttgtggaatgaatagcacatggctcctgtggtggatctgatagtggcatagcaccaagtgatgcaggcctgccaggggccacagacacagaagatgctcccggggtcccccatgtactccagacacactgcaggccacctctcccagcaggttgccagtcatgggccccatcatcatgacttctgtccaaggtactgtgtgcagaaatgtgattgagattcaagtcagggcctctctgcccttttccctccagaaacaaaaccaagataatttatcctgaacacggtgaaaaaaggaagggagggaggagaaaaagtccgggtctcacctgggattctctgtctcctgcaacatgaaggatttagcctgggaggaggtggtgagaactctgggagagaaaaaagaaggaaagaatagttttacccatgctgaagttaatttaaaccttcacctagagaagcaaaaaaaaaaacccacactttcccattttgtgcctcccttcctagagttttagccaaaggtttagctaagtaattggttttaccagggcactcactcctcctatcccaagtctgtttgactccctccccatcatcctcctcacctcttttcaggcagggtggggatagcagcaggaggagattttgggagcctggcaactcctgcaaggaccgcaggacagcccctctgtggggatgcgtggtgccccatctgccgcccttctgaagaatgcactgccttcactttttactgtgttagagtccatccagactgttctatccaaaaaagtttctttttcccccacaggcaatcaggaaatgattcctttcccgactgcttctgtctagtgcctgggaatcttgagtcaatccctcagtaagtcagtgactagggaaatccctctctgagcctcccagttcatgttgcttagggaacctgatattttcgtgaaacctgcctacacatgggcagcccaacagcagaacaaatggtggtgaccaaagtgaacaaagaagtatagttgtgccagcttcgtagttgcccatgtggacaagtcagcaggatcaggacacgaggaagagtaaatgtgagacagtcaatgtgacttctgcgataaacagatttttaaaccccgaaattttgcaaaattttggtgaaacctgaactttcttcgttgcatatactggcactatctgtaccatcatacaactgtctcacattaaagctatttttcttgggca

SEQ ID NO: 347388 - DNA, 1909 bp, Homo sapiens
gccggctaccatatggttggacgaggacattacattaagatacggaccaaagtgctgggattacaggcatgaaccaccatgcctggactattgccattttcagtgttgtgtccagtgatgtttccttcacaccaagaagtcttcaggggattcatatatggattgtgaaatcctctagtgacatggaagtttctgtgtcatgcagatagagaaattgtgatgcctggatgcctgaggttttttggagtgaggtactatgcatttgcaagtaattgtaaactgtataatccaggattaaaagataaactattgttgcatttagaactgtgtttagaatacaataatttgttgttgttttgtaataggactgaagccaatattaaagcaagtcaaccaaaggttctctggtgtagacaagacagcaaaaggacagactaccttgtggaacctagcattgttctccttctgcagcactaagtaacatttgttctccgttaagatctttgcaaaccacacacaagaattgctggtcatcctgccaatagatgctgctcacagaaccaaatttcctgtgctgaattgtcactcatgggcttgagagtaggagactggagaccaaggtggctagaatccagttgggcctgatgtctccctgttgaaagggctccttgtggaatgaatagcacatggctcctgtggtggatctgatagtggcatagcaccaagtgatgcaggcctgccaggggccacagacacagaagatgctcccggggtcccccatgtactccagacacactgcaggccacctctcccagcaggttgccagtcatgggccccatcatcatgacttctgtccaaggtactgtgtgcagaaatgtgattgagattcaagtcagggcctctctgcccttttccctccagaaacaaaaccaagataatttatcctgaacacggtgaaaaaaggaagggagggaggagaaaaagtccgggtctcacctgggattctctgtctcctgcaacatgaaggatttagcctgggaggaggtggtgagaactctgggagagaaaaaagaaggaaagaatagttttacccatgctgaagttaatttaaaccttcacctagagaagcaaaaaaaaaaacccacactttcccattttgtgcctcccttcctagagttttagccaaaggtttagctaagtaattggttttaccagggcactcactcctcctatcccaagtctgtttgactccctccccatcatcctcctcacctcttttcaggcagggtggggatagcagcaggaggagattttgggagcctggcaactcctgcaaggaccgcaggacagcccctctgtggggatgcgtggtgccccatctgccgcccttctgaagaatgcactgccttcactttttactgtgttagagtccatccagactgttctatccaaaaaagtttctttttcccccacaggcaatcaggaaatgattcctttcccgactgcttctgtctagtgcctgggaatcttgagtcaatccctcagtaagtcagtgactagggaaatccctctctgagcctcccagttcatgttgcttagggaacctgatattttcgtgaaacctgcctacacatgggcagcccaacagcagaacaaatggtggtgaccaaagtgaacaaagaagtatagttgtgccagcttcgtagttgcccatgtggacaagtcagcaggatcaggacacgaggaagagtaaatgtgagacagtcaatgtgacttctgcgataaacagatttttaaaccccgaaattttgcaaaattttggtgaaacctgaactttcttcgttgcatatactggcactatctgtaccatcatacaactgtctcacattaaagctatttttcttgggca

SEQ ID NO: 347389 - DNA, 1927 bp, Homo sapiens
ttcactgtgttggccaggctagtctcaaactcctgacctcaggtgatctacccgcgtaagcctcccaaagtgctgggattacaggcatgaaccaccatgcctggactattgccattttcagtgttgtgtccagtgatgtttccttcacaccaagaagtcttcaggggattcatatatggattgtgaaatcctctagtgacatggaagtttctgtgtcatgcagatagagaaattgtgatgcctggatgcctgaggttttttggagtgaggtactatgcatttgcaagtaattgtaaactgtataatccaggattaaaagataaactattgttgcatttagaactgtgtttagaatacaataatttgttgttgttttgtaataggactgaagccaatattaaagcaagtcaaccaaaggttctctggtgtagacaagacagcaaaaggacagactaccttgtggaacctagcattgttctccttctgcagcactaagtaacatttgttctccgttaagatctttgcaaaccacacacaagaattgctggtcatcctgccaatagatgctgctcacagaaccaaatttcctgtgctgaattgtcactcatgggcttgagagtaggagactggagaccaaggtggctagaatccagttgggcctgatgtctccctgttgaaagggctccttgtggaatgaatagcacatggctcctgtggtggatctgatagtggcatagcaccaagtgatgcaggcctgccaggggccacagacacagaagatgctcccggggtcccccatgtactccagacacactgcaggccacctctcccagcaggttgccagtcatgggccccatcatcatgacttctgtccaaggtactgtgtgcagaaatgtgattgagattcaagtcagggcctctctgcccttttccctccagaaacaaaaccaagataatttatcctgaacacggtgaaaaaaggaagggagggaggagaaaaagtccgggtctcacctgggattctctgtctcctgcaacatgaaggatttagcctgggaggaggtggtgagaactctgggagagaaaaaagaaggaaagaatagttttacccatgctgaagttaatttaaaccttcacctagagaagcaaaaaaaaaaacccacactttcccattttgtgcctcccttcctagagttttagccaaaggtttagctaagtaattggttttaccagggcactcactcctcctatcccaagtctgtttgactccctccccatcatcctcctcacctcttttcaggcagggtggggatagcagcaggaggagattttgggagcctggcaactcctgcaaggaccgcaggacagcccctctgtggggatgcgtggtgccccatctgccgcccttctgaagaatgcactgccttcactttttactgtgttagagtccatccagactgttctatccaaaaaagtttctttttcccccacaggcaatcaggaaatgattcctttcccgactgcttctgtctagtgcctgggaatcttgagtcaatccctcagtaagtcagtgactagggaaatccctctctgagcctcccagttcatgttgcttagggaacctgatattttcgtgaaacctgcctacacatgggcagcccaacagcagaacaaatggtggtgaccaaagtgaacaaagaagtatagttgtgccagcttcgtagttgcccatgtggacaagtcagcaggatcaggacacgaggaagagtaaatgtgagacagtcaatgtgacttctgcgataaacagatttttaaaccccgaaattttgcaaaattttggtgaaacctgaactttcttcgttgcatatactggcactatctgtaccatcatacaactgtctcacattaaagctatttttcttgggca

SEQ ID NO: 347390 - DNA, 2488 bp, Homo sapiens
cggggcggcaaaacgtccgcccgggcccgaggcgggcggaggcagctgtggttacgtgcggggggccggtgacgcagtcgcggggcgctgggacgcggcttgcggagccggccggcgagcgcaggccccaggctcgggcgcggcggcgggacagcacctaccttcccggcttcgggtccgggagtgcggggcgcggagccgccggagcgctgcctccctccttcctcctcccctcgcccccgccccgcggcgcgacacacaatactcgccggaagcggaagccgcgccgaggctcgtgtcagtggaagctggggtgtcggcgggcggccgcggccgggtctagcggtgcctgcggaagaaggaggaggagggctggcgatgagaagcagcagggggaatcaagggcaagaagggacccagaggggcaggtggctgagatgctggcgtccaggtgacccgaggaatcctctggagatacaggcccgcgcatgcgcgtgctcgagcgctgaagcccattgcccgcagggcgctggactggcgccccggccggcgaggctgtctagtccaggctccaggccccggctctggccaggcgccgccgcctcccggtgcagctgaaagtcgacgaagagggcggggcgggggcggcttgtggacttccacacttttcctctcttcgggccagtctggggagagggtggctagctgtggcggcggccaattacgtggcggacctgcggggctaagctggcacgtcacttccgactagtggagtttttagccttttaacattcaaggattaggtaagttctccccgcggtagacttcaaatactctttgtcctgcccctgcttggcgaaatttaccgaaattatctacctatcccgctggagtgggagccgggggagagctggaaccgcgtctctgctgctcacctttgtgtccttagctccttcgcatggggtccgaccgcaacacgtgcgctggataaacgcttgttaactgggtaaaagtcttgcagtgaaaaacccgaggacccttaccgcaagtgtcttttgctcccagctactgatactggattccactcgtgattctccctttcttagcgcattcatgatatagacatcagtctctgagctggaggaggacaaaggcagcggtcctgtgaattctatgctctagcttgggttaagggatttggaattgcacttgtttcagagagctccctctttgcccactagcagggcattagctggtgctgaagacagtggctgcttggcgagcctggatctccaagtgaccccctcagcaactcctgatgaacaggactgaagccaatattaaagcaagtcaaccaaaggttctctggtgtagacaagacagcaaaaggacagactaccttgtggaacctagcattgttctccttctgcagcactaagtactgtgtgcagaaatgtgattgagattcaagtcagggcctctctgcccttttccctccagaaacaaaaccaagataatttatcctgaacacggtgaaaaaaggaagggagggaggagaaaaagtccgggtctcacctgggattctctgtctcctgcaacatgaaggatttagcctgggaggaggtggtgagaactctgggagagaaaaaagaaggaaagaatagttttacccatgctgaagttaatttaaaccttcacctagagaagcaaaaaaaaaaacccacactttcccattttgtgcctcccttcctagagttttagccaaaggtttagctaagtaattggttttaccagggcactcactcctcctatcccaagtctgtttgactccctccccatcatcctcctcacctcttttcaggcagggtggggatagcagcaggaggagattttgggagcctggcaactcctgcaaggaccgcaggacagcccctctgtggggatgcgtggtgccccatctgccgcccttctgaagaatgcactgccttcactttttactgtgttagagtccatccagactgttctatccaaaaaagtttctttttcccccacaggcaatcaggaaatgattcctttcccgactgcttctgtctagtgcctgggaatcttgagtcaatccctcagtaagtcagtgactagggaaatccctctctgagcctcccagttcatgttgcttagggaacctgatattttcgtgaaacctgcctacacatgggcagcccaacagcagaacaaatggtggtgaccaaagtgaacaaagaagtatagttgtgccagcttcgtagttgcccatgtggacaagtcagcaggatcaggacacgaggaagagtaaatgtgagacagtcaatgtgacttctgcgataaacagatttttaaaccccgaaattttgcaaaattttggtgaaacctgaactttcttcgttgcatatactggcactatctgtaccatcatacaactgtctcacattaaagctatttttcttgggca

SEQ ID NO: 347391 - DNA, 1318 bp, Homo sapiens
gaccaaggatgactttgggcattgctgtgaggaactatttcgtttaacaccctactacctgaacatgatgcgtactcagcctttcaccaccccccaagtagctacacatgatgtgataatagtattggtggtggttttagagagttggagagaaaactgaagttggatttgggtaaaagaaaaaagagtgggaattattttttctccattctaaagcccataaagcaatgttaattgttcccacccctctgctattctgtctcctcaggtactgtgtgcagaaatgtgattgagattcaagtcagggcctctctgcccttttccctccagaaacaaaaccaagataatttatcctgaacacggtgaaaaaaggaagggagggaggagaaaaagtccgggtctcacctgggattctctgtctcctgcaacatgaaggatttagcctgggaggaggtggtgagaactctgggagagaaaaaagaaggaaagaatagttttacccatgctgaagttaatttaaaccttcacctagagaagcaaaaaaaaaaacccacactttcccattttgtgcctcccttcctagagttttagccaaaggtttagctaagtaattggttttaccagggcactcactcctcctatcccaagtctgtttgactccctccccatcatcctcctcacctcttttcaggcagggtggggatagcagcaggaggagattttgggagcctggcaactcctgcaaggaccgcaggacagcccctctgtggggatgcgtggtgccccatctgccgcccttctgaagaatgcactgccttcactttttactgtgttagagtccatccagactgttctatccaaaaaagtttctttttcccccacaggcaatcaggaaatgattcctttcccgactgcttctgtctagtgcctgggaatcttgagtcaatccctcagtaagtcagtgactagggaaatccctctctgagcctcccagttcatgttgcttagggaacctgatattttcgtgaaacctgcctacacatgggcagcccaacagcagaacaaatggtggtgaccaaagtgaacaaagaagtatagttgtgccagcttcgtagttgcccatgtggacaagtcagcaggatcaggacacgaggaagagtaaatgtgagacagtcaatgtgacttctgcgataaacagatttttaaaccccgaaattttgcaaaattttggtgaaacctgaactttcttcgttgcatatactggcactatctgtaccatcatacaactgtctcacattaaagctatttttcttgggca

SEQ ID NO: 347392 - DNA, 4315 bp, Homo sapiens
  misc_feature (1095)..(1095): n is a, c, g, or t
  misc_feature (1164)..(1164): n is a, c, g, or t
  misc_feature (1742)..(1742): n is a, c, g, or t
  misc_feature (1774)..(1774): n is a, c, g, or t
  misc_feature (2160)..(2160): n is a, c, g, or t
  misc_feature (2265)..(2265): n is a, c, g, or t
  misc_feature (2281)..(2281): n is a, c, g, or t
  misc_feature (2762)..(2762): n is a, c, g, or t
gttgattgtagagaatgcagacctcgtgtcatgctcaagtgtcaccttaatgtaatggctggagacagccacatatgaccctctcattgtccagtcagtaagctcaatcaatgacaggaaccactgactctggtaattaaaaacttattgtggccgggcacagtggctcacgcctgaaatcccagcactttgggaggcaaaggtgggcagatcacctgaggtcaggagttcaagaccagcctggccaacatggtgaaaccccatctctactaaaaatacaaaattagctgggcgtggtggggttgcctataattccagctactcaggaggctaagacaggagaaacacttgaacccaggaggtggaggttgcagtaagctgagatcgcatcattgcactccagcctgggcaacaagagtgaaactgtctaaaaaacaaacaacaacaacaacaacaaaaacacttattgctgggcaggttctcataagaggccatgggaaagccatgtcctatctcagggacacagggtcatctgggcctctggctaatagaggccaaataatgggactattttccctgtgaaatcctgaaaaccaaaaatggtggcgtctttatctgcattagcagaggtaatttgctccttcttgaaatccaaggtcacgtctactgtctggggattttgatccagggtcagtgtggtttctcctttacaggagagccgagtctcagaaaggtgaggtggtttgtgttggtcattggctacctcagattttagagcagctctaccttgattgtggggttgacctaattttttttgctgtcttctttcttctccaggtgaggaaagaggacttcctgtatatctctatccttttgtttccattactcactttctgtggctgctgctgcagaagccactgctgactgatgtggatacctcaatctttggtttacaaaaagcctaggtgtcttttggcctctctccaggttgatagccatggctcctgaaagaaataaaagatgatcatctttctaaaaagtcttaagtctgaattattagtaacttaactggagaatctcacttttcctactctngtattttaaccacagttgctctaacacagacctttgaggatcttttcatgacttcattcacaaataccnatttatgctgtacagatgctactaggaaggaaatagggatgtctgttttgactgtggaacttaacttggtctcgtctcttcgtgcatgcaaccctgtccttgggatagctttcttgagcatatctacttatgttcaagaggtaaattgtcctgaaacccccattgctataagtatttattttattactcataatacttaatgctcctaaagttggggtattttttttttggatacctaaacttcattgagatactttgaactatttatagagaaaacggaaccttctaatacctggcttctatttcttaaaatgttatgatcatacatggcttagggctttatggccaaataacttcactgaacccaggaaaaagaatagatccatctgaaacagacctgtagcttccagaggcctaaattttcggctccatttgtatccttcattttctgtgaggtaaagaagtggaaggagacaagcctcagcccttcccctggcacctttactcttcgcccttcctcctggcatggtggaaagtgcactggaggaggagtgaagggccctaggtttgcatccatnttctgccacttgccaaccttaatggcccttanaattgatttaccctcatgaaatttggaatgatttctaaagtctttcctcgccctgaatgttaacattttttgatagtcaggactttctgtagcttcaccttccttatttagtgttatttttttctcaagactgaacagagagggaagctgtcaaagtgtgctgggcacacaccctgcagtggggcaatggccaattctaatctcaagtcattaggctgcagtagcatgaccactgcttcctgtctaccctcagagggtagagacagctgagctcctgtagttggggtcaggcccagccactctgtggggacagtgattagtgttgtgtcaccaattcagggaaggagccaccttgtcttattttccctcttgaattatcttgatangaccccattataaatttccttttgtaaacctctgtctcccaatttctccttttagcttactttctattgaagtagaggaacagagtacaacttccatcctctttnatcagccctgagagcngaacgcaagcgccgttactgggaactatatccttggctccctggatgtggctattaacttctggcctgccactctatcacatacacatatggagatggtgtcatccatgtaccttaccccgtatttacaacttctatcacccaacagtgccaatggccctgatggtccctctgggagggagagaagagtaagctggagtcaccccttccctgtacttcccacctcgccaggcctgttggtgttagtgtcccttctgatcttggcctgacccctgtgccctgggcactgggctgcaggttggagaggcagcatgatggagtggggataacacatactccaaaaccaaacagaagccagacctgggttgggtcctggcgaaacagtctagaggcttggtgaccttaacctcctaattaatcttcctaagcataagtttccttatcataagttatgtatgataaaattttccttggatgcattnattttagcatgacttgaaattatgtgtgaaggaacctggcccacggaagttgccctgtaaattcagattcactttcccttggacatatggatgacattagctcattacagttatgacctccctaaaactcccaaatattctttaagttcttctcttattttccctttagtttgtagtcatatttcttagttcttatatcagttgggattcccacatcttctagttggacaatattggagaagacaccacattttaactgagttccagtgatatgacaggctttcaattctctaatctcacagaagttagaaaaaaagtagataatcaaaatccacagaaaatatagaagattccattaactctgagaatgattctcaggtatccttaggacctcaagaaagctgttctctcctgggcctgtagagagttcaagtgccaggaatctaccacaaagtagccgggaggtgcagggcagcagggggcacagtgaagtgctgaagggcttctcagtcttctttaattagagtgagaagaaaagagcacctcctcattttagagtacatggtgtgaactcactctcagctgccaagtgagcttcaccttgggctgttttgcatgctttctcctagtgctttaagccaccctgagatgtacagaccaatactggccatcacaaaaatatactcgagtacatagaccattgacactataaagcaagtaaacaatgaagtctacataacagccaaataacaacatgatgataggatcaaatctgcacatatcaatattaaccttgaatgtaaatgagctaaatgcctcaattaataggcagagagtggcaagttggacagagaagcaagacccaactgtatgtcttcaagagacccatctcatatgcagggacaccaatagcctcaaagtaagggatggagaaagatctatcaagcaaatggaaaacaaaaaacagcactctctgtccaacaaaaacagaatatacattcttttcagctgcacatggtacatactcttaaaatcgaccacaattgctttattggccagaaagcaattctcaacaaattcaagaaacctgaaataccggccaggtgtagtggctcacacctgtaatcccaacactttggaaggctgaggtgggcaaatcacttgaggtcaagagtttgagaccagcctggccaacatggcaaaaacccatctcttctaaaaaatataaaaattagccgtgcatggtggcatgcgcctgtaatcccagctacttcggaggttgagtcacgagaattgcttgaacctgggaggaggaggttgcagtgagctgagatcacgccattgcactccagtctggttgacagagtgagactcatctcaaaaaaacaaaaaaaccctgaaataccaaccacactcttggaccacagtgccataaaaataaataccaagaagatctctcaaaaccatataattaagtggaaattaatctactcctgaatgacttgggtaaacaaagagaaattaaggcagaaatcaagaaattgtttacaact

SEQ ID NO: 347393 - DNA, 4626 bp, Homo sapiens
  misc_feature (1406)..(1406): n is a, c, g, or t
  misc_feature (1475)..(1475): n is a, c, g, or t
  misc_feature (2053)..(2053): n is a, c, g, or t
  misc_feature (2085)..(2085): n is a, c, g, or t
  misc_feature (2471)..(2471): n is a, c, g, or t
  misc_feature (2576)..(2576): n is a, c, g, or t
  misc_feature (2592)..(2592): n is a, c, g, or t
  misc_feature (3073)..(3073): n is a, c, g, or t
cggggcggcaaaacgtccgcccgggcccgaggcgggcggaggcagctgtggttacgtgcggggggccggtgacgcagtcgcggggcgctgggacgcggcttgcggagccggccggcgagcgcaggccccaggctcgggcgcggcggcgggacagcacctaccttcccggcttcgggtccgggagtgcggggcgcggagccgccggagcgctgcctccctccttcctcctcccctcgcccccgccccgcggcgcgacacacaatactcgccggaagcggaagccgcgccgaggctcgtgtcagtggaagctggggtgtcggcgggcggccgcggccgggtctagcggtgcctgcggaagaaggaggaggagggctggcgatgagaagcagcagggggaatcaagggcaagaagggacccagaggggcaggtggctgagatgctggcgtccaggtgacccgaggaatcctctggagatacaggcccgcgcatgcgcgtgctcgagcgctgaagcccattgcccgcagggcgctggactggcgccccggccggcgaggctgtctagtccaggctccaggccccggctctggccaggcgccgccgcctcccggtgcagctgaaagtcgacgaagagggcggggcgggggcggcttgtggacttccacacttttcctctcttcgggccagtctggggagagggtggctagctgtggcggcggccaattacgtggcggacctgcggggctaagctggcacgtcacttccgactagtggagtttttagccttttaacattcaaggattaggtaagttctccccgcggtagacttcaaatactctttgtcctgcccctgcttggcgaaatttaccgaaattatctacctatcccgctggagtgggagccgggggagagctggaaccgcgtctctgctgctcacctttgtgtccttagctccttcgcatggggtccgaccgcaacacgtgcgctggataaacgcttgttaactgggtgagagccaaggcctgttctttccacttctggggctgtgacttgagtttctccgcaggagcagatagtgtttgtgtagggactgcggacttttgcattacagcctccctgctttgcccgcctgctgctggaagcttagcaggtgaggaaagaggacttcctgtatatctctatccttttgtttccattactcactttctgtggctgctgctgcagaagccactgctgactgatgtggatacctcaatctttggtttacaaaaagcctaggtgtcttttggcctctctccaggttgatagccatggctcctgaaagaaataaaagatgatcatctttctaaaaagtcttaagtctgaattattagtaacttaactggagaatctcacttttcctactctngtattttaaccacagttgctctaacacagacctttgaggatcttttcatgacttcattcacaaataccnatttatgctgtacagatgctactaggaaggaaatagggatgtctgttttgactgtggaacttaacttggtctcgtctcttcgtgcatgcaaccctgtccttgggatagctttcttgagcatatctacttatgttcaagaggtaaattgtcctgaaacccccattgctataagtatttattttattactcataatacttaatgctcctaaagttggggtattttttttttggatacctaaacttcattgagatactttgaactatttatagagaaaacggaaccttctaatacctggcttctatttcttaaaatgttatgatcatacatggcttagggctttatggccaaataacttcactgaacccaggaaaaagaatagatccatctgaaacagacctgtagcttccagaggcctaaattttcggctccatttgtatccttcattttctgtgaggtaaagaagtggaaggagacaagcctcagcccttcccctggcacctttactcttcgcccttcctcctggcatggtggaaagtgcactggaggaggagtgaagggccctaggtttgcatccatnttctgccacttgccaaccttaatggcccttanaattgatttaccctcatgaaatttggaatgatttctaaagtctttcctcgccctgaatgttaacattttttgatagtcaggactttctgtagcttcaccttccttatttagtgttatttttttctcaagactgaacagagagggaagctgtcaaagtgtgctgggcacacaccctgcagtggggcaatggccaattctaatctcaagtcattaggctgcagtagcatgaccactgcttcctgtctaccctcagagggtagagacagctgagctcctgtagttggggtcaggcccagccactctgtggggacagtgattagtgttgtgtcaccaattcagggaaggagccaccttgtcttattttccctcttgaattatcttgatangaccccattataaatttccttttgtaaacctctgtctcccaatttctccttttagcttactttctattgaagtagaggaacagagtacaacttccatcctctttnatcagccctgagagcngaacgcaagcgccgttactgggaactatatccttggctccctggatgtggctattaacttctggcctgccactctatcacatacacatatggagatggtgtcatccatgtaccttaccccgtatttacaacttctatcacccaacagtgccaatggccctgatggtccctctgggagggagagaagagtaagctggagtcaccccttccctgtacttcccacctcgccaggcctgttggtgttagtgtcccttctgatcttggcctgacccctgtgccctgggcactgggctgcaggttggagaggcagcatgatggagtggggataacacatactccaaaaccaaacagaagccagacctgggttgggtcctggcgaaacagtctagaggcttggtgaccttaacctcctaattaatcttcctaagcataagtttccttatcataagttatgtatgataaaattttccttggatgcattnattttagcatgacttgaaattatgtgtgaaggaacctggcccacggaagttgccctgtaaattcagattcactttcccttggacatatggatgacattagctcattacagttatgacctccctaaaactcccaaatattctttaagttcttctcttattttccctttagtttgtagtcatatttcttagttcttatatcagttgggattcccacatcttctagttggacaatattggagaagacaccacattttaactgagttccagtgatatgacaggctttcaattctctaatctcacagaagttagaaaaaaagtagataatcaaaatccacagaaaatatagaagattccattaactctgagaatgattctcaggtatccttaggacctcaagaaagctgttctctcctgggcctgtagagagttcaagtgccaggaatctaccacaaagtagccgggaggtgcagggcagcagggggcacagtgaagtgctgaagggcttctcagtcttctttaattagagtgagaagaaaagagcacctcctcattttagagtacatggtgtgaactcactctcagctgccaagtgagcttcaccttgggctgttttgcatgctttctcctagtgctttaagccaccctgagatgtacagaccaatactggccatcacaaaaatatactcgagtacatagaccattgacactataaagcaagtaaacaatgaagtctacataacagccaaataacaacatgatgataggatcaaatctgcacatatcaatattaaccttgaatgtaaatgagctaaatgcctcaattaataggcagagagtggcaagttggacagagaagcaagacccaactgtatgtcttcaagagacccatctcatatgcagggacaccaatagcctcaaagtaagggatggagaaagatctatcaagcaaatggaaaacaaaaaacagcactctctgtccaacaaaaacagaatatacattcttttcagctgcacatggtacatactcttaaaatcgaccacaattgctttattggccagaaagcaattctcaacaaattcaagaaacctgaaataccggccaggtgtagtggctcacacctgtaatcccaacactttggaaggctgaggtgggcaaatcacttgaggtcaagagtttgagaccagcctggccaacatggcaaaaacccatctcttctaaaaaatataaaaattagccgtgcatggtggcatgcgcctgtaatcccagctacttcggaggttgagtcacgagaattgcttgaacctgggaggaggaggttgcagtgagctgagatcacgccattgcactccagtctggttgacagagtgagactcatctcaaaaaaacaaaaaaaccctgaaataccaaccacactcttggaccacagtgccataaaaataaataccaagaagatctctcaaaaccatataattaagtggaaattaatctactcctgaatgacttgggtaaacaaagagaaattaaggcagaaatcaagaaattgtttacaact

SEQ ID NO: 347394 - DNA, 3324 bp, Homo sapiens
cggggcggcaaaacgtccgcccgggcccgaggcgggcggaggcagctgtggttacgtgcggggggccggtgacgcagtcgcggggcgctgggacgcggcttgcggagccggccggcgagcgcaggccccaggctcgggcgcggcggcgggacagcacctaccttcccggcttcgggtccgggagtgcggggcgcggagccgccggagcgctgcctccctccttcctcctcccctcgcccccgccccgcggcgcgacacacaatactcgccggaagcggaagccgcgccgaggctcgtgtcagtggaagctggggtgtcggcgggcggccgcggccgggtctagcggtgcctgcggaagaaggaggaggagggctggcgatgagaagcagcagggggaatcaagggcaagaagggacccagaggggcaggtggctgagatgctggcgtccaggtgacccgaggaatcctctggagatacaggcccgcgcatgcgcgtgctcgagcgctgaagcccattgcccgcagggcgctggactggcgccccggccggcgaggctgtctagtccaggctccaggccccggctctggccaggcgccgccgcctcccggtgcagctgaaagtcgacgaagagggcggggcgggggcggcttgtggacttccacacttttcctctcttcgggccagtctggggagagggtggctagctgtggcggcggccaattacgtggcggacctgcggggctaagctggcacgtcacttccgactagtggagtttttagccttttaacattcaaggattaggtaagttctccccgcggtagacttcaaatactctttgtcctgcccctgcttggcgaaatttaccgaaattatctacctatcccgctggagtgggagccgggggagagctggaaccgcgtctctgctgctcacctttgtgtccttagctccttcgcatggggtccgaccgcaacacgtgcgctggataaacgcttgttaactgggtgagagccaaggcctgttctttccacttctggggctgtgacttgagtttctccgcaggagcagatagtgtttgtgtagggactgcggacttttgcattacagcctccctgctttgcccgcctgctgctggaagcttagcagagctccctctttgcccactagcagggcattagctggtgctgaagacagtggctgcttggcgagcctggatctccaagtgaccccctcagcaactcctgatgaacaggactgaagccaatattaaagcaagtcaaccaaaggttctctggtgtagacaagacagcaaaaggacagactaccttgtggaacctagcattgttctccttctgcagcactaagtaacatttgttctccgttaagatctttgcaaaccacacacaagaattgctggtcatcctgccaatagatgctgctcacagaaccaaatttcctgtgctgaattgtcactcatgggcttgagagtaggagactggagaccaaggtggctagaatccagttgggcctgatgtctccctgttgaaagggctccttgtggaatgaatagcacatggctcctgtggtggatctgatagtggcatagcaccaagtgatgcaggcctgccaggggccacagacacagaagatgctcccggggtcccccatgtactccagacacactgcaggccacctctcccagcaggttgccagtcatgggccccatcatcatgacttctgtccaaggtgtgctcggaaatctcttccttaactgtgactttctgacaggtggaggatgtggtcaggagtgggaaaaggattcgagacgggaagagggaggggttcaggatgaagagagataatctgtgccacagatgctggccctgcagttagctcccacctagtccgtgcacacacattctaatcccctcccattcctttacatgctgcggccagagaggcctttctcaaagtggaagtctcatcctcacttctctggttacagtgctgggccatggtaacttacaaggcttagcaggaactgtctgcgcactcccccttcctgcccactaccttgtttccctccagttgcgagagaaaacattgattgagcattaactatgtgccaggcttgtcctaagtcctttgcatgtattcactcaaacaatcctcacaacattcctatcacatctcccatttcacagtgagggttctaaagcacgtagtgggtgaggaacttgtccagggtcacacaactaagtgggggtggagaaacatcaaatctaggtggtccaggtggtggccagaacccatcagcacctcactacagctgcctccagtttctcgctctaggaaatactcttccctgtcaactcctgttgtcctctgggctcagttgacatgtcatctccttgaggaggacatcctgagatgctccccgactagggtgggcacccacttccacactccaaatgcctatttgacctgtgtatcgctgcatccccactgcctggcagatagcaggcccctaataaatatgatttgagcaaataaatatagttcttcaaaaaatagggaggacttcttgcttcaggtaatggtaggctaggacatttggaccaaccctcctgcagaaaatagccatttattttgatgcaatatatctggctatgactagagatttcaaatatttggagggctattatgtgaagaactaaacttactctttgtgacatagaggtcagaaattggtcgtttccatagagtatgagagagacagaattgtgctcatcataagtatcttttttaaaagttagacttaataaaatgggctgccttggtaggtggtgagttctctgtcacgaaagagattcagccacttgctctgagaaagcatggagaatatcaacattgtaagggtcgaccacctcatctctgaggccccctcctcacttaggttgccattgcaggtggaacactgggctgagtgtcaaagaacctgggttccacaagctgtgcgaccatggctggttgttttggatctcattcctaatatctgttagttaagctgacccgtcaatactgacccacttcacagagttatgaagggattaaattaggtattacatgtaaatctgttttgtttgctttttgttgttcttttttgttttgcttttttctttgcattatgaaatcccaagtcaactttttccattcttttatttttttaaaaattgacatcatcattataaccacaaaataatttttaaatggaaaaaaaaaactcacctgcaaccccacaatctaatacaataatcatact

SEQ ID NO: 347395 - DNA, 1092 bp, Homo sapiens
cggggcggcaaaacgtccgcccgggcccgaggcgggcggaggcagctgtggttacgtgcggggggccggtgacgcagtcgcggggcgctgggacgcggcttgcggagccggccggcgagcgcaggccccaggctcgggcgcggcggcgggacagcacctaccttcccggcttcgggtccgggagtgcggggcgcggagccgccggagcgctgcctccctccttcctcctcccctcgcccccgccccgcggcgcgacacacaatactcgccggaagcggaagccgcgccgaggctcgtgtcagtggaagctggggtgtcggcgggcggccgcggccgggtctagcggtgcctgcggaagaaggaggaggagggctggcgatgagaagcagcagggggaatcaagggcaagaagggacccagaggggcaggtggctgagatgctggcgtccaggtgacccgaggaatcctctggagatacaggcccgcgcatgcgcgtgctcgagcgctgaagcccattgcccgcagggcgctggactggcgccccggccggcgaggctgtctagtccaggctccaggccccggctctggccaggcgccgccgcctcccggtgcagctgaaagtcgacgaagagggcggggcgggggcggcttgtggacttccacacttttcctctcttcgggccagtctggggagagggtggctagctgtggcggcggccaattacgtggcggacctgcggggctaagctggcacgtcacttccgactagtggagtttttagccttttaacattcaaggattagagctccctctttgcccactagcagggcattagctggtgctgaagacagtggctgcttggcgagcctggatctccaagtgaccccctcagcaactcctgatgaacaggtagcatgtaaaagaaatctttttggtttataccagtgagatacgggagttgtatatcattgcagcataatctaggctatagatgatgcaatactgctacattagggtctttgatttctagtcaggccctatgcctaggatagcttactgctggcacactcttcagccagtctctcagctctg

SEQ ID NO: 347396 - DNA, 3632 bp, Homo sapiens
cggggcggcaaaacgtccgcccgggcccgaggcgggcggaggcagctgtggttacgtgcggggggccggtgacgcagtcgcggggcgctgggacgcggcttgcggagccggccggcgagcgcaggccccaggctcgggcgcggcggcgggacagcacctaccttcccggcttcgggtccgggagtgcggggcgcggagccgccggagcgctgcctccctccttcctcctcccctcgcccccgccccgcggcgcgacacacaatactcgccggaagcggaagccgcgccgaggctcgtgtcagtggaagctggggtgtcggcgggcggccgcggccgggtctagcggtgcctgcggaagaaggaggaggagggctggcgatgagaagcagcagggggaatcaagggcaagaagggacccagaggggcaggtggctgagatgctggcgtccaggtgacccgaggaatcctctggagatacaggcccgcgcatgcgcgtgctcgagcgctgaagcccattgcccgcagggcgctggactggcgccccggccggcgaggctgtctagtccaggctccaggccccggctctggccaggcgccgccgcctcccggtgcagctgaaagtcgacgaagagggcggggcgggggcggcttgtggacttccacacttttcctctcttcgggccagtctggggagagggtggctagctgtggcggcggccaattacgtggcggacctgcggggctaagctggcacgtcacttccgactagtggagtttttagccttttaacattcaaggattaggtaagttctccccgcggtagacttcaaatactctttgtcctgcccctgcttggcgaaatttaccgaaattatctacctatcccgctggagtgggagccgggggagagctggaaccgcgtctctgctgctcacctttgtgtccttagctccttcgcatggggtccgaccgcaacacgtgcgctggataaacgcttgttaactgggtaaaagtcttgcagtgaaaaacccgaggacccttaccgcaagtgtcttttgctcccagctactgatactggattccactcgtgattctccctttcttagcgcattcatgatatagacatcagtctctgagctggaggaggacaaaggcagcggtcctgtgaattctatgctctagcttgggttaagggatttggaattgcacttgtttcagagagctccctctttgcccactagcagggcattagctggtgctgaagacagtggctgcttggcgagcctggatctccaagtgaccccctcagcaactcctgatgaacaggactgaagccaatattaaagcaagtcaaccaaaggttctctggtgtagacaagacagcaaaaggacagactaccttgtggaacctagcattgttctccttctgcagcactaagtaacatttgttctccgttaagatctttgcaaaccacacacaagaattgctggtcatcctgccaatagatgctgctcacagaaccaaatttcctgtgctgaattgtcactcatgggcttgagagtaggagactggagaccaaggtggctagaatccagttgggcctgatgtctccctgttgaaagggctccttgtggaatgaatagcacatggctcctgtggtggatctgatagtggcatagcaccaagtgatgcaggcctgccaggggccacagacacagaagatgctcccggggtcccccatgtactccagacacactgcaggccacctctcccagcaggttgccagtcatgggccccatcatcatgacttctgtccaaggtactgtgtgcagaaatgtgattgagattcaagtcagggcctctctgcccttttccctccagaaacaaaaccaagataatttatcctgaacacggtgaaaaaaggaagggagggaggagaaaaagtccgggtctcacctgggattctctgtctcctgcaacatgaaggatttagcctgggaggaggtggtgagaactctgggagagaaaaaagaaggaaagaatagttttacccatgctgaagttaatttaaaccttcacctagagaagcaaaaaaaaaaacccacactttcccattttgtgcctcccttcctagagttttagccaaaggtttagctaagtaattggttttaccagggcactcactcctcctatcccaagtctgtttgactccctccccatcatcctcctcacctcttttcaggcagggtggggatagcagcaggaggagattttgggagcctggcaactcctgcaaggaccgcaggacagcccctctgtggggatgcgtggtgccccatctgccgcccttctgaagaatgcactgccttcactttttactgtgttagagtccatccagactgttctatccaaaaaagtttctttttcccccacaggcaatcaggaaatgattcctttcccgactgcttctgtctagtgcctgggaatcttgagtcaatccctcagtaagtcagtgactagggaaatccctctctgagcctcccagttcatgttgcttagggaacctgatattttcgtgaaacctgcctacacatgggcagcccaacagcagaacaaatggtggtgaccaaagtgaacaaagaagtatagttgtgccagcttcgtagttgcccatgtggacaagtcagcaggatcaggacacgaggaagagtaaatgtgagacagtcaatgtgacttctgcgataaacagatttttaaaccccgaaattttgcaaaattttggtgaaacctgaactttcttcgttgcatatactggcactatctgtaccatcatacaactgtctcacattaaagctatttttcttgggcactgatgagtaaggttggtataagttcctcagatcaacaaaaacccattttcctgtaagtcttacatttagtatttaaggaactaaaacttaaatacattttgtgaaatggttgacacttcactgataatgatttattgcttggattaataaattttccaaaagttgtcttatgtagaatatggtttgcaaccagcagaaccattaatctatactgcaatgatatgcactatgtataattgtttaaaagcctctacttaatgatgtaaaatgctctatttaattacacatttgggtaaactgtatactaacatctgatggcatttttccactgtttgttgcttttttcaaatactttattgtacaaagctgttcttaatatttttcaagtttttttctttgaattttgctaatgttttccttgaattatgagcactgacagaatgtgcttagcacttttggctattcacacagcttttgagcatgatttgcatccaatatttacattgctagcaataataagccatctgtgagttttgtcaaaagttattggggattttttaaattttagaaatgcaaattattgtttctttgaactaactcttatgcagttgcaaaggcatttccagttgttatagtttgtgtacaatatcaggtgttccagattatgattcattattaatatcattgcttccttgttccctctgaggtccagaagattcatgtttacaatatttagaaacaatgttaaaaaggtatccaaa

SEQ ID NO: 347397 - DNA, 2798 bp, Homo sapiens
cggggcggcaaaacgtccgcccgggcccgaggcgggcggaggcagctgtggttacgtgcggggggccggtgacgcagtcgcggggcgctgggacgcggcttgcggagccggccggcgagcgcaggccccaggctcgggcgcggcggcgggacagcacctaccttcccggcttcgggtccgggagtgcggggcgcggagccgccggagcgctgcctccctccttcctcctcccctcgcccccgccccgcggcgcgacacacaatactcgccggaagcggaagccgcgccgaggctcgtgtcagtggaagctggggtgtcggcgggcggccgcggccgggtctagcggtgcctgcggaagaaggaggaggagggctggcgatgagaagcagcagggggaatcaagggcaagaagggacccagaggggcaggtggctgagatgctggcgtccaggtgacccgaggaatcctctggagatacaggcccgcgcatgcgcgtgctcgagcgctgaagcccattgcccgcagggcgctggactggcgccccggccggcgaggctgtctagtccaggctccaggccccggctctggccaggcgccgccgcctcccggtgcagctgaaagtcgacgaagagggcggggcgggggcggcttgtggacttccacacttttcctctcttcgggccagtctggggagagggtggctagctgtggcggcggccaattacgtggcggacctgcggggctaagctggcacgtcacttccgactagtggagtttttagccttttaacattcaaggattaggtaagttctccccgcggtagacttcaaatactctttgtcctgcccctgcttggcgaaatttaccgaaattatctacctatcccgctggagtgggagccgggggagagctggaaccgcgtctctgctgctcacctttgtgtccttagctccttcgcatggggtccgaccgcaacacgtgcgctggataaacgcttgttaactgggtgagagccaaggcctgttctttccacttctggggctgtgacttgagtttctccgcaggagcagatagtgtttgtgtagggactgcggacttttgcattacagcctccctgctttgcccgcctgctgctggaagcttagcagagctccctctttgcccactagcagggcattagctggtgctgaagacagtggctgcttggcgagcctggatctccaagtgaccccctcagcaactcctgatgaacaggactgaagccaatattaaagcaagtcaaccaaaggttctctggtgtagacaagacagcaaaaggacagactaccttgtggaacctagcattgttctccttctgcagcactaagtaacatttgttctccgttaagatctttgcaaaccacacacaagaattgctggtcatcctgccaatagatgctgctcacagaaccaaatttcctgtgctgaattgtcactcatgggcttgagagtaggagactggagaccaaggtggctagaatccagttgggcctgatgtctccctgttgaaagggctccttgtggaatgaatagcacatggctcctgtggtggatctgatagtggcatagcaccaagtgatgcaggcctgccaggggccacagacacagaagatgctcccggggtcccccatgtactccagacacactgcaggccacctctcccagcaggttgccagtcatgggccccatcatcatgacttctgtccaaggtactgtgtgcagaaatgtgattgagattcaagtcagggcctctctgcccttttccctccagaaacaaaaccaagataatttatcctgaacacggtgaaaaaaggaagggagggaggagaaaaagtccgggtctcacctgggattctctgtctcctgcaacatgaaggatttagcctgggaggaggtggtgagaactctgggagagaaaaaagaaggaaagaatagttttacccatgctgaagttaatttaaaccttcacctagagaagcaaaaaaaaaaacccacactttcccattttgtgcctcccttcctagagttttagccaaaggtttagctaagtaattggttttaccagggcactcactcctcctatcccaagtctgtttgactccctccccatcatcctcctcacctcttttcaggcagggtggggatagcagcaggaggagattttgggagcctggcaactcctgcaaggaccgcaggacagcccctctgtggggatgcgtggtgccccatctgccgcccttctgaagaatgcactgccttcactttttactgtgttagagtccatccagactgttctatccaaaaaagtttctttttcccccacaggcaatcaggaaatgattcctttcccgactgcttctgtctagtgcctgggaatcttgagtcaatccctcagtaagtcagtgactagggaaatccctctctgagcctcccagttcatgttgcttagggaacctgatattttcgtgaaacctgcctacacatgggcagcccaacagcagaacaaatggtggtgaccaaagtgaacaaagaagtatagttgtgccagcttcgtagttgcccatgtggacaagtcagcaggatcaggacacgaggaagagtaaatgtgagacagtcaatgtgacttctgcgataaacagatttttaaaccccgaaattttgcaaaattttggtgaaacctgaactttcttcgttgcatatactggcactatctgtaccatcatacaactgtctcacattaaagctatttttcttgggca

SEQ ID NO: 347398 - DNA, 2161 bp, Homo sapiens
cggggcggcaaaacgtccgcccgggcccgaggcgggcggaggcagctgtggttacgtgcggggggccggtgacgcagtcgcggggcgctgggacgcggcttgcggagccggccggcgagcgcaggccccaggctcgggcgcggcggcgggacagcacctaccttcccggcttcgggtccgggagtgcggggcgcggagccgccggagcgctgcctccctccttcctcctcccctcgcccccgccccgcggcgcgacacacaatactcgccggaagcggaagccgcgccgaggctcgtgtaaaagtcttgcagtgaaaaacccgaggacccttaccgcaagtgtcttttgctcccagctactgatactggattccactcgtgattctccctttcttagcgcattcatgatatagacatcagtctctgagctggaggaggacaaaggcagcggtcctgtgaattctatgctctagcttgggttaagggatttggaattgcacttgtttcagagagctccctctttgcccactagcagggcattagctggtgctgaagacagtggctgcttggcgagcctggatctccaagtgaccccctcagcaactcctgatgaacaggactgaagccaatattaaagcaagtcaaccaaaggttctctggtgtagacaagacagcaaaaggacagactaccttgtggaacctagcattgttctccttctgcagcactaagtaacatttgttctccgttaagatctttgcaaaccacacacaagaattgctggtcatcctgccaatagatgctgctcacagaaccaaatttcctgtgctgaattgtcactcatgggcttgagagtaggagactggagaccaaggtggctagaatccagttgggcctgatgtctccctgttgaaagggctccttgtggaatgaatagcacatggctcctgtggtggatctgatagtggcatagcaccaagtgatgcaggcctgccaggggccacagacacagaagatgctcccggggtcccccatgtactccagacacactgcaggccacctctcccagcaggttgccagtcatgggccccatcatcatgacttctgtccaaggtactgtgtgcagaaatgtgattgagattcaagtcagggcctctctgcccttttccctccagaaacaaaaccaagataatttatcctgaacacggtgaaaaaaggaagggagggaggagaaaaagtccgggtctcacctgggattctctgtctcctgcaacatgaaggatttagcctgggaggaggtggtgagaactctgggagagaaaaaagaaggaaagaatagttttacccatgctgaagttaatttaaaccttcacctagagaagcaaaaaaaaaaacccacactttcccattttgtgcctcccttcctagagttttagccaaaggtttagctaagtaattggttttaccagggcactcactcctcctatcccaagtctgtttgactccctccccatcatcctcctcacctcttttcaggcagggtggggatagcagcaggaggagattttgggagcctggcaactcctgcaaggaccgcaggacagcccctctgtggggatgcgtggtgccccatctgccgcccttctgaagaatgcactgccttcactttttactgtgttagagtccatccagactgttctatccaaaaaagtttctttttcccccacaggcaatcaggaaatgattcctttcccgactgcttctgtctagtgcctgggaatcttgagtcaatccctcagtaagtcagtgactagggaaatccctctctgagcctcccagttcatgttgcttagggaacctgatattttcgtgaaacctgcctacacatgggcagcccaacagcagaacaaatggtggtgaccaaagtgaacaaagaagtatagttgtgccagcttcgtagttgcccatgtggacaagtcagcaggatcaggacacgaggaagagtaaatgtgagacagtcaatgtgacttctgcgataaacagatttttaaaccccgaaattttgcaaaattttggtgaaacctgaactttcttcgttgcatatactggcactatctgtaccatcatacaactgtctcacattaaagctatttttcttgggca

SEQ ID NO: 347399 - DNA, 1959 bp, Homo sapiens
cggggcggcaaaacgtccgcccgggcccgaggcgggcggaggcagctgtggttacgtgcggggggccggtgacgcagtcgcggggcgctgggacgcggcttgcggagccggccggcgagcgcaggccccaggctcgggcgcggcggcgggacagcacctaccttcccggcttcgggtccgggagtgcggggcgcggagccgccggagcgctgcctccctccttcctcctcccctcgcccccgccccgcggcgcgacacacaatactcgccggaagcggaagccgcgccgaggctcgtgtcagtggaagctggggtgtcggcgggcggccgcggccgggtctagcggtgcctgcggaagaaggaggaggagggctggcgatgagaagcagcagggggaatcaagggcaagaagggacccagaggggcaggtggctgagatgctggcgtccaggtgacccgaggaatcctctggagatacaggcccgcgcatgcgcgtgctcgagcgctgaagcccattgcccgcagggcgctggactggcgccccggccggcgaggctgtctagtccaggctccaggccccggctctggccaggcgccgccgcctcccggtgcagctgaaagtcgacgaagagggcggggcgggggcggcttgtggacttccacacttttcctctcttcgggccagtctggggagagggtggctagctgtggcggcggccaattacgtggcggacctgcggggctaagctggcacgtcacttccgactagtggagtttttagccttttaacattcaaggattagagctccctctttgcccactagcagggcattagctggtgctgaagacagtggctgcttggcgagcctggatctccaagtgaccccctcagcaactcctgatgaacaggtactgtgtgcagaaatgtgattgagattcaagtcagggcctctctgcccttttccctccagaaacaaaaccaagataatttatcctgaacacggtgaaaaaaggaagggagggaggagaaaaagtccgggtctcacctgggattctctgtctcctgcaacatgaaggatttagcctgggaggaggtggtgagaactctgggagagaaaaaagaaggaaagaatagttttacccatgctgaagttaatttaaaccttcacctagagaagcaaaaaaaaaaacccacactttcccattttgtgcctcccttcctagagttttagccaaaggtttagctaagtaattggttttaccagggcactcactcctcctatcccaagtctgtttgactccctccccatcatcctcctcacctcttttcaggcagggtggggatagcagcaggaggagattttgggagcctggcaactcctgcaaggaccgcaggacagcccctctgtggggatgcgtggtgccccatctgccgcccttctgaagaatgcactgccttcactttttactgtgttagagtccatccagactgttctatccaaaaaagtttctttttcccccacaggcaatcaggaaatgattcctttcccgactgcttctgtctagtgcctgggaatcttgagtcaatccctcagtaagtcagtgactagggaaatccctctctgagcctcccagttcatgttgcttagggaacctgatattttcgtgaaacctgcctacacatgggcagcccaacagcagaacaaatggtggtgaccaaagtgaacaaagaagtatagttgtgccagcttcgtagttgcccatgtggacaagtcagcaggatcaggacacgaggaagagtaaatgtgagacagtcaatgtgacttctgcgataaacagatttttaaaccccgaaattttgcaaaattttggtgaaacctgaactttcttcgttgcatatactggcactatctgtaccatcatacaactgtctcacattaaagctatttttcttgggca

SEQ ID NO: 347400 - DNA, 3396 bp, Homo sapiens
cggggcggcaaaacgtccgcccgggcccgaggcgggcggaggcagctgtggttacgtgcggggggccggtgacgcagtcgcggggcgctgggacgcggcttgcggagccggccggcgagcgcaggccccaggctcgggcgcggcggcgggacagcacctaccttcccggcttcgggtccgggagtgcggggcgcggagccgccggagcgctgcctccctccttcctcctcccctcgcccccgccccgcggcgcgacacacaatactcgccggaagcggaagccgcgccgaggctcgtgtcagtggaagctggggtgtcggcgggcggccgcggccgggtctagcggtgcctgcggaagaaggaggaggagggctggcgatgagaagcagcagggggaatcaagggcaagaagggacccagaggggcaggtggctgagatgctggcgtccaggtgacccgaggaatcctctggagatacaggcccgcgcatgcgcgtgctcgagcgctgaagcccattgcccgcagggcgctggactggcgccccggccggcgaggctgtctagtccaggctccaggccccggctctggccaggcgccgccgcctcccggtgcagctgaaagtcgacgaagagggcggggcgggggcggcttgtggacttccacacttttcctctcttcgggccagtctggggagagggtggctagctgtggcggcggccaattacgtggcggacctgcggggctaagctggcacgtcacttccgactagtggagtttttagccttttaacattcaaggattaggtaagttctccccgcggtagacttcaaatactctttgtcctgcccctgcttggcgaaatttaccgaaattatctacctatcccgctggagtgggagccgggggagagctggaaccgcgtctctgctgctcacctttgtgtccttagctccttcgcatggggtccgaccgcaacacgtgcgctggataaacgcttgttaactgggtaaaagtcttgcagtgaaaaacccgaggacccttaccgcaagtgtcttttgctcccagctactgatactggattccactcgtgattctccctttcttagcgcattcatgatatagacatcagtctctgagctggaggaggacaaaggcagcggtcctgtgaattctatgctctagcttgggttaagggatttggaattgcacttgtttcagagagctccctctttgcccactagcagggcattagctggtgctgaagacagtggctgcttggcgagcctggatctccaagtgaccccctcagcaactcctgatgaacaggactgaagccaatattaaagcaagtcaaccaaaggttctctggtgtagacaagacagcaaaaggacagactaccttgtggaacctagcattgttctccttctgcagcactaagtaacatttgttctccgttaagatctttgcaaaccacacacaagaattgctggtcatcctgccaatagatgctgctcacagaaccaaatttcctgtgctgaattgtcactcatgggcttgagagtaggagactggagaccaaggtggctagaatccagttgggcctgatgtctccctgttgaaagggctccttgtggaatgaatagcacatggctcctgtggtggatctgatagtggcatagcaccaagtgatgcaggcctgccaggggccacagacacagaagatgctcccggggtcccccatgtactccagacacactgcaggccacctctcccagcaggttgccagtcatgggccccatcatcatgacttctgtccaaggtgtgctcggaaatctcttccttaactgtgactttctgacaggtggaggatgtggtcaggagtgggaaaaggattcgagacgggaagagggaggggttcaggatgaagagagataatctgtgccacagatgctggccctgcagttagctcccacctagtccgtgcacacacattctaatcccctcccattcctttacatgctgcggccagagaggcctttctcaaagtggaagtctcatcctcacttctctggttacagtgctgggccatggtaacttacaaggcttagcaggaactgtctgcgcactcccccttcctgcccactaccttgtttccctccagttgcgagagaaaacattgattgagcattaactatgtgccaggcttgtcctaagtcctttgcatgtattcactcaaacaatcctcacaacattcctatcacatctcccatttcacagtgagggttctaaagcacgtagtgggtgaggaacttgtccagggtcacacaactaagtgggggtggagaaacatcaaatctaggtggtccaggtggtggccagaacccatcagcacctcactacagctgcctccagtttctcgctctaggaaatactcttccctgtcaactcctgttgtcctctgggctcagttgacatgtcatctccttgaggaggacatcctgagatgctccccgactagggtgggcacccacttccacactccaaatgcctatttgacctgtgtatcgctgcatccccactgcctggcagatagcaggcccctaataaatatgatttgagcaaataaatatagttcttcaaaaaatagggaggacttcttgcttcaggtaatggtaggctaggacatttggaccaaccctcctgcagaaaatagccatttattttgatgcaatatatctggctatgactagagatttcaaatatttggagggctattatgtgaagaactaaacttactctttgtgacatagaggtcagaaattggtcgtttccatagagtatgagagagacagaattgtgctcatcataagtatcttttttaaaagttagacttaataaaatgggctgccttggtaggtggtgagttctctgtcacgaaagagattcagccacttgctctgagaaagcatggagaatatcaacattgtaagggtcgaccacctcatctctgaggccccctcctcacttaggttgccattgcaggtggaacactgggctgagtgtcaaagaacctgggttccacaagctgtgcgaccatggctggttgttttggatctcattcctaatatctgttagttaagctgacccgtcaatactgacccacttcacagagttatgaagggattaaattaggtattacatgtaaatctgttttgtttgctttttgttgttcttttttgttttgcttttttctttgcattatgaaatcccaagtcaactttttccattcttttatttttttaaaaattgacatcatcattataaccacaaaataatttttaaatggaaaaaaaaaactcacctgcaaccccacaatctaatacaataatcatact

SEQ ID NO: 347401 - DNA, 913 bp, Homo sapiens
aacaagattcgctaatagaccagatgttgggtatgagacagagagaggagtcaagagtggtaccaaggtttttggcccaagcacctagaagaatagaactggcattaactgagagagcaggctgcaggagaagctggtttgtggaggaccatcagaagcacagttagacacataccaagttaaggatacctactacacatgtcaagtaggcagttggatatgtaagtctagaggtcaagggacaggtcttgaccacagatggatttggaagtcatcatcacacagatggtatttaatgccatgggactggacgagattcctgtcctagagaatggaacagaaaagtggagcggtccaaggactgattcttggggcactccaaaatctagagacaagggagatgaaaaggaagcaccaagataaatcaagatagtatattaactttagatatgtaaaaagaatttcaaccgttactaaggtcgaattaatgagaaaagtaacagacacaccatcaggaactctatagagatatagtgatacaggggtccccagagaaactccgaccagcttgtgcactgggaaaatggggtggagcttcgtgaagttcacgctgtttgcagggaaaaggagcctggcctctgtgatctggtgtggtaacctggggattcaatctgtgagatgtgggcctgttaacaggaacctctcttgctttgctgagttttttccttttcacccaataaaccctgtccttcctcacccttcaaattgtctgtgagcctaattttttgtggttgtgtgtctttagctgacctaagaaaaaagtcctacaataataatattgctcaaatgatgtgttctaggaagattatattagaaggaatactttatgacttgattttttttcatgtcaact

SEQ ID NO: 347402 - DNA, 772 bp, Homo sapiens
ccatctagttaataagagctcctctgacccacgcacatcaatacttacatcccaatggtgatgtgacattttgggttttgtatttcttttgcaaattgagctagcatttttgatgagtggcagggctctgctacccaacctttggacagtttccaagcataaaatcacaattccagataattctgtcacaaagatctgggtctcattaggaaggagaggaagctgggagatgatccagtccaacctcccccaaaccaaacatcacggccttctcagttgtttcaccaaccatctaaatgttttagtaattctaaaaattgatgcgctttttccacgaaaggaagtgttaccacattttccaagtgggaggcatctatatccttactccttcatcctctccttcccaccccctcaccccccaccacccacacaacatctgcaattcttaaactaaagcacaaattgttacaaaagttaattgcactttcaaaggaatgcttgtatagaaactttctcggcttcaaggaaaaataatacgctttgaatggctgttcaacagcatagaaattagctgagtagaaggcactcatatagccattaggaccaatcctttctgccgccaacaccccccttataaagacttgacagtgggccagaataaacaacttcaggatgaattcagttgagacacaaagtacacacttccagtttttcccttctctggttactggcctcaataaccaggcagtcaacttaaaaagaaaaacaaaag

SEQ ID NO: 347403 - DNA, 621 bp, Homo sapiens
tccagcaggatgtcttatcaacagcagcagtgcaagcagccctgccagccacctcctgtgtgccccacgccaaagtgcccagagccatgtccacccccgaagtgccctgagccctgcccaccaccaaagtgtccacagccctgcccacctcagcagtgccagcagaaatatcctcctgtgacaccttccccaccctgccagccaaagtatccaccgaagagcaagtaacagcttcaggattcatcaggagcatgagaggataaggataattggctcacctcgttccacagctccaccttcatcttctcatcaaagcttatcatggattcatagggagcttctttccccttagcctgtgatctgcccatgatgttccctgatagcaaaaggtttcctttctaaggctgccatactgccactgtccaggtggagactgagcaaaggaaccttggctttgtcagttcccagagcttcagcagaaagagctgcagctgtgtgcctgggaaccatcagagaattctgttgatgtgttctgtgtctgtctttcacctgggcatgagcttctaccacctgtgcaattgtcacttttctttcactccctgaataaagtatctatgcata

SEQ ID NO: 347404 - DNA, 1274 bp, Homo sapiens
gaaggttctgggcggggctggactgttctaagtgagttcgggtgggggagcttcacgaggggaggctgctctgtgaaggaaccgcctttctctccgcgtgtctcacccttttctccccatatctgtttggacatgagctgagggcacggtcgcgggcggtcagccctgttcgcagctacggcgaggaggggcgcgattgttccttgttgccgctccgcttagtggccgcgtccattccgcgcggtgtcccgattttaggggtagggagaagtgtcagcttcaggcatcgcgaggcgtggcggccccatggccccgctgggaggcgccccgcggctggtactgctgttcagcggcaagaggaaatccgggaaggacttcgtgaccgaggcgctgcagagcagacttggagctgatgtctgtgctgtcctccggctctctggtccactcaaggaacagtatgctcaggagcatggcttgaacttccagagactcctggacaccagcacctacaaggaggcctttcggaaggacatgatccgctggggagaggagaaacgccaggctgacccaggcttcttttgcaggaagattgtggagggcatctcccagcccatctggctggtgagtgacacacggagagtgtctgacatccagtggtttcgggaggcctatggggccgtgacgcagacggtccgcgttgtagcgttggagcagagccgacagcagcggggctgggtgttcacgccaggggtggacgatgctgagtcagaatgtggcctggacaacttcggggactttgactgggtcatcgagaaccatggagttgaacagcgcctggaggagcagttggagaacctgatagaatttatccgctccagactttagtcactaggttctaggagtgagctggggcctgctgaggtgggggtggggctgactctgcaaaatgggggtgtcccccgatcctggccgaggtgaggaacagacagggggggtctagattctgagggggttggtggatattgggcaaggcaggaaacctctggagacctcattttctccatggggaagacagccatgctcttcaggaggagactccaagggcaaaggagggtgtcttggctgtgcttgaaggcgaaaccctgccatatccccagtgccagtcccctcagcctgtggtggccttgcatcctgactggatgttctcagccccttgttctgggcaagaacccagagctccccagtgtggatactaataaacctcttggagcaca

SEQ ID NO: 347405 - DNA, 973 bp, Homo sapiens
gaaggttctgggcggggctggactgttctaagtgagttcgggtgggggagcttcacgaggggaggctgctctgtgaaggaaccgcctttctctccgcgtgtctcacccttttctccccatatctgtttggacatgagctgagggcacggtcgcgggcggtcagccctgttcgcagctacggcgaggaggggcgcgattgttccttgttgccgctccgcttagtggccgcgtccattccgcgcggtgtcccgattttaggggtagggagaagtgtcagcttcaggcatcgcgaggcgtggcggccccatggccccgctgggaggcgccccgcggctggtactgctgttcagcggcaagaggaaatccgggaaggacttcgtgaccgaggcgctgcagagcagacttggagctgatgtctgtgctgtcctccggctctctggtccactcaaggaacagtatgctcaggagcatggcttgaacttccagagactcctggacaccagcacctacaaggaggcctttcggaaggacatgatccgctggggagaggagaaacgccaggctgacccaggcttcttttgcaggaagattgtggagggcatctcccagcccatctggctggtgagtgacacacggagagtgtctgacatccagtggtttcgggaggcctatggggccgtgacgcagacggtccgcgttgtagcgttggagcagagccgacagcagcggggctgggtgttcacgccaggggtggacgatgctgagtcagaatgtggcctggacaacttcggggactttgactgggtcatcgagaaccatggagttgaacagcgcctggaggagcagttggagaacctgatagaatttatccgctccagactttagtcactaggttctaggagtgagctggggcctgctgaggtgggggcagggactgtcgacccgcccgcgaatttagtagtagtagtcgccc

SEQ ID NO: 347406 - DNA, 734 bp, Homo sapiens
gaaggttctgggcggggctggactgttctaagtgagttcgggtgggggagcttcacgaggggaggctgctctgtgaaggaaccgcctttctctccgcgtgtctcacccttttctccccatatctgtttggacatgagctgagggcacggtcgcgggcggtcagccctgttcgcagctacggcgaggaggggcgcgattgttccttgttgccgctccgcttagtggccgcgtccattccgcgcggtgtcccgattttaggggtagggagaagtgtcagcttcaggcatcgcgaggcgtggcggccccatggccccgctgggaggcgccccgcggctggtactgctgttcagcggcaagaggaaatccgggaaggacttcgtgaccgaggcgctgcagagcagacttggagctgatgtctgtgctgtcctccggctctctggtccactcaaggaacagtatgctcaggagcatggcttgaacttccagagactcctggacaccagcacctacaaggaggcctttcggaaggacatgatccgctggggagaggagaaacgccaggctgacccaggcttcttttgcaggaagattgtggagggcatctcccagcccatctggctggtgagtgacacacggagagtgtctgacatcctgactggatgttctcagccccttgttctgggcaagaacccagagctccccagtgtggatactaataaacctcttggagcaca

SEQ ID NO: 347407 - DNA, 1673 bp, Homo sapiens
  misc_feature (1298)..(1298): n is a, c, g, or t
gaaggttctgggcggggctggactgttctaagtgagttcgggtgggggagcttcacgaggggaggctgctctgtgaaggaaccgcctttctctccgcgtgtctcacccttttctccccatatctgtttggacatgagctgagggcacggtcgcgggcggtcagccctgttcgcagctacggcgaggaggggcgcgattgttccttgttgccgctccgcttagtggccgcgtccattccgcgcggtgtcccgattttaggggtagggagaagtgtcagcttcaggcatcgcgaggcgtggcggccccatggccccgctgggaggcgccccgcggctggtactgctgttcagcggcaagaggaaatccgggaaggacttcgtgaccgaggcgctgcagagcagacttggagctgatgtctgtgctgtcctccggctctctggtccactcaaggaacagtatgctcaggagcatggcttgaacttccagagactcctggacaccagcacctacaaggaggcctttcggaaggacatgatccgctggggagaggagaaacgccaggctgacccaggcttcttttgcaggaagattgtggagggcatctcccagcccatctggctggtgagtgacacacggagagtgtctgacatccagtggtttcgggaggcctatggggccgtgacgcagacggtccgcgttgtagcgttggagcagagccgacagcagcggggctgggtgttcacgccaggggtggacgatgctgagtcagaatgtggcctggacaacttcggggactttgactgggtcatcgagaaccatggagttgaacagcgcctggaggagcagttggagaacctgatagaatttatccgctccagactttagtcactaggttctaggagtgagctggggcctgctgaggtgggggtggggctgactctgcaaaatgggggtgtcccccgatcctggccgaggtgaggaacagacagggggggtctagattctgagggggttggtggatattgggcaaggcaggaaacctctggagacctcattttctccatggggaagacagccatgctcttcaggaggagactccaagggcaaaggagggtgtcttggctgtgcttgaaggcgaaaccctgccatatccccagtgccagtcccctcagcctgtggtggccttgcatcctgactggatgttctcagccccttgttctgggcaagaacccagagctccccagtgtggatactaataaacctcttggagcacaaaaaaaaaaaaaaaaaaaaaaaanaaaaaaaaaaaaaaaaaaaaaaaaaaaaaaaaaaaaggggggggggggctaaaaagtttcccgggggggggccattagatggcgccgacaccccacagtttttgtgggaacaggggggggccccataaggagggaggacgaatataaaacagcagtgagggcgagaggcgcgggcgtgagttttatacacaacggagcgtgttgtaggagtgggaaacaacagagcggttaatggcgggggaccctcttttgtgtggagagcgaaggccaccctaatcttgagcggggggggggggagacacaaattttggtggggcaaaaagatatgactctacacgaggtattttagaggcgcctcagaggggggacatattt

SEQ ID NO: 347408 - DNA, 1210 bp, Homo sapiens
gaaggttctgggcggggctggactgttctaagtgagttcgggtgggggagcttcacgaggggaggctgctctgtgaaggaaccgcctttctctccgcgtgtctcacccttttctccccatatctgtttggacatgagctgagggcacggtcgcgggcggtcagccctgttcgcagctacggcgaggaggggcgcgattgttccttgttgccgctccgcttagtggccgcgtccattccgcgcggtgtcccgattttaggggtagggagaagtgtcagcttcaggcatcgcgaggcgtggcggccccatggccccgctgggaggcgccccgcggctggtactgctgttcagcggcaagaggaaatccgggaaggacttcgtgaccgaggcgctgcagagcaggagcatggcttgaacttccagagactcctggacaccagcacctacaaggaggcctttcggaaggacatgatccgctggggagaggagaaacgccaggctgacccaggcttcttttgcaggaagattgtggagggcatctcccagcccatctggctggtgagtgacacacggagagtgtctgacatccagtggtttcgggaggcctatggggccgtgacgcagacggtccgcgttgtagcgttggagcagagccgacagcagcggggctgggtgttcacgccaggggtggacgatgctgagtcagaatgtggcctggacaacttcggggactttgactgggtcatcgagaaccatggagttgaacagcgcctggaggagcagttggagaacctgatagaatttatccgctccagactttagtcactaggttctaggagtgagctggggcctgctgaggtgggggtggggctgactctgcaaaatgggggtgtcccccgatcctggccgaggtgaggaacagacagggggggtctagattctgagggggttggtggatattgggcaaggcaggaaacctctggagacctcattttctccatggggaagacagccatgctcttcaggaggagactccaagggcaaaggagggtgtcttggctgtgcttgaaggcgaaaccctgccatatccccagtgccagtcccctcagcctgtggtggccttgcatcctgactggatgttctcagccccttgttctgggcaagaacccagagctccccagtgtggatactaataaacctcttggagcaca

SEQ ID NO: 347409 - DNA, 501 bp, Homo sapiens
atgggggtcttgttctgaacggatgaactgccgcctcactccagtcacagtggaagtgtttcgtgggtgtctgaggattggcacttgggaagggggcaagatgtgctcgtggaatgtgctgtctggtcccgccctctcagtttacagatggagaaactgaggcccaatagtacggaccagacctggggaggttggcatggccagggctgctggcagcaattgctggcctccatgaagactgaaggctgaggccagggcaggcccagtgatgagtgaggcatgaggaagggtcccattcattcatccattctcctggccctgctgttaagccccaggctgtcttccttcctcactggcttccagaaagagtagttgaggatgtccctgtccctgcttccccttcagccccagcagccccacttccaccctgagaccagggatgtccaagccacaagcagccccagctgacaggccacgcagccatgtgctctgcccagcgtt

SEQ ID NO: 347410 - DNA, 463 bp, Homo sapiens
ttcctataaccctagacagaagaattttcagaaacctcattgtgatgtgtgcgttcatctcacagagtggagtcttccgtttgatagagaagttttgaaaccctgttcttgtaggatttccaagtggatatttagaccactttgaagcctatgatagaaaaggaaacatcttcatggaaaacatagatagaatcattctcagaaacaactttgtgatgtgtgcgttgaactcaccgtctttaaactttcttttggtagagaagttttgaaacactctctttgtaaagtctacaagtggatattttgagcccttggaggcattctttggaaaagggaatgtcttcacgtaaaaggcagacagaagtgttctcagaaactgctttgtgatgtctgtgttcaactcacagagtttaacatttcctttgatagagcagtttagtaacactgtctttgtagaatttgg

SEQ ID NO: 347411 - DNA, 433 bp, Homo sapiens
gctggtcttgaactcttgacgtcaggtgatccgcccgccccagcctcccaaagtgctgagattacagaagtgagtcactgggcccagcctgtaaaccaagtattttggcttcagaactttgcttattgcctgaagtacaaaaagcaagtttcaggaaagtgggatcctatttataaaaaaaaaaataatcaaattatgtagatgcatgtatatatgtgcatgcatatatatgctcatattttaattattatttttggcaggatccacaagaaaaaagtaggaaggactgggggctcagggcaggaggaaaatgccaggagtgctagctcatgcctgtgatctcagcactttgggaggctgaggtgggaggaaggattgaggccgggagtttgagaccctcctgaataacatggtgagacctaatctctaccca

SEQ ID NO: 347412 - DNA, 421 bp, Homo sapiens
aaaaagtcatgtttcttttcttactgtgaaaataaagttactacttttagtaaattattttaagttatttatatattctggttacaagtcctttctcagaatattgtgaatattttctcccagtctgcggttttttttgaagagccagtattgttaattttaatgaagccttatttatcaagcttttctcttaaggttcatgcttttttgtatcataataagaaatcttttacgtaccctaggttatgaatgtttttatggttaggtatatggttgatttcaggttaggttttgtgtagggtgtgatgtaaaggtctagcttcattttctccaccataaatatttactcggtttctctggcaccagcctctgttttccattggtggctttattttttttctgttcttgaaacaagagtctc

SEQ ID NO: 347413 - DNA, 452 bp, Homo sapiens
ttaattgacaaggtatggtaacatgtgcaataaagaaacaaaagtgactgggcatggtggctcaggcctctaatcccagcactttgggaggctgaggtgggtgggtcactttgaggccaggagttggagaccagcctggccaacatggtgaaactctgtctctactgaaaatacaaaaaattattgtattttcagtagaatgaaaatactactgaatggtctcacacacctgtggtctcaggcactcagtaggactgaggcaggaaaatcacttgaaccctggaggcagaggttgcagtgagccaagaacgcgccactgcactttagcctgggagacagagcaagactccatctcaaaaaaaacaaaacaaaacaaaaaaaaggctgagcgcggtggctcacgcctgtattcccagcactttggggaggccaatgcaggcaaatcacgaggt

SEQ ID NO: 347414 - DNA, 185 bp, Homo sapiens
ctagaaaagtagaagaaaataaaataacctgttgttctacactctaagaataatcactattctcattttattttactttttattttatcttatttatttatttatttgagacagagtcttactctgttgcccaggctggactgcagtggcgtgatctcagctcactgaaacctccgccgcctggg

SEQ ID NO: 347415 - DNA, 411 bp, Homo sapiens
tgtgtctgagaattttgttttaaatgtgatttgattttacttaaatttgaactgccacatgtgactagtggctactgtattagtcaacagagagacagaatgccctgtgttagggatggctgtgctaacagaaggtggctggtcagaagggcagaattactgagcaaagacatgggaatgagaccagaaactcagtggaggtaatgacgttctgactggacagtgtgaaggtggcctggctgatctgccagaaagtctcctacctcagtggtaaatgactacgttatagaagcaaaactcaccaaaaccattcattaaaaccagccctttgctctgattctctgctctctttttcaagcttctgattaatatttaagtctcctaaataaattttcctacagggagaaaaat

SEQ ID NO: 347416 - DNA, 537 bp, Homo sapiens
ggaaaatgagagaggaggtcttcggataaatccggtgagagggaccaacttcaggaagggtggcttttgtggaatccagatggaaacctgagggaagggatgatattaaagaacagtggccccaggtaaaacatatggcacccatgtgtaaggtgattcttagaatctgtagaggtgtctttcgtggtatagaggttgaggcacctgtgcttcaaggaaaccttaactcttcaaaatcaggcaatgcgtatgaggtaaagagaggactgtgggaccataatcttgaagacagagacaggcttcactcatccctgcctcctgcaccagtgggttcaaggctctgtcagtgtcccctaggggcacctcaccactcccagcttcttcagctctggcctgtcctgctgcctgcaagggttttgcttaattctcaattcaatgtctcttcatcttttagtagctgtggggttttgttgttgttcttctgtttttgcttagtatctgactactttttaattataaaaagagatgtatctaaac

SEQ ID NO: 347417 - DNA, 445 bp, Homo sapiens
gaagttgcagtgacccaagaccgcgccactgcactccagcctggtgacaaagcgagaatctgtctcaaaaaaaaaagaaaaaaaattatctggggctgggcgcagtggctcatgcctgtaatctcagcactagtgagctgggaagtaatgtgcccaaaggctccaaatacaagcattctcttgtggaaggccttgtccactagcgtcagtgggtgtcaggagcgctgactgggagccagaggattgggttcaaggtgtggatccactgtgagttagcgatgctctaaggcactggagaaattacatcctagcgctttttaacatccgtttcccatgtagctttatcgcccacttcaaatacatacaaacagaggacattagataaagcccctctttttgtgaccggcctgggcaacacagcgagaccctgtctctcgctctaaaa

SEQ ID NO: 347418 - DNA, 687 bp, Homo sapiens
tgaacaaactatccctttccattgctatattccaatcttaaatttttgtgatatccatgagatcattttaaaatttttttgttgtgttgtcaattaattcaacctacatatagttttttgagtctgctaaatgccagatactattttgggtgctgaggatatagcactagacaaaataaacaagaatcctgactttaaagagtttttatgttggctggagagaagatcctgtttatttctcaaatgttatcatttgaagcaaaataaagaacttacggtgattttattagcacttcaaatgcctaaagtttggtttaaaatacattgttttgtagaaacatcctggaagaaaaagagcaacaagaagggtttttttgtttttacatgaacatgagtgatcaaacctaagattaaaccatattccatagatattagttttattagactagtaatgtagtagttatatatcttagtttaaatgtatcttttgatatgcatgtaaatggtcctttttgggttgtctgtattaaatcttgagaaggctcaaattgccctctaccggctgggcacagtggcgcacgcctgtaatcccagcactttgggaggccgaggtgggtggattacctgggatcaggagtttgagaccagcctgattgatatggtgaaactgtctctctaaaaaaaaaa

SEQ ID NO: 347419 - DNA, 124 bp, Homo sapiens
catcagttatgtaagatttaatgataaaatcacaataataagtaccagttacaattaacaaactggtttgggagcaagcctacctcttggcaagcctgcaattccgctggtgggagcagagctg

SEQ ID NO: 347420 - DNA, 493 bp, Homo sapiens
aatgattttgtttctctgtgcctgaatctcgtccttcaggagcttataatttagtagacacataagccacaaacagaagccagctctgtgtcaggccccatgagaagtccgcaggtgcgatcttcaatttggagactacaggaaggatggctggggaggcctcaggaaacttacagtcacagcggaaggcaaagaggaagcaggcagcggcttcgtggcaggagcaggaggaaggcggtggggaggtgctacatacttttaaacaactggatcttgtgagaactcactatcacgagaacagcaagggggaattctgcgccctgatccagtcacctcccaccaggctcctcctccaacagtggggattacaattcgacatgagatttgagtggggacacagatccaaaccatatcagtgtcattaaaaaaatagttgccctgctaacttttttaatcccctgtaactctaaataaaataatgatgtgaacataa

SEQ ID NO: 347421 - DNA, 582 bp, Homo sapiens
aatgattttgtttctctgtgcctgaatctcgtccttcaggagcttataatttagtagacacataagccacaaacagaagccagctctgtgtcaggccccatgagaagtccgcaggtgcgatcttcaatttggaggaaaagctgactaacattgaacatcaacacagacttcatctgataagaaacattcatgatctactctctatgaagcctgctacctggagactacaggaaggatggctggggaggcctcaggaaacttacagtcacagcggaaggcaaagaggaagcaggcagcggcttcgtggcaggagcaggaggaaggcggtggggaggtgctacatacttttaaacaactggatcttgtgagaactcactatcacgagaacagcaagggggaattctgcgccctgatccagtcacctcccaccaggctcctcctccaacagtggggattacaattcgacatgagatttgagtggggacacagatccaaaccatatcagtgtcattaaaaaaatagttgccctgctaacttttttaatcccctgtaactctaaataaaataatgatgtgaacataa

SEQ ID NO: 347422 - DNA, 395 bp, Homo sapiens
aaatgaggtatcatggaacttaagtattcattgtcctggaaggtaaggtccaggacaaaaaaaaaaaaacaacagtgggaaactttctcccacctccactaaatatacacctgagtaaacccttcatccaattactatgatttgatcattacacactgcataacgtgtaatgatgtctgagaagtatggggtgttgtccaaaatgctgtgtccttaacagcttagtttaacatctaaaatgcatgccatatgatattccccttttttgcaaaacctttctcatgaagctttatggaactaaaaaccagttgggatttttttcttcattcagtctgtttctatcacacaagctcccaaaaagaaagatagcaaaagcccccgccaaagaaacatag

SEQ ID NO: 347423 - DNA, 362 bp, Homo sapiens
gtagagttcatcgtggagaggaccaagacagaagatcaagaagaattttttttttaatctcttcccttgtccaccgaaagaccatcaaaactagagagagattatcaaatgcctggtgacaagtcctcggctgcactggcttcacaggagcttatgtggagaagaaaaagaatttgagccacagcaacgaaactctaaagttgtttccaactctcttaccaaaagaggcatccagcccaacagctctcaacctggagtaaagctcccacgtgccctgtggagcatcctcgctttgattccatccctttactcccattcagagaattctacttgaatttaaataaatgactcttctgctatta

SEQ ID NO: 347424 - DNA, 1399 bp, Homo sapiens
ttgctctgtcgcccaggctggagtgcagtggcatgatctcagctcactgcaacctccacctcccgggtttaagtgattctcttgcttcagcatcccaagtagctggggcaccaccacacccagctaatttttgtatttttagtagagacggggtttcaccatgttggccaggatggtctcaatctcttgactatgtgatccacccgcctcagcctcccaaagtgctgggatgacaggcatgagccaccgcacccggccagggcaatctgccatttgctggcaaccccagcttctgaggaggaaaggctcagaggagacaaaggtggcacctaatcacagatcttgtcaggctcctggactggaacaggcttagccatgctgtgccacgtcatggtccaaggcagcagtgacactctgctgaccccattctctgtaggttcccagtttcctagcgttctcccaaaacccagaggcttgaggcttccaaaagttcagaaggacaagactgcttcccaggctactgagaccaagggctggggttctctcttcccttgtccttctagacatctgctttctgcccaagcacatctcagcacctctggctaggcaggttcagcaagggcagtgtccatgctcatcacctccttatcctagcctgtcgtgggagataaatcttgataccaaggaacccgtctaaaccctcctccaagcctcactccctgaaccagcccaaacaaagagaaatacaccctaagcagaaagtctgaggtcacagaccacaggactgatcctcctctcacccataggggaaaccaggtggggtgtaggggagaataaatagagtggggacttgaagttagctgagctaggtactccagttctgccatctactaactgggagaccatgtgcaaaaagtgacaacttcttcatctttcagtggggtcataacgcacacctcatctcttatagggctgcaatgaggaataaatgtgtacaagggcccagcctggtgggtggccagcaaatggtagctattaggtgactggtatttgcggcttaactagcaatttcacatctcttttctcatctgactggtccccatacacaggcctttgaggaaggcagggcatgattaccaccattttactcatgaagcaattgaggctctgagagattacttaatttgctcaatggtaaacaaattctaactcctggccgctgatccaagctctaccgctttacagctgtgtgaaacagggctggctgctttgctctctgagcttccagttcctcatctgtaacccaggaggaatgccacctcctcagagaacattggtaaacatgatgtgaggcaattaagagctgacactttcatgcgctggccgtgtactagctctg

SEQ ID NO: 347425 - DNA, 538 bp, Homo sapiens
ataatagtttgtgattctgggtgtagaacataagactcactgaagtttctactttggttctttctttctctggaatcatgagccctgggggaagctggctgttgtgtcataaggaggcctgtggtccatgtgactaggaagtgagtcctcctgggaccagacaataagaagctaaagcctcttccaaaagccatgtgagagattcttgtgtcttgtgaatccccggccccatttgagccctcagatgattcagccctggaagacaactagactgcaacgttgtgagaggccctgagccagaagcattcagagaaacttctcctggattcctgaccatggataactgtgggagatgataaatatttgttgatttgagctgctaagttgtaggtgacttgttatgcagcagtagataactaatacagcttcacaagagaggatgaatcactgaactttttcatttgctctaaattcattataagatattaaacatgtcatttgcttttaatatttaataaaaatttccatggctatataa

SEQ ID NO: 347426 - DNA, 614 bp, Homo sapiens
cagagtcagactccgtctccaggaaaaaaaaaaaaaaaaagactaaagatgatcaaagattagaattacggaggtgtcctcaagaagaattggaacagatatggttaaaagtggctggaggtgggtgcagtggatatggtggtgcacacctgtaatcccagtgctttgggaggctgaggcaggtggatcacttgagcctaagagttggagaccagcctgggcaacatggcgagacctggtctctacaaaaaatacaaaaattagccgggcatagtagcacatacctgaagtcccagctactcaggaagctgagttgggaggattctttgaccccaggaggttgaggctgcagttagctgttattatatcactgcactccagcctatgtgacagtgtgagaccctatctcaaaaaaaaagtgatgtcgggaggctgagaggatgagtgactggggcaggagatgagtactttcccttttaagcccatagcatttaattccctggtggttcacttcttatttggataactaacaaattatttcaaatgtgtgcctataggtgagagaagcaatggtacatgaggaggtaagcatttgatttgtgggattatgaaca

SEQ ID NO: 347427 - DNA, 573 bp, Homo sapiens
aggcaggatgacacagtgtgagtaaaacttgaccagtcactgttcactttgagacagaagggaccagccaagaattgtgaatagtgtacagaagctctaaaagccgtcgatatatagctaaggatgataacaagcacaacaaggacttacagcatttgctttgcaccagacaccatctaaaacacttcacaaatattaactcaaaggaacctatcataatgctgtcattattcccagttcacagatggggaggtaaaaacccagagcttaatagcatgtccaagatcacataactattccactgctcaaaattactcctgaagggatgaggacaccaggatatgccaccggaccactgaaggaatggtgatggtatgaagaaagtatttttaatgagcagagccattgtttgctctgctctgtcctcacccctcaagagaatttcccttattattatgaaaactttttatcttaaaagatattacatgttaatggaactgtcgtttaacaaatgttttataagtgtaccaatcaagcacattgtcgaaataaaagatatgaaataagtgaaaa

SEQ ID NO: 347428 - DNA, 489 bp, Homo sapiens
tttctttttctctttatagccgtcgatatatagctaaggatgataacaagcacaacaaggacttacagcatttgctttgcaccagacaccatctaaaacacttcacaaatattaactcaaaggaacctatcataatgctgtcattattcccagttcacagatggggaggtaaaaacccagagcttaatagcatgtccaagatcacataactattccactgctcaaaattactcctgaagggatgaggacaccaggatatgccaccggaccactgaaggaatggtgatggtatgaagaaagtatttttaatgagcagagccattgtttgctctgctctgtcctcacccctcaagagaatttcccttattattatgaaaactttttatcttaaaagatattacatgttaatggaactgtcgtttaacaaatgttttataagtgtaccaatcaagcacattgtcgaaataaaagatatgaaataagtgaaaa

SEQ ID NO: 347429 - DNA, 459 bp, Homo sapiens
aggcaggatgacacagtgtgagtaaaacttgaccagtcactgttcactttgagacagaagggaccagccaagaattgtgaatagtgtacagaagctctaaaagaatgctgtcattattcccagttcacagatggggaggtaaaaacccagagcttaatagcatgtccaagatcacataactattccactgctcaaaattactcctgaagggatgaggacaccaggatatgccaccggaccactgaaggaatggtgatggtatgaagaaagtatttttaatgagcagagccattgtttgctctgctctgtcctcacccctcaagagaatttcccttattattatgaaaactttttatcttaaaagatattacatgttaatggaactgtcgtttaacaaatgttttataagtgtaccaatcaagcacattgtcgaaataaaagatatgaaataagtgaaaa

SEQ ID NO: 347430 - DNA, 411 bp, Homo sapiens
aaaatcaaatccctattaggataaatgattgagtgttcctgtaaagaattgttcccctggttcaagcaaccagatttcattcccagatgatcaaaaatggacttgatgaaatggaaaagcactgatagaaacagttccactgctcaaaattactcctgaagggatgaggacaccaggatatgccaccggaccactgaaggaatggtgatggtatgaagaaagtatttttaatgagcagagccattgtttgctctgctctgtcctcacccctcaagagaatttcccttattattatgaaaactttttatcttaaaagatattacatgttaatggaactgtcgtttaacaaatgttttataagtgtaccaatcaagcacattgtcgaaataaaagatatgaaataagtgaaaa

SEQ ID NO: 347431 - DNA, 494 bp, Homo sapiens
aggcaggatgacacagtgtgagtaaaacttgaccagtcactgttcactttgagacagaagggaccagccaagaattgtgaatagtgtacagaagctctaaaagccgtcgatatatagctaaggatgataacaagcacaacaaggacttacagcatttgctttgcaccagacaccatctaaaacacttcacaaatattaactcaaaggaacctatcatttccactgctcaaaattactcctgaagggatgaggacaccaggatatgccaccggaccactgaaggaatggtgatggtatgaagaaagtatttttaatgagcagagccattgtttgctctgctctgtcctcacccctcaagagaatttcccttattattatgaaaactttttatcttaaaagatattacatgttaatggaactgtcgtttaacaaatgttttataagtgtaccaatcaagcacattgtcgaaataaaagatatgaaataagtgaaaa

SEQ ID NO: 347432 - DNA, 604 bp, Homo sapiens
aggcaggatgacacagtgtgagtaaaacttgaccagtcactgttcactttgagacagaagggaccagccaagaattgtgaatagtgtacagaagctctaaaagccgtcgatatatagctaaggatgataacaagcacaacaaggacttacagcatttgctttgcaccagacaccatctaaaacacttcacaaatattaactcaaaggaacctatcattaatctcagaggccacatgctgaacatggcctatccacagtgtggaagaagccttggatcctgagccactgttctgacaaccaaccaatttatagaagagagctacataattccactgctcaaaattactcctgaagggatgaggacaccaggatatgccaccggaccactgaaggaatggtgatggtatgaagaaagtatttttaatgagcagagccattgtttgctctgctctgtcctcacccctcaagagaatttcccttattattatgaaaactttttatcttaaaagatattacatgttaatggaactgtcgtttaacaaatgttttataagtgtaccaatcaagcacattgtcgaaataaaagatatgaaataagtgaaaa

SEQ ID NO: 347433 - DNA, 409 bp, Homo sapiens
aggcaggatgacacagtgtgagtaaaacttgaccagtcactgttcactttgagacagaagggaccagccaagaattgtgaatagtgtacagaagctctaaaagaatgctgtcattattcccagttcacagatggggaggtaaaaacccagagcttaatagcatgtccaagatcacataactatcctgaagggatgaggacaccaggatatgccaccggaccactgaaggaatggtgatggtatgaagaaagtatttttaatgagcagagccatgtcctcacccctcaagagaatttcccttattattatgaaaactttttatcttaaaagatattacatgttaatggaactgtcgtttatgtaccaatcaagcacattgtcgaaataaaagatatgaaataagtgaaaa

SEQ ID NO: 347434 - DNA, 360 bp, Homo sapiens
cagtggaaaacttcccaggaaagcacttggaaaagtggataggaagagtagttacatggcagttttctgcccgtcccaccctcccttctaacgacttcttttatgtcaacagaactgccactttacttatctcaggatttctctttttcaggaatggtgatggtatgaagaaagtatttttaatgagcagagccattgtttgctctgctctgtcctcacccctcaagagaatttcccttattattatgaaaactttttatcttaaaagatattacatgttaatggaactgtcgtttaacaaatgttttataagtgtaccaatcaagcacattgtcgaaataaaagatatgaaataagtga

SEQ ID NO: 347435 - DNA, 726 bp, Homo sapiens
aagaaaggaataatacattacatggctcagcagtgaacagtgtttatgtaggtatagtgaggtaaacagtaaatattgatttaatttaaaatatgatattgaatgtattgagaagatgaggaagggaactatgtgtgggagagtagagtcaagttctcatattctttaagaaaaagctagtagataatgtatgggaaaggggataaagtgtttgtgtgagagcaaagtggtataagagtgctaaattctcttctttcatggtgggagcatagtagatgatgtctctaactggaggggaagggagaataagaaatcttaatataagcatattattcagaaatatgaggtaaagaagaaacagctaaaaggtgttctcagagtttggggtagatagtagagcagagaactgcttttttttcattataaatcttgtagtggtttagacttgttaaaccatacttatactttattaataataatatatgtgttatgtatgcatttatttttgagttccctatgtggaaaattaaaagggtaatatggtagaatttggagctgttattaagcggttctagccttggctttgtcccttatcatccctgtgactttgggcaggatgctcttgtcttcctgggccttagtttcttcatttataagaggaagaaggttggaaagatggtctccagggtctctttaagctgtaaaattcaaagattctatgattta

SEQ ID NO: 347436 - DNA, 576 bp, Homo sapiens
aggccccactttcttcaactgttctcgttattatgtggttcagggcctctcaccccatgacacagtttgactcatcactgcccttcttaaagtaggtagtgtgggaaaaatacgtggaaaggaatgtaggatttatagtcaaagtcttattcctaagtctggatattcatctttgtattagtccattctcacactgctaataaagacatacctgagactgggtgatttataaaggaaagactcacagctgactgtgactgactcacagctcatcatggctagggaggcctcaggaaacttacaatcatggcagaaggggaagcaaacacgtccttcacatggcagtagcaaggataagtgctgagcaaaaggaggaaaagccccttataaaaccaccagatctcatgagaactcactgattatcatgagaacagcagcatgggggtaacggttcccatgattcaattacctcccactgggtccctcccatgacacgtggtggggattatgggaactacaattcaagatgagatttgggtggggacacagccaaatcatatcaatcttcaaaataag

SEQ ID NO: 347437 - DNA, 323 bp, Homo sapiens
ctatgtcatcatcttcaggattattagagaagaattcccagattaaaagtatggagaaagatttgattcggagctggaaggaaaggaaaagtaatgttcactgagtaccttctgtgtactcaacttagttttagccattgtcacatgctatttttctgcatcccaagaccaatgggtatattatttccatgtaccgattagaaaactgaggcctagcaaattcattttattttattttatttatttttgagatggagtctcgctctgttgcccaggctggagtgcagtggcgcaatctctgctcactgccacctctgcctccc

SEQ ID NO: 347438 - DNA, 337 bp, Homo sapiens
gtgtgattcccaacaagcagcatcaggatcatctggaaacttgatagaaatgtaaattctacagtccctccttggagctacagattcagaaattctgaagtttaagtccagcagttggttataataagctctctaggtgattctgacttgcaccaaggttggtggaccaatgccttagattagtaaaaagcactgtcatagagtaagcactgccaaatccacagatattcattgaatggctaccagacataagatactatgtacactgattagaaaagtaaatacataaagcagatctcatgatgcttgcttctgcttttcactgtgtttaagagag

SEQ ID NO: 347439 - DNA, 829 bp, Homo sapiens
ccatcacacctggtaaaactgtatcattttttataacctagtcttagaagccatgcagcatcatatccatcacttccgtttgttaaaagcaaattactaaggccatatgtgttctggggaggggaattagactccaccttttaatggtaggagtgtcaatttgcaacatgtttaaaatcaccacatgtaacttctgataaatagatttataaacagtacatttgtacattagaaaagtttaaacataagaaacctaataaataccctcttttttatattagaatgaaatataaaaacccaaacatttaaatgttccagcaaagctaatcctgagccaacttgagtaggcagtctgtctcataatcttcctgcacctttcttctccctgtgtccattccctccaggtcaggcctcctgtgcacacatacccttctctcccaaactaggtaggacattcacagtagctgtacctccacggtgatgaaaacttttttctttgccctccatgagttatcccaactttggacctcataggatcgctggcaatcaatggcataatgtccttctcaaaattaaaaagcaaaatgctatggagaatattccagtaagtaattttataataataattaaaacaaaatgacatttcccaaaagggacaatatgcttttagatgttacgatattgactttattggggcttgtttattcatcaaaatcagtaattctaaaggaacagttgaggcttttaagtattttataagagtatgcatgtttcctatgaaggcgacgtaacacttgattattacaataaaaaaatggatacttctccc

SEQ ID NO: 347440 - DNA, 358 bp, Homo sapiens
ctcccatcaagccaataagagctattttcattatatccattttacagatgaggacagttaggcacagagaggttacatggcacagccaccatcacaccaccactgaggggcggagtcagaacccagacctccataatgtagctccagaattttcactcctacctccacactgtgctaaagaaggaagatgaggagccactccaagtagggaggggactctaggtcaaaggagagataatggacatgaatccaatgtttggcacaataacgtacatttatttaagttttcttttttaaaggtttctgtaaaccttttcaaaaaatgattcattccgtgccgggcatgttggctcatgcc

SEQ ID NO: 347441 - DNA, 701 bp, Homo sapiens
ggatattttctatgcatatacaaacatgggtgtgtttgggtagaaaactttttcttcctttagcataaacaggaatatagcataaacatatatatatgtgtgtatatatatatatttccttgcttttttcattatgtatattggataatctctctagatcaatatgcatatgttttcctcttttaacaatttgatagtagtccattgttcaaatataatttatttaccccaatttttaaaattaatatttaattatccagtttttccttggagtaagcatccataaatatgcatatatatgtacatatatgtctttgagcatttaggccagtatatcataagatataacaggtaaaaatcacaaggtaatgtccagtagtagaattgttgggtcagagtttgtggcttttaaatttgataaatatggcccagttgttctcaaaaaagattatgtcaagacaggcatggttgttcctacctgtaatcctagctacttgggaggctgaggagggagggttcgagaccaacttggacaacatagggaaaccctatcctttttttttttttttgagaaggagtctcgctctgtcgcccaggctagagtgcagtggcgcaatctcggctcactgcaagctccgcctcccgggttcacgccattgtcctgcctcagcctcccgagtagctgggactacaggcgcccg

SEQ ID NO: 347442 - DNA, 420 bp, Homo sapiens
agagtaagacctgaaaaagaaagaaaaaaagaaaagaaagagcggacaacaagaaatgaccagatatctgaggaaaacctccaacaacagattgctaaacaaacagaacacagcaacttggagtaatagagactctgcaggaagatgaaaactttaaaattttaaactataatcgatttccacttatggccatgactgactgtgagggaccagatttaccttcctgccctaagcagctagaaaactgggatatttggaaagtattttctgatactgaatagcaggctgcacaggactgtgactcctgagaggcgtgagtcctgaagacacattccatacccaagcagatgttgttaatcttactgagtcaagaaaaacattaggctgggcgtggtggctcacgcctgtaatctcagcact

SEQ ID NO: 347443 - DNA, 297 bp, Homo sapiens
caggggcggtgcgggggcgtgggcagcacaagccgtgcgctcccgggctgcgaggtctggctaggctacgggccacgcgccgccgccgctgccgccgccactgtcctcttcggaggcgcgggcccgacggaaaccatgtttgtggctcgcagcatcgcggcggaccacaaggatctcatccacgatgtctctttcgacttccacgggcggcggatggcaacctgctccagcgatcagagcgttaaggtctgggataaaagtgaaagtggtgattggcattgtactgctagctggaag

SEQ ID NO: 347444 - DNA, 736 bp, Homo sapiens
tcaactattccaaaaataagattttcctccagtaagttatcattctcacttgataataagataactaagataactccccaaataaactcattcttcatatcttgcaaatctaaaaagcaacgtgcatcccctttcctgatgcctacccctgcactgtgctgacgcttctttcctgtcttgcagctgtgtgagccacacgccagccctgcggctctggatatcagccatgaagtgggaccccacagtctgtgctcttctcatggataagagcattttccagggcttcttgaatctctattttcagaacaaccctaatgcctttgactttgggctgtgctgagtctcactgtccaccccttcgctgtccagaattccccagcttgttgggagtctacgtcacggcttgtcttgggaaccaatccgtctctctttcttttctttgaagttcccaataaaatgaaaacaggaaatgtattcttctgataatcatttgtctgactcctctagcctgtagctgctgctactgctgcttttttttcctttttttttttgaggcaagatcttgcttcgttactcaggctggagtgcagtgggacagtcggctcactgcagccttgaactcctgggctcagttgattctcccgcctcagcctcctgagaagctaggactacaggtatgtgtcaccacgcccagctaatttttaaaaaaatgttgttgagacagggtctcactatg

SEQ ID NO: 347445 - DNA, 1172 bp, Homo sapiens
gggcaagtgagcgagctccttcctcaccgggctgactagcctctcctttccctgtccccctccatcgctgctctgcaggaagccagcccccagggccagtcccggaggggctgatccgcatctacagcatgaggttctgcccctattctcacaggacccgcctcgtcctcaaggccaaagacatcagacatgaagtggtcaacattaacctgagaaacaagcctgaatggtactatacaaagcacccttttggccacattcctgtcctggagaccagccaatgtcaactgatctatgaatctgttattgcttgtgagtacctggatgatgcttatccaggaaggaagctgtttccatatgacccttatgaacgagctcgccaaaagatgttattggagctattttgtaaggtcccacatttgaccaaggagtgcctggtagcgttgagatgtgggagagaatgcactaatctgaaggcagccctgcgtcaggaattcagcaacctggaagagattcttgagtatcagaacaccaccttctttggtggaacctgtatatccatgattgattacctcctctggccctggtttgagcggctggatgtgtatgggatactggactgtgtgagccacacgccagccctgcggctctggatatcagccatgaagtgggaccccacagtctgtgctcttctcatggataagagcattttccagggcttcttgaatctctattttcagaacaaccctaatgcctttgactttgggctgtgctgagtctcactgtccaccccttcgctgtccagaattccccagcttgttgggagtctacgtcacggcttgtcttgggaaccaatccgtctctctttcttttctttgaagttcccaataaaatgaaaacaggaaatgtattcttctgataatcatttgtctgactcctctagcctgtagctgctgctactgctgcttttttttcctttttttttttgaggcaagatcttgcttcgttactcaggctggagtgcagtgggacagtcggctcactgcagccttgaactcctgggctcagttgattctcccgcctcagcctcctgagaagctaggactacaggtatgtgtcaccacgcccagctaatttttaaaaaaatgttgttgagacagggtctcactatg

SEQ ID NO: 347446 - DNA, 1070 bp, Homo sapiens
gggcaagtgagcgagctccttcctcaccgggctgactagcctctcctttccctgtccccctccatcgctgctctgcaggaagccagcccccagggccagtcccggaggggctgatccgcatctacagcatgaggttctgcccctattctcacaggacccgcctcgtcctcaaggccaaagacatcagacatgaagtggtcaacattaacctgagaaacaagcctgaatggtactatacaaagcacccttttggccacattcctgtcctggagaccagccaatgtcaactgatctatgaatctgttattgcttgtgagtacctggatgatgcttatccaggaaggaagctgtttccatatgacccttatgaacgagctcgccaaaagatgttattggagctattttgtaagattcttgagtatcagaacaccaccttctttggtggaacctgtatatccatgattgattacctcctctggccctggtttgagcggctggatgtgtatgggatactggactgtgtgagccacacgccagccctgcggctctggatatcagccatgaagtgggaccccacagtctgtgctcttctcatggataagagcattttccagggcttcttgaatctctattttcagaacaaccctaatgcctttgactttgggctgtgctgagtctcactgtccaccccttcgctgtccagaattccccagcttgttgggagtctacgtcacggcttgtcttgggaaccaatccgtctctctttcttttctttgaagttcccaataaaatgaaaacaggaaatgtattcttctgataatcatttgtctgactcctctagcctgtagctgctgctactgctgcttttttttcctttttttttttgaggcaagatcttgcttcgttactcaggctggagtgcagtgggacagtcggctcactgcagccttgaactcctgggctcagttgattctcccgcctcagcctcctgagaagctaggactacaggtatgtgtcaccacgcccagctaatttttaaaaaaatgttgttgagacagggtctcactatg

SEQ ID NO: 347447 - DNA, 844 bp, Homo sapiens
caggataggaagaaaagaaagtttatacctggttaattcgtcactgaaaacaattttctaacacctctgttctgtaaagcagaagagctgtgtagatgttccagagtcgcttggtgtaaatttggttctgatttgtgccgtgaagcccaataacaaactggaggcacacatttcaaagccagtgattcttgagtatcagaacaccaccttctttggtggaacctgtatatccatgattgattacctcctctggccctggtttgagcggctggatgtgtatgggatactggactgtgtgagccacacgccagccctgcggctctggatatcagccatgaagtgggaccccacagtctgtgctcttctcatggataagagcattttccagggcttcttgaatctctattttcagaacaaccctaatgcctttgactttgggctgtgctgagtctcactgtccaccccttcgctgtccagaattccccagcttgttgggagtctacgtcacggcttgtcttgggaaccaatccgtctctctttcttttctttgaagttcccaataaaatgaaaacaggaaatgtattcttctgataatcatttgtctgactcctctagcctgtagctgctgctactgctgcttttttttcctttttttttttgaggcaagatcttgcttcgttactcaggctggagtgcagtgggacagtcggctcactgcagccttgaactcctgggctcagttgattctcccgcctcagcctcctgagaagctaggactacaggtatgtgtcaccacgcccagctaatttttaaaaaaatgttgttgagacagggtctcactatg

SEQ ID NO: 347448 - DNA, 305 bp, Homo sapiens
gttcttccagtttcttcaatcagatgagccacactgtcactctagtgttgaaaggagggaagggacagaggtggccaggagtgtgaccctaaaagaggcagaggagacctcagagaaagagaagaagcattctcctaaccagagggagaaggagagaggcctcagttctccctctctgggaattaatttgagatttacatttagtgtctataaacatgtcagcagatatataaacttatttgcttttgctttgtttccatttttagattcttgagtatcagaacaccaccttctttggtggaacc

SEQ ID NO: 347449 - DNA, 1756 bp, Homo sapiens
accacctctgctgccgcgcgcctaccggagccgcttggccctagtgctttccagcggatttcccctcaggtgcggagccgggtgccggggtcccacagccaaccactaccggttcctctttcgtcagccaccggcgccggcaggacccgcgaatcccgatctccaggagcctgtaaggaggccgcccattggctcagccgcactgctgggcaggtacttccaaagctttgaggattggctgatgctctgggcgccggggctagttggcgggtaggatcacgtgcgaggggcaggccccgtctaggccccgcctccttgctgctgctgccgccgccaatcctggtccggttgcccgagttcccggaggtctctcgcgggacctctctcaccgccaccgctcctactctcgggcttccaaatctggggcgatgtctccccaggttaaattaccctagctcctgctccagatcgcttccccgtgccccgccagagcccagtagttcaaaaattaaatttggggcaaggggtgcgcgccagagcgcagctgtttctggagcctgcggcagcggtggcgagccacagggcggcgaccgtgagctccgggagctgcgcaaaccacctggagaccatgtctggggatgcgaccaggaccctggggaaaggaagccagcccccagggccagtcccggaggggctgatccgcatctacagcatgaggttctgcccctattctcacaggacccgcctcgtcctcaaggccaaagacatcagacatgaagtggtcaacattaacctgagaaacaagcctgaatggtactatacaaagcacccttttggccacattcctgtcctggagaccagccaatgtcaactgatctatgaatctgttattgcttgtgagtacctggatgatgcttatccaggaaggaagctgtttccatatgacccttatgaacgagctcgccaaaagatgttattggagctattttgtaaggtcccacatttgaccaaggagtgcctggtagcgttgagatgtgggagagaatgcactaatctgaaggcagccctgcgtcaggaattcagcaacctggaagagattcttgagtatcagaacaccaccttctttggtggaacctgtatatccatgattgattacctcctctggccctggtttgagcggctggatgtgtatgggatactggactgtgtgagccacacgccagccctgcggctctggatatcagccatgaagtgggaccccacagtctgtgctcttctcatggataagagcattttccagggcttcttgaatctctattttcagaacaaccctaatgcctttgactttgggctgtgctgagtctcactgtccaccccttcgctgtccagaattccccagcttgttgggagtctacgtcacggcttgtcttgggaaccaatccgtctctctttcttttctttgaagttcccaataaaatgaaaacaggaaatgtattcttctgataatcatttgtctgactcctctagcctgtagctgctgctactgctgcttttttttcctttttttttttgaggcaagatcttgcttcgttactcaggctggagtgcagtgggacagtcggctcactgcagccttgaactcctgggctcagttgattctcccgcctcagcctcctgagaagctaggactacaggtatgtgtcaccacgcccagctaatttttaaaaaaatgttgttgagacagggtctcactatg

SEQ ID NO: 347450 - DNA, 1586 bp, Homo sapiens
accacctctgctgccgcgcgcctaccggagccgcttggccctagtgctttccagcggatttcccctcaggtgcggagccgggtgccggggtcccacagccaaccactaccggttcctctttcgtcagccaccggcgccggcaggacccgcgaatcccgatctccaggagcctgtaaggaggccgcccattggctcagccgcactgctgggcaggtacttccaaagctttgaggattggctgatgctctgggcgccggggctagttggcgggtaggatcacgtgcgaggggcaggccccgtctaggccccgcctccttgctgctgctgccgccgccaatcctggtccggttgcccgagttcccggaggtctctcgcgggacctctctcaccgccaccgctcctactctcgggcttccaaatctggggcgatgtctccccaggttaaattaccctagctcctgctccagatcgcttccccgtgccccgccagagcccagtagttcaaaaattaaatttggggcaaggggtgcgcgccagagcgcagctgtttctggagcctgcggcagcggtggcgagccacagggcggcgaccgtgagctccgggagctgcgcaaaccacctggagaccatgtctggggatgcgaccaggaccctggggaaaggaagccagcccccagggccagtcccggaggggctgatccgcatctacagcatgaggttctgcccctattctcacaggacccgcctcgtcctcaaggccaaagacatcagacatgaagtggtcaacattaacctgagaaacaagcctgaatggtactatacaaagcacccttttggccacattcctgtcctggagaccagccaatgtcaactgatctatgaatctgttattgcttgtgagtacctggatgatgcttatccaggaaggaagctgtttccatatgacccttatgaacgagctcgccaaaagatgttattggagctattttgtaaggtcccacatttgaccaaggagtgcctggtagcgttgagatgtgggagagaatgcactaatctgaaggcagccctgcgtcaggaattcagcaacctggaagagattcttgagtatcagaacaccaccttctttggtggaacctgtatatccatgattgattacctcctctggccctggtttgagcggctggatgtgtatgggatactggactgtgtgagccacacgccagccctgcggctctggatatcagccatgaagtgggaccccacagtctgtgctcttctcatggataagagcattttccagggcttcttgaatctctattttcagaacaaccctaatgcctttgactttgggctgtgctgagtctcactgtccaccccttcgctgtccagaattccccaggtcgactcgccaagcaatcaaagggcgtccaacagtggctttagatctcctgagtgtatggacttcattcgcaatcattttagtggcttcgtcaaaatcaagtgcaaaggaaagcacattgggtgtgatgtcatgcagaatgtcccttaatgcctccaattggtcagtgctggttgcagtcagcctg

SEQ ID NO: 347451 - DNA, 597 bp, Homo sapiens
ttctagaggatcccggtgtgtccttgtctcctaattacgtataaaactgactttcgccgggcatggtggctcaagcctgtaatcccagcactttgggaggccgaggtgggaggattacaaggtcaggagttcatgaccacactggccaacatggtgaaaccccttctctactaaagatacaaaaaaaaaaaaaattagccgggtatggtggcacacacctgtaataccagctacttgggagactgaggcaggagaattgcttgaaccagggaggtggaggttgcagtgagccgagatcacaccattgcactccagcctgagcgagagggcaagactctgtctcaaaacaaaacaaaacaaaacaaaacaaaacgcaagactctgtctcaaaacaaaacaaaacaaaaaacaaaaaataaaaaacagtaacaaaaaaccttacaaggtatcctgaagaaaataaaagggaccaattgaccagaaaccaagagaaaaatccaactgtagaaacagaattgtagcaactcagatattggattataggacaaagggaaacaccccactgcattccagccagggtgacagggaggctgtctt

SEQ ID NO: 347452 - DNA, 889 bp, Homo sapiens
ttctagaggatcccggtgtgtccttgtctcctaattacgtataaaactgactttcgccgggcatggtggctcaagcctgtaatcccagcactttgggaggccgaggtgggaggattacaaggtcaggagttcatgaccacactggccaacatggtgaaaccccttctctactaaagatacaaaaaaaaaaaaaattagccgggtatggtggcacacacctgtaataccagctacttgggagactgaggcaggagaattgcttgaaccagggaggtggaggttgcagtgagccgagatcacaccattgcactccagcctgagcgagagggcaagactctgtctcaaaacaaaacaaaacaaaacaaaacaaaacgcaagactctgtctcaaaacaaaacaaaacaaaaaacaaaaaataaaaaacagtaacaaaaaaccttacaaggtatcctgaagaaaataaaagggaccaattgaccagaaaccaagagaaaaatccaactgtagaaacagaattgtagcaactcagatattggattataggacaggaaacatgaaaattgctacaatcgatatattcaggaaaacagaagaaaggatatgttttagcacctggaatccattttttaaaagagtccaacagaaaatatagaacagtgactcaaatgaagaactcggcagttatgcttgatagaggtcagaaacagcagagcaaaaggattaaggagctagaagacagaacagtagaagcatgtcggttgatgcacagatgtggaagataagggggtctgccaggtttctgccccggggactggatggggccgccttggacgcgtggacttcaagaaaaagagcagttgtgggagaagatggggagttttgtttagga

SEQ ID NO: 347453 - DNA, 5920 bp, Homo sapiens
tacacatgcatacaacccgaaatcaccacctacacaaaactcttcagccagcagtgtgaactggaattctgccaacccagatgacatggtggttgattatgaaactgaccctgctgtagttactggtgaaaatatttctttaagccttcagggtgttgaagtatttggtcatgaaaagtcttctagtgatttcattagtaagcaggtgttagatatgcataaagattctatttgtcagtgtcctgcacttgtaggtactgagaagcccaaatatctgcaacacagttgtcattccctagaagcagttgagggccagagtgttgagccatctttgccttttgtgtggaagcctaatgacaatttgaactgtgcaggctactgtgatgccttggagctaaaccaaacatttgacatgacagtggataaagttaactgcacctttatatcacatcatgccatcggaaagagtcagtccttccatactgctggaagcctgccaccaactggtaggagaagtggaagtacatcttctttatcctattccacttggacatcttcccattctgataagacgcatgcaagagaaactacttatgatagagaaagctttgaaaaccctcaagtcacaccatcagaagcccaagacatgacttacacagcattttctgatgtggtgatgcaaagtgaggtttttgtttcagatattggaaatcagtgtgcatgttcttcaggaaaggtcaccagtgagtacacagatggatcacaacaaagactagttggagaaaaagagacacaagcactaacaccagtttctgatggcatggaagtccccaatgattctgcattacaagagttcttttgtttatcccatgatgaatccaatagcgaaccacattcacagagctcatacaggcacaaggaaatgggccaaaatctgagagagacagtgtcctattgtcttattgatgatgaatgccctttaatggtgccagcttttgataagagcgaagctcaagtgctgaacccagagcataaagtcactgagactgaagacacacaaatggtctccaaaggaaaggatttgggaacccaaaatcatacctcagaattgattctaagtagcccgccaggacaaaaggtgggctcgtcatttggactgacttgggatgcaaatgatatggtcattagcacagacaaaacgatgtgcatgtcaacaccagtcctagaacccacaaaagtaaccttttctgtttcaccgattgaagcgacggagaaatgtaagaaagtggagaagggtaatcgagggcttaaaaacataccagactcgaaggaggcacctgtgaacctgtgtaaacctagtttaggaaaatcaacaatcaaaacgaataccccaataggctgcaaagttagaaaaactgaaattataagttacccaagaccaaacttcaagaatgtcaaagcaaaagttatgtctagagcagtgttgcagcccaaagatgctgctttatcaaaggtcacgcccagacctcagcagaccagtgcctcatcaccctcatcagtgaattcaagacaacaaacagtcttgagcagaacaccgagatctgacttgaatgcagacaaaaaagcagaaattctaattaacaagacacataagcagcagtttaataaactcattactagccaggctgtgcatgttacaactcattctaaaaatgcttcacacagggttccaagaacaacatctgccgtgaaatcgaatcaggaagatgttgacaaagccagttcttctaactcagcatgcgagaccgggtccgtttctgcgttgtttcagaagatcaaaggcatactccctgttaaaatggaaagtgcagaatgtttggaaatgacctatgttcccaacattgataggattagccctgaaaagaagggtgaaaaagaaaatgggacatctatggaaaaacaagagctgaaacaagagattatgaatgagacttttgaatatggttctctgtttttgggctctgcttcaaaaacaacgaccacctcaggtaggaatatatccaagcctgactcctgcggtttgaggcaaatagctgctccaaaagccaaagtggggccccctgtttcctgtttgaggcggaacagtgacaatagaaatcccagtgctgatcgagccgtatctcctcagaggatcaggcgtgtgtccagttctgttttgccaaaagctgctttctcatgattattctgattgatcatctccttcagagaacatgtgaaagcctacatccttgaaaactgcacagtcgtcatgggtgaatttgcctagaccacttcctaaatccaaagcatctttgaaaagtcctgcgctgcggaggacaggaagcaccccctcaatagccagcacccacagtgagctgagcacttacagcaacaattctggtaatgccgctgtcatcaaatatgaggagaaacctccaaaaccagcatttcagaatggttcctcaggatccttttatttgaagcctttggtatccagggctcatgttcacttgatgaaaactcctccaaaaggtccttcgagaaaaaatttatttacagctcttaatgcagttgaaaagagcaggcaaaagaatcctcgaagcttatgtatccagccacagacagctcccgatgcgctgccccctgagaaaacacttgaattgacgcaatataaaacaaaatgtgaaaaccaaagtggatttatcctgcagctcaagcagcttcttgcctgtggtaataccaagtttgaggcattgacagttgtgattcagcacctgctgtctgagcgggaggaagcactgaaacaacacaaaaccctatctcaagaacttgttaacctccggggagagctagtcactgcttcaaccacctgtgagaaattagaaaaagccaggaatgagttacaaacagtgtatgaagcattcgtccagcagcaccaggctgaaaaaacagaacgagagaatcggcttaaagagttttacaccagggagtatgaaaagcttcgggacacttacattgaagaagcagagaagtacaaaatgcaattgcaagagcagtttgacaacttaaatgctgcgcatgaaacctctaagttggaaattgaagctagccactcagagaaacttgaattgctaaagaaggcctatgaagcctccctttcagaaattaagaaaggccatgaaatagaaaagaaatcgcttgaagatttactttctgagaagcaggaatcgctagagaagcaaatcaatgatctgaagagtgaaaatgatgctttaaatgaaaaattgaaatcagaagaacaaaaaagaagagcaagagaaaaagcaaatttgaaaaatcctcagatcatgtatctagaacaggagttagaaagcctgaaagctgtgttagagatcaagaatgagaaactgcatcaacaggacatcaagttaatgaaaatggagaaactggtggacaacaacacagcattggttgacaaattgaagcgtttccagcaggagaatgaagaattgaaagctcggatggacaagcacatggcaatctcaaggcagctttccacggagcaggctgttctgcaagagtcgctggagaaggagtcgaaagtcaacaagcgactctctatggaaaacgaggagcttctgtggaaactgcacaatggggacctgtgtagccccaagagatcccccacatcctccgccatccctttgcagtcaccaaggaattcgggctccttccctagccccagcatttcacccagatgacacgtccccaaagtccacagactctctgaaagcattttgatgcaggtctgcaggactgaccccaaggaggaacgtgggcacaagaggtatatcagcacacgtgtgatcaccgtagggtaactggagcgtcaccaccggcggaatcgcagcttctgagactggaagtctggaggaagacttttgcctccgtccaaaagattcctccaaaaaaagatttaaaaaaagatttcggcatcgacacggacgttgttgcacaaagcacttaaagaacgagagcatcttgttcattgcctttttcacctaagcataaggggaaaaactctcagggccctattaagatttataacctttgtaatgttcttcaccacagacaccttcttgtgagttttcagtctgactgtgggggtggggggtgtgaatgaaatggatgtcacagagtgtcatgtgtctgatgcagcctcctctgctgtgtattaaatgtcaaaatctgaatatatctggatatgtactaatcaaataataatcaatcaatcagcatatacatttcagccaaagccatagaagaaaaagcaatagttgcttgaattatgatcatctaccaccaactctgctcagccctgtaacagggtagggagagggtataacaggaagagctttgacttgtccctgtctatacattctctgtatcttttgggggtaacttcttggcagtttttcagtgttcagccatgtcagttgaaactagatttttctgtagattttttacttacccatgtgagcctaacactatcctgtaattcattttctcaggctatgtgtaaatgtagaaccctaatttttctataaaaaaacaaactaactaactgtgtaaagaaagaaaaagggaagtaccaatgggtttttccaccttatttttacctttgatctacccttgcagatttaacctgtcttcttccctcccattattctcattttccttttacctttctccaccatccagagccacaaaagcaaaccttctacctcctacctacttttctctgggacaaggataaaggaatatgattttccagagccccagagccagctcatcttccaggtgctgaaaccactttccaaataaactaaagcctggatttgatattacaaattttgggaaatcttagaataaagaacgagaacaaggaagtcattggctagtataattaagaaaggtaggattcagtgcttaccgatgatgcagtacttgatagaagaaaacagtctgggaggatagcgctcatttttcagttaccctttaaggagtccctttgtctttgggaaagtagcagaatggtccgcttctttcccatgagtggaaaatgtggcttgtccaactctcctccaggttgcatttcagtttctttccaaaacttattacctcccctaatcctgagactttggaaaaggtggaaggaagaactgttgctttatctccccctccctgcatgtgtcaacattgtgatgtcagtatttactaatctacattcagtggctgtacaaataacagctgtagtaagaagagattcaggatgctagaggtgaatatttgggtcatttacatgtacactacatagcaagttgatactcatgttgcatgttcttttaaattagtgattttgtgtcttaagtctttaacttccaatacttcatcatgtatgtaaccttccatgtttgcttctgataaatggaaatgtaggttcactgccacttcatgagatatctctgctcacgcttccaagttgttctcaatgacattagccaaagttgggtttgccattcatcccctaggcatggtaaatcttgtgttgttccctgctgtcctccgtattacgtgaccggcaaataaatctcatagcagttaatataaaacatctttggaggatgggagagaacaggagggaagatgggaaacaaaatagagaattcttaagattttgtttaaaccaaatgtttcatgtagaatgcaaaatgttggcacgtcaaaaatatgaatgtgtagacaactgtagttgtgctcagtttgtagtgatgggaagtgtattttactctgatcaaataaataatgctggaatactcaa

SEQ ID NO: 347454 - DNA, 3720 bp, Homo sapiens
ctctgcgtctttgctcccggagcgcttgaaggagctgcggggctctgcttcaaaaacaacgaccacctcaggtaggaatatatccaagcctgactcctgcggtttgaggcaaatagctgctccaaaagccaaagtggggccccctgtttcctgtttgaggcggaacagtgacaatagaaatcccagtgctgatcgagccgtatctcctcagaggatcaggcgtgtgtccagttctgctggtaatgccgctgtcatcaaatatgaggagaaacctccaaaaccagcatttcagaatggttcctcaggatccttttatttgaagcctttggtatccagggctcatgttcacttgatgaaaactcctccaaaaggtccttcgagaaaaaatttatttacagctcttaatgcagttgaaaagagcaggcaaaagaatcctcgaagcttatgtatccagccacagacagctcccgatgcgctgccccctgagaaaacacttgaattgacgcaatataaaacaaaatgtgaaaaccaaagtggatttatcctgcagctcaagcagcttcttgcctgtggtaataccaagtttgaggcattgacagttgtgattcagcacctgctgtctgagcgggaggaagcactgaaacaacacaaaaccctatctcaagaacttgttaacctccggggagagctagtcactgcttcaaccacctgtgagaaattagaaaaagccaggaatgagttacaaacagtgtatgaagcattcgtccagcagcaccaggctgaaaaaacagaacgagagaatcggcttaaagagttttacaccagggagtatgaaaagcttcgggacacttacattgaagaagcagagaagtacaaaatgcaattgcaagagcagtttgacaacttaaatgctgcgcatgaaacctctaagttggaaattgaagctagccactcagagaaacttgaattgctaaagaaggcctatgaagcctccctttcagaaattaagaaaggccatgaaatagaaaagaaatcgcttgaagatttactttctgagaagcaggaatcgctagagaagcaaatcaatgatctgaagagtgaaaatgatgctttaaatgaaaaattgaaatcagaagaacaaaaaagaagagcaagagaaaaagcaaatttgaaaaatcctcagatcatgtatctagaacaggagttagaaagcctgaaagctgtgttagagatcaagaatgagaaactgcatcaacaggacatcaagttaatgaaaatggagaaactggtggacaacaacacagcattggttgacaaattgaagcgtttccagcaggagaatgaagaattgaaagctcggatggacaagcacatggcaatctcaaggcagctttccacggagcaggctgttctgcaagagtcgctggagaaggagtcgaaagtcaacaagcgactctctatggaaaacgaggagcttctgtggaaactgcacaatggggacctgtgtagccccaagagatcccccacatcctccgccatccctttgcagtcaccaaggaattcgggctccttccctagccccagcatttcacccagatgacacgtccccaaagtccacagactctctgaaagcattttgatgcaggtctgcaggactgaccccaaggaggaacgtgggcacaagaggtatatcagcacacgtgtgatcaccgtagggtaactggagcgtcaccaccggcggaatcgcagcttctgagactggaagtctggaggaagacttttgcctccgtccaaaagattcctccaaaaaaagatttaaaaaaagatttcggcatcgacacggacgttgttgcacaaagcacttaaagaacgagagcatcttgttcattgcctttttcacctaagcataaggggaaaaactctcagggccctattaagatttataacctttgtaatgttcttcaccacagacaccttcttgtgagttttcagtctgactgtgggggtggggggtgtgaatgaaatggatgtcacagagtgtcatgtgtctgatgcagcctcctctgctgtgtattaaatgtcaaaatctgaatatatctggatatgtactaatcaaataataatcaatcaatcagcatatacatttcagccaaagccatagaagaaaaagcaatagttgcttgaattatgatcatctaccaccaactctgctcagccctgtaacagggtagggagagggtataacaggaagagctttgacttgtccctgtctatacattctctgtatcttttgggggtaacttcttggcagtttttcagtgttcagccatgtcagttgaaactagatttttctgtagattttttacttacccatgtgagcctaacactatcctgtaattcattttctcaggctatgtgtaaatgtagaaccctaatttttctataaaaaaacaaactaactaactgtgtaaagaaagaaaaagggaagtaccaatgggtttttccaccttatttttacctttgatctacccttgcagatttaacctgtcttcttccctcccattattctcattttccttttacctttctccaccatccagagccacaaaagcaaaccttctacctcctacctacttttctctgggacaaggataaaggaatatgattttccagagccccagagccagctcatcttccaggtgctgaaaccactttccaaataaactaaagcctggatttgatattacaaattttgggaaatcttagaataaagaacgagaacaaggaagtcattggctagtataattaagaaaggtaggattcagtgcttaccgatgatgcagtacttgatagaagaaaacagtctgggaggatagcgctcatttttcagttaccctttaaggagtccctttgtctttgggaaagtagcagaatggtccgcttctttcccatgagtggaaaatgtggcttgtccaactctcctccaggttgcatttcagtttctttccaaaacttattacctcccctaatcctgagactttggaaaaggtggaaggaagaactgttgctttatctccccctccctgcatgtgtcaacattgtgatgtcagtatttactaatctacattcagtggctgtacaaataacagctgtagtaagaagagattcaggatgctagaggtgaatatttgggtcatttacatgtacactacatagcaagttgatactcatgttgcatgttcttttaaattagtgattttgtgtcttaagtctttaacttccaatacttcatcatgtatgtaaccttccatgtttgcttctgataaatggaaatgtaggttcactgccacttcatgagatatctctgctcacgcttccaagttgttctcaatgacattagccaaagttgggtttgccattcatcccctaggcatggtaaatcttgtgttgttccctgctgtcctccgtattacgtgaccggcaaataaatctcatagcagttaatataaaacatctttggaggatgggagagaacaggagggaagatgggaaacaaaatagagaattcttaagattttgtttaaaccaaatgtttcatgtagaatgcaaaatgttggcacgtcaaaaatatgaatgtgtagacaactgtagttgtgctcagtttgtagtgatgggaagtgtattttactctgatcaaataaataatgctggaatactcaa

SEQ ID NO: 347455 - DNA, 3299 bp, Homo sapiens
caggacatgaagtaagacgcccgagggccaatggcgcgcctcctgctagagctttgaatgtagacagacccgactggtgggtggcgcggccacctgtatgcttcttgcacagtgcgaggggtggggggacttggagacagaagctggaaaatgggctgccccagcagcaaactgtgcctctattctccatgtgcagcaacaaggcgggaggaagcactgaaacaacacaaaaccctatctcaagaacttgttaacctccggggagagctagtcactgcttcaaccacctgtgagaaattagaaaaagccaggaatgagttacaaacagtgtatgaagcattcgtccagcagcaccaggctgaaaaaacagaacgagagaatcggcttaaagagttttacaccagggagtatgaaaagcttcgggacacttacattgaagaagcagagaagtacaaaatgcaattgcaagagcagtttgacaacttaaatgctgcgcatgaaacctctaagttggaaattgaagctagccactcagagaaacttgaattgctaaagaaggcctatgaagcctccctttcagaaattaagaaaggccatgaaatagaaaagaaatcgcttgaagatttactttctgagaagcaggaatcgctagagaagcaaatcaatgatctgaagagtgaaaatgatgctttaaatgaaaaattgaaatcagaagaacaaaaaagaagagcaagagaaaaagcaaatttgaaaaatcctcagatcatgtatctagaacaggagttagaaagcctgaaagctgtgttagagatcaagaatgagaaactgcatcaacaggacatcaagttaatgaaaatggagaaactggtggacaacaacacagcattggttgacaaattgaagcgtttccagcaggagaatgaagaattgaaagctcggatggacaagcacatggcaatctcaaggcagctttccacggagcaggctgttctgcaagagtcgctggagaaggagtcgaaagtcaacaagcgactctctatggaaaacgaggagcttctgtggaaactgcacaatggggacctgtgtagccccaagagatcccccacatcctccgccatccctttgcagtcaccaaggaattcgggctccttccctagccccagcatttcacccagatgacacgtccccaaagtccacagactctctgaaagcattttgatgcaggtctgcaggactgaccccaaggaggaacgtgggcacaagaggtatatcagcacacgtgtgatcaccgtagggtaactggagcgtcaccaccggcggaatcgcagcttctgagactggaagtctggaggaagacttttgcctccgtccaaaagattcctccaaaaaaagatttaaaaaaagatttcggcatcgacacggacgttgttgcacaaagcacttaaagaacgagagcatcttgttcattgcctttttcacctaagcataaggggaaaaactctcagggccctattaagatttataacctttgtaatgttcttcaccacagacaccttcttgtgagttttcagtctgactgtgggggtggggggtgtgaatgaaatggatgtcacagagtgtcatgtgtctgatgcagcctcctctgctgtgtattaaatgtcaaaatctgaatatatctggatatgtactaatcaaataataatcaatcaatcagcatatacatttcagccaaagccatagaagaaaaagcaatagttgcttgaattatgatcatctaccaccaactctgctcagccctgtaacagggtagggagagggtataacaggaagagctttgacttgtccctgtctatacattctctgtatcttttgggggtaacttcttggcagtttttcagtgttcagccatgtcagttgaaactagatttttctgtagattttttacttacccatgtgagcctaacactatcctgtaattcattttctcaggctatgtgtaaatgtagaaccctaatttttctataaaaaaacaaactaactaactgtgtaaagaaagaaaaagggaagtaccaatgggtttttccaccttatttttacctttgatctacccttgcagatttaacctgtcttcttccctcccattattctcattttccttttacctttctccaccatccagagccacaaaagcaaaccttctacctcctacctacttttctctgggacaaggataaaggaatatgattttccagagccccagagccagctcatcttccaggtgctgaaaccactttccaaataaactaaagcctggatttgatattacaaattttgggaaatcttagaataaagaacgagaacaaggaagtcattggctagtataattaagaaaggtaggattcagtgcttaccgatgatgcagtacttgatagaagaaaacagtctgggaggatagcgctcatttttcagttaccctttaaggagtccctttgtctttgggaaagtagcagaatggtccgcttctttcccatgagtggaaaatgtggcttgtccaactctcctccaggttgcatttcagtttctttccaaaacttattacctcccctaatcctgagactttggaaaaggtggaaggaagaactgttgctttatctccccctccctgcatgtgtcaacattgtgatgtcagtatttactaatctacattcagtggctgtacaaataacagctgtagtaagaagagattcaggatgctagaggtgaatatttgggtcatttacatgtacactacatagcaagttgatactcatgttgcatgttcttttaaattagtgattttgtgtcttaagtctttaacttccaatacttcatcatgtatgtaaccttccatgtttgcttctgataaatggaaatgtaggttcactgccacttcatgagatatctctgctcacgcttccaagttgttctcaatgacattagccaaagttgggtttgccattcatcccctaggcatggtaaatcttgtgttgttccctgctgtcctccgtattacgtgaccggcaaataaatctcatagcagttaatataaaacatctttggaggatgggagagaacaggagggaagatgggaaacaaaatagagaattcttaagattttgtttaaaccaaatgtttcatgtagaatgcaaaatgttggcacgtcaaaaatatgaatgtgtagacaactgtagttgtgctcagtttgtagtgatgggaagtgtattttactctgatcaaataaataatgctggaatactcaa

SEQ ID NO: 347456 - DNA, 2904 bp, Homo sapiens
accctaaccacctctcaaggccattttgagaacagatggccaatttacataaaagcatactatagatgtaaagtaacgtcatacggcttcatcatcaacccctacatctatatgctttaactgttttagagtacattgatctcatagaatgttattgcctcaaaaatatccgtttattttcccagaaattaagaaaggccatgaaatagaaaagaaatcgcttgaagatttactttctgagaagcaggaatcgctagagaagcaaatcaatgatctgaagagtgaaaatgatgctttaaatgaaaaattgaaatcagaagaacaaaaaagaagagcaagagaaaaagcaaatttgaaaaatcctcagatcatgtatctagaacaggagttagaaagcctgaaagctgtgttagagatcaagaatgagaaactgcatcaacaggacatcaagttaatgaaaatggagaaactggtggacaacaacacagcattggttgacaaattgaagcgtttccagcaggagaatgaagaattgaaagctcggatggacaagcacatggcaatctcaaggcagctttccacggagcaggctgttctgcaagagtcgctggagaaggagtcgaaagtcaacaagcgactctctatggaaaacgaggagcttctgtggaaactgcacaatggggacctgtgtagccccaagagatcccccacatcctccgccatccctttgcagtcaccaaggaattcgggctccttccctagccccagcatttcacccagatgacacgtccccaaagtccacagactctctgaaagcattttgatgcaggtctgcaggactgaccccaaggaggaacgtgggcacaagaggtatatcagcacacgtgtgatcaccgtagggtaactggagcgtcaccaccggcggaatcgcagcttctgagactggaagtctggaggaagacttttgcctccgtccaaaagattcctccaaaaaaagatttaaaaaaagatttcggcatcgacacggacgttgttgcacaaagcacttaaagaacgagagcatcttgttcattgcctttttcacctaagcataaggggaaaaactctcagggccctattaagatttataacctttgtaatgttcttcaccacagacaccttcttgtgagttttcagtctgactgtgggggtggggggtgtgaatgaaatggatgtcacagagtgtcatgtgtctgatgcagcctcctctgctgtgtattaaatgtcaaaatctgaatatatctggatatgtactaatcaaataataatcaatcaatcagcatatacatttcagccaaagccatagaagaaaaagcaatagttgcttgaattatgatcatctaccaccaactctgctcagccctgtaacagggtagggagagggtataacaggaagagctttgacttgtccctgtctatacattctctgtatcttttgggggtaacttcttggcagtttttcagtgttcagccatgtcagttgaaactagatttttctgtagattttttacttacccatgtgagcctaacactatcctgtaattcattttctcaggctatgtgtaaatgtagaaccctaatttttctataaaaaaacaaactaactaactgtgtaaagaaagaaaaagggaagtaccaatgggtttttccaccttatttttacctttgatctacccttgcagatttaacctgtcttcttccctcccattattctcattttccttttacctttctccaccatccagagccacaaaagcaaaccttctacctcctacctacttttctctgggacaaggataaaggaatatgattttccagagccccagagccagctcatcttccaggtgctgaaaccactttccaaataaactaaagcctggatttgatattacaaattttgggaaatcttagaataaagaacgagaacaaggaagtcattggctagtataattaagaaaggtaggattcagtgcttaccgatgatgcagtacttgatagaagaaaacagtctgggaggatagcgctcatttttcagttaccctttaaggagtccctttgtctttgggaaagtagcagaatggtccgcttctttcccatgagtggaaaatgtggcttgtccaactctcctccaggttgcatttcagtttctttccaaaacttattacctcccctaatcctgagactttggaaaaggtggaaggaagaactgttgctttatctccccctccctgcatgtgtcaacattgtgatgtcagtatttactaatctacattcagtggctgtacaaataacagctgtagtaagaagagattcaggatgctagaggtgaatatttgggtcatttacatgtacactacatagcaagttgatactcatgttgcatgttcttttaaattagtgattttgtgtcttaagtctttaacttccaatacttcatcatgtatgtaaccttccatgtttgcttctgataaatggaaatgtaggttcactgccacttcatgagatatctctgctcacgcttccaagttgttctcaatgacattagccaaagttgggtttgccattcatcccctaggcatggtaaatcttgtgttgttccctgctgtcctccgtattacgtgaccggcaaataaatctcatagcagttaatataaaacatctttggaggatgggagagaacaggagggaagatgggaaacaaaatagagaattcttaagattttgtttaaaccaaatgtttcatgtagaatgcaaaatgttggcacgtcaaaaatatgaatgtgtagacaactgtagttgtgctcagtttgtagtgatgggaagtgtattttactctgatcaaataaataatgctggaatactcaa

SEQ ID NO: 347457 - DNA, 2600 bp, Homo sapiens
ctagaggatcccacctcctacccacgaagagcaagagaaaaagcaaatttgaaaaatcctcagatcatgtatctagaacaggagttagaaagcctgaaagctgtgttagagatcaagaatgagaaactgcatcaacaggacatcaagttaatgaaaatggagaaactggtggacaacaacacagcattggttgacaaattgaagcgtttccagcaggagaatgaagaattgaaagctcggatggacaagcacatggcaatctcaaggcagctttccacggagcaggctgttctgcaagagtcgctggagaaggagtcgaaagtcaacaagcgactctctatggaaaacgaggagcttctgtggaaactgcacaatggggacctgtgtagccccaagagatcccccacatcctccgccatccctttgcagtcaccaaggaattcgggctccttccctagccccagcatttcacccagatgacacgtccccaaagtccacagactctctgaaagcattttgatgcaggtctgcaggactgaccccaaggaggaacgtgggcacaagaggtatatcagcacacgtgtgatcaccgtagggtaactggagcgtcaccaccggcggaatcgcagcttctgagactggaagtctggaggaagacttttgcctccgtccaaaagattcctccaaaaaaagatttaaaaaaagatttcggcatcgacacggacgttgttgcacaaagcacttaaagaacgagagcatcttgttcattgcctttttcacctaagcataaggggaaaaactctcagggccctattaagatttataacctttgtaatgttcttcaccacagacaccttcttgtgagttttcagtctgactgtgggggtggggggtgtgaatgaaatggatgtcacagagtgtcatgtgtctgatgcagcctcctctgctgtgtattaaatgtcaaaatctgaatatatctggatatgtactaatcaaataataatcaatcaatcagcatatacatttcagccaaagccatagaagaaaaagcaatagttgcttgaattatgatcatctaccaccaactctgctcagccctgtaacagggtagggagagggtataacaggaagagctttgacttgtccctgtctatacattctctgtatcttttgggggtaacttcttggcagtttttcagtgttcagccatgtcagttgaaactagatttttctgtagattttttacttacccatgtgagcctaacactatcctgtaattcattttctcaggctatgtgtaaatgtagaaccctaatttttctataaaaaaacaaactaactaactgtgtaaagaaagaaaaagggaagtaccaatgggtttttccaccttatttttacctttgatctacccttgcagatttaacctgtcttcttccctcccattattctcattttccttttacctttctccaccatccagagccacaaaagcaaaccttctacctcctacctacttttctctgggacaaggataaaggaatatgattttccagagccccagagccagctcatcttccaggtgctgaaaccactttccaaataaactaaagcctggatttgatattacaaattttgggaaatcttagaataaagaacgagaacaaggaagtcattggctagtataattaagaaaggtaggattcagtgcttaccgatgatgcagtacttgatagaagaaaacagtctgggaggatagcgctcatttttcagttaccctttaaggagtccctttgtctttgggaaagtagcagaatggtccgcttctttcccatgagtggaaaatgtggcttgtccaactctcctccaggttgcatttcagtttctttccaaaacttattacctcccctaatcctgagactttggaaaaggtggaaggaagaactgttgctttatctccccctccctgcatgtgtcaacattgtgatgtcagtatttactaatctacattcagtggctgtacaaataacagctgtagtaagaagagattcaggatgctagaggtgaatatttgggtcatttacatgtacactacatagcaagttgatactcatgttgcatgttcttttaaattagtgattttgtgtcttaagtctttaacttccaatacttcatcatgtatgtaaccttccatgtttgcttctgataaatggaaatgtaggttcactgccacttcatgagatatctctgctcacgcttccaagttgttctcaatgacattagccaaagttgggtttgccattcatcccctaggcatggtaaatcttgtgttgttccctgctgtcctccgtattacgtgaccggcaaataaatctcatagcagttaatataaaacatctttggaggatgggagagaacaggagggaagatgggaaacaaaatagagaattcttaagattttgtttaaaccaaatgtttcatgtagaatgcaaaatgttggcacgtcaaaaatatgaatgtgtagacaactgtagttgtgctcagtttgtagtgatgggaagtgtattttactctgatcaaataaataatgctggaatactcaa

SEQ ID NO: 347458 - DNA, 2635 bp, Homo sapiens
catgttttaaaaatacccagccgctctgttttgctgttttaaaatctttttcagtatgtttgttagtgtataaatattttaatatggaattgcattttccttaattaaatctccaaagtgtgcttgtgtcgtgaggtgccttaagaaatgaggggttttttttttaatattgtataaatgttggaattcttgtttatgccaaggtggacaacaacacagcattggttgacaaattgaagcgtttccagcaggagaatgaagaattgaaagctcggatggacaagcacatggcaatctcaaggcagctttccacggagcaggctgttctgcaagagtcgctggagaaggagtcgaaagtcaacaagcgactctctatggaaaacgaggagcttctgtggaaactgcacaatggggacctgtgtagccccaagagatcccccacatcctccgccatccctttgcagtcaccaaggaattcgggctccttccctagccccagcatttcacccagatgacacgtccccaaagtccacagactctctgaaagcattttgatgcaggtctgcaggactgaccccaaggaggaacgtgggcacaagaggtatatcagcacacgtgtgatcaccgtagggtaactggagcgtcaccaccggcggaatcgcagcttctgagactggaagtctggaggaagacttttgcctccgtccaaaagattcctccaaaaaaagatttaaaaaaagatttcggcatcgacacggacgttgttgcacaaagcacttaaagaacgagagcatcttgttcattgcctttttcacctaagcataaggggaaaaactctcagggccctattaagatttataacctttgtaatgttcttcaccacagacaccttcttgtgagttttcagtctgactgtgggggtggggggtgtgaatgaaatggatgtcacagagtgtcatgtgtctgatgcagcctcctctgctgtgtattaaatgtcaaaatctgaatatatctggatatgtactaatcaaataataatcaatcaatcagcatatacatttcagccaaagccatagaagaaaaagcaatagttgcttgaattatgatcatctaccaccaactctgctcagccctgtaacagggtagggagagggtataacaggaagagctttgacttgtccctgtctatacattctctgtatcttttgggggtaacttcttggcagtttttcagtgttcagccatgtcagttgaaactagatttttctgtagattttttacttacccatgtgagcctaacactatcctgtaattcattttctcaggctatgtgtaaatgtagaaccctaatttttctataaaaaaacaaactaactaactgtgtaaagaaagaaaaagggaagtaccaatgggtttttccaccttatttttacctttgatctacccttgcagatttaacctgtcttcttccctcccattattctcattttccttttacctttctccaccatccagagccacaaaagcaaaccttctacctcctacctacttttctctgggacaaggataaaggaatatgattttccagagccccagagccagctcatcttccaggtgctgaaaccactttccaaataaactaaagcctggatttgatattacaaattttgggaaatcttagaataaagaacgagaacaaggaagtcattggctagtataattaagaaaggtaggattcagtgcttaccgatgatgcagtacttgatagaagaaaacagtctgggaggatagcgctcatttttcagttaccctttaaggagtccctttgtctttgggaaagtagcagaatggtccgcttctttcccatgagtggaaaatgtggcttgtccaactctcctccaggttgcatttcagtttctttccaaaacttattacctcccctaatcctgagactttggaaaaggtggaaggaagaactgttgctttatctccccctccctgcatgtgtcaacattgtgatgtcagtatttactaatctacattcagtggctgtacaaataacagctgtagtaagaagagattcaggatgctagaggtgaatatttgggtcatttacatgtacactacatagcaagttgatactcatgttgcatgttcttttaaattagtgattttgtgtcttaagtctttaacttccaatacttcatcatgtatgtaaccttccatgtttgcttctgataaatggaaatgtaggttcactgccacttcatgagatatctctgctcacgcttccaagttgttctcaatgacattagccaaagttgggtttgccattcatcccctaggcatggtaaatcttgtgttgttccctgctgtcctccgtattacgtgaccggcaaataaatctcatagcagttaatataaaacatctttggaggatgggagagaacaggagggaagatgggaaacaaaatagagaattcttaagattttgtttaaaccaaatgtttcatgtagaatgcaaaatgttggcacgtcaaaaatatgaatgtgtagacaactgtagttgtgctcagtttgtagtgatgggaagtgtattttactctgatcaaataaataatgctggaatactcaa

SEQ ID NO: 347459 - DNA, 4870 bp, Homo sapiens
tacacatgcatacaacccgaaatcaccacctacacaaaactcttcagccagcagtgtgaactggaattctgccaacccagatgacatggtggttgattatgaaactgaccctgctgtagttactggtgaaaatatttctttaagccttcagggtgttgaagtatttggtcatgaaaagtcttctagtgatttcattagtaagcaggtgttagatatgcataaagattctatttgtcagtgtcctgcacttgtaggtactgagaagcccaaatatctgcaacacagttgtcattccctagaagcagttgagggccagagtgttgagccatctttgccttttgtgtggaagcctaatgacaatttgaactgtgcaggctactgtgatgccttggagctaaaccaaacatttgacatgacagtggataaagttaactgcacctttatatcacatcatgccatcggaaagagtcagtccttccatactgctggaagcctgccaccaactggtaggagaagtggaagtacatcttctttatcctattccacttggacatcttcccattctgataagacgcatgcaagagaaactacttatgatagagaaagctttgaaaaccctcaagtcacaccatcagaagcccaagacatgacttacacagcattttctgatgtggtgatgcaaagtgaggtttttgtttcagatattggaaatcagtgtgcatgttcttcaggaaaggtcaccagtgagtacacagatggatcacaacaaagactagttggagaaaaagagacacaagcactaacaccagtttctgatggcatggaagtccccaatgattctgcattacaagagttcttttgtttatcccatgatgaatccaatagcgaaccacattcacagagctcatacaggcacaaggaaatgggccaaaatctgagagagacagtgtcctattgtcttattgatgatgaatgccctttaatggtgccagcttttgataagagcgaagctcaagtgctgaacccagagcataaagtcactgagactgaagacacacaaatggtctccaaaggaaaggatttgggaacccaaaatcatacctcagaattgattctaagtagcccgccaggacaaaaggtgggctcgtcatttggactgacttgggatgcaaatgatatggtcattagcacagacaaaacgatgtgcatgtcaacaccagtcctagaacccacaaaagtaaccttttctgtttcaccgattgaagcgacggagaaatgtaagaaagtggagaagggtaatcgagggcttaaaaacataccagactcgaaggaggcacctgtgaacctgtgtaaacctagtttaggaaaatcaacaatcaaaacgaataccccaataggctgcaaagttagaaaaactgaaattataagttacccaagaccaaacttcaagaatgtcaaagcaaaagttatgtctagagcagtgttgcagcccaaagatgctgctttatcaaaggtcacgcccagacctcagcagaccagtgcctcatcaccctcatcagtgaattcaagacaacaaacagtcttgagcagaacaccgagatctgacttgaatgcagacaaaaaagcagaaattctaattaacaagacacataagcagcagtttaataaactcattactagccaggctgtgcatgttacaactcattctaaaaatgcttcacacagggttccaagaacaacatctgccgtgaaatcgaatcaggaagatgttgacaaagccagttcttctaactcagcatgcgagaccgggtccgtttctgcgttgtttcagaagatcaaaggcatactccctgttaaaatggaaagtgcagaatgtttggaaatgacctatgttcccaacattgataggattagccctgaaaagaagggtgaaaaagaaaatgggacatctatggaaaaacaagagctgaaacaagagattatgaatgagacttttgaatatggttctctgtttttgggctctgcttcaaaaacaacgaccacctcaggtaggaatatatccaagcctgactcctgcggtttgaggcaaatagctgctccaaaagccaaagtggggccccctgtttcctgtttgaggcggaacagtgacaatagaaatcccagtgctgatcgagccgtatctcctcagaggatcaggcgtgtgtccagttctggaaagcctacatccttgaaaactgcacagtcgtcatgggtgaatttgcctagaccacttcctaaatccaaagcatctttgaaaagtcctgcgctgcggaggacaggaagcaccccctcaatagccagcacccacagtgagctgagcacttacagcaacaattctggtaatgccgctgtcatcaaatatgaggagaaacctccaaaaccagcatttcagaatggttcctcaggatccttttatttgaagcctttggtatccagggctcatgttcacttgatgaaaactcctccaaaaggtccttcgagaaaaaatttatttacagctcttaatgcagttgaaaagagcaggcaaaagaatcctcgaagcttatgtatccagccacagacagctcccgatgcgctgccccctgagaaaacacttgaattgacgcaatataaaacaaaatgtgaaaaccaaagtggatttatcctgcagctcaagcagcttcttgcctgtggtaataccaagtttgaggcattgacagttgtgattcagcacctgctgtctgagcgggaggaagcactgaaacaacacaaaaccctatctcaagaacttgttaacctccggggagagctagtcactgcttcaaccacctgtgagaaattagaaaaagccaggaatgagttacaaacagtgtatgaagcattcgtccagcagcaccaggctgaaaaaacagaacgagagaatcggcttaaagagttttacaccagggagtatgaaaagcttcgggacacttacattgaagaagcagagaagtacaaaatgcaattgcaagagcagtttgacaacttaaatgctgcgcatgaaacctctaagttggaaattgaagctagccactcagagaaacttgaattgctaaagaaggcctatgaagcctccctttcagaaattaagaaaggccatgaaatagaaaagaaatcgcttgaagatttactttctgagaagcaggaatcgctagagaagcaaatcaatgatctgaagagtgaaaatgatgctttaaatgaaaaattgaaatcagaagaacaaaaaagaagagcaagagaaaaagcaaatttgaaaaatcctcagatcatgtatctagaacaggagttagaaagcctgaaagctgtgttagagatcaagaatgagaaactgcatcaacaggacatcaagttaatgaaaatggagaaactggtggacaacaacacagcattggttgacaaattgaagcgtttccagcaggagaatgaagaattgaaagctcggatggacaagcacatggcaatctcaaggcagctttccacggagcaggctgttctgcaagagtcgctggagaaggagtcgaaagtcaacaagcgactctctatggaaaacgaggagcttctgtggaaactgcacaatggggacctgtgtagccccaagagatcccccacatcctccgccatccctttgcagtcaccaaggaattcgggctccttccctagccccagcatttcacccagatgacacgtccccaaagtccacagactctctgaaagcattttgatgcaggtctgcaggactgaccccaaggaggaacgtgggcacaagaggtatatcagcacacgtgtgatcaccgtagggtaactggagcgtcaccaccggcggaatcgcagcttctgagactggaagtctggaggaagacttttgcctccgtccaaaagattcctccaaaaaaagatttaaaaaaagatttcggcatcgacacggacgttgttgcacaaagcacttaaagaacgagagcatcttgttcattgcctttttcacctaagcataaggggaaaaactctcagggccctattaagatttataacctttgtaatgttcttcaccacagacaccttcttgtgagttttcagtctgactgtgggggtggggggtgtgaatgaaatggatgtcacagagtgtcatgtgtctgatgcagcctcctctgctgtgtattaaatgtcaaaatctgaatatatctggatatgtactaatcaaataataatcaatcaatcagcatatacatttcagccaaagccatagaagaaaaagcaatagttgcttgaattatgatcatctaccaccaactctgctcagccctgtaacagggtagggagagggtataacaggaagagctttgacttgtccctgtctatacattctctgtatcttttgggggtaacttcttggcagtttttcagtgttcagccatgtcagttgaaactagatttttctgtagattttttacttacccatgtgagcctaacactatcctgtaattcattttctcaggctatgtgtaaatgtagaaccctaatttttctataaaaaaacaaactaactaactgtgtaaagaaagaaaaagggaagtaccaatgggtttttccaccttatttttacctttgatctacccttgcagatttaacctgtcttcttccctcccattattctcattttccttttacctttctccaccatccagagccacaaaagcaaaccttctacctcctacctgggttaggtctacctgggttaggtctgcctgggttaggtctacctgggttaggtctacctgtagccacctgggttaggtctacctgggttagtctacct

SEQ ID NO: 347460 - DNA, 3279 bp, Homo sapiens
tacacatgcatacaacccgaaatcaccacctacacaaaactcttcagccagcagtgtgaactggaattctgccaacccagatgacatggtggttgattatgaaactgaccctgctgtagttactggtgaaaatatttctttaagccttcagggtgttgaagtatttggtcatgaaaagtcttctagtgatttcattagtaagcaggtgttagatatgcataaagattctatttgtcagtgtcctgcacttgtaggtactgagaagcccaaatatctgcaacacagttgtcattccctagaagcagttgagggccagagtgttgagccatctttgccttttgtgtggaagcctaatgacaatttgaactgtgcaggctactgtgatgccttggagctaaaccaaacatttgacatgacagtggataaagttaactgcacctttatatcacatcatgccatcggaaagagtcagtccttccatactgctggaagcctgccaccaactggtaggagaagtggaagtacatcttctttatcctattccacttggacatcttcccattctgataagacgcatgcaagagaaactacttatgatagagaaagctttgaaaaccctcaagtcacaccatcagaagcccaagacatgacttacacagcattttctgatgtggtgatgcaaagtgaggtttttgtttcagatattggaaatcagtgtgcatgttcttcaggaaaggtcaccagtgagtacacagatggatcacaacaaagactagttggagaaaaagagacacaagcactaacaccagtttctgatggcatggaagtccccaatgattctgcattacaagagttcttttgtttatcccatgatgaatccaatagcgaaccacattcacagagctcatacaggcacaaggaaatgggccaaaatctgagagagacagtgtcctattgtcttattgatgatgaatgccctttaatggtgccagcttttgataagagcgaagctcaagtgctgaacccagagcataaagtcactgagactgaagacacacaaatggtctccaaaggaaaggatttgggaacccaaaatcatacctcagaattgattctaagtagcccgccaggacaaaaggtgggctcgtcatttggactgacttgggatgcaaatgatatggtcattagcacagacaaaacgatgtgcatgtcaacaccagtcctagaacccacaaaagtaaccttttctgtttcaccgattgaagcgacggagaaatgtaagaaagtggagaagggtaatcgagggcttaaaaacataccagactcgaaggaggcacctgtgaacctgtgtaaacctagtttaggaaaatcaacaatcaaaacgaataccccaataggctgcaaagttagaaaaactgaaattataagttacccaagaccaaacttcaagaatgtcaaagcaaaagttatgtctagagcagtgttgcagcccaaagatgctgctttatcaaaggtcacgcccagacctcagcagaccagtgcctcatcaccctcatcagtgaattcaagacaacaaacagtcttgagcagaacaccgagatctgacttgaatgcagacaaaaaagcagaaattctaattaacaagacacataagcagcagtttaataaactcattactagccaggctgtgcatgttacaactcattctaaaaatgcttcacacagggttccaagaacaacatctgccgtgaaatcgaatcaggaagatgttgacaaagccagttcttctaactcagcatgcgagaccgggtccgtttctgcgttgtttcagaagatcaaaggcatactccctgttaaaatggaaagtgcagaatgtttggaaatgacctatgttcccaacattgataggattagccctgaaaagaagggtgaaaaagaaaatgggacatctatggaaaaacaagagctgaaacaagagattatgaatgagacttttgaatatggttctctgtttttgggctctgcttcaaaaacaacgaccacctcaggtaggaatatatccaagcctgactcctgcggtttgaggcaaatagctgctccaaaagccaaagtggggccccctgtttcctgtttgaggcggaacagtgacaatagaaatcccagtgctgatcgagccgtatctcctcagaggatcaggcgtgtgtccagttctggaaagcctacatccttgaaaactgcacagtcgtcatgggtgaatttgcctagaccacttcctaaatccaaagcatctttgaaaagtcctgcgctgcggaggacaggaagcaccccctcaatagccagcacccacagtgagctgagcacttacagcaacaattctggtaatgccgctgtcatcaaatatgaggagaaacctccaaaaccagcatttcagaatggttcctcaggatccttttatttgaagcctttggtatccagggctcatgttcacttgatgaaaactcctccaaaaggtccttcgagaaaaaatttatttacagctcttaatgcagttgaaaagagcaggcaaaagaatcctcgaagcttatgtatccagccacagacagctcccgatgcgctgccccctgagaaaacacttgaattgacgcaatataaaacaaaatgtgaaaaccaaagtggatttatcctgcagctcaagcagcttcttgcctgtggtaataccaagtttgaggcattgacagttgtgattcagcacctgctgtctgagcgggaggaagcactgaaacaacacaaaaccctatctcaagaacttgttaacctccggggagagctagtcactgcttcaaccacctgtgagaaattagaaaaagccaggaatgagttacaaacagtgtatgaagcattcgtccagcagcaccaggctgaaaaaacagaacgagagaatcggcttaaagagttttacaccagggagtatgaaaagcttcgggacacttacattgaagaagcagagaagtacaaaatgcaattgcaagagcagtttgacaacttaaatgctgcgcatgaaacctctaagttggaaattgaagctagccactcagagaaacttgaattgctaaagaaggcctatgaagcctccctttcagaaattaagaaaggccatgaaatagaaaagaaatcgcttgaagatttactttctgagaagcaggaatcgctagagaagcaaatcaatgatctgaagagtgaaaatgatgctttaaatgaaaaattgaaatcagaagaaca

SEQ ID NO: 347461 - DNA, 3272 bp, Homo sapiens
tacacatgcatacaacccgaaatcaccacctacacaaaactcttcagccagcagtgtgaactggaattctgccaacccagatgacatggtggttgattatgaaactgaccctgctgtagttactggtgaaaatatttctttaagccttcagggtgttgaagtatttggtcatgaaaagtcttctagtgatttcattagtaagcaggtgttagatatgcataaagattctatttgtcagtgtcctgcacttgtaggtactgagaagcccaaatatctgcaacacagttgtcattccctagaagcagttgagggccagagtgttgagccatctttgccttttgtgtggaagcctaatgacaatttgaactgtgcaggctactgtgatgccttggagctaaaccaaacatttgacatgacagtggataaagttaactgcacctttatatcacatcatgccatcggaaagagtcagtccttccatactgctggaagcctgccaccaactggtaggagaagtggaagtacatcttctttatcctattccacttggacatcttcccattctgataagacgcatgcaagagaaactacttatgatagagaaagctttgaaaaccctcaagtcacaccatcagaagcccaagacatgacttacacagcattttctgatgtggtgatgcaaagtgaggtttttgtttcagatattggaaatcagtgtgcatgttcttcaggaaaggtcaccagtgagtacacagatggatcacaacaaagactagttggagaaaaagagacacaagcactaacaccagtttctgatggcatggaagtccccaatgattctgcattacaagagttcttttgtttatcccatgatgaatccaatagcgaaccacattcacagagctcatacaggcacaaggaaatgggccaaaatctgagagagacagtgtcctattgtcttattgatgatgaatgccctttaatggtgccagcttttgataagagcgaagctcaagtgctgaacccagagcataaagtcactgagactgaagacacacaaatggtctccaaaggaaaggatttgggaacccaaaatcatacctcagaattgattctaagtagcccgccaggacaaaaggtgggctcgtcatttggactgacttgggatgcaaatgatatggtcattagcacagacaaaacgatgtgcatgtcaacaccagtcctagaacccacaaaagtaaccttttctgtttcaccgattgaagcgacggagaaatgtaagaaagtggagaagggtaatcgagggcttaaaaacataccagactcgaaggaggcacctgtgaacctgtgtaaacctagtttaggaaaatcaacaatcaaaacgaataccccaataggctgcaaagttagaaaaactgaaattataagttacccaagaccaaacttcaagaatgtcaaagcaaaagttatgtctagagcagtgttgcagcccaaagatgctgctttatcaaaggtcacgcccagacctcagcagaccagtgcctcatcaccctcatcagtgaattcaagacaacaaacagtcttgagcagaacaccgagatctgacttgaatgcagacaaaaaagcagaaattctaattaacaagacacataagcagcagtttaataaactcattactagccaggctgtgcatgttacaactcattctaaaaatgcttcacacagggttccaagaacaacatctgccgtgaaatcgaatcaggaagatgttgacaaagccagttcttctaactcagcatgcgagaccgggtccgtttctgcgttgtttcagaagatcaaaggcatactccctgttaaaatggaaagtgcagaatgtttggaaatgacctatgttcccaacattgataggattagccctgaaaagaagggtgaaaaagaaaatgggacatctatggaaaaacaagagctgaaacaagagattatgaatgagacttttgaatatggttctctgtttttgggctctgcttcaaaaacaacgaccacctcaggtaggaatatatccaagcctgactcctgcggtttgaggcaaatagctgctccaaaagccaaagtggggccccctgtttcctgtttgaggcggaacagtgacaatagaaatcccagtgctgatcgagccgtatctcctcagaggatcaggcgtgtgtccagttctggaaagcctacatccttgaaaactgcacagtcgtcatgggtgaatttgcctagaccacttcctaaatccaaagcatctttgaaaagtcctgcgctgcggaggacaggaagcaccccctcaatagccagcacccacagtgagctgagcacttacagcaacaattctggtaatgccgctgtcatcaaatatgaggagaaacctccaaaaccagcatttcagaatggttcctcaggatccttttatttgaagcctttggtatccagggctcatgttcacttgatgaaaactcctccaaaaggtccttcgagaaaaaatttatttacagctcttaatgcagttgaaaagagcaggcaaaagaatcctcgaagcttatgtatccagccacagacagctcccgatgcgctgccccctgagaaaacacttgaattgacgcaatataaaacaaaatgtgaaaaccaaagtggatttatcctgcagctcaagcagcttcttgcctgtggtaataccaagtttgaggcattgacagttgtgattcagcacctgctgtctgagcgggaggaagcactgaaacaacacaaaaccctatctcaagaacttgttaacctccggggagagctagtcactgcttcaaccacctgtgagaaattagaaaaagccaggaatgagttacaaacagtgtatgaagcattcgtccagcagcaccaggctgaaaaaacagaacgagagaatcggcttaaagagttttacaccagggagtatgaaaagcttcgggacacttacattgaagaagcagagaagtacaaaatgcaattgcaagagcagtttgacaacttaaatgctgcgcatgaaacctctaagttggaaattgaagctagccactcagagaaacttgaattgctaaagaaggcctatgaagcctccctttcagaaattaagaaaggccatgaaatagaaaagaaatcgcttgaagatttactttctgagaagcaggaatcgctagagaagcaaatcaatgctattggaacagaaacaatgtttgaaagtttgatcacttgctctg

SEQ ID NO: 347462 - DNA, 112 bp, Homo sapiens
cagaatggttcctcaggatccttttatttgaagcctttggtatccagggctcatgttcacttgatgaaaactcctccaaaaggtacagtcctcattgtggtttgaagaggga

SEQ ID NO: 347463 - DNA, 457 bp, Homo sapiens
atgttcctaattctctgttccccataaatcttttaaagtcataaatgaagccacggtccctgttcatgaattccaaccatctagatctccgattcattccagttctcatccatatgcattccttacagcaacataacttaaatggatttctgtggcttatctggttgtttttgaatccttgtggtggtgattttaaaaattaacctcacctatctttgtacctatgttaattcgttttgcagttgaaaagagcaggcaaaagaatcctcgaagcttatgtatccagccacagacagctcccgatgcgctgccccctgagaaaacacttgaattgacgcaatataaaacaaaatgtgaaaaccaaagtggatttatcctgcagctcaagcagcttcttgcctgtggtaataccaagtttgaggcattgacagttgtgattcagcacctgctgtctgag

SEQ ID NO: 347464 - DNA, 207 bp, Homo sapiens
acaggagggaagatgggaaacaaaatagagaattcttaagattttgtttaaaccaaatgtttcatgtagaatgcaaaatgttggcacgtcaaaaatatgaatgtgtagacaactgtagttgtgctcagtttgtagtgatgggaagtgtattttactctgatcaaataaataatgctggaatactcaagaattgcatcctctgaccta

SEQ ID NO: 347465 - DNA, 5859 bp, Homo sapiens
tacacatgcatacaacccgaaatcaccacctacacaaaactcttcagccagcagtgtgaactggaattctgccaacccagatgacatggtggttgattatgaaactgaccctgctgtagttactggtgaaaatatttctttaagccttcagggtgttgaagtatttggtcatgaaaagtcttctagtgatttcattagtaagcaggtgttagatatgcataaagattctatttgtcagtgtcctgcacttgtaggtactgagaagcccaaatatctgcaacacagttgtcattccctagaagcagttgagggccagagtgttgagccatctttgccttttgtgtggaagcctaatgacaatttgaactgtgcaggctactgtgatgccttggagctaaaccaaacatttgacatgacagtggataaagttaactgcacctttatatcacatcatgccatcggaaagagtcagtccttccatactgctggaagcctgccaccaactggtaggagaagtggaagtacatcttctttatcctattccacttggacatcttcccattctgataagacgcatgcaagagaaactacttatgatagagaaagctttgaaaaccctcaagtcacaccatcagaagcccaagacatgacttacacagcattttctgatgtggtgatgcaaagtgaggtttttgtttcagatattggaaatcagtgtgcatgttcttcaggaaaggtcaccagtgagtacacagatggatcacaacaaagactagttggagaaaaagagacacaagcactaacaccagtttctgatggcatggaagtccccaatgattctgcattacaagagttcttttgtttatcccatgatgaatccaatagcgaaccacattcacagagctcatacaggcacaaggaaatgggccaaaatctgagagagacagtgtcctattgtcttattgatgatgaatgccctttaatggtgccagcttttgataagagcgaagctcaagtgctgaacccagagcataaagtcactgagactgaagacacacaaatggtctccaaaggaaaggatttgggaacccaaaatcatacctcagaattgattctaagtagcccgccaggacaaaaggtgggctcgtcatttggactgacttgggatgcaaatgatatggtcattagcacagacaaaacgatgtgcatgtcaacaccagtcctagaacccacaaaagtaaccttttctgtttcaccgattgaagcgacggagaaatgtaagaaagtggagaagggtaatcgagggcttaaaaacataccagactcgaaggaggcacctgtgaacctgtgtaaacctagtttaggaaaatcaacaatcaaaacgaataccccaataggctgcaaagttagaaaaactgaaattataagttacccaagaccaaacttcaagaatgtcaaagcaaaagttatgtctagagcagtgttgcagcccaaagatgctgctttatcaaaggtcacgcccagacctcagcagaccagtgcctcatcaccctcatcagtgaattcaagacaacaaacagtcttgagcagaacaccgagatctgacttgaatgcagacaaaaaagcagaaattctaattaacaagacacataagcagcagtttaataaactcattactagccaggctgtgcatgttacaactcattctaaaaatgcttcacacagggttccaagaacaacatctgccgtgaaatcgaatcaggaagatgttgacaaagccagttcttctaactcagcatgcgagaccgggtccgtttctgcgttgtttcagaagatcaaaggcatactccctgttaaaatggaaagtgcagaatgtttggaaatgacctatgttcccaacattgataggattagccctgaaaagaagggtgaaaaagaaaatgggacatctatggaaaaacaagagctgaaacaagagattatgaatgagacttttgaatatggttctctgtttttgggctctgcttcaaaaacaacgaccacctcaggtaggaatatatccaagcctgactcctgcggtttgaggcaaatagctgctccaaaagccaaagtggggccccctgtttcctgtttgaggcggaacagtgacaatagaaatcccagtgctgatcgagccgtatctcctcagaggatcaggcgtgtgtccagttctggaaagcctacatccttgaaaactgcacagtcgtcatgggtgaatttgcctagaccacttcctaaatccaaagcatctttgaaaagtcctgcgctgcggaggacaggaagcaccccctcaatagccagcacccacagtgagctgagcacttacagcaacaattctggtaatgccgctgtcatcaaatatgaggagaaacctccaaaaccagcatttcagaatggttcctcaggatccttttatttgaagcctttggtatccagggctcatgttcacttgatgaaaactcctccaaaaggtccttcgagaaaaaatttatttacagctcttaatgcagttgaaaagagcaggcaaaagaatcctcgaagcttatgtatccagccacagacagctcccgatgcgctgccccctgagaaaacacttgaattgacgcaatataaaacaaaatgtgaaaaccaaagtggatttatcctgcagctcaagcagcttcttgcctgtggtaataccaagtttgaggcattgacagttgtgattcagcacctgctgtctgagcgggaggaagcactgaaacaacacaaaaccctatctcaagaacttgttaacctccggggagagctagtcactgcttcaaccacctgtgagaaattagaaaaagccaggaatgagttacaaacagtgtatgaagcattcgtccagcagcaccaggctgaaaaaacagaacgagagaatcggcttaaagagttttacaccagggagtatgaaaagcttcgggacacttacattgaagaagcagagaagtacaaaatgcaattgcaagagcagtttgacaacttaaatgctgcgcatgaaacctctaagttggaaattgaagctagccactcagagaaacttgaattgctaaagaaggcctatgaagcctccctttcagaaattaagaaaggccatgaaatagaaaagaaatcgcttgaagatttactttctgagaagcaggaatcgctagagaagcaaatcaatgatctgaagagtgaaaatgatgctttaaatgaaaaattgaaatcagaagaacaaaaaagaagagcaagagaaaaagcaaatttgaaaaatcctcagatcatgtatctagaacaggagttagaaagcctgaaagctgtgttagagatcaagaatgagaaactgcatcaacaggacatcaagttaatgaaaatggagaaactggtggacaacaacacagcattggttgacaaattgaagcgtttccagcaggagaatgaagaattgaaagctcggatggacaagcacatggcaatctcaaggcagctttccacggagcaggctgttctgcaagagtcgctggagaaggagtcgaaagtcaacaagcgactctctatggaaaacgaggagcttctgtggaaactgcacaatggggacctgtgtagccccaagagatcccccacatcctccgccatccctttgcagtcaccaaggaattcgggctccttccctagccccagcatttcacccagatgacacgtccccaaagtccacagactctctgaaagcattttgatgcaggtctgcaggactgaccccaaggaggaacgtgggcacaagaggtatatcagcacacgtgtgatcaccgtagggtaactggagcgtcaccaccggcggaatcgcagcttctgagactggaagtctggaggaagacttttgcctccgtccaaaagattcctccaaaaaaagatttaaaaaaagatttcggcatcgacacggacgttgttgcacaaagcacttaaagaacgagagcatcttgttcattgcctttttcacctaagcataaggggaaaaactctcagggccctattaagatttataacctttgtaatgttcttcaccacagacaccttcttgtgagttttcagtctgactgtgggggtggggggtgtgaatgaaatggatgtcacagagtgtcatgtgtctgatgcagcctcctctgctgtgtattaaatgtcaaaatctgaatatatctggatatgtactaatcaaataataatcaatcaatcagcatatacatttcagccaaagccatagaagaaaaagcaatagttgcttgaattatgatcatctaccaccaactctgctcagccctgtaacagggtagggagagggtataacaggaagagctttgacttgtccctgtctatacattctctgtatcttttgggggtaacttcttggcagtttttcagtgttcagccatgtcagttgaaactagatttttctgtagattttttacttacccatgtgagcctaacactatcctgtaattcattttctcaggctatgtgtaaatgtagaaccctaatttttctataaaaaaacaaactaactaactgtgtaaagaaagaaaaagggaagtaccaatgggtttttccaccttatttttacctttgatctacccttgcagatttaacctgtcttcttccctcccattattctcattttccttttacctttctccaccatccagagccacaaaagcaaaccttctacctcctacctacttttctctgggacaaggataaaggaatatgattttccagagccccagagccagctcatcttccaggtgctgaaaccactttccaaataaactaaagcctggatttgatattacaaattttgggaaatcttagaataaagaacgagaacaaggaagtcattggctagtataattaagaaaggtaggattcagtgcttaccgatgatgcagtacttgatagaagaaaacagtctgggaggatagcgctcatttttcagttaccctttaaggagtccctttgtctttgggaaagtagcagaatggtccgcttctttcccatgagtggaaaatgtggcttgtccaactctcctccaggttgcatttcagtttctttccaaaacttattacctcccctaatcctgagactttggaaaaggtggaaggaagaactgttgctttatctccccctccctgcatgtgtcaacattgtgatgtcagtatttactaatctacattcagtggctgtacaaataacagctgtagtaagaagagattcaggatgctagaggtgaatatttgggtcatttacatgtacactacatagcaagttgatactcatgttgcatgttcttttaaattagtgattttgtgtcttaagtctttaacttccaatacttcatcatgtatgtaaccttccatgtttgcttctgataaatggaaatgtaggttcactgccacttcatgagatatctctgctcacgcttccaagttgttctcaatgacattagccaaagttgggtttgccattcatcccctaggcatggtaaatcttgtgttgttccctgctgtcctccgtattacgtgaccggcaaataaatctcatagcagttaatataaaacatctttggaggatgggagagaacaggagggaagatgggaaacaaaatagagaattcttaagattttgtttaaaccaaatgtttcatgtagaatgcaaaatgttggcacgtcaaaaatatgaatgtgtagacaactgtagttgtgctcagtttgtagtgatgggaagtgtattttactctgatcaaataaataatgctggaatactcaa

SEQ ID NO: 347466 - DNA, 3731 bp, Homo sapiens
agcatgcacagtgtgatgtggttcagaggcagcttctagacctgcaggagggagattgtattcagaggaagagcatcattttggcaacatctgaaagtgaaaacggaagccagaaacacttggccagccctgggggatttttttcttctatgcctctctggtggaatgacatttgctgtgtaggcatctttcctctgactgtatttcttggccttgaagagtactgagtttaaaaagacagtatgtgacagtccatggaaattgcctcttctgtgaaatctcgccacctgctccgaagacatgttgttgtctcccaaattctccttatccaccattcacatacgactgacggccaaaggattgcttcgaaaccttcgacttccttcagggtttaggagaagcactgttgttttccacacagttgaaaagagcaggcaaaagaatcctcgaagcttatgtatccagccacagacagctcccgatgcgctgccccctgagaaaacacttgaattgacgcaatataaaacaaaatgtgaaaaccaaagtggatttatcctgcagctcaagcagcttcttgcctgtggtaataccaagtttgaggcattgacagttgtgattcagcacctgctgtctgagcgggaggaagcactgaaacaacacaaaaccctatctcaagaacttgttaacctccggggagagctagtcactgcttcaaccacctgtgagaaattagaaaaagccaggaatgagttacaaacagtgtatgaagcattcgtccagcagcaccaggctgaaaaaacagaacgagagaatcggcttaaagagttttacaccagggagtatgaaaagcttcgggacacttacattgaagaagcagagaagtacaaaatgcaattgcaagagcagtttgacaacttaaatgctgcgcatgaaacctctaagttggaaattgaagctagccactcagagaaacttgaattgctaaagaaggcctatgaagcctccctttcagaaattaagaaaggccatgaaatagaaaagaaatcgcttgaagatttactttctgagaagcaggaatcgctagagaagcaaatcaatgatctgaagagtgaaaatgatgctttaaatgaaaaattgaaatcagaagaacaaaaaagaagagcaagagaaaaagcaaatttgaaaaatcctcagatcatgtatctagaacaggagttagaaagcctgaaagctgtgttagagatcaagaatgagaaactgcatcaacaggacatcaagttaatgaaaatggagaaactggtggacaacaacacagcattggttgacaaattgaagcgtttccagcaggagaatgaagaattgaaagctcggatggacaagcacatggcaatctcaaggcagctttccacggagcaggctgttctgcaagagtcgctggagaaggagtcgaaagtcaacaagcgactctctatggaaaacgaggagcttctgtggaaactgcacaatggggacctgtgtagccccaagagatcccccacatcctccgccatccctttgcagtcaccaaggaattcgggctccttccctagccccagcatttcacccagatgacacgtccccaaagtccacagactctctgaaagcattttgatgcaggtctgcaggactgaccccaaggaggaacgtgggcacaagaggtatatcagcacacgtgtgatcaccgtagggtaactggagcgtcaccaccggcggaatcgcagcttctgagactggaagtctggaggaagacttttgcctccgtccaaaagattcctccaaaaaaagatttaaaaaaagatttcggcatcgacacggacgttgttgcacaaagcacttaaagaacgagagcatcttgttcattgcctttttcacctaagcataaggggaaaaactctcagggccctattaagatttataacctttgtaatgttcttcaccacagacaccttcttgtgagttttcagtctgactgtgggggtggggggtgtgaatgaaatggatgtcacagagtgtcatgtgtctgatgcagcctcctctgctgtgtattaaatgtcaaaatctgaatatatctggatatgtactaatcaaataataatcaatcaatcagcatatacatttcagccaaagccatagaagaaaaagcaatagttgcttgaattatgatcatctaccaccaactctgctcagccctgtaacagggtagggagagggtataacaggaagagctttgacttgtccctgtctatacattctctgtatcttttgggggtaacttcttggcagtttttcagtgttcagccatgtcagttgaaactagatttttctgtagattttttacttacccatgtgagcctaacactatcctgtaattcattttctcaggctatgtgtaaatgtagaaccctaatttttctataaaaaaacaaactaactaactgtgtaaagaaagaaaaagggaagtaccaatgggtttttccaccttatttttacctttgatctacccttgcagatttaacctgtcttcttccctcccattattctcattttccttttacctttctccaccatccagagccacaaaagcaaaccttctacctcctacctacttttctctgggacaaggataaaggaatatgattttccagagccccagagccagctcatcttccaggtgctgaaaccactttccaaataaactaaagcctggatttgatattacaaattttgggaaatcttagaataaagaacgagaacaaggaagtcattggctagtataattaagaaaggtaggattcagtgcttaccgatgatgcagtacttgatagaagaaaacagtctgggaggatagcgctcatttttcagttaccctttaaggagtccctttgtctttgggaaagtagcagaatggtccgcttctttcccatgagtggaaaatgtggcttgtccaactctcctccaggttgcatttcagtttctttccaaaacttattacctcccctaatcctgagactttggaaaaggtggaaggaagaactgttgctttatctccccctccctgcatgtgtcaacattgtgatgtcagtatttactaatctacattcagtggctgtacaaataacagctgtagtaagaagagattcaggatgctagaggtgaatatttgggtcatttacatgtacactacatagcaagttgatactcatgttgcatgttcttttaaattagtgattttgtgtcttaagtctttaacttccaatacttcatcatgtatgtaaccttccatgtttgcttctgataaatggaaatgtaggttcactgccacttcatgagatatctctgctcacgcttccaagttgttctcaatgacattagccaaagttgggtttgccattcatcccctaggcatggtaaatcttgtgttgttccctgctgtcctccgtattacgtgaccggcaaataaatctcatagcagttaatataaaacatctttggaggatgggagagaacaggagggaagatgggaaacaaaatagagaattcttaagattttgtttaaaccaaatgtttcatgtagaatgcaaaatgttggcacgtcaaaaatatgaatgtgtagacaactgtagttgtgctcagtttgtagtgatgggaagtgtattttactctgatcaaataaataatgctggaatactcaa

SEQ ID NO: 347467 - DNA, 3326 bp, Homo sapiens
atggcctcccaggtgtgatggcctcccaggtgtgatagcctcccaggtgtgatggcctcccaggtgtgatggcctcccaaagtgctgggattacaggtgtgagccagtgcgccatgccctcgtgttcctttttacagttcacttccatactgttatatttgaagacatggtcactagagacccaagacatcatgggtgtatgcttcaggtgtcatcacagctgtgtgtgactgtaatgaatataggacatttcacaaataaaatgacctcttccctcttctttctcctctgttttcagtcactgcttcaaccacctgtgagaaattagaaaaagccaggaatgagttacaaacagtgtatgaagcattcgtccagcagcaccaggctgaaaaaacagaacgagagaatcggcttaaagagttttacaccagggagtatgaaaagcttcgggacacttacattgaagaagcagagaagtacaaaatgcaattgcaagagcagtttgacaacttaaatgctgcgcatgaaacctctaagttggaaattgaagctagccactcagagaaacttgaattgctaaagaaggcctatgaagcctccctttcagaaattaagaaaggccatgaaatagaaaagaaatcgcttgaagatttactttctgagaagcaggaatcgctagagaagcaaatcaatgatctgaagagtgaaaatgatgctttaaatgaaaaattgaaatcagaagaacaaaaaagaagagcaagagaaaaagcaaatttgaaaaatcctcagatcatgtatctagaacaggagttagaaagcctgaaagctgtgttagagatcaagaatgagaaactgcatcaacaggacatcaagttaatgaaaatggagaaactggtggacaacaacacagcattggttgacaaattgaagcgtttccagcaggagaatgaagaattgaaagctcggatggacaagcacatggcaatctcaaggcagctttccacggagcaggctgttctgcaagagtcgctggagaaggagtcgaaagtcaacaagcgactctctatggaaaacgaggagcttctgtggaaactgcacaatggggacctgtgtagccccaagagatcccccacatcctccgccatccctttgcagtcaccaaggaattcgggctccttccctagccccagcatttcacccagatgacacgtccccaaagtccacagactctctgaaagcattttgatgcaggtctgcaggactgaccccaaggaggaacgtgggcacaagaggtatatcagcacacgtgtgatcaccgtagggtaactggagcgtcaccaccggcggaatcgcagcttctgagactggaagtctggaggaagacttttgcctccgtccaaaagattcctccaaaaaaagatttaaaaaaagatttcggcatcgacacggacgttgttgcacaaagcacttaaagaacgagagcatcttgttcattgcctttttcacctaagcataaggggaaaaactctcagggccctattaagatttataacctttgtaatgttcttcaccacagacaccttcttgtgagttttcagtctgactgtgggggtggggggtgtgaatgaaatggatgtcacagagtgtcatgtgtctgatgcagcctcctctgctgtgtattaaatgtcaaaatctgaatatatctggatatgtactaatcaaataataatcaatcaatcagcatatacatttcagccaaagccatagaagaaaaagcaatagttgcttgaattatgatcatctaccaccaactctgctcagccctgtaacagggtagggagagggtataacaggaagagctttgacttgtccctgtctatacattctctgtatcttttgggggtaacttcttggcagtttttcagtgttcagccatgtcagttgaaactagatttttctgtagattttttacttacccatgtgagcctaacactatcctgtaattcattttctcaggctatgtgtaaatgtagaaccctaatttttctataaaaaaacaaactaactaactgtgtaaagaaagaaaaagggaagtaccaatgggtttttccaccttatttttacctttgatctacccttgcagatttaacctgtcttcttccctcccattattctcattttccttttacctttctccaccatccagagccacaaaagcaaaccttctacctcctacctacttttctctgggacaaggataaaggaatatgattttccagagccccagagccagctcatcttccaggtgctgaaaccactttccaaataaactaaagcctggatttgatattacaaattttgggaaatcttagaataaagaacgagaacaaggaagtcattggctagtataattaagaaaggtaggattcagtgcttaccgatgatgcagtacttgatagaagaaaacagtctgggaggatagcgctcatttttcagttaccctttaaggagtccctttgtctttgggaaagtagcagaatggtccgcttctttcccatgagtggaaaatgtggcttgtccaactctcctccaggttgcatttcagtttctttccaaaacttattacctcccctaatcctgagactttggaaaaggtggaaggaagaactgttgctttatctccccctccctgcatgtgtcaacattgtgatgtcagtatttactaatctacattcagtggctgtacaaataacagctgtagtaagaagagattcaggatgctagaggtgaatatttgggtcatttacatgtacactacatagcaagttgatactcatgttgcatgttcttttaaattagtgattttgtgtcttaagtctttaacttccaatacttcatcatgtatgtaaccttccatgtttgcttctgataaatggaaatgtaggttcactgccacttcatgagatatctctgctcacgcttccaagttgttctcaatgacattagccaaagttgggtttgccattcatcccctaggcatggtaaatcttgtgttgttccctgctgtcctccgtattacgtgaccggcaaataaatctcatagcagttaatataaaacatctttggaggatgggagagaacaggagggaagatgggaaacaaaatagagaattcttaagattttgtttaaaccaaatgtttcatgtagaatgcaaaatgttggcacgtcaaaaatatgaatgtgtagacaactgtagttgtgctcagtttgtagtgatgggaagtgtattttactctgatcaaataaataatgctggaatactcaa

SEQ ID NO: 347468 - DNA, 5476 bp, Homo sapiens
tacacatgcatacaacccgaaatcaccacctacacaaaactcttcagccagcagtgtgaactggaattctgccaacccagatgacatggtggttgattatgaaactgaccctgctgtagttactggtgaaaatatttctttaagccttcagggtgttgaagtatttggtcatgaaaagtcttctagtgatttcattagtaagcaggtgttagatatgcataaagattctatttgtcagtgtcctgcacttgtaggtactgagaagcccaaatatctgcaacacagttgtcattccctagaagcagttgagggccagagtgttgagccatctttgccttttgtgtggaagcctaatgacaatttgaactgtgcaggctactgtgatgccttggagctaaaccaaacatttgacatgacagtggataaagttaactgcacctttatatcacatcatgccatcggaaagagtcagtccttccatactgctggaagcctgccaccaactggtaggagaagtggaagtacatcttctttatcctattccacttggacatcttcccattctgataagacgcatgcaagagaaactacttatgatagagaaagctttgaaaaccctcaagtcacaccatcagaagcccaagacatgacttacacagcattttctgatgtggtgatgcaaagtgaggtttttgtttcagatattggaaatcagtgtgcatgttcttcaggaaaggtcaccagtgagtacacagatggatcacaacaaagactagttggagaaaaagagacacaagcactaacaccagtttctgatggcatggaagtccccaatgattctgcattacaagagttcttttgtttatcccatgatgaatccaatagcgaaccacattcacagagctcatacaggcacaaggaaatgggccaaaatctgagagagacagtgtcctattgtcttattgatgatgaatgccctttaatggtgccagcttttgataagagcgaagctcaagtgctgaacccagagcataaagtcactgagactgaagacacacaaatggtctccaaaggaaaggatttgggaacccaaaatcatacctcagaattgattctaagtagcccgccaggacaaaaggtgggctcgtcatttggactgacttgggatgcaaatgatatggtcattagcacagacaaaacgatgtgcatgtcaacaccagtcctagaacccacaaaagtaaccttttctgtttcaccgattgaagcgacggagaaatgtaagaaagtggagaagggtaatcgagggcttaaaaacataccagactcgaaggaggcacctgtgaacctgtgtaaacctagtttaggaaaatcaacaatcaaaacgaataccccaataggctgcaaagttagaaaaactgaaattataagttacccaagaccaaacttcaagaatgtcaaagcaaaagttatgtctagagcagtgttgcagcccaaagatgctgctttatcaaaggtcacgcccagacctcagcagaccagtgcctcatcaccctcatcagtgaattcaagacaacaaacagtcttgagcagaacaccgagatctgacttgaatgcagacaaaaaagcagaaattctaattaacaagacacataagcagcagtttaataaactcattactagccaggctgtgcatgttacaactcattctaaaaatgcttcacacagggttccaagaacaacatctgccgtgaaatcgaatcaggaagatgttgacaaagccagttcttctaactcagcatgcgagaccgggtccgtttctgcgttgtttcagaagatcaaaggcatactccctgttaaaatggaaagtgcagaatgtttggaaatgacctatgttcccaacattgataggattagccctgaaaagaagggtgaaaaagaaaatgggacatctatggaaaaacaagagctgaaacaagagattatgaatgagacttttgaatatggttctctgtttttgggctctgcttcaaaaacaacgaccacctcaggtaggaatatatccaagcctgactcctgcggtttgaggcaaatagctgctccaaaagccaaagtggggccccctgtttcctgtttgaggcggaacagtgacaatagaaatcccagtgctgatcgagccgtatctcctcagaggatcaggcgtgtgtccagttctggaaagcctacatccttgaaaactgcacagtcgtcatgggtgaatttgcctagaccacttcctaaatccaaagcatctttgaaaagtcctgcgctgcggaggacaggaagcaccccctcaatagccagcacccacagtgagctgagcacttacagcaacaattctggtaatgccgctgtcatcaaatatgaggagaaacctccaaaaccagcatttcagaatggttcctcaggatccttttatttgaagcctttggtatccagggctcatgttcacttgatgaaaactcctccaaaaggtccttcgagaaaaaatttatttacagctcttaatgcagttgaaaagagcaggcaaaagaatcctcgaagcttatgtatccagccacagacagctcccgatgcgctgccccctgagaaaacacttgaattgacgcaatataaaacaaaatgtgaaaaccaaagtggatttatcctgcagctcaagcagcttcttgcctgtggtaataccaagtttgaggcattgacagttgtgattcagcacctgctgtctgagcgggaggaagcactgaaacaacacaaaaccctatctcaagaacttgttaacctccggggagagctagtcactgcttcaaccacctgtgagaaattagaaaaagccaggaatgagttacaaacagtgtatgaagcattcgtccagcagcaccaggctgaaaaaacagaacgagagaatcggcttaaagagttttacaccagggagtatgaaaagcttcgggacacttacattgaagaagcagagaagtacaaaatgcaattgcaagagcagtttgacaacttaaatgctgcgcatgaaacctctaagttggaaattgaagctagccactcagagaaacttgaattgctaaagaaggcctatgaagcctccctttcagaaattaagaaaggccatgaaatagaaaagaaatcgcttgaagatttactttctgagaagcaggaatcgctagagaagcaaatcaatgatctgaagagtgaaaatgatgctttaaatgaaaaattgaaatcagaagaacaaaaaagaagagcaagagaaaaagcaaatttgaaaaatcctcagatcatgtatctagaacaggagttagaaagcctgaaagctgtgttagagatcaagaatgagaaactgcatcaacaggacatcaagttaatgaaaatggagaaactggtggacaacaacacagcattggttgacaaattgaagcgtttccagcaggagaatgaagaattgaaagctcggatggacaagcacatggcaatctcaaggcagctttccacggagcaggctgttctgcaagagtcgctggagaaggagtcgaaagtcaacaagcgactctctatggaaaacgaggagcttctgtggaaactgcacaatggggacctgtgtagccccaagagatcccccacatcctccgccatccctttgcagtcaccaaggaattcgggctccttccctagccccagcatttcacccagatgacacgtccccaaagtccacagactctctgaaagcattttgatgcaggtctgcaggactgaccccaaggaggaacgtgggcacaagaggtatatcagcacacgtgtgatcaccgtagggtaactggagcgtcaccaccggcggaatcgcagcttctgagactggaagtctggaggaagacttttgcctccgtccaaaagattcctccaaaaaaagatttaaaaaaagatttcggcatcgacacggacgttgttgcacaaagcacttaaagaacgagagcatcttgttcattgcctttttcacctaagcataaggggaaaaactctcagggccctattaagatttataacctttgtaatgttcttcaccacagacaccttcttgtgagttttcagtctgactgtgggggtggggggtgtgaatgaaatggatgtcacagagtgtcatgtgtctgatgcagcctcctctgctgtgtattaaatgtcaaaatctgaatatatctggatatgtactaatcaaataataatcaatcaatcagcatatacatttcagccaaagccatagaagaaaaagcaatagttgcttgaattatgatcatctaccaccaactctgctcagccctgtaacagggtagggagagggtataacaggaagagctttgacttgtccctgtctatacattctctgtatcttttgggggtaacttcttggcagtttttcagtgttcagccatgtcagttgaaactagatttttctgtagattttttacttacccatgtgagcctaacactatcctgtaattcattttctcaggctatgtgtaaatgtagaaccctaatttttctataaaaaaacaaactaactaactgtgtaaagaaagaaaaagggaagtaccaatgggtttttccaccttatttttacctttgatctacccttgcagatttaacctgtcttcttccctcccattattctcattttccttttacctttctccaccatccagagccacaaaagcaaaccttctacctcctacctacttttctctgggacaaggataaaggaatatgattttccagagccccagagccagctcatcttccaggtgctgaaaccactttccaaataaactaaagcctggatttgatattacaaattttgggaaatcttagaataaagaacgagaacaaggaagtcattggctagtataattaagaaaggtaggattcagtgcttaccgatgatgcagtacttgatagaagaaaacagtctgggaggatagcgctcatttttcagttaccctttaaggagtccctttgtctttgggaaagtagcagaatggtccgcttctttcccatgagtggaaaatgtggcttgtccaactctcctccaggttgcatttcagtttctttccaaaacttattacctcccctaatcctgagactttggaaaaggtggaaggaagaactgttgctttatctccccctccgtattacgtgaccggcaaataaatctcatagcagttaatataaaacatctttggaggatgggagagaacaggagggaagatgggaaacaaaatagagaattcttaagattttgtttaaaccaaatgtttcatgtagaatgcaaaatgttggcacgtcaaaaatatgaatgtgtagacaactgtagttgtgctcagtttgtagtgatgggaagtgtattttactctgatcaaataaataatgctggaatactcaa

SEQ ID NO: 347469 - DNA, 428 bp, Homo sapiens
tcaatagcatgggcaacagtgtggaatcagaattgtgtgatgggaagttcataggtttactctcaaataaatgtggatttcatcagcctttgaagagcagtcaggccttggacaagttttggacagctttacgctgttttttcttcatcattaaaatggagtcaataatatgtatccaaaaggtaaaagtggaaaattagaatacagaatggtgtattctcattaaatgctaacattttcactatcacttcttcctttctacctggtcatataatctttacttctgaagaaaagcagaggcaaaaataatagtctacctagtgacaaagaactcagaattatttacataaaatatatactaaaatattaaataatatcatttgtagttgttattttatacatatgatacatatgagaaggagttgtgg

SEQ ID NO: 347470 - DNA, 363 bp, Homo sapiens
ggagggggatgaagagagctgggttaatgggtacaaaaaaacagtcagatagaaagaataagttctactattcgatagtagaatgactacagtgaacaaaaatgtattgcatatttcaaaatagctggaagaaaggacttgaaatgagcccaataaaaatgataaatgcttgaggtgatgggtatcctaaaaccttgatttgattgttacaaattctatgcatgtaacaaaatatcacgtgtctataaatatctataaatattatatatcagtaaaaaagcaacttgcttggaactgattttttttaaaaacaacttatattcttccaatcataccatctacagctgataagggtctatttgc

SEQ ID NO: 347471 - DNA, 645 bp, Homo sapiens
tgtagggggagagcaggaagtgatctggaatattgccatcaggattgagaaaggcagcctttcagaatttgatgaaatgtgtgagatcaaaactcacaaggcagtcttaagtaatagggtaggtagtggctatgtgttaattctccaggagaacacagactatcacttgaaagttagcctaaatgtaaccgaagagtccaaaaattttcccattctctgaaaatagattaatctctacttctaagcaatattcaatatggcatgacttaaaaaacagggagaggctctctatttggaaaatatcctctccctaattgctagagatgcacactttagccactaagtcaagataaagtccctaaaggctctattcatgtgtgttggtaatttaaactatcaccatccattaagacggcatgacttagtctacggaattagctctaaccacttcataagaaattgagaagatagagggcactgaacagatttcaaatttctttttttgtggggtgctagggagaggaatgcccacaacatgtctgggtgagtgtggaagccaaaagaaactatgcagggtctcaacaccagaagaagaggtgatgtaaacagaaagtagaaggatgctataaaccggctctgatcacg

SEQ ID NO: 347472 - DNA, 1662 bp, Homo sapiens
ctgctctgctacgactgcgtgggtgagtcgtctataaaaactcatctctgcgcgtctcttcggccacattcgcttcctgctttcggtgtgtctgttgtgtcttgttgcgggcaccgcagtcgccgtgaagatggcgtctaccagccgtttggatgctcttccaagagtcacatgtccaaaccatccagatgcgattttagtggaggactacagagccggtgatatgatctgtcctgaatgtggcttggttgtaggtgaccgggttattgatgtgggatctgaatggcgaactttcagcaatgacaaagcaacaaaagatccatctcgagttggagattctcagaatcctcttctgagtgatggagatttgtctaccatgattggcaagggcacaggagctgcaagttttgacgaatttggcaattctaagtaccagaatcggagaacaatgagcagttctgatcgggcaatgatgaatgcattcaaagaaatcactaccatggcagacagaatcaatctacctcgaaatatagttgatcgaacaaataatttattcaagcaagtatatgaacagaagagcctgaagggaagagctaatgatgctatagcttctgcttgtctctatattgcctgtagacaagaaggggttcctaggacatttaaagaaatatgtgccgtatcacgaatttctaagaaagaaattggtcggtgttttaaacttattttgaaagcgctagaaaccagtgtggatttgattacaactggggacttcatgtccaggttctgttccaacctttgtcttcctaaacaagtacagatggcagctacacatatagcccgtaaagctgtggaattggacttggttcctgggaggagccccatctctgtggcagcggcagctatttacatggcctcacaggcatcagctgaaaagaggacccaaaaagaaattggagatattgctggtgttgctgatgttacaatcagacagtcctatagactgatctatcctcgagccccagatctgtttcctacagacttcaaatttgacaccccagtggacaaactaccacagctataaattgaggcagctaacgtcaaattcttgaatacaaaactttgcctgttgtacatagcctatacaaaatgctgggttgagcctttcatgaggaaaaacaaaagacatggtacgcattccagggctgaatactattgcttggcattctgtatgtatatactagtgaaacatatttaatgatttaaatttcttatcaaatttcttttgtagcaatctaggaaactgtattttggaagatatttgaaattatgtaattcttgaataaaacatttttcaaaactcaagtttttgttatatgttacatgtaacttatgatacataattacaaataatgcaaatcattgcagctaataaagctgatagactttatttccattacttatatatacatagttttttattttaataaatttatggaaagagcaaaagcttttgagaaccattgttaacatcaacatcatagtttccagtttgaaaggatgtgtatgtgagatttattatgtatattattaaacaagaagtgatgagcttgggccttgaaaggcaccagcttgagagacattaaaatgttctaagtaaaaaaa

SEQ ID NO: 347473 - DNA, 1436 bp, Homo sapiens
ctgctctgctacgactgcgtgggtgagtcgtctataaaaactcatctctgcgcgtctcttcggccacattcgcttcctgctttcggtgtgtctgttgtgtcttgttgcgggcaccgcagtcgccgtgaagatggcgtctaccagccgtttggatgctcttccaagagtcacatgtccaaaccatccagatgcgattttagtggaggactacagagccggtgatatgatctgtcctgaatgtggcttggttgtaggtgaccgggttattgatgtgggatctgaatggcgaactttcagcaatgacaaagcaacaaaagatccatctcgagttggagattctcagaatcctcttctgagtgatggagatttgtctaccatgattggcaagggcacaggagctgcaagttttgacgaatttggcaattctaagtaccagaatcggagaacaatgagcagttctgatcgggcaatgatgaatgcattcaaagaaatcactaccatggcagacagaatcaatctacctcgaaatatagttgatcgaacaaataatttattcaagcaagtatatgaacagaagagcctgaagggaagagctaatgatgctatagcttctgcttgtctctatattgcctgtagacaagaaggggttcctaggacatttaaagaaatatgtgccgtatcacgaatttctaagaaagaaattggtcggtgttttaaacttattttgaaagcgctagaaaccagtgtggatttgattacaactggggacttcatgtccaggttctgttccaacctttgtcttcctaaacaagtacagatggcagctacacatatagcccgtaaagctgtggaattggacttggttcctgggaggagccccatctctgtggcagcggcagctatttacatggcctcacaggcatcagctgaaaagaggacccaaaaagaaattggagatattgctggtgttgctgatgttacaatcagacagtcctatagactgatctatcctcgagccccagatctgtttcctacagacttcaaatttgacaccccagtggacaaactaccacagctataaattgaggcagctaacgtcaaattcttgaatacaaaactttgcctgttgtacatagcctatacaaaatgctgggttgagcctttcatgaggaaaaacaaaagacatggtacgcattccagggctgaatactattgcttggcattctgtatgtatatactagtgaaacatatttaatgatttaaatttcttatcaaatttcttttgtagcaatctaggaaactgtattttggaagatatttgaaattatgtaattcttgaataaaacatttttcaaaacttataatattataattatagataaatactctagggggggcccgtgacccaatttggccatatagcgagttggtttacg

SEQ ID NO: 347474 - DNA, 1537 bp, Homo sapiens
ctgctctgctacgactgcgtggtttggatgctcttccaagagtcacatgtccaaaccatccagatgcgattttagtggaggactacagagccggtgatatgatctgtcctgaatgtggcttggttgtaggtgaccgggttattgatgtgggatctgaatggcgaactttcagcaatgacaaagcaacaaaagatccatctcgagttggagattctcagaatcctcttctgagtgatggagatttgtctaccatgattggcaagggcacaggagctgcaagttttgacgaatttggcaattctaagtaccagaatcggagaacaatgagcagttctgatcgggcaatgatgaatgcattcaaagaaatcactaccatggcagacagaatcaatctacctcgaaatatagttgatcgaacaaataatttattcaagcaagtatatgaacagaagagcctgaagggaagagctaatgatgctatagcttctgcttgtctctatattgcctgtagacaagaaggggttcctaggacatttaaagaaatatgtgccgtatcacgaatttctaagaaagaaattggtcggtgttttaaacttattttgaaagcgctagaaaccagtgtggatttgattacaactggggacttcatgtccaggttctgttccaacctttgtcttcctaaacaagtacagatggcagctacacatatagcccgtaaagctgtggaattggacttggttcctgggaggagccccatctctgtggcagcggcagctatttacatggcctcacaggcatcagctgaaaagaggacccaaaaagaaattggagatattgctggtgttgctgatgttacaatcagacagtcctatagactgatctatcctcgagccccagatctgtttcctacagacttcaaatttgacaccccagtggacaaactaccacagctataaattgaggcagctaacgtcaaattcttgaatacaaaactttgcctgttgtacatagcctatacaaaatgctgggttgagcctttcatgaggaaaaacaaaagacatggtacgcattccagggctgaatactattgcttggcattctgtatgtatatactagtgaaacatatttaatgatttaaatttcttatcaaatttcttttgtagcaatctaggaaactgtattttggaagatatttgaaattatgtaattcttgaataaaacatttttcaaaactcaagtttttgttatatgttacatgtaacttatgatacataattacaaataatgcaaatcattgcagctaataaagctgatagactttatttccattacttatatatacatagttttttattttaataaatttatggaaagagcaaaagcttttgagaaccattgttaacatcaacatcatagtttccagtttgaaaggatgtgtatgtgagatttattatgtatattattaaacaagaagtgatgagcttgggccttgaaaggcaccagcttgagagacattaaaatgttctaagtaaaaaaa

SEQ ID NO: 347475 - DNA, 1608 bp, Homo sapiens
ctgctctgctacgactgcgtgggtgagtcgtctataaaaactcatctctgcgcgtctcttcggccacattcgcttcctgctttcggtgtgtctgttgtgtcttgttgcgggcaccgcagtcgccgtgaagatggcgtctaccagccgtttggatgctcttccaagagtcacatgtccaaaccatccagatgcgattttagtggaggactacagagccggtgatatgatctgtcctgaatgtggcttggttgtaggtgaccgggttattgatgtgggatctgaatggcgaactttcagcaatgacaaagcaactttgtctaccatgattggcaagggcacaggagctgcaagttttgacgaatttggcaattctaagtaccagaatcggagaacaatgagcagttctgatcgggcaatgatgaatgcattcaaagaaatcactaccatggcagacagaatcaatctacctcgaaatatagttgatcgaacaaataatttattcaagcaagtatatgaacagaagagcctgaagggaagagctaatgatgctatagcttctgcttgtctctatattgcctgtagacaagaaggggttcctaggacatttaaagaaatatgtgccgtatcacgaatttctaagaaagaaattggtcggtgttttaaacttattttgaaagcgctagaaaccagtgtggatttgattacaactggggacttcatgtccaggttctgttccaacctttgtcttcctaaacaagtacagatggcagctacacatatagcccgtaaagctgtggaattggacttggttcctgggaggagccccatctctgtggcagcggcagctatttacatggcctcacaggcatcagctgaaaagaggacccaaaaagaaattggagatattgctggtgttgctgatgttacaatcagacagtcctatagactgatctatcctcgagccccagatctgtttcctacagacttcaaatttgacaccccagtggacaaactaccacagctataaattgaggcagctaacgtcaaattcttgaatacaaaactttgcctgttgtacatagcctatacaaaatgctgggttgagcctttcatgaggaaaaacaaaagacatggtacgcattccagggctgaatactattgcttggcattctgtatgtatatactagtgaaacatatttaatgatttaaatttcttatcaaatttcttttgtagcaatctaggaaactgtattttggaagatatttgaaattatgtaattcttgaataaaacatttttcaaaactcaagtttttgttatatgttacatgtaacttatgatacataattacaaataatgcaaatcattgcagctaataaagctgatagactttatttccattacttatatatacatagttttttattttaataaatttatggaaagagcaaaagcttttgagaaccattgttaacatcaacatcatagtttccagtttgaaaggatgtgtatgtgagatttattatgtatattattaaacaagaagtgatgagcttgggccttgaaaggcaccagcttgagagacattaaaatgttctaagtaaaaaaa

SEQ ID NO: 347476 - DNA, 1610 bp, Homo sapiens
ctgctctgctacgactgcgtgggtgagtcgtctataaaaactcatctctgcgcgtctcttcggccacattcgcttcctgctttcggtgtgtctgttgtgtcttgttgcgggcaccgcagtcgccgtgaagatggcgtctaccagccgtttggatgctcttccaagagtcacatgtccaaaccatccagatgcgattttagtggaggactacagagccggtgatatgatctgtcctgaatgtggcttggttgtaggtgaccgggttattgatgtgggatctgaatggcgaactttcagcaatgacaaagcaacaaaagatccatctcgagttggagattctcagaatcctcttctgagtgatggagatttgtctaccatgattggcaagggcacaggagctgcaagttttgacgaatttggcaattctaagtaccagaatcggagaacaatgagcagttctgatcgggcaatgatgaatgcattcaaagaaatcactaccatggcagacagaatcaatctacctcgaaatatagttgatcgaacaaataatttattcaagcaagtatatgaacagaagagcctgaagggaagagctaatgatgctatagcttctgcttgtctctatattgcctgtagacaagaaggggttcctaggacatttaaagaaatatgtgccgtatcacgaatttctaagaaagaaattggtcggtgttttaaacttattttgaaagcgctagaaaccagtgtggatttgattacaactggggacttcatgtccaggttctgttccaacctttgtcttcctaaacaagtacagatggcagctacacatatagcccgtaaagctgtggaattggacttggttcctgggaggagccccatctctgtggcagcggcagctatttacatggcctcacaggcatcagctgaaaagaggacccaaaaagactgatctatcctcgagccccagatctgtttcctacagacttcaaatttgacaccccagtggacaaactaccacagctataaattgaggcagctaacgtcaaattcttgaatacaaaactttgcctgttgtacatagcctatacaaaatgctgggttgagcctttcatgaggaaaaacaaaagacatggtacgcattccagggctgaatactattgcttggcattctgtatgtatatactagtgaaacatatttaatgatttaaatttcttatcaaatttcttttgtagcaatctaggaaactgtattttggaagatatttgaaattatgtaattcttgaataaaacatttttcaaaactcaagtttttgttatatgttacatgtaacttatgatacataattacaaataatgcaaatcattgcagctaataaagctgatagactttatttccattacttatatatacatagttttttattttaataaatttatggaaagagcaaaagcttttgagaaccattgttaacatcaacatcatagtttccagtttgaaaggatgtgtatgtgagatttattatgtatattattaaacaagaagtgatgagcttgggccttgaaaggcaccagcttgagagacattaaaatgttctaagtaaaaaaa

SEQ ID NO: 347477 - DNA, 405 bp, Homo sapiens
taataccattctaaaaaatgttttctctttttttcccatgcctattgcaaattttgtgcaaaatctggttcttaatcattattacattggtttacctttgcatcacatatgaatagctgtactttgctacttttgactaatactttttcttccaagagttagaatatcatagcataatgtttcaagaggattattgttagattggcacaatagttaaaggaatgctttaggacaaatgtctgaaatgtgatatttaagcttggtcctagatgtccatgttgagatttcctgggaataaaatggcttagttgggcattggacagtgtagttaagtaaaccctatcttgacaaaatgattcagatatgtgcttatattcttagggtgaccgggttattgatgtggga

SEQ ID NO: 347478 - DNA, 426 bp, Homo sapiens
gcaggagaatcacttgagcctaggaggtggaggttgcagtgagctgagatcatgccactacccttagtctgggcgacagagtgagacttcatctcaaaaaaaaaggtgtgatgaacattaaagttaactgagaaatttgcagttaactctgtgggaagtatcactgagatgattagggtttcatctttaaggtatgattgaatgttttacaattagaatgtatattatgtttataattagaaatggtagattttaagatgaactatatggcttaagtgaattgatttatttaattttttttcttttagaaatatgtgccgtatcacgaatttctaagaaagaaattggtcggtgttttaaacttattttgaaagcgctagaaaccagtgtggatttgattacaactggggacttcatgtccaggtt

SEQ ID NO: 347479 - DNA, 654 bp, Homo sapiens
tctcgatctcctgacctggtgatccacccgcctcggcctcccaaagtgctgggattacaggcatgagccactgcgcccggcctagctcccgctttctaccttttagtatgtatttctattatcagtttttagaaatcacttctggttttgtttttaagtttggcactttatactatcatatctcacaaattacaatgcaggtagtggaaaggaggtaggatggaaatgatggttaatgtttcgatttttgtcttttagaaattggagatattgctggtgttgctgatgttacaatcagacagtcctatagactgatctatcctcgagccccagatctgtttcctacagacttcaaatttgacaccccagtggacaaactaccacagctataaattgaggcagctaacgtcaaattcttgaatacaaaactttgcctgttgtacatagcctatacaaaatgctgggttgagcctttcatgaggaaaaacaaaagacatggtacgcattccagggctgaatactattgcttggcattctgtatgtatatactagtgaaacatatttaatgatttaaatttcttatcaaatttcttttgtagcaatctaggaaactgtattttggaagatatttgaaattatgtaattcttgaataa

SEQ ID NO: 347480 - DNA, 1896 bp, Homo sapiens
ggaattcctctctttattgtcagggtcctctccctaggaggcctgcccccgctaaccggctttttgcccaaatgggccattatcgaagaattcacaaaaaacaatagcctcatcatccccaccatcatagccaccatcaccctccttaacctctacttctacctacgcctaatctactccacctcaatcacactactccccatatctaacaacgtaaaaataaaatgacagtttaacatacaaaacccaccccattcctccccacactcatcgcccttaccacgctactcctacctatctccccttttatactaataaggtgtgtctgttgtgtcttgttgcgggcaccgcagtcgccgtgaagatggcgtctaccagccgtttggatgctcttccaagagtcacatgtccaaaccatccagatgcgattttagtggaggactacagagccggtgatatgatctgtcctgaatgtggcttggttgtaggtgaccgggttattgatgtgggatctgaatggcgaactttcagcaatgacaaagcaacaaaagatccatctcgagttggagattctcagaatcctcttctgagtgatggagatttgtctaccatgattggcaagggcacaggagctgcaagttttgacgaatttggcaattctaagtaccagaatcggagaacaatgagcagttctgatcgggcaatgatgaatgcattcaaagaaatcactaccatggcagacagaatcaatctacctcgaaatatagttgatcgaacaaataatttattcaagcaagtatatgaacagaagagcctgaagggaagagctaatgatgctatagcttctgcttgtctctatattgcctgtagacaagaaggggttcctaggacatttaaagaaatatgtgccgtatcacgaatttctaagaaagaaattggtcggtgttttaaacttattttgaaagcgctagaaaccagtgtggatttgattacaactggggacttcatgtccaggttctgttccaacctttgtcttcctaaacaagtacagatggcagctacacatatagcccgtaaagctgtggaattggacttggttcctgggaggagccccatctctgtggcagcggcagctatttacatggcctcacaggcatcagctgaaaagaggacccaaaaagaaattggagatattgctggtgttgctgatgttacaatcagacagtcctatagactgatctatcctcgagccccagatctgtttcctacagacttcaaatttgacaccccagtggacaaactaccacagctataaattgaggcagctaacgtcaaattcttgaatacaaaactttgcctgttgtacatagcctatacaaaatgctgggttgagcctttcatgaggaaaaacaaaagacatggtacgcattccagggctgaatactattgcttggcattctgtatgtatatactagtgaaacatatttaatgatttaaatttcttatcaaatttcttttgtagcaatctaggaaactgtattttggaagatatttgaaattatgtaattcttgaataaaacatttttcaaaactcaagtttttgttatatgttacatgtaacttatgatacataattacaaataatgcaaatcattgcagctaataaagctgatagactttatttccattacttatatatacatagttttttattttaataaatttatggaaagagcaaaagcttttgagaaccattgttaacatcaacatcatagtttccagtttgaaaggatgtgtatgtgagatttattatgtatattattaaacaagaagtgatgagcttgggccttgaaaggcaccagcttgagagacattaaaatgttctaagtaaaaaaa

SEQ ID NO: 347481 - DNA, 1878 bp, Homo sapiens
agatcatttaagattaatgtgtcaaaaaaagatgaatgtgtcttctgcaaactgctttgttgttcaaaataaattgagctaattattaatatcacagataacaagtagcttttgaaacaatttcttgaatgataaattcaataactcaattctggactaaaggaaatcatcaagtcttaagttcagcagagcaacttctaccatccctcatttctatacttactgggttcagtgtactatttaaatctgttactaaagtagttaacaagtagaaaaatacagagagaaattgttctctgactagagaaataagtggcaaagagcacaaactggatggtaatgtaaatgctgcaggttattacgtttggatgctcttccaagagtcacatgtccaaaccatccagatgcgattttagtggaggactacagagccggtgatatgatctgtcctgaatgtggcttggttgtaggtgaccgggttattgatgtgggatctgaatggcgaactttcagcaatgacaaagcaacaaaagatccatctcgagttggagattctcagaatcctcttctgagtgatggagatttgtctaccatgattggcaagggcacaggagctgcaagttttgacgaatttggcaattctaagtaccagaatcggagaacaatgagcagttctgatcgggcaatgatgaatgcattcaaagaaatcactaccatggcagacagaatcaatctacctcgaaatatagttgatcgaacaaataatttattcaagcaagtatatgaacagaagagcctgaagggaagagctaatgatgctatagcttctgcttgtctctatattgcctgtagacaagaaggggttcctaggacatttaaagaaatatgtgccgtatcacgaatttctaagaaagaaattggtcggtgttttaaacttattttgaaagcgctagaaaccagtgtggatttgattacaactggggacttcatgtccaggttctgttccaacctttgtcttcctaaacaagtacagatggcagctacacatatagcccgtaaagctgtggaattggacttggttcctgggaggagccccatctctgtggcagcggcagctatttacatggcctcacaggcatcagctgaaaagaggacccaaaaagaaattggagatattgctggtgttgctgatgttacaatcagacagtcctatagactgatctatcctcgagccccagatctgtttcctacagacttcaaatttgacaccccagtggacaaactaccacagctataaattgaggcagctaacgtcaaattcttgaatacaaaactttgcctgttgtacatagcctatacaaaatgctgggttgagcctttcatgaggaaaaacaaaagacatggtacgcattccagggctgaatactattgcttggcattctgtatgtatatactagtgaaacatatttaatgatttaaatttcttatcaaatttcttttgtagcaatctaggaaactgtattttggaagatatttgaaattatgtaattcttgaataaaacatttttcaaaactcaagtttttgttatatgttacatgtaacttatgatacataattacaaataatgcaaatcattgcagctaataaagctgatagactttatttccattacttatatatacatagttttttattttaataaatttatggaaagagcaaaagcttttgagaaccattgttaacatcaacatcatagtttccagtttgaaaggatgtgtatgtgagatttattatgtatattattaaacaagaagtgatgagcttgggccttgaaaggcaccagcttgagagacattaaaatgttctaagtaaaaaaa

SEQ ID NO: 347482 - DNA, 1363 bp, Homo sapiens
ctgctctgctacgactgcgtgggtgagtcgtctataaaaactcatctctgcgcgtctcttcggccacattcgcttcctgctttcggtgtgtctgttgtgtcttgttgcgggcaccgcagtcgccgtgaagatggcgtctaccagccgtttggatgctcttccaagagtcacatgtccaaaccatccagatgcgattttagtggaggactacagagccggtgatatgatctgtcctgaatgtggcttggttgtaggtgaccgggttattgatgtgggatctgaatggcgaactttcagcaatgacaaagcaacaaaagatccatctcgagttggagattctcagaatcctcttctgagtgatggagatttgtctaccatgattggcaagggcacaggagctgcaagttttgacgaatttggcaattctaagtaccagaatcggagaacaatgagcagttctgatcgggcaatgatgaatgcattcaaagaaatcactaccatggcagacagaatcaatctacctcgaaatatagttgatcgaacaaataatttattcaagcaagtatatgaacagaagagcctgaagggaagagctaatgatgctatagcttctgcttgtctctatattgcctgtagacaagaaggggttcctaggacatttaaagaaatatgtgccgtatcacgaatttctaagaaagaaattggtcggtgttttaaacttattttgaaagcgctagaaaccagtgtggatttgattacaactggggacttcatgtccaggttctgttccaacctttgtcttcctaaacaagtacagatggcagctacacatatagcccgtaaagctgtggaattggacttggttcctgggaggagccccatctctgtggcagcggcagctatttacatggcctcacaggcatcagctgaaaagaggacccaaaaagaaattggagatattgctggtgttgctgatgttacaatcagacagtcctatagactgatctatcctcgagccccagatctgtttcctacagacttcaaatttgacaccccagtggacaaactaccacagctataaattgaggcagctaacgtcaaattcttgaatacaaaactttgcctgttgtacatagcctatacaaaatgctgggttgagcctttcatgaggaaaaacaaaagacatggtacgcattcccccctcctcctccatggagtgggcttgagtccgtagagccgagagccttagatgaagtgcccttgatataaccccctatgtttttggtgggtatcgaggcccccgatgttcttgattttcccagagaaggaaattaacagagtgaacagccccaaaaaataaaaa

SEQ ID NO: 347483 - DNA, 1370 bp, Homo sapiens
ctgctctgctacgactgcgtggtttggatgctcttccaagagtcacatgtccaaaccatccagatgcgattttagtggaggactacagagccggtgatatgatctgtcctgaatgtggcttggttgtaggtgaccgggttattgatgtgggatctgaatggcgaactttcagcaatgacaaagcaacaaaagatccatctcgagttggagattctcagaatcctcttctgagtgatggagatttgtctaccatgattggcaagggcacaggagctgcaagttttgacgaatttggcaattctaagtaccagaatcggagaacaatgagcagttctgatcgggcaatgatgaatgcattcaaagaaatcactaccatggcagacagaatcaatctacctcgaaatatagttgatcgaacaaataatttattcaagcaagtatatgaacagaagagcctgaagggaagagctaatgatgctatagcttctgcttgtctctatattgcctgtagacaagaaggggttcctaggacatttaaagaaatatgtgccgtatcacgaatttctaagaaagaaattggtcggtgttttaaacttattttgaaagcgctagaaaccagtgtggatttgattacaactggggacttcatgtccagaaattggagatattgctggtgttgctgatgttacaatcagacagtcctatagactgatctatcctcgagccccagatctgtttcctacagacttcaaatttgacaccccagtggacaaactaccacagctataaattgaggcagctaacgtcaaattcttgaatacaaaactttgcctgttgtacatagcctatacaaaatgctgggttgagcctttcatgaggaaaaacaaaagacatggtacgcattccagggctgaatactattgcttggcattctgtatgtatatactagtgaaacatatttaatgatttaaatttcttatcaaatttcttttgtagcaatctaggaaactgtattttggaagatatttgaaattatgtaattcttgaataaaacatttttcaaaactcaagtttttgttatatgttacatgtaacttatgatacataattacaaataatgcaaatcattgcagctaataaagctgatagactttatttccattacttatatatacatagttttttattttaataaatttatggaaagagcaaaagcttttgagaaccattgttaacatcaacatcatagtttccagtttgaaaggatgtgtatgtgagatttattatgtatattattaaacaagaagtgatgagcttgggccttgaaaggcaccagcttgagagacattaaaatgttctaagtaaaaaaa

SEQ ID NO: 347484 - DNA, 1123 bp, Homo sapiens
caagaaagaagtggtttttccaggcagggaataaaggcaaattatgctagcttcacatctgtgcctaaggctcctattgacaaggactctctgcattaggtagtaaataactagatgtatgaatgctgctaactttataaaagaaaactgtaatttcattaccagaagtacaatgatttaattattatgtcagagcttctacattcattagtttatatttacctacttgcccattagtgtatatttacaagtcacagtttcttaaattttatagggactctcgatgcagaagattaaagttcatgaaaagtcagtcttagggtgcttcttaaatttacaggtgtaaaccttctggtggggactgaaaatggcctgatgcttttggaccgaagtgggcaaggcaaagtctataatctgatcaaccggaggcgatttcagcagatggatgtgctagagggactgaatgtccttgtgacaatttcaggaaagaagaataagctacgagtttactatctttcatggttaagaaacagaatactacataatgacccagaagtagaaaagaaacaaggctggatcactgttggggacttggaaggctgtatacattataaagttgttaaatatgaaaggatcaaatttttggtgattgccttaaagaatgctgtggaaatatatgcttgggctcctaaaccgtatcataaattcatggcatttaagtcttttgcagatctccagcacaagcctctgctagttgatctcacggtagaagaaggtcaaagattaaaggttatttttggttcacacactggtttccatgtaattgatgttgattcaggaaactcttatgatatctacataccatctcatattcagggcaatatcactcctcatgctattgtcatcttgcctaaaacagatggaatggaaatgcttgtttgctatgaggatgagggggtgtatgtaaacacctatggccggataactaaggatgtggtgctccaatggggagaaatgcccacgtctgtgggtaggttaaccattccttatctccttcagcagttacaccccccaaatgaaacgaaaatcaagaaatgtgaaacaaccatttgattccacaaaa

SEQ ID NO: 347485 - DNA, 581 bp, Homo sapiens
caggtaaattccttttgtattgccatttgagtttaatcccatgtagtcttttgttctggttaattgctgtcctgattgctatactaccaaatcaaaatgaaaactgcatatctgccaaaagtgggaatgcaaccagaaaattcacattcagacttcattatgttgttagtggcacatcttcatacacacacacacacacgtaaataaaataaattagaaataaatggaggtggggaaggaaaaagtgagagctgtcacagcaatttgaaattaaacctctattatttcaacaggaaagaagaataagctacgagtttactatctttcatggttaagaaacagaatactacataatgacccagaagtagaaaagaaacaaggctggatcactgttggggacttggaaggctgtatacattataaagttggtaagtctcaagacatggaattataagtttggtctgtttactcaatcagacttacttagttaggtttcacctagttttttctatcagattgatgatgcatgtgtgaccagcttcagatgttgctggaaccttcagcattatttatatttttta

SEQ ID NO: 347486 - DNA, 161 bp, Homo sapiens
cggctgatctagagatccctttcttgccaaagactcgtgagcagtacaatgtgggaatggtggggacgcatgggctggagacctctcatgcggacagtttcagcggcagtatttcaagagaaggaaccttgatgattagagaggtaagttggtataaaaac

SEQ ID NO: 347487 - DNA, 6976 bp, Homo sapiens
attataacagccaatgcagccgccatccacgcacaagcaaagaagcatgtcccatttaaatacacccacgcagccccagcgcccttagccgatcggggcgctcagcaacagcgcaccgctgctcggggcttggagatccgcgcaggctgggctcccggacccggcggaccgacgcgcggaggatcgggatccggcgctgtggggctggggtgggcgggggaggctgggccggggctctggcgcgacacccgcatgaggacgcgagtgaaatagaccaaggtggaatttccaagggaaaagcttcggggtggttttggtccatttctccagcgaagaagtagacatggcgagcgactccccggctcgaagcctggatgaaatagatctctcggctctgagggaccctgcagggatctttgaattggtggaacttgttggaaatggaacatacgggcaagtttataagggtcgtcatgtcaaaacgggccagcttgcagccatcaaggttatggatgtcacaggggatgaagaggaagaaatcaaacaagaaattaacatgttgaagaaatattctcatcaccggaatattgctacatactatggtgcttttatcaaaaagaacccaccaggcatggatgaccaactttggttggtgatggagttttgtggtgctggctctgtcaccgacctgatcaagaacacaaaaggtaacacgttgaaagaggagtggattgcatacatctgcagggaaatcttacgggggctgagtcacctgcaccagcataaagtgattcatcgagatattaaagggcaaaatgtcttgctgactgaaaatgcagaagttaaactagtggactttggagtcagtgctcagcttgatcgaacagtgggcaggaggaatactttcattggaactccctactggatggcaccagaagttattgcctgtgatgaaaacccagatgccacatatgatttcaagagtgacttgtggtctttgggtatcaccgccattgaaatggcagaaggtgctccccctctctgtgacatgcaccccatgagagctctcttcctcatcccccggaatccagcgcctcggctgaagtctaagaagtggtcaaaaaaattccagtcatttattgagagctgcttggtaaagaatcacagccagcgaccagcaacagaacaattgatgaagcatccatttatacgagaccaacctaatgagcgacaggtccgcattcaactcaaggaccatattgatagaacaaagaagaagcgaggagaaaaagatgagacagagtatgagtacagtggaagtgaggaagaagaggaggagaatgactcaggagagcccagctccatcctgaatctgccaggggagtcgacgctgcggagggactttctgaggctgcagctggccaacaaggagcgttctgaggccctacggaggcagcagctggagcagcagcagcgggagaatgaggagcacaagcggcagctgctggccgagcgtcagaagcgcatcgaggagcagaaagagcagaggcggcggctggaggagcaacaaaggcgagagaaggagctgcggaagcagcaggagagggagcagcgccggcactatgaggagcagatgcgccgggaggaggagaggaggcgtgcggagcatgaacaggaatacatcaggcgacagttagaggaggagcagagacagttagagatcttgcagcagcagctactgcatgaacaagctctacttctggaatataagcgcaaacaattggaagaacagagacaagcagaaagactgcagaggcagctaaagcaagaaagagactacttagtttcccttcagcatcagcggcaggagcagaggcctgtggagaagaagccactgtaccattacaaagaaggaatgagtcctagtgagaagccagcatgggccaaggaggtagaagaacggtcaaggctcaaccggcaaagttcccctgccatgcctcacaaggttgccaacaggatatctgaccccaacctgcccccaaggtcggagtccttcagcattagtggagttcagcctgctcgaacaccccccatgctcagaccagtcgatccccagatcccacatctggtagctgtaaaatcccagggacctgccttgaccgcctcccagtcagtgcacgagcagcccacaaagggcctctctgggtttcaggaggctctgaacgtgacctcccaccgcgtggagatgccacgccagaactcagatcccacctcggaaaatcctcctctccccactcgcattgaaaagtttgaccgaagctcttggttacgacaggaagaagacattccaccaaaggtgcctcaaagaacaacttctatatccccagcattagccagaaagaattctcctgggaatggtagtgctctgggacccagactaggatctcaacccatcagagcaagcaaccctgatctccggagaactgagcccatcttggagagccccttgcagaggaccagcagtggcagttcctccagctccagcacccctagctcccagcccagctcccaaggaggctcccagcctggatcacaagcaggatccagtgaacgcaccagagttcgagccaacagtaagtcagaaggatcacctgtgcttccccatgagcctgccaaggtgaaaccagaagaatccagggacattacccggcccagtcgaccagctagctacaaaaaagctatagatgaggatctgacggcattagccaaagaactaagagaactccggattgaagaaacaaaccgcccaatgaagaaggtgactgattactcctcctccagtgaggagtcagaaagtagcgaggaagaggaggaagatggagagagcgagacccatgatgggacagtggctgtcagcgacatacccagactgataccaacaggagctccaggcagcaacgagcagtacaatgtgggaatggtggggacgcatgggctggagacctctcatgcggacagtttcagcggcagtatttcaagagaaggaaccttgatgattagagagacgtctggagagaagaagcgatctggccacagtgacagcaatggctttgctggccacatcaacctccctgacctggtgcagcagagccattctccagctggaaccccgactgagggactggggcgcgtctcaacccattcccaggagatggactctgggactgaatatggcatggggagcagcaccaaagcctccttcaccccctttgtggaccccagagtataccagacgtctcccactgatgaagatgaagaggatgaggaatcatcagccgcagctctgtttactagcgaacttcttaggcaagaacaggccaaactcaatgaagcaagaaagatttcggtggtaaatgtaaacccaaccaacattcggcctcatagcgacacaccagaaatcagaaaatacaagaaacgattcaactcagaaatactttgtgcagctctgtggggtgtaaaccttctggtggggactgaaaatggcctgatgcttttggaccgaagtgggcaaggcaaagtctataatctgatcaaccggaggcgatttcagcagatggatgtgctagagggactgaatgtccttgtgacaatttcaggaaagaagaataagctacgagtttactatctttcatggttaagaaacagaatactacataatgacccagaagtagaaaagaaacaaggctggatcactgttggggacttggaaggctgtatacattataaagttgttaaatatgaaaggatcaaatttttggtgattgccttaaagaatgctgtggaaatatatgcttgggctcctaaaccgtatcataaattcatggcatttaagtcttttgcagatctccagcacaagcctctgctagttgatctcacggtagaagaaggtcaaagattaaaggttatttttggttcacacactggtttccatgtaattgatgttgattcaggaaactcttatgatatctacataccatctcatattcagggcaatatcactcctcatgctattgtcatcttgcctaaaacagatggaatggaaatgcttgtttgctatgaggatgagggggtgtatgtaaacacctatggccggataactaaggatgtggtgctccaatggggagaaatgcccacgtctgtggcctacattcattccaatcagataatgggctggggcgagaaagctattgagatccggtcagtggaaacaggacatttggatggagtatttatgcataagcgagctcaaaggttaaagtttctatgtgaaagaaatgataaggtattttttgcatccgtgcgatctggaggaagtagccaagtgtttttcatgaccctcaacagaaattccatgatgaactggtaacagaagagcacttggcacttatcttcatggcgttatttctaatttaaaagaacataactcatgtggacttatgccagtctagaggcagaatcagaaggcttggttgaacatatcgctttccctttttcctctccctccgcccctcccagtacagtccatctttcaatgttgcagcctggttgagaaggagagaaaaaggtggcaggaatttccaggagatccccaagaatgctgccttgtctgtggacaaagatggaccatgtgcccttcggaattagggatagaaacaaatattgtgtgctcttaacgattaagctgtgttatggtgggttttcaggtttttaccttttttctttacccctttactctgcaagaatggggaaagaatgcatactgcgaaaatgagtcttttaaattctgtctgcctactagttttaagtatatggtatgttgtaaaatttccaatgatgagagacagcacaataaatgtaccttatctccttaggctgaaggccataactacatagtggagtaatttaagaactctcttgccttcaccaacccaaaaggttgctttttgatagcaactggctaatgaatttttaaaaagagaagaaaaatactagttttcccctcttttgggaaatagattttaaatggctaaactactagccttaaaactactagtctaataaaatcaactaccacttttgtgaatctgacaggccacatttttatatggccctttacagaatggagtgtgttgaacaggatactaacgccattgagttgagctggcctagcgatggagggacactctaacacaactttccctcagctattatgcaacagatcagggaaaaagatgggatgacagatggggtcagacagaaagagcttctgggaaacaagcttacatagtcttttttaaaatgcacaaagcctcccagctaagaggtcacttggtttgggcttcattaggactgagactttgttgagttctttctgggacttggagagtggatgatattcaggctctgaacattcccagcgctctcccgagggtgccactttctcaagatgaaaactgtgactgaaaaaattaataataaatgtttctgagctgcctgtgttctccctgtgtgggtgagagaagggactagactcctaagcctgcctcagatacaagaggcatcattggctccaattttagagaacttgaaagcaaggctttggacaaaattttgagaccctaatcactttaccttcctccaaattacccaacatacggtaaacaacatttgtgcagaagtatgtatgtatttagttcaggttgacttgtgtccttataaactcttactcaaatgatttgaacttttatgcgactgggattttttttttccaaagctacaagcatggccgcctgtggtatcgaggtgttgcaaacaatatctgtgttgcgcttcctgttttaacctacctcgttttgtttgtttttgtttcactgttcatcacagcagtgttatctccaggagacatatagagagctcaaccggcaatctcaggtgcatttaacatttttaaaacgaaacagtagttgaccaaatttttcttcttaaaaaattggaagtggggggaatccaatgacaaaaactaatgtggcttgtttctggagaaaataattactgtaaatggaacaacaacaacaaaaaaaactacgatcttactgactttgcctaaatacacaagcagctgatgtactattaatgagaacgaaatacacattaggaaaatggagccatttcaatctagtggtttgggcaagatggggaagagaaggggaaacattctagtttctggattacattattatgcccctcctgaaaaggtggttgtcatttgcatttatttaaagcaggtaatatgcaggaatgtaactgaggattatcttcaggcaatcagcaagatatcctcctcatggtccctttagctctcaaaagcaatgaaatcctcctgttctcatttttactgctgtggttgtgctgctgaacaatactatcttctcaaattccatgccacaaattcagcaataactttttggattgaatttaacaactactgtaattggatgctgatgtggacaaaatatattgatttcgatttcactcccgaatgtgattgccaccagctctttatattgctgctgtggtattttaaaccagaagcttctttaaattatgttgcaaactgatctttgtttttatgttttgttttgtttttatttctaagtgataagtttgaaacacacagctttaaatgatttttttattgtgggattttgggtacagttaagaaataaaagggaatcattgtgtttaaacataaggtagtttgtgaatgtattttttaaaatctagagtcattgaaacaaatcataagaaaacaatattaatgcagtcttgtttacagtatgtacagtgacataacatagaacatgagcttttctggtgccaacaacaataaaacacacgttaaacatcaaaacatgcc

SEQ ID NO: 347488 - DNA, 6952 bp, Homo sapiens
attataacagccaatgcagccgccatccacgcacaagcaaagaagcatgtcccatttaaatacacccacgcagccccagcgcccttagccgatcggggcgctcagcaacagcgcaccgctgctcggggcttggagatccgcgcaggctgggctcccggacccggcggaccgacgcgcggaggatcgggatccggcgctgtggggctggggtgggcgggggaggctgggccggggctctggcgcgacacccgcatgaggacgcgagtgaaatagaccaaggtggaatttccaagggaaaagcttcggggtggttttggtccatttctccagcgaagaagtagacatggcgagcgactccccggctcgaagcctggatgaaatagatctctcggctctgagggaccctgcagggatctttgaattggtggaacttgttggaaatggaacatacgggcaagtttataagggtcgtcatgtcaaaacgggccagcttgcagccatcaaggttatggatgtcacaggggatgaagaggaagaaatcaaacaagaaattaacatgttgaagaaatattctcatcaccggaatattgctacatactatggtgcttttatcaaaaagaacccaccaggcatggatgaccaactttggttggtgatggagttttgtggtgctggctctgtcaccgacctgatcaagaacacaaaaggtaacacgttgaaagaggagtggattgcatacatctgcagggaaatcttacgggggctgagtcacctgcaccagcataaagtgattcatcgagatattaaagggcaaaatgtcttgctgactgaaaatgcagaagttaaactagtggactttggagtcagtgctcagcttgatcgaacagtgggcaggaggaatactttcattggaactccctactggatggcaccagaagttattgcctgtgatgaaaacccagatgccacatatgatttcaagagtgacttgtggtctttgggtatcaccgccattgaaatggcagaaggtgctccccctctctgtgacatgcaccccatgagagctctcttcctcatcccccggaatccagcgcctcggctgaagtctaagaagtggtcaaaaaaattccagtcatttattgagagctgcttggtaaagaatcacagccagcgaccagcaacagaacaattgatgaagcatccatttatacgagaccaacctaatgagcgacaggtccgcattcaactcaaggaccatattgatagaacaaagaagaagcgaggagaaaaagatgagacagagtatgagtacagtggaagtgaggaagaagaggaggagaatgactcaggagagcccagctccatcctgaatctgccaggggagtcgacgctgcggagggactttctgaggctgcagctggccaacaaggagcgttctgaggccctacggaggcagcagctggagcagcagcagcgggagaatgaggagcacaagcggcagctgctggccgagcgtcagaagcgcatcgaggagcagaaagagcagaggcggcggctggaggagcaacaaaggcgagagaaggagctgcggaagcagcaggagagggagcagcgccggcactatgaggagcagatgcgccgggaggaggagaggaggcgtgcggagcatgaacaggaatacatcaggcgacagttagaggaggagcagagacagttagagatcttgcagcagcagctactgcatgaacaagctctacttctggaatataagcgcaaacaattggaagaacagagacaagcagaaagactgcagaggcagctaaagcaagaaagagactacttagtttcccttcagcatcagcggcaggagcagaggcctgtggagaagaagccactgtaccattacaaagaaggaatgagtcctagtgagaagccagcatgggccaaggaggtagaagaacggtcaaggctcaaccggcaaagttcccctgccatgcctcacaaggttgccaacaggatatctgaccccaacctgcccccaaggtcggagtccttcagcattagtggagttcagcctgctcgaacaccccccatgctcagaccagtcgatccccagatcccacatctggtagctgtaaaatcccagggacctgccttgaccgcctcccagtcagtgcacgagcagcccacaaagggcctctctgggtttcaggaggctctgaacgtgacctcccaccgcgtggagatgccacgccagaactcagatcccacctcggaaaatcctcctctccccactcgcattgaaaagtttgaccgaagctcttggttacgacaggaagaagacattccaccaaaggtgcctcaaagaacaacttctatatccccagcattagccagaaagaattctcctgggaatggtagtgctctgggacccagactaggatctcaacccatcagagcaagcaaccctgatctccggagaactgagcccatcttggagagccccttgcagaggaccagcagtggcagttcctccagctccagcacccctagctcccagcccagctcccaaggaggctcccagcctggatcacaagcaggatccagtgaacgcaccagagttcgagccaacagtaagtcagaaggatcacctgtgcttccccatgagcctgccaaggtgaaaccagaagaatccagggacattacccggcccagtcgaccagctgatctgacggcattagccaaagaactaagagaactccggattgaagaaacaaaccgcccaatgaagaaggtgactgattactcctcctccagtgaggagtcagaaagtagcgaggaagaggaggaagatggagagagcgagacccatgatgggacagtggctgtcagcgacatacccagactgataccaacaggagctccaggcagcaacgagcagtacaatgtgggaatggtggggacgcatgggctggagacctctcatgcggacagtttcagcggcagtatttcaagagaaggaaccttgatgattagagagacgtctggagagaagaagcgatctggccacagtgacagcaatggctttgctggccacatcaacctccctgacctggtgcagcagagccattctccagctggaaccccgactgagggactggggcgcgtctcaacccattcccaggagatggactctgggactgaatatggcatggggagcagcaccaaagcctccttcaccccctttgtggaccccagagtataccagacgtctcccactgatgaagatgaagaggatgaggaatcatcagccgcagctctgtttactagcgaacttcttaggcaagaacaggccaaactcaatgaagcaagaaagatttcggtggtaaatgtaaacccaaccaacattcggcctcatagcgacacaccagaaatcagaaaatacaagaaacgattcaactcagaaatactttgtgcagctctgtggggtgtaaaccttctggtggggactgaaaatggcctgatgcttttggaccgaagtgggcaaggcaaagtctataatctgatcaaccggaggcgatttcagcagatggatgtgctagagggactgaatgtccttgtgacaatttcaggaaagaagaataagctacgagtttactatctttcatggttaagaaacagaatactacataatgacccagaagtagaaaagaaacaaggctggatcactgttggggacttggaaggctgtatacattataaagttgttaaatatgaaaggatcaaatttttggtgattgccttaaagaatgctgtggaaatatatgcttgggctcctaaaccgtatcataaattcatggcatttaagtcttttgcagatctccagcacaagcctctgctagttgatctcacggtagaagaaggtcaaagattaaaggttatttttggttcacacactggtttccatgtaattgatgttgattcaggaaactcttatgatatctacataccatctcatattcagggcaatatcactcctcatgctattgtcatcttgcctaaaacagatggaatggaaatgcttgtttgctatgaggatgagggggtgtatgtaaacacctatggccggataactaaggatgtggtgctccaatggggagaaatgcccacgtctgtggcctacattcattccaatcagataatgggctggggcgagaaagctattgagatccggtcagtggaaacaggacatttggatggagtatttatgcataagcgagctcaaaggttaaagtttctatgtgaaagaaatgataaggtattttttgcatccgtgcgatctggaggaagtagccaagtgtttttcatgaccctcaacagaaattccatgatgaactggtaacagaagagcacttggcacttatcttcatggcgttatttctaatttaaaagaacataactcatgtggacttatgccagtctagaggcagaatcagaaggcttggttgaacatatcgctttccctttttcctctccctccgcccctcccagtacagtccatctttcaatgttgcagcctggttgagaaggagagaaaaaggtggcaggaatttccaggagatccccaagaatgctgccttgtctgtggacaaagatggaccatgtgcccttcggaattagggatagaaacaaatattgtgtgctcttaacgattaagctgtgttatggtgggttttcaggtttttaccttttttctttacccctttactctgcaagaatggggaaagaatgcatactgcgaaaatgagtcttttaaattctgtctgcctactagttttaagtatatggtatgttgtaaaatttccaatgatgagagacagcacaataaatgtaccttatctccttaggctgaaggccataactacatagtggagtaatttaagaactctcttgccttcaccaacccaaaaggttgctttttgatagcaactggctaatgaatttttaaaaagagaagaaaaatactagttttcccctcttttgggaaatagattttaaatggctaaactactagccttaaaactactagtctaataaaatcaactaccacttttgtgaatctgacaggccacatttttatatggccctttacagaatggagtgtgttgaacaggatactaacgccattgagttgagctggcctagcgatggagggacactctaacacaactttccctcagctattatgcaacagatcagggaaaaagatgggatgacagatggggtcagacagaaagagcttctgggaaacaagcttacatagtcttttttaaaatgcacaaagcctcccagctaagaggtcacttggtttgggcttcattaggactgagactttgttgagttctttctgggacttggagagtggatgatattcaggctctgaacattcccagcgctctcccgagggtgccactttctcaagatgaaaactgtgactgaaaaaattaataataaatgtttctgagctgcctgtgttctccctgtgtgggtgagagaagggactagactcctaagcctgcctcagatacaagaggcatcattggctccaattttagagaacttgaaagcaaggctttggacaaaattttgagaccctaatcactttaccttcctccaaattacccaacatacggtaaacaacatttgtgcagaagtatgtatgtatttagttcaggttgacttgtgtccttataaactcttactcaaatgatttgaacttttatgcgactgggattttttttttccaaagctacaagcatggccgcctgtggtatcgaggtgttgcaaacaatatctgtgttgcgcttcctgttttaacctacctcgttttgtttgtttttgtttcactgttcatcacagcagtgttatctccaggagacatatagagagctcaaccggcaatctcaggtgcatttaacatttttaaaacgaaacagtagttgaccaaatttttcttcttaaaaaattggaagtggggggaatccaatgacaaaaactaatgtggcttgtttctggagaaaataattactgtaaatggaacaacaacaacaaaaaaaactacgatcttactgactttgcctaaatacacaagcagctgatgtactattaatgagaacgaaatacacattaggaaaatggagccatttcaatctagtggtttgggcaagatggggaagagaaggggaaacattctagtttctggattacattattatgcccctcctgaaaaggtggttgtcatttgcatttatttaaagcaggtaatatgcaggaatgtaactgaggattatcttcaggcaatcagcaagatatcctcctcatggtccctttagctctcaaaagcaatgaaatcctcctgttctcatttttactgctgtggttgtgctgctgaacaatactatcttctcaaattccatgccacaaattcagcaataactttttggattgaatttaacaactactgtaattggatgctgatgtggacaaaatatattgatttcgatttcactcccgaatgtgattgccaccagctctttatattgctgctgtggtattttaaaccagaagcttctttaaattatgttgcaaactgatctttgtttttatgttttgttttgtttttatttctaagtgataagtttgaaacacacagctttaaatgatttttttattgtgggattttgggtacagttaagaaataaaagggaatcattgtgtttaaacataaggtagtttgtgaatgtattttttaaaatctagagtcattgaaacaaatcataagaaaacaatattaatgcagtcttgtttacagtatgtacagtgacataacatagaacatgagcttttctggtgccaacaacaataaaacacacgttaaacatcaaaacatgcc

SEQ ID NO: 347489 - DNA, 6787 bp, Homo sapiens
attataacagccaatgcagccgccatccacgcacaagcaaagaagcatgtcccatttaaatacacccacgcagccccagcgcccttagccgatcggggcgctcagcaacagcgcaccgctgctcggggcttggagatccgcgcaggctgggctcccggacccggcggaccgacgcgcggaggatcgggatccggcgctgtggggctggggtgggcgggggaggctgggccggggctctggcgcgacacccgcatgaggacgcgagtgaaatagaccaaggtggaatttccaagggaaaagcttcggggtggttttggtccatttctccagcgaagaagtagacatggcgagcgactccccggctcgaagcctggatgaaatagatctctcggctctgagggaccctgcagggatctttgaattggtggaacttgttggaaatggaacatacgggcaagtttataagggtcgtcatgtcaaaacgggccagcttgcagccatcaaggttatggatgtcacaggggatgaagaggaagaaatcaaacaagaaattaacatgttgaagaaatattctcatcaccggaatattgctacatactatggtgcttttatcaaaaagaacccaccaggcatggatgaccaactttggttggtgatggagttttgtggtgctggctctgtcaccgacctgatcaagaacacaaaaggtaacacgttgaaagaggagtggattgcatacatctgcagggaaatcttacgggggctgagtcacctgcaccagcataaagtgattcatcgagatattaaagggcaaaatgtcttgctgactgaaaatgcagaagttaaactagtggactttggagtcagtgctcagcttgatcgaacagtgggcaggaggaatactttcattggaactccctactggatggcaccagaagttattgcctgtgatgaaaacccagatgccacatatgatttcaagagtgacttgtggtctttgggtatcaccgccattgaaatggcagaaggtgctccccctctctgtgacatgcaccccatgagagctctcttcctcatcccccggaatccagcgcctcggctgaagtctaagaagtggtcaaaaaaattccagtcatttattgagagctgcttggtaaagaatcacagccagcgaccagcaacagaacaattgatgaagcatccatttatacgagaccaacctaatgagcgacaggtccgcattcaactcaaggaccatattgatagaacaaagaagaagcgaggagaaaaagatgagacagagtatgagtacagtggaagtgaggaagaagaggaggagaatgactcaggagagcccagctccatcctgaatctgccaggggagtcgacgctgcggagggactttctgaggctgcagctggccaacaaggagcgttctgaggccctacggaggcagcagctggagcagcagcagcgggagaatgaggagcacaagcggcagctgctggccgagcgtcagaagcgcatcgaggagcagaaagagcagaggcggcggctggaggagcaacaaaggcgagagaaggagctgcggaagcagcaggagagggagcagcgccggcactatgaggagcagatgcgccgggaggaggagaggaggcgtgcggagcatgaacaggaatacatcaggcgacagttagaggaggagcagagacagttagagatcttgcagcagcagctactgcatgaacaagctctacttctggaatataagcgcaaacaattggaagaacagagacaagcagaaagactgcagaggcagctaaagcaagaaagagactacttagtttcccttcagcatcagcggcaggagcagaggcctgtggagaagaagccactgtaccattacaaagaaggaatgagtcctagtgagaagccagcatgggccaaggagatcccacatctggtagctgtaaaatcccagggacctgccttgaccgcctcccagtcagtgcacgagcagcccacaaagggcctctctgggtttcaggaggctctgaacgtgacctcccaccgcgtggagatgccacgccagaactcagatcccacctcggaaaatcctcctctccccactcgcattgaaaagtttgaccgaagctcttggttacgacaggaagaagacattccaccaaaggtgcctcaaagaacaacttctatatccccagcattagccagaaagaattctcctgggaatggtagtgctctgggacccagactaggatctcaacccatcagagcaagcaaccctgatctccggagaactgagcccatcttggagagccccttgcagaggaccagcagtggcagttcctccagctccagcacccctagctcccagcccagctcccaaggaggctcccagcctggatcacaagcaggatccagtgaacgcaccagagttcgagccaacagtaagtcagaaggatcacctgtgcttccccatgagcctgccaaggtgaaaccagaagaatccagggacattacccggcccagtcgaccagctgatctgacggcattagccaaagaactaagagaactccggattgaagaaacaaaccgcccaatgaagaaggtgactgattactcctcctccagtgaggagtcagaaagtagcgaggaagaggaggaagatggagagagcgagacccatgatgggacagtggctgtcagcgacatacccagactgataccaacaggagctccaggcagcaacgagcagtacaatgtgggaatggtggggacgcatgggctggagacctctcatgcggacagtttcagcggcagtatttcaagagaaggaaccttgatgattagagagacgtctggagagaagaagcgatctggccacagtgacagcaatggctttgctggccacatcaacctccctgacctggtgcagcagagccattctccagctggaaccccgactgagggactggggcgcgtctcaacccattcccaggagatggactctgggactgaatatggcatggggagcagcaccaaagcctccttcaccccctttgtggaccccagagtataccagacgtctcccactgatgaagatgaagaggatgaggaatcatcagccgcagctctgtttactagcgaacttcttaggcaagaacaggccaaactcaatgaagcaagaaagatttcggtggtaaatgtaaacccaaccaacattcggcctcatagcgacacaccagaaatcagaaaatacaagaaacgattcaactcagaaatactttgtgcagctctgtggggtgtaaaccttctggtggggactgaaaatggcctgatgcttttggaccgaagtgggcaaggcaaagtctataatctgatcaaccggaggcgatttcagcagatggatgtgctagagggactgaatgtccttgtgacaatttcaggaaagaagaataagctacgagtttactatctttcatggttaagaaacagaatactacataatgacccagaagtagaaaagaaacaaggctggatcactgttggggacttggaaggctgtatacattataaagttgttaaatatgaaaggatcaaatttttggtgattgccttaaagaatgctgtggaaatatatgcttgggctcctaaaccgtatcataaattcatggcatttaagtcttttgcagatctccagcacaagcctctgctagttgatctcacggtagaagaaggtcaaagattaaaggttatttttggttcacacactggtttccatgtaattgatgttgattcaggaaactcttatgatatctacataccatctcatattcagggcaatatcactcctcatgctattgtcatcttgcctaaaacagatggaatggaaatgcttgtttgctatgaggatgagggggtgtatgtaaacacctatggccggataactaaggatgtggtgctccaatggggagaaatgcccacgtctgtggcctacattcattccaatcagataatgggctggggcgagaaagctattgagatccggtcagtggaaacaggacatttggatggagtatttatgcataagcgagctcaaaggttaaagtttctatgtgaaagaaatgataaggtattttttgcatccgtgcgatctggaggaagtagccaagtgtttttcatgaccctcaacagaaattccatgatgaactggtaacagaagagcacttggcacttatcttcatggcgttatttctaatttaaaagaacataactcatgtggacttatgccagtctagaggcagaatcagaaggcttggttgaacatatcgctttccctttttcctctccctccgcccctcccagtacagtccatctttcaatgttgcagcctggttgagaaggagagaaaaaggtggcaggaatttccaggagatccccaagaatgctgccttgtctgtggacaaagatggaccatgtgcccttcggaattagggatagaaacaaatattgtgtgctcttaacgattaagctgtgttatggtgggttttcaggtttttaccttttttctttacccctttactctgcaagaatggggaaagaatgcatactgcgaaaatgagtcttttaaattctgtctgcctactagttttaagtatatggtatgttgtaaaatttccaatgatgagagacagcacaataaatgtaccttatctccttaggctgaaggccataactacatagtggagtaatttaagaactctcttgccttcaccaacccaaaaggttgctttttgatagcaactggctaatgaatttttaaaaagagaagaaaaatactagttttcccctcttttgggaaatagattttaaatggctaaactactagccttaaaactactagtctaataaaatcaactaccacttttgtgaatctgacaggccacatttttatatggccctttacagaatggagtgtgttgaacaggatactaacgccattgagttgagctggcctagcgatggagggacactctaacacaactttccctcagctattatgcaacagatcagggaaaaagatgggatgacagatggggtcagacagaaagagcttctgggaaacaagcttacatagtcttttttaaaatgcacaaagcctcccagctaagaggtcacttggtttgggcttcattaggactgagactttgttgagttctttctgggacttggagagtggatgatattcaggctctgaacattcccagcgctctcccgagggtgccactttctcaagatgaaaactgtgactgaaaaaattaataataaatgtttctgagctgcctgtgttctccctgtgtgggtgagagaagggactagactcctaagcctgcctcagatacaagaggcatcattggctccaattttagagaacttgaaagcaaggctttggacaaaattttgagaccctaatcactttaccttcctccaaattacccaacatacggtaaacaacatttgtgcagaagtatgtatgtatttagttcaggttgacttgtgtccttataaactcttactcaaatgatttgaacttttatgcgactgggattttttttttccaaagctacaagcatggccgcctgtggtatcgaggtgttgcaaacaatatctgtgttgcgcttcctgttttaacctacctcgttttgtttgtttttgtttcactgttcatcacagcagtgttatctccaggagacatatagagagctcaaccggcaatctcaggtgcatttaacatttttaaaacgaaacagtagttgaccaaatttttcttcttaaaaaattggaagtggggggaatccaatgacaaaaactaatgtggcttgtttctggagaaaataattactgtaaatggaacaacaacaacaaaaaaaactacgatcttactgactttgcctaaatacacaagcagctgatgtactattaatgagaacgaaatacacattaggaaaatggagccatttcaatctagtggtttgggcaagatggggaagagaaggggaaacattctagtttctggattacattattatgcccctcctgaaaaggtggttgtcatttgcatttatttaaagcaggtaatatgcaggaatgtaactgaggattatcttcaggcaatcagcaagatatcctcctcatggtccctttagctctcaaaagcaatgaaatcctcctgttctcatttttactgctgtggttgtgctgctgaacaatactatcttctcaaattccatgccacaaattcagcaataactttttggattgaatttaacaactactgtaattggatgctgatgtggacaaaatatattgatttcgatttcactcccgaatgtgattgccaccagctctttatattgctgctgtggtattttaaaccagaagcttctttaaattatgttgcaaactgatctttgtttttatgttttgttttgtttttatttctaagtgataagtttgaaacacacagctttaaatgatttttttattgtgggattttgggtacagttaagaaataaaagggaatcattgtgtttaaacataaggtagtttgtgaatgtattttttaaaatctagagtcattgaaacaaatcataagaaaacaatattaatgcagtcttgtttacagtatgtacagtgacataacatagaacatgagcttttctggtgccaacaacaataaaacacacgttaaacatcaaaacatgcc

SEQ ID NO: 347490 - DNA, 6700 bp, Homo sapiens
attataacagccaatgcagccgccatccacgcacaagcaaagaagcatgtcccatttaaatacacccacgcagccccagcgcccttagccgatcggggcgctcagcaacagcgcaccgctgctcggggcttggagatccgcgcaggctgggctcccggacccggcggaccgacgcgcggaggatcgggatccggcgctgtggggctggggtgggcgggggaggctgggccggggctctggcgcgacacccgcatgaggacgcgagtgaaatagaccaaggtggaatttccaagggaaaagcttcggggtggttttggtccatttctccagcgaagaagtagacatggcgagcgactccccggctcgaagcctggatgaaatagatctctcggctctgagggaccctgcagggatctttgaattggtggaacttgttggaaatggaacatacgggcaagtttataagggtcgtcatgtcaaaacgggccagcttgcagccatcaaggttatggatgtcacaggggatgaagaggaagaaatcaaacaagaaattaacatgttgaagaaatattctcatcaccggaatattgctacatactatggtgcttttatcaaaaagaacccaccaggcatggatgaccaactttggttggtgatggagttttgtggtgctggctctgtcaccgacctgatcaagaacacaaaaggtaacacgttgaaagaggagtggattgcatacatctgcagggaaatcttacgggggctgagtcacctgcaccagcataaagtgattcatcgagatattaaagggcaaaatgtcttgctgactgaaaatgcagaagttaaactagtggactttggagtcagtgctcagcttgatcgaacagtgggcaggaggaatactttcattggaactccctactggatggcaccagaagttattgcctgtgatgaaaacccagatgccacatatgatttcaagagtgacttgtggtctttgggtatcaccgccattgaaatggcagaaggtgctccccctctctgtgacatgcaccccatgagagctctcttcctcatcccccggaatccagcgcctcggctgaagtctaagaagtggtcaaaaaaattccagtcatttattgagagctgcttggtaaagaatcacagccagcgaccagcaacagaacaattgatgaagcatccatttatacgagaccaacctaatgagcgacaggtccgcattcaactcaaggaccatattgatagaacaaagaagaagcgaggagaaaaagatgagacagagtatgagtacagtggaagtgaggaagaagaggaggagaatgactcaggagagcccagctccatcctgaatctgccaggggagtcgacgctgcggagggactttctgaggctgcagctggccaacaaggagcgttctgaggccctacggaggcagcagctggagcagcagcagcgggagaatgaggagcacaagcggcagctgctggccgagcgtcagaagcgcatcgaggagcagaaagagcagaggcggcggctggaggagcaacaaaggcgagagaaggagctgcggaagcagcaggagagggagcagcgccggcactatgaggagcagatgcgccgggaggaggagaggaggcgtgcggagcatgaacaggaatataagcgcaaacaattggaagaacagagacaagcagaaagactgcagaggcagctaaagcaagaaagagactacttagtttcccttcagcatcagcggcaggagcagaggcctgtggagaagaagccactgtaccattacaaagaaggaatgagtcctagtgagaagccagcatgggccaaggagatcccacatctggtagctgtaaaatcccagggacctgccttgaccgcctcccagtcagtgcacgagcagcccacaaagggcctctctgggtttcaggaggctctgaacgtgacctcccaccgcgtggagatgccacgccagaactcagatcccacctcggaaaatcctcctctccccactcgcattgaaaagtttgaccgaagctcttggttacgacaggaagaagacattccaccaaaggtgcctcaaagaacaacttctatatccccagcattagccagaaagaattctcctgggaatggtagtgctctgggacccagactaggatctcaacccatcagagcaagcaaccctgatctccggagaactgagcccatcttggagagccccttgcagaggaccagcagtggcagttcctccagctccagcacccctagctcccagcccagctcccaaggaggctcccagcctggatcacaagcaggatccagtgaacgcaccagagttcgagccaacagtaagtcagaaggatcacctgtgcttccccatgagcctgccaaggtgaaaccagaagaatccagggacattacccggcccagtcgaccagctgatctgacggcattagccaaagaactaagagaactccggattgaagaaacaaaccgcccaatgaagaaggtgactgattactcctcctccagtgaggagtcagaaagtagcgaggaagaggaggaagatggagagagcgagacccatgatgggacagtggctgtcagcgacatacccagactgataccaacaggagctccaggcagcaacgagcagtacaatgtgggaatggtggggacgcatgggctggagacctctcatgcggacagtttcagcggcagtatttcaagagaaggaaccttgatgattagagagacgtctggagagaagaagcgatctggccacagtgacagcaatggctttgctggccacatcaacctccctgacctggtgcagcagagccattctccagctggaaccccgactgagggactggggcgcgtctcaacccattcccaggagatggactctgggactgaatatggcatggggagcagcaccaaagcctccttcaccccctttgtggaccccagagtataccagacgtctcccactgatgaagatgaagaggatgaggaatcatcagccgcagctctgtttactagcgaacttcttaggcaagaacaggccaaactcaatgaagcaagaaagatttcggtggtaaatgtaaacccaaccaacattcggcctcatagcgacacaccagaaatcagaaaatacaagaaacgattcaactcagaaatactttgtgcagctctgtggggtgtaaaccttctggtggggactgaaaatggcctgatgcttttggaccgaagtgggcaaggcaaagtctataatctgatcaaccggaggcgatttcagcagatggatgtgctagagggactgaatgtccttgtgacaatttcaggaaagaagaataagctacgagtttactatctttcatggttaagaaacagaatactacataatgacccagaagtagaaaagaaacaaggctggatcactgttggggacttggaaggctgtatacattataaagttgttaaatatgaaaggatcaaatttttggtgattgccttaaagaatgctgtggaaatatatgcttgggctcctaaaccgtatcataaattcatggcatttaagtcttttgcagatctccagcacaagcctctgctagttgatctcacggtagaagaaggtcaaagattaaaggttatttttggttcacacactggtttccatgtaattgatgttgattcaggaaactcttatgatatctacataccatctcatattcagggcaatatcactcctcatgctattgtcatcttgcctaaaacagatggaatggaaatgcttgtttgctatgaggatgagggggtgtatgtaaacacctatggccggataactaaggatgtggtgctccaatggggagaaatgcccacgtctgtggcctacattcattccaatcagataatgggctggggcgagaaagctattgagatccggtcagtggaaacaggacatttggatggagtatttatgcataagcgagctcaaaggttaaagtttctatgtgaaagaaatgataaggtattttttgcatccgtgcgatctggaggaagtagccaagtgtttttcatgaccctcaacagaaattccatgatgaactggtaacagaagagcacttggcacttatcttcatggcgttatttctaatttaaaagaacataactcatgtggacttatgccagtctagaggcagaatcagaaggcttggttgaacatatcgctttccctttttcctctccctccgcccctcccagtacagtccatctttcaatgttgcagcctggttgagaaggagagaaaaaggtggcaggaatttccaggagatccccaagaatgctgccttgtctgtggacaaagatggaccatgtgcccttcggaattagggatagaaacaaatattgtgtgctcttaacgattaagctgtgttatggtgggttttcaggtttttaccttttttctttacccctttactctgcaagaatggggaaagaatgcatactgcgaaaatgagtcttttaaattctgtctgcctactagttttaagtatatggtatgttgtaaaatttccaatgatgagagacagcacaataaatgtaccttatctccttaggctgaaggccataactacatagtggagtaatttaagaactctcttgccttcaccaacccaaaaggttgctttttgatagcaactggctaatgaatttttaaaaagagaagaaaaatactagttttcccctcttttgggaaatagattttaaatggctaaactactagccttaaaactactagtctaataaaatcaactaccacttttgtgaatctgacaggccacatttttatatggccctttacagaatggagtgtgttgaacaggatactaacgccattgagttgagctggcctagcgatggagggacactctaacacaactttccctcagctattatgcaacagatcagggaaaaagatgggatgacagatggggtcagacagaaagagcttctgggaaacaagcttacatagtcttttttaaaatgcacaaagcctcccagctaagaggtcacttggtttgggcttcattaggactgagactttgttgagttctttctgggacttggagagtggatgatattcaggctctgaacattcccagcgctctcccgagggtgccactttctcaagatgaaaactgtgactgaaaaaattaataataaatgtttctgagctgcctgtgttctccctgtgtgggtgagagaagggactagactcctaagcctgcctcagatacaagaggcatcattggctccaattttagagaacttgaaagcaaggctttggacaaaattttgagaccctaatcactttaccttcctccaaattacccaacatacggtaaacaacatttgtgcagaagtatgtatgtatttagttcaggttgacttgtgtccttataaactcttactcaaatgatttgaacttttatgcgactgggattttttttttccaaagctacaagcatggccgcctgtggtatcgaggtgttgcaaacaatatctgtgttgcgcttcctgttttaacctacctcgttttgtttgtttttgtttcactgttcatcacagcagtgttatctccaggagacatatagagagctcaaccggcaatctcaggtgcatttaacatttttaaaacgaaacagtagttgaccaaatttttcttcttaaaaaattggaagtggggggaatccaatgacaaaaactaatgtggcttgtttctggagaaaataattactgtaaatggaacaacaacaacaaaaaaaactacgatcttactgactttgcctaaatacacaagcagctgatgtactattaatgagaacgaaatacacattaggaaaatggagccatttcaatctagtggtttgggcaagatggggaagagaaggggaaacattctagtttctggattacattattatgcccctcctgaaaaggtggttgtcatttgcatttatttaaagcaggtaatatgcaggaatgtaactgaggattatcttcaggcaatcagcaagatatcctcctcatggtccctttagctctcaaaagcaatgaaatcctcctgttctcatttttactgctgtggttgtgctgctgaacaatactatcttctcaaattccatgccacaaattcagcaataactttttggattgaatttaacaactactgtaattggatgctgatgtggacaaaatatattgatttcgatttcactcccgaatgtgattgccaccagctctttatattgctgctgtggtattttaaaccagaagcttctttaaattatgttgcaaactgatctttgtttttatgttttgttttgtttttatttctaagtgataagtttgaaacacacagctttaaatgatttttttattgtgggattttgggtacagttaagaaataaaagggaatcattgtgtttaaacataaggtagtttgtgaatgtattttttaaaatctagagtcattgaaacaaatcataagaaaacaatattaatgcagtcttgtttacagtatgtacagtgacataacatagaacatgagcttttctggtgccaacaacaataaaacacacgttaaacatcaaaacatgcc

SEQ ID NO: 347491 - DNA, 6898 bp, Homo sapiens
attataacagccaatgcagccgccatccacgcacaagcaaagaagcatgtcccatttaaatacacccacgcagccccagcgcccttagccgatcggggcgctcagcaacagcgcaccgctgctcggggcttggagatccgcgcaggctgggctcccggacccggcggaccgacgcgcggaggatcgggatccggcgctgtggggctggggtgggcgggggaggctgggccggggctctggcgcgacacccgcatgaggacgcgagtgaaatagaccaaggtggaatttccaagggaaaagcttcggggtggttttggtccatttctccagcgaagaagtagacatggcgagcgactccccggctcgaagcctggatgaaatagatctctcggctctgagggaccctgcagggatctttgaattggtggaacttgttggaaatggaacatacgggcaagtttataagggtcgtcatgtcaaaacgggccagcttgcagccatcaaggttatggatgtcacaggggatgaagaggaagaaatcaaacaagaaattaacatgttgaagaaatattctcatcaccggaatattgctacatactatggtgcttttatcaaaaagaacccaccaggcatggatgaccaactttggttggtgatggagttttgtggtgctggctctgtcaccgacctgatcaagaacacaaaaggtaacacgttgaaagaggagtggattgcatacatctgcagggaaatcttacgggggctgagtcacctgcaccagcataaagtgattcatcgagatattaaagggcaaaatgtcttgctgactgaaaatgcagaagttaaactagtggactttggagtcagtgctcagcttgatcgaacagtgggcaggaggaatactttcattggaactccctactggatggcaccagaagttattgcctgtgatgaaaacccagatgccacatatgatttcaagagtgacttgtggtctttgggtatcaccgccattgaaatggcagaaggtgctccccctctctgtgacatgcaccccatgagagctctcttcctcatcccccggaatccagcgcctcggctgaagtctaagaagtggtcaaaaaaattccagtcatttattgagagctgcttggtaaagaatcacagccagcgaccagcaacagaacaattgatgaagcatccatttatacgagaccaacctaatgagcgacaggtccgcattcaactcaaggaccatattgatagaacaaagaagaagcgaggagaaaaagatgagacagagtatgagtacagtggaagtgaggaagaagaggaggagaatgactcaggagagcccagctccatcctgaatctgccaggggagtcgacgctgcggagggactttctgaggctgcagctggccaacaaggagcgttctgaggccctacggaggcagcagctggagcagcagcagcgggagaatgaggagcacaagcggcagctgctggccgagcgtcagaagcgcatcgaggagcagaaagagcagaggcggcggctggaggagcaacaaaggcgagagaaggagctgcggaagcagcaggagagggagcagcgccggcactatgaggagcagatgcgccgggaggaggagaggaggcgtgcggagcatgaacaggaatacatcaggcgacagttagaggaggagcagagacagttagagatcttgcagcagcagctactgcatgaacaagctctacttctggaatataagcgcaaacaattggaagaacagagacaagcagaaagactgcagaggcagctaaagcaagaaagagactacttagtttcccttcagcatcagcggcaggagcagaggcctgtggagaagaagccactgtaccattacaaagaaggaatgagtcctagtgagaagccagcatgggccaaggaggtagaagaacggtcaaggctcaaccggcaaagttcccctgccatgcctcacaaggttgccaacaggatatctgaccccaacctgcccccaaggtcggagtccttcagcattagtggagttcagcctgctcgaacaccccccatgctcagaccagtcgatccccagatcccacatctggtagctgtaaaatcccagggacctgccttgaccgcctcccagtcagtgcacgagcagcccacaaagggcctctctgggtttcaggaggctctgaacgtgacctcccaccgcgtggagatgccacgccagaactcagatcccacctcggaaaatcctcctctccccactcgcattgaaaagtttgaccgaagctcttggttacgacaggaagaagacattccaccaaaggtgcctcaaagaacaacttctatatccccagcattagccagaaagaattctcctgggaatggtagtgctctgggacccagactaggatctcaacccatcagagcaagcaaccctgatctccggagaactgagcccatcttggagagccccttgcagaggaccagcagtggcagttcctccagctccagcacccctagctcccagcccagctcccaaggaggctcccagcctggatcacaagcaggatccagtgaacgcaccagagttcgagccaacagtaagtcagaaggatcacctgtgcttccccatgagcctgccaaggtgaaaccagaagaatccagggacattacccggcccagtcgaccagctgatctgacggcattagccaaagaactaagagaactccggattgaagaaacaaaccgcccaatgaagaaggtgactgattactcctcctccagtgaggagtcagaaagtagcgaggaagaggaggaagatggagagagcgagacccatgatgggacagtggctgtcagcgacatacccagactgataccaacaggagctccaggcagcaacgagcagtacaatgtgggaatggtggggacgcatgggctggagacctctcatgcggacagtttcagcggcagtatttcaagagaaggaaccttgatgattagagagacgtctggagagaagaagcgatctggccacagtgacagcaatggctttgctggccacatcaacctccctgacctggtgcagcagagccattctccagctggaaccccgactgagggactggggcgcgtctcaacccattcccaggagatggactctgggactgaatatggcatggggagcagcaccaaagcctccttcaccccctttgtggaccccagagtataccagacgtctcccactgatgaagatgaagaggatgaggaatcatcagccgcagctctgtttactagcgaacttcttaggcaagaacaggccaaactcaatgaagcaagaaagatttcggtggtaaatgtaaacccaaccaacattcggcctcatagcgacacaccagaaatcagaaaatacaagaaacgattcaactcagaaatactttgtgcagctctgtggggtgtaaaccttctggtggggactgaaaatggcctgatgcttttggaccgaagtgggcaaggcaaagtctataatctgatcaaccggaggcgatttcagcagatggatgtgctagagggactgaatgtccttgtgacaatttcaggaaagaagaataagctacgagtttactatctttcatggttaagaaacagaatactacataatgacccagaagtagaaaagaaacaaggctggatcactgttggggacttggaaggctgtatacattataaagttgttaaatatgaaaggatcaaatttttggtgattgccttaaagaatgctgtggaaatatatgcttgggctcctaaaccgtatcataaattcatggcatttaagtcttttgcagatctccagcacaagcctctgctagttgatctcacggtagaagaaggtcaaagattaaaggttatttttggttcacacactggtttccatgtaattgatgttgattcaggaaactcttatgatatctacataccatctcatattcagggcaatatcactcctcatgctattgtcatcttgcctaaaacagatggaatggaaatgcttgtttgctatgaggatgagggggtgtatgtaaacacctatggccggataactaaggatgtggtgctccaatggggagaaatgcccacgtctgtggcctacattcattccaatcagataatgggctggggcgagaaagctattgagatccggtcagtggaaacaggacatttggatggagtatttatgcataagcgagctcaaaggttaaagtttctatgtgaaagaaatgataaggtattttttgcatccgtgcgatctggaggaagtagccaagtgtttttcatgaccctcaacagaaattccatgatgaactggtaacagaagagcacttggcacttatcttcatggcgttatttctaatttaaaagaacataactcatgtggacttatgccagtctagaggcagaatcagaaggcttggttgaacatatcgctttccctttttcctctccctccgcccctcccagtacagtccatctttcaatgttgcagcctggttgagaaggagagaaaaaggtggcaggaatttccaggagatccccaagaatgctgccttgtctgtggacaaagatggaccatgtgcccttcggaattagggcaggtttttaccttttttctttacccctttactctgcaagaatggggaaagaatgcatactgcgaaaatgagtcttttaaattctgtctgcctactagttttaagtatatggtatgttgtaaaatttccaatgatgagagacagcacaataaatgtaccttatctccttaggctgaaggccataactacatagtggagtaatttaagaactctcttgccttcaccaacccaaaaggttgctttttgatagcaactggctaatgaatttttaaaaagagaagaaaaatactagttttcccctcttttgggaaatagattttaaatggctaaactactagccttaaaactactagtctaataaaatcaactaccacttttgtgaatctgacaggccacatttttatatggccctttacagaatggagtgtgttgaacaggatactaacgccattgagttgagctggcctagcgatggagggacactctaacacaactttccctcagctattatgcaacagatcagggaaaaagatgggatgacagatggggtcagacagaaagagcttctgggaaacaagcttacatagtcttttttaaaatgcacaaagcctcccagctaagaggtcacttggtttgggcttcattaggactgagactttgttgagttctttctgggacttggagagtggatgatattcaggctctgaacattcccagcgctctcccgagggtgccactttctcaagatgaaaactgtgactgaaaaaattaataataaatgtttctgagctgcctgtgttctccctgtgtgggtgagagaagggactagactcctaagcctgcctcagatacaagaggcatcattggctccaattttagagaacttgaaagcaaggctttggacaaaattttgagaccctaatcactttaccttcctccaaattacccaacatacggtaaacaacatttgtgcagaagtatgtatgtatttagttcaggttgacttgtgtccttataaactcttactcaaatgatttgaacttttatgcgactgggattttttttttccaaagctacaagcatggccgcctgtggtatcgaggtgttgcaaacaatatctgtgttgcgcttcctgttttaacctacctcgttttgtttgtttttgtttcactgttcatcacagcagtgttatctccaggagacatatagagagctcaaccggcaatctcaggtgcatttaacatttttaaaacgaaacagtagttgaccaaatttttcttcttaaaaaattggaagtggggggaatccaatgacaaaaactaatgtggcttgtttctggagaaaataattactgtaaatggaacaacaacaacaaaaaaaactacgatcttactgactttgcctaaatacacaagcagctgatgtactattaatgagaacgaaatacacattaggaaaatggagccatttcaatctagtggtttgggcaagatggggaagagaaggggaaacattctagtttctggattacattattatgcccctcctgaaaaggtggttgtcatttgcatttatttaaagcaggtaatatgcaggaatgtaactgaggattatcttcaggcaatcagcaagatatcctcctcatggtccctttagctctcaaaagcaatgaaatcctcctgttctcatttttactgctgtggttgtgctgctgaacaatactatcttctcaaattccatgccacaaattcagcaataactttttggattgaatttaacaactactgtaattggatgctgatgtggacaaaatatattgatttcgatttcactcccgaatgtgattgccaccagctctttatattgctgctgtggtattttaaaccagaagcttctttaaattatgttgcaaactgatctttgtttttatgttttgttttgtttttatttctaagtgataagtttgaaacacacagctttaaatgatttttttattgtgggattttgggtacagttaagaaataaaagggaatcattgtgtttaaacataaggtagtttgtgaatgtattttttaaaatctagagtcattgaaacaaatcataagaaaacaatattaatgcagtcttgtttacagtatgtacagtgacataacatagaacatgagcttttctggtgccaacaacaataaaacacacgttaaacatcaaaacatgcc

SEQ ID NO: 347492 - DNA, 5530 bp, Homo sapiens
attataacagccaatgcagccgccatccacgcacaagcaaagaagcatgtcccatttaaatacacccacgcagccccagcgcccttagccgatcggggcgctcagcaacagcgcaccgctgctcggggcttggagatccgcgcaggctgggctcccggacccggcggaccgacgcgcggaggatcgggatccggcgctgtggggctggggtgggcgggggaggctgggccggggctctggcgcgacacccgcatgaggacgcgagtgaaatagaccaaggtggaatttccaagggaaaagcttcggggtggttttggtccatttctccagcgaagaagtagacatggcgagcgactccccggctcgaagcctggatgaaatagatctctcggctctgagggaccctgcagggatctttgaattggtggaacttgttggaaatggaacatacgggcaagtttataagggtcgtcatgtcaaaacgggccagcttgcagccatcaaggttatggatgtcacaggggatgaagaggaagaaatcaaacaagaaattaacatgttgaagaaatattctcatcaccggaatattgctacatactatggtgcttttatcaaaaagaacccaccaggcatggatgaccaactttggttggtgatggagttttgtggtgctggctctgtcaccgacctgatcaagaacacaaaaggtaacacgttgaaagaggagtggattgcatacatctgcagggaaatcttacgggggctgagtcacctgcaccagcataaagtgattcatcgagatattaaagggcaaaatgtcttgctgactgaaaatgcagaagttaaactagtggactttggagtcagtgctcagcttgatcgaacagtgggcaggaggaatactttcattggaactccctactggatggcaccagaagttattgcctgtgatgaaaacccagatgccacatatgatttcaagagtgacttgtggtctttgggtatcaccgccattgaaatggcagaaggtgctccccctctctgtgacatgcaccccatgagagctctcttcctcatcccccggaatccagcgcctcggctgaagtctaagaagtggtcaaaaaaattccagtcatttattgagagctgcttggtaaagaatcacagccagcgaccagcaacagaacaattgatgaagcatccatttatacgagaccaacctaatgagcgacaggtccgcattcaactcaaggaccatattgatagaacaaagaagaagcgaggagaaaaagatgagacagagtatgagtacagtggaagtgaggaagaagaggaggagaatgactcaggagagcccagctccatcctgaatctgccaggggagtcgacgctgcggagggactttctgaggctgcagctggccaacaaggagcgttctgaggccctacggaggcagcagctggagcagcagcagcgggagaatgaggagcacaagcggcagctgctggccgagcgtcagaagcgcatcgaggagcagaaagagcagaggcggcggctggaggagcaacaaaggcgagagaaggagctgcggaagcagcaggagagggagcagcgccggcactatgaggagcagatgcgccgggaggaggagaggaggcgtgcggagcatgaacaggaatacatcaggcgacagttagaggaggagcagagacagttagagatcttgcagcagcagctactgcatgaacaagctctacttctggaatataagcgcaaacaattggaagaacagagacaagcagaaagactgcagaggcagctaaagcaagaaagagactacttagtttcccttcagcatcagcggcaggagcagaggcctgtggagaagaagccactgtaccattacaaagaaggaatgagtcctagtgagaagccagcatgggccaaggaggtagaagaacggtcaaggctcaaccggcaaagttcccctgccatgcctcacaaggttgccaacaggatatctgaccccaacctgcccccaaggtcggagtccttcagcattagtggagttcagcctgctcgaacaccccccatgctcagaccagtcgatccccagatcccacatctggtagctgtaaaatcccagggacctgccttgaccgcctcccagtcagtgcacgagcagcccacaaagggcctctctgggtttcaggaggctctgaacgtgacctcccaccgcgtggagatgccacgccagaactcagatcccacctcggaaaatcctcctctccccactcgcattgaaaagtttgaccgaagctcttggttacgacaggaagaagacattccaccaaaggtgcctcaaagaacaacttctatatccccagcattagccagaaagaattctcctgggaatggtagtgctctgggacccagactaggatctcaacccatcagagcaagcaaccctgatctccggagaactgagcccatcttggagagccccttgcagaggaccagcagtggcagttcctccagctccagcacccctagctcccagcccagctcccaaggaggctcccagcctggatcacaagcaggatccagtgaacgcaccagagttcgagccaacagtaagtcagaaggatcacctgtgcttccccatgagcctgccaaggtgaaaccagaagaatccagggacattacccggcccagtcgaccagctgatctgacggcattagccaaagaactaagagaactccggattgaagaaacaaaccgcccaatgaagaaggtgactgattactcctcctccagtgaggagtcagaaagtagcgaggaagaggaggaagatggagagagcgagacccatgatgggacagtggctgtcagcgacatacccagactgataccaacaggagctccaggcagcaacgagcagtacaatgtgggaatggtggggacgcatgggctggagacctctcatgcggacagtttcagcggcagtatttcaagagaaggaaccttgatgattagagagacgtctggagagaagaagcgatctggccacagtgacagcaatggctttgctggccacatcaacctccctgacctggtgcagcagagccattctccagctggaaccccgactgagggactggggcgcgtctcaacccattcccaggagatggactctgggactgaatatggcatggggagcagcaccaaagcctccttcaccccctttgtggaccccagagtataccagacgtctcccactgatgaagatgaagaggatgaggaatcatcagccgcagctctgtttactagcgaacttcttaggcaagaacaggccaaactcaatgaagcaagaaagatttcggtggtaaatgtaaacccaaccaacattcggcctcatagcgacacaccagaaatcagaaaatacaagaaacgattcaactcagaaatactttgtgcagctctgtggggtgtaaaccttctggtggggactgaaaatggcctgatgcttttggaccgaagtgggcaaggcaaagtctataatctgatcaaccggaggcgatttcagcagatggatgtgctagagggactgaatgtccttgtgacaatttcaggaaagaagaataagctacgagtttactatctttcatggttaagaaacagaatactacataatgacccagaagtagaaaagaaacaaggctggatcactgttggggacttggaaggctgtatacattataaagttgttaaatatgaaaggatcaaatttttggtgattgccttaaagaatgctgtggaaatatatgcttgggctcctaaaccgtatcataaattcatggcatttaagtcttttgcagatctccagcacaagcctctgctagttgatctcacggtagaagaaggtcaaagattaaaggttatttttggttcacacactggtttccatgtaattgatgttgattcaggaaactcttatgatatctacataccatctcatattcagggcaatatcactcctcatgctattgtcatcttgcctaaaacagatggaatggaaatgcttgtttgctatgaggatgagggggtgtatgtaaacacctatggccggataactaaggatgtggtgctccaatggggagaaatgcccacgtctgtggcctacattcattccaatcagataatgggctggggcgagaaagctattgagatccggtcagtggaaacaggacatttggatggagtatttatgcataagcgagctcaaaggttaaagtttctatgtgaaagaaatgataaggtattttttgcatccgtgcgatctggaggaagtagccaagtgtttttcatgaccctcaacagaaattccatgatgaactggtaacagaagagcacttggcacttatcttcatggcgttatttctaatttaaaagaacataactcatgtggacttatgccagtctagaggcagaatcagaaggcttggttgaacatatcgctttccctttttcctctccctccgcccctcccagtacagtccatctttcaatgttgcagcctggttgagaaggagagaaaaaggtggcaggaatttccaggagatccccaagaatgctgccttgtctgtggacaaagatggaccatgtgcccttcggaattagggatagaaacaaatattgtgtgctcttaacgattaagctgtgttatggtgggttttcaggtttttaccttttttctttacccctttactctgcaagaatggggaaagaatgcatactgcgaaaatgagtcttttaaattctgtctgcctactagttttaagtatatggtatgttgtaaaatttccaatgatgagagacagcacaataaatgtaccttatctccttaggctgaaggccataactacatagtggagtaatttaagaactctcttgccttcaccaacccaaaaggttgctttttgatagcaactggctaatgaatttttaaaaagagaagaaaaatactagttttcccctcttttgggaaatagattttaaatggctaaactactagccttaaaactactagtctaataaaatcaactaccacttttgtgaatctgacaggccacatttttatatggccctttacagaatggagtgtgttgaacaggatactaacgccattgagttgagctggcctagcgatggagggacactctaacacaactttccctcagctattatgcaacagatcagggaaaaagatgggatgacagatggggtcagacagaaagagcttctgggaaacaagcttacatagtcttttttaaaatgcacaaagcctcccagctaagaggtcacttggtttgggcttcattaggactgagactttgttgagttctttctgggacttggagagtggatgatattcaggctctgaacattcccagcgctctcccgagggtgccactttctcaagatgaaaactgtgactgaaaaaattaataataaatgtttctgagctgcc

SEQ ID NO: 347493 - DNA, 6724 bp, Homo sapiens
attataacagccaatgcagccgccatccacgcacaagcaaagaagcatgtcccatttaaatacacccacgcagccccagcgcccttagccgatcggggcgctcagcaacagcgcaccgctgctcggggcttggagatccgcgcaggctgggctcccggacccggcggaccgacgcgcggaggatcgggatccggcgctgtggggctggggtgggcgggggaggctgggccggggctctggcgcgacacccgcatgaggacgcgagtgaaatagaccaaggtggaatttccaagggaaaagcttcggggtggttttggtccatttctccagcgaagaagtagacatggcgagcgactccccggctcgaagcctggatgaaatagatctctcggctctgagggaccctgcagggatctttgaattggtggaacttgttggaaatggaacatacgggcaagtttataagggtcgtcatgtcaaaacgggccagcttgcagccatcaaggttatggatgtcacaggggatgaagaggaagaaatcaaacaagaaattaacatgttgaagaaatattctcatcaccggaatattgctacatactatggtgcttttatcaaaaagaacccaccaggcatggatgaccaactttggttggtgatggagttttgtggtgctggctctgtcaccgacctgatcaagaacacaaaaggtaacacgttgaaagaggagtggattgcatacatctgcagggaaatcttacgggggctgagtcacctgcaccagcataaagtgattcatcgagatattaaagggcaaaatgtcttgctgactgaaaatgcagaagttaaactagtggactttggagtcagtgctcagcttgatcgaacagtgggcaggaggaatactttcattggaactccctactggatggcaccagaagttattgcctgtgatgaaaacccagatgccacatatgatttcaagagtgacttgtggtctttgggtatcaccgccattgaaatggcagaaggtgctccccctctctgtgacatgcaccccatgagagctctcttcctcatcccccggaatccagcgcctcggctgaagtctaagaagtggtcaaaaaaattccagtcatttattgagagctgcttggtaaagaatcacagccagcgaccagcaacagaacaattgatgaagcatccatttatacgagaccaacctaatgagcgacaggtccgcattcaactcaaggaccatattgatagaacaaagaagaagcgaggagaaaaagatgagacagagtatgagtacagtggaagtgaggaagaagaggaggagaatgactcaggagagcccagctccatcctgaatctgccaggggagtcgacgctgcggagggactttctgaggctgcagctggccaacaaggagcgttctgaggccctacggaggcagcagctggagcagcagcagcgggagaatgaggagcacaagcggcagctgctggccgagcgtcagaagcgcatcgaggagcagaaagagcagaggcggcggctggaggagcaacaaaggcgagagaaggagctgcggaagcagcaggagagggagcagcgccggcactatgaggagcagatgcgccgggaggaggagaggaggcgtgcggagcatgaacaggaatataagcgcaaacaattggaagaacagagacaagcagaaagactgcagaggcagctaaagcaagaaagagactacttagtttcccttcagcatcagcggcaggagcagaggcctgtggagaagaagccactgtaccattacaaagaaggaatgagtcctagtgagaagccagcatgggccaaggagatcccacatctggtagctgtaaaatcccagggacctgccttgaccgcctcccagtcagtgcacgagcagcccacaaagggcctctctgggtttcaggaggctctgaacgtgacctcccaccgcgtggagatgccacgccagaactcagatcccacctcggaaaatcctcctctccccactcgcattgaaaagtttgaccgaagctcttggttacgacaggaagaagacattccaccaaaggtgcctcaaagaacaacttctatatccccagcattagccagaaagaattctcctgggaatggtagtgctctgggacccagactaggatctcaacccatcagagcaagcaaccctgatctccggagaactgagcccatcttggagagccccttgcagaggaccagcagtggcagttcctccagctccagcacccctagctcccagcccagctcccaaggaggctcccagcctggatcacaagcaggatccagtgaacgcaccagagttcgagccaacagtaagtcagaaggatcacctgtgcttccccatgagcctgccaaggtgaaaccagaagaatccagggacattacccggcccagtcgaccagctagctacaaaaaagctatagatgaggatctgacggcattagccaaagaactaagagaactccggattgaagaaacaaaccgcccaatgaagaaggtgactgattactcctcctccagtgaggagtcagaaagtagcgaggaagaggaggaagatggagagagcgagacccatgatgggacagtggctgtcagcgacatacccagactgataccaacaggagctccaggcagcaacgagcagtacaatgtgggaatggtggggacgcatgggctggagacctctcatgcggacagtttcagcggcagtatttcaagagaaggaaccttgatgattagagagacgtctggagagaagaagcgatctggccacagtgacagcaatggctttgctggccacatcaacctccctgacctggtgcagcagagccattctccagctggaaccccgactgagggactggggcgcgtctcaacccattcccaggagatggactctgggactgaatatggcatggggagcagcaccaaagcctccttcaccccctttgtggaccccagagtataccagacgtctcccactgatgaagatgaagaggatgaggaatcatcagccgcagctctgtttactagcgaacttcttaggcaagaacaggccaaactcaatgaagcaagaaagatttcggtggtaaatgtaaacccaaccaacattcggcctcatagcgacacaccagaaatcagaaaatacaagaaacgattcaactcagaaatactttgtgcagctctgtggggtgtaaaccttctggtggggactgaaaatggcctgatgcttttggaccgaagtgggcaaggcaaagtctataatctgatcaaccggaggcgatttcagcagatggatgtgctagagggactgaatgtccttgtgacaatttcaggaaagaagaataagctacgagtttactatctttcatggttaagaaacagaatactacataatgacccagaagtagaaaagaaacaaggctggatcactgttggggacttggaaggctgtatacattataaagttgttaaatatgaaaggatcaaatttttggtgattgccttaaagaatgctgtggaaatatatgcttgggctcctaaaccgtatcataaattcatggcatttaagtcttttgcagatctccagcacaagcctctgctagttgatctcacggtagaagaaggtcaaagattaaaggttatttttggttcacacactggtttccatgtaattgatgttgattcaggaaactcttatgatatctacataccatctcatattcagggcaatatcactcctcatgctattgtcatcttgcctaaaacagatggaatggaaatgcttgtttgctatgaggatgagggggtgtatgtaaacacctatggccggataactaaggatgtggtgctccaatggggagaaatgcccacgtctgtggcctacattcattccaatcagataatgggctggggcgagaaagctattgagatccggtcagtggaaacaggacatttggatggagtatttatgcataagcgagctcaaaggttaaagtttctatgtgaaagaaatgataaggtattttttgcatccgtgcgatctggaggaagtagccaagtgtttttcatgaccctcaacagaaattccatgatgaactggtaacagaagagcacttggcacttatcttcatggcgttatttctaatttaaaagaacataactcatgtggacttatgccagtctagaggcagaatcagaaggcttggttgaacatatcgctttccctttttcctctccctccgcccctcccagtacagtccatctttcaatgttgcagcctggttgagaaggagagaaaaaggtggcaggaatttccaggagatccccaagaatgctgccttgtctgtggacaaagatggaccatgtgcccttcggaattagggatagaaacaaatattgtgtgctcttaacgattaagctgtgttatggtgggttttcaggtttttaccttttttctttacccctttactctgcaagaatggggaaagaatgcatactgcgaaaatgagtcttttaaattctgtctgcctactagttttaagtatatggtatgttgtaaaatttccaatgatgagagacagcacaataaatgtaccttatctccttaggctgaaggccataactacatagtggagtaatttaagaactctcttgccttcaccaacccaaaaggttgctttttgatagcaactggctaatgaatttttaaaaagagaagaaaaatactagttttcccctcttttgggaaatagattttaaatggctaaactactagccttaaaactactagtctaataaaatcaactaccacttttgtgaatctgacaggccacatttttatatggccctttacagaatggagtgtgttgaacaggatactaacgccattgagttgagctggcctagcgatggagggacactctaacacaactttccctcagctattatgcaacagatcagggaaaaagatgggatgacagatggggtcagacagaaagagcttctgggaaacaagcttacatagtcttttttaaaatgcacaaagcctcccagctaagaggtcacttggtttgggcttcattaggactgagactttgttgagttctttctgggacttggagagtggatgatattcaggctctgaacattcccagcgctctcccgagggtgccactttctcaagatgaaaactgtgactgaaaaaattaataataaatgtttctgagctgcctgtgttctccctgtgtgggtgagagaagggactagactcctaagcctgcctcagatacaagaggcatcattggctccaattttagagaacttgaaagcaaggctttggacaaaattttgagaccctaatcactttaccttcctccaaattacccaacatacggtaaacaacatttgtgcagaagtatgtatgtatttagttcaggttgacttgtgtccttataaactcttactcaaatgatttgaacttttatgcgactgggattttttttttccaaagctacaagcatggccgcctgtggtatcgaggtgttgcaaacaatatctgtgttgcgcttcctgttttaacctacctcgttttgtttgtttttgtttcactgttcatcacagcagtgttatctccaggagacatatagagagctcaaccggcaatctcaggtgcatttaacatttttaaaacgaaacagtagttgaccaaatttttcttcttaaaaaattggaagtggggggaatccaatgacaaaaactaatgtggcttgtttctggagaaaataattactgtaaatggaacaacaacaacaaaaaaaactacgatcttactgactttgcctaaatacacaagcagctgatgtactattaatgagaacgaaatacacattaggaaaatggagccatttcaatctagtggtttgggcaagatggggaagagaaggggaaacattctagtttctggattacattattatgcccctcctgaaaaggtggttgtcatttgcatttatttaaagcaggtaatatgcaggaatgtaactgaggattatcttcaggcaatcagcaagatatcctcctcatggtccctttagctctcaaaagcaatgaaatcctcctgttctcatttttactgctgtggttgtgctgctgaacaatactatcttctcaaattccatgccacaaattcagcaataactttttggattgaatttaacaactactgtaattggatgctgatgtggacaaaatatattgatttcgatttcactcccgaatgtgattgccaccagctctttatattgctgctgtggtattttaaaccagaagcttctttaaattatgttgcaaactgatctttgtttttatgttttgttttgtttttatttctaagtgataagtttgaaacacacagctttaaatgatttttttattgtgggattttgggtacagttaagaaataaaagggaatcattgtgtttaaacataaggtagtttgtgaatgtattttttaaaatctagagtcattgaaacaaatcataagaaaacaatattaatgcagtcttgtttacagtatgtacagtgacataacatagaacatgagcttttctggtgccaacaacaataaaacacacgttaaacatcaaaacatgcc

SEQ ID NO: 347494 - DNA, 4671 bp, Homo sapiens
atttcagtacagcagcaatcataagaggggaaaagccatcactgtggcttgggcaggagtcccagaatactggggcacaatttctaatcccacatattttcccattaactctgggggtgaccagcttcacctttccaaaacaaaatgagaacccaatgtttgtatatatgtgtacatacacatatgtacacatatatattcaggactgaacagtctcagtctagctattggttttgaaaaagtttaaattgatttcatctttcttttctagcttctacacgctacaaacatcattttcttagttccatgcagtaactatgtttgtcacagttctatatagagcttttttttttcttgttgcttaagctggagcactgacttgctgagagatgtagctttggtcgtatctaccactcatatgctgaacaaatttttctttcataggatctgacggcattagccaaagaactaagagaactccggattgaagaaacaaaccgcccaatgaagaaggtgactgattactcctcctccagtgaggagtcagaaagtagcgaggaagaggaggaagatggagagagcgagacccatgatgggacagtggctgtcagcgacatacccagactgataccaacaggagctccaggcagcaacgagcagtacaatgtgggaatggtggggacgcatgggctggagacctctcatgcggacagtttcagcggcagtatttcaagagaaggaaccttgatgattagagagacgtctggagagaagaagcgatctggccacagtgacagcaatggctttgctggccacatcaacctccctgacctggtgcagcagagccattctccagctggaaccccgactgagggactggggcgcgtctcaacccattcccaggagatggactctgggactgaatatggcatggggagcagcaccaaagcctccttcaccccctttgtggaccccagagtataccagacgtctcccactgatgaagatgaagaggatgaggaatcatcagccgcagctctgtttactagcgaacttcttaggcaagaacaggccaaactcaatgaagcaagaaagatttcggtggtaaatgtaaacccaaccaacattcggcctcatagcgacacaccagaaatcagaaaatacaagaaacgattcaactcagaaatactttgtgcagctctgtggggtgtaaaccttctggtggggactgaaaatggcctgatgcttttggaccgaagtgggcaaggcaaagtctataatctgatcaaccggaggcgatttcagcagatggatgtgctagagggactgaatgtccttgtgacaatttcaggaaagaagaataagctacgagtttactatctttcatggttaagaaacagaatactacataatgacccagaagtagaaaagaaacaaggctggatcactgttggggacttggaaggctgtatacattataaagttgttaaatatgaaaggatcaaatttttggtgattgccttaaagaatgctgtggaaatatatgcttgggctcctaaaccgtatcataaattcatggcatttaagtcttttgcagatctccagcacaagcctctgctagttgatctcacggtagaagaaggtcaaagattaaaggttatttttggttcacacactggtttccatgtaattgatgttgattcaggaaactcttatgatatctacataccatctcatattcagggcaatatcactcctcatgctattgtcatcttgcctaaaacagatggaatggaaatgcttgtttgctatgaggatgagggggtgtatgtaaacacctatggccggataactaaggatgtggtgctccaatggggagaaatgcccacgtctgtggcctacattcattccaatcagataatgggctggggcgagaaagctattgagatccggtcagtggaaacaggacatttggatggagtatttatgcataagcgagctcaaaggttaaagtttctatgtgaaagaaatgataaggtattttttgcatccgtgcgatctggaggaagtagccaagtgtttttcatgaccctcaacagaaattccatgatgaactggtaacagaagagcacttggcacttatcttcatggcgttatttctaatttaaaagaacataactcatgtggacttatgccagtctagaggcagaatcagaaggcttggttgaacatatcgctttccctttttcctctccctccgcccctcccagtacagtccatctttcaatgttgcagcctggttgagaaggagagaaaaaggtggcaggaatttccaggagatccccaagaatgctgccttgtctgtggacaaagatggaccatgtgcccttcggaattagggatagaaacaaatattgtgtgctcttaacgattaagctgtgttatggtgggttttcaggtttttaccttttttctttacccctttactctgcaagaatggggaaagaatgcatactgcgaaaatgagtcttttaaattctgtctgcctactagttttaagtatatggtatgttgtaaaatttccaatgatgagagacagcacaataaatgtaccttatctccttaggctgaaggccataactacatagtggagtaatttaagaactctcttgccttcaccaacccaaaaggttgctttttgatagcaactggctaatgaatttttaaaaagagaagaaaaatactagttttcccctcttttgggaaatagattttaaatggctaaactactagccttaaaactactagtctaataaaatcaactaccacttttgtgaatctgacaggccacatttttatatggccctttacagaatggagtgtgttgaacaggatactaacgccattgagttgagctggcctagcgatggagggacactctaacacaactttccctcagctattatgcaacagatcagggaaaaagatgggatgacagatggggtcagacagaaagagcttctgggaaacaagcttacatagtcttttttaaaatgcacaaagcctcccagctaagaggtcacttggtttgggcttcattaggactgagactttgttgagttctttctgggacttggagagtggatgatattcaggctctgaacattcccagcgctctcccgagggtgccactttctcaagatgaaaactgtgactgaaaaaattaataataaatgtttctgagctgcctgtgttctccctgtgtgggtgagagaagggactagactcctaagcctgcctcagatacaagaggcatcattggctccaattttagagaacttgaaagcaaggctttggacaaaattttgagaccctaatcactttaccttcctccaaattacccaacatacggtaaacaacatttgtgcagaagtatgtatgtatttagttcaggttgacttgtgtccttataaactcttactcaaatgatttgaacttttatgcgactgggattttttttttccaaagctacaagcatggccgcctgtggtatcgaggtgttgcaaacaatatctgtgttgcgcttcctgttttaacctacctcgttttgtttgtttttgtttcactgttcatcacagcagtgttatctccaggagacatatagagagctcaaccggcaatctcaggtgcatttaacatttttaaaacgaaacagtagttgaccaaatttttcttcttaaaaaattggaagtggggggaatccaatgacaaaaactaatgtggcttgtttctggagaaaataattactgtaaatggaacaacaacaacaaaaaaaactacgatcttactgactttgcctaaatacacaagcagctgatgtactattaatgagaacgaaatacacattaggaaaatggagccatttcaatctagtggtttgggcaagatggggaagagaaggggaaacattctagtttctggattacattattatgcccctcctgaaaaggtggttgtcatttgcatttatttaaagcaggtaatatgcaggaatgtaactgaggattatcttcaggcaatcagcaagatatcctcctcatggtccctttagctctcaaaagcaatgaaatcctcctgttctcatttttactgctgtggttgtgctgctgaacaatactatcttctcaaattccatgccacaaattcagcaataactttttggattgaatttaacaactactgtaattggatgctgatgtggacaaaatatattgatttcgatttcactcccgaatgtgattgccaccagctctttatattgctgctgtggtattttaaaccagaagcttctttaaattatgttgcaaactgatctttgtttttatgttttgttttgtttttatttctaagtgataagtttgaaacacacagctttaaatgatttttttattgtgggattttgggtacagttaagaaataaaagggaatcattgtgtttaaacataaggtagtttgtgaatgtattttttaaaatctagagtcattgaaacaaatcataagaaaacaatattaatgcagtcttgtttacagtatgtacagtgacataacatagaacatgagcttttctggtgccaacaacaataaaacacacgttaaacatcaaaacatgcc

SEQ ID NO: 347495 - DNA, 3804 bp, Homo sapiens
caagaaagaagtggtttttccaggcagggaataaaggcaaattatgctagcttcacatctgtgcctaaggctcctattgacaaggactctctgcattaggtagtaaataactagatgtatgaatgctgctaactttataaaagaaaactgtaatttcattaccagaagtacaatgatttaattattatgtcagagcttctacattcattagtttatatttacctacttgcccattagtgtatatttacaagtcacagtttcttaaattttatagggactctcgatgcagaagattaaagttcatgaaaagtcagtcttagggtgcttcttaaatttacaggtgtaaaccttctggtggggactgaaaatggcctgatgcttttggaccgaagtgggcaaggcaaagtctataatctgatcaaccggaggcgatttcagcagatggatgtgctagagggactgaatgtccttgtgacaatttcaggaaagaagaataagctacgagtttactatctttcatggttaagaaacagaatactacataatgacccagaagtagaaaagaaacaaggctggatcactgttggggacttggaaggctgtatacattataaagttgttaaatatgaaaggatcaaatttttggtgattgccttaaagaatgctgtggaaatatatgcttgggctcctaaaccgtatcataaattcatggcatttaagtcttttgcagatctccagcacaagcctctgctagttgatctcacggtagaagaaggtcaaagattaaaggttatttttggttcacacactggtttccatgtaattgatgttgattcaggaaactcttatgatatctacataccatctcatattcagggcaatatcactcctcatgctattgtcatcttgcctaaaacagatggaatggaaatgcttgtttgctatgaggatgagggggtgtatgtaaacacctatggccggataactaaggatgtggtgctccaatggggagaaatgcccacgtctgtggcctacattcattccaatcagataatgggctggggcgagaaagctattgagatccggtcagtggaaacaggacatttggatggagtatttatgcataagcgagctcaaaggttaaagtttctatgtgaaagaaatgataaggtattttttgcatccgtgcgatctggaggaagtagccaagtgtttttcatgaccctcaacagaaattccatgatgaactggtaacagaagagcacttggcacttatcttcatggcgttatttctaatttaaaagaacataactcatgtggacttatgccagtctagaggcagaatcagaaggcttggttgaacatatcgctttccctttttcctctccctccgcccctcccagtacagtccatctttcaatgttgcagcctggttgagaaggagagaaaaaggtggcaggaatttccaggagatccccaagaatgctgccttgtctgtggacaaagatggaccatgtgcccttcggaattagggatagaaacaaatattgtgtgctcttaacgattaagctgtgttatggtgggttttcaggtttttaccttttttctttacccctttactctgcaagaatggggaaagaatgcatactgcgaaaatgagtcttttaaattctgtctgcctactagttttaagtatatggtatgttgtaaaatttccaatgatgagagacagcacaataaatgtaccttatctccttaggctgaaggccataactacatagtggagtaatttaagaactctcttgccttcaccaacccaaaaggttgctttttgatagcaactggctaatgaatttttaaaaagagaagaaaaatactagttttcccctcttttgggaaatagattttaaatggctaaactactagccttaaaactactagtctaataaaatcaactaccacttttgtgaatctgacaggccacatttttatatggccctttacagaatggagtgtgttgaacaggatactaacgccattgagttgagctggcctagcgatggagggacactctaacacaactttccctcagctattatgcaacagatcagggaaaaagatgggatgacagatggggtcagacagaaagagcttctgggaaacaagcttacatagtcttttttaaaatgcacaaagcctcccagctaagaggtcacttggtttgggcttcattaggactgagactttgttgagttctttctgggacttggagagtggatgatattcaggctctgaacattcccagcgctctcccgagggtgccactttctcaagatgaaaactgtgactgaaaaaattaataataaatgtttctgagctgcctgtgttctccctgtgtgggtgagagaagggactagactcctaagcctgcctcagatacaagaggcatcattggctccaattttagagaacttgaaagcaaggctttggacaaaattttgagaccctaatcactttaccttcctccaaattacccaacatacggtaaacaacatttgtgcagaagtatgtatgtatttagttcaggttgacttgtgtccttataaactcttactcaaatgatttgaacttttatgcgactgggattttttttttccaaagctacaagcatggccgcctgtggtatcgaggtgttgcaaacaatatctgtgttgcgcttcctgttttaacctacctcgttttgtttgtttttgtttcactgttcatcacagcagtgttatctccaggagacatatagagagctcaaccggcaatctcaggtgcatttaacatttttaaaacgaaacagtagttgaccaaatttttcttcttaaaaaattggaagtggggggaatccaatgacaaaaactaatgtggcttgtttctggagaaaataattactgtaaatggaacaacaacaacaaaaaaaactacgatcttactgactttgcctaaatacacaagcagctgatgtactattaatgagaacgaaatacacattaggaaaatggagccatttcaatctagtggtttgggcaagatggggaagagaaggggaaacattctagtttctggattacattattatgcccctcctgaaaaggtggttgtcatttgcatttatttaaagcaggtaatatgcaggaatgtaactgaggattatcttcaggcaatcagcaagatatcctcctcatggtccctttagctctcaaaagcaatgaaatcctcctgttctcatttttactgctgtggttgtgctgctgaacaatactatcttctcaaattccatgccacaaattcagcaataactttttggattgaatttaacaactactgtaattggatgctgatgtggacaaaatatattgatttcgatttcactcccgaatgtgattgccaccagctctttatattgctgctgtggtattttaaaccagaagcttctttaaattatgttgcaaactgatctttgtttttatgttttgttttgtttttatttctaagtgataagtttgaaacacacagctttaaatgatttttttattgtgggattttgggtacagttaagaaataaaagggaatcattgtgtttaaacataaggtagtttgtgaatgtattttttaaaatctagagtcattgaaacaaatcataagaaaacaatattaatgcagtcttgtttacagtatgtacagtgacataacatagaacatgagcttttctggtgccaacaacaataaaacacacgttaaacatcaaaacatgcc

SEQ ID NO: 347496 - DNA, 2658 bp, Homo sapiens
gagaaaatggatggacggttgaagaaaagaggggaaaagaccatgcagttgaactaacttctttttaatttcaaacaggtattttttgcatccgtgcgatctggaggaagtagccaagtgtttttcatgaccctcaacagaaattccatgatgaactggtaacagaagagcacttggcacttatcttcatggcgttatttctaatttaaaagaacataactcatgtggacttatgccagtctagaggcagaatcagaaggcttggttgaacatatcgctttccctttttcctctccctccgcccctcccagtacagtccatctttcaatgttgcagcctggttgagaaggagagaaaaagatggaccatgtgcccttcggaattagggatagaaacaaatattgtgtgctcttaacgattaagctgtgttatggtgggttttcaggtttttaccttttttctttacccctttactctgcaagaatggggaaagaatgcatactgcgaaaatgagtcttttaaattctgtctgcctactagttttaagtatatggtatgttgtaaaatttccaatgatgagagacagcacaataaatgtaccttatctccttaggctgaaggccataactacatagtggagtaatttaagaactctcttgccttcaccaacccaaaaggttgctttttgatagcaactggctaatgaatttttaaaaagagaagaaaaatactagttttcccctcttttgggaaatagattttaaatggctaaactactagccttaaaactactagtctaataaaatcaactaccacttttgtgaatctgacaggccacatttttatatggccctttacagaatggagtgtgttgaacaggatactaacgccattgagttgagctggcctagcgatggagggacactctaacacaactttccctcagctattatgcaacagatcagggaaaaagatgggatgacagatggggtcagacagaaagagcttctgggaaacaagcttacatagtcttttttaaaatgcacaaagcctcccagctaagaggtcacttggtttgggcttcattaggactgagactttgttgagttctttctgggacttggagagtggatgatattcaggctctgaacattcccagcgctctcccgagggtgccactttctcaagatgaaaactgtgactgaaaaaattaataataaatgtttctgagctgcctgtgttctccctgtgtgggtgagagaagggactagactcctaagcctgcctcagatacaagaggcatcattggctccaattttagagaacttgaaagcaaggctttggacaaaattttgagaccctaatcactttaccttcctccaaattacccaacatacggtaaacaacatttgtgcagaagtatgtatgtatttagttcaggttgacttgtgtccttataaactcttactcaaatgatttgaacttttatgcgactgggattttttttttccaaagctacaagcatggccgcctgtggtatcgaggtgttgcaaacaatatctgtgttgcgcttcctgttttaacctacctcgttttgtttgtttttgtttcactgttcatcacagcagtgttatctccaggagacatatagagagctcaaccggcaatctcaggtgcatttaacatttttaaaacgaaacagtagttgaccaaatttttcttcttaaaaaattggaagtggggggaatccaatgacaaaaactaatgtggcttgtttctggagaaaataattactgtaaatggaacaacaacaacaaaaaaaactacgatcttactgactttgcctaaatacacaagcagctgatgtactattaatgagaacgaaatacacattaggaaaatggagccatttcaatctagtggtttgggcaagatggggaagagaaggggaaacattctagtttctggattacattattatgcccctcctgaaaaggtggttgtcatttgcatttatttaaagcaggtaatatgcaggaatgtaactgaggattatcttcaggcaatcagcaagatatcctcctcatggtccctttagctctcaaaagcaatgaaatcctcctgttctcatttttactgctgtggttgtgctgctgaacaatactatcttctcaaattccatgccacaaattcagcaataactttttggattgaatttaacaactactgtaattggatgctgatgtggacaaaatatattgatttcgatttcactcccgaatgtgattgccaccagctctttatattgctgctgtggtattttaaaccagaagcttctttaaattatgttgcaaactgatctttgtttttatgttttgttttgtttttatttctaagtgataagtttgaaacacacagctttaaatgatttttttattgtgggattttgggtacagttaagaaataaaagggaatcattgtgtttaaacataaggtagtttgtgaatgtattttttaaaatctagagtcattgaaacaaatcataagaaaacaatattaatgcagtcttgtttacagtatgtacagtgacataacatagaacatgagcttttctggtgccaacaacaataaaacacacgttaaacatcaaaacatgcc

SEQ ID NO: 347497 - DNA, 558 bp, Homo sapiens
gtagctgtaaaatcccagggacctgccttgaccgcctcccagtcagtgcacgagcagcccacaaagggcctctctgggtttcaggaggctctgaacgtgacctcccaccgcgtggagatgccacgccagaactcagatcccacctcggaaaatcctcctctccccactcgcattgaaaagtttgaccgaagctcttggttacgacaggaagaagacattccaccaaaggtaatatttactggggtgttttttttaatcaccagcatcactgatgatttttattaccactattccagacctttcgtagtagtggagaatgtgatcatgccaaagcacttccccttctcatgtttgttttggtccctcttcattccctggctaagacttggtattgccatttaccatgtctgacctttatttcccccgcaagaaaactgaagtcaggtagattgaagcacagatcctacgtccaaagttagaactctcaacaccaagtattccaaactgtcattttgctatccatattaacaaataaagtaatggatatttcattgatga

SEQ ID NO: 347498 - DNA, 327 bp, Homo sapiens
agagatgtagctttggtcgtatctaccactcatatgctgaacaaatttttctttcataggatctgacggcattagccaaagaactaagagaactccggattgaagaaacaaaccgcccaatgaagaaggtgactgattactcctcctccagtgaggagtcagaaagtagcgaggaagaggaggaagatggagagagcgagacccatgatgggacagtggctgtcagcgacatacccagactgatgtaagagaactacttttaaagtgtagaccgggaggggactaggtttccaaaataaaaggacaaaaaaatatgagttaaatgta

SEQ ID NO: 347499 - DNA, 460 bp, Homo sapiens
tttcatgacagaatttttatattgttctcatacaggatgaagaggaagaaatcaaacaagaaattaacatgttgaagaaatattctcatcaccggaatattgctacatactatggtgcttttatcaaaaagaacccaccaggcatggatgaccaactttgggtatgtactgccgtccaaatttgctttatttacataaaaaacaaacacggccaaatggttcatttttctatcctcatgacaaaatttgattaactccttctttaaccattagcccccatgatgtccgtaacatattgttttcagggttttctcccatttccttgaatatctgtcttttcaggatctctaaatgttccttctatcccttaatatggaccatccccaaagccaattgttaagttctctgtttttttttttttttttcactaattgacaaccttttattgtgttttatttta

SEQ ID NO: 347500 - DNA, 300 bp, Homo sapiens
gttttattttttaaaagaataatgcttggcttttctttgtcttctagattcagggcaatatcactcctcatgctattgtcatcttgcctaaaacagatggaatggaaatgcttgtttgctatgaggatgagggggtgtatgtaaacacctatggccggataactaaggatgtggtgctccaatggggagaaatgcccacgtctgtgggtaggttaaccattccttatctccttcagcagttacaccccccaaatgaaacgaaaatcaagaaatgtgaaacaaccatttgattccacaaaa

SEQ ID NO: 347501 - DNA, 751 bp, Homo sapiens
attataacagccaatgcagccgccatccacgcacaagcaaagaagcatgtcccatttaaatacacccacgcagccccagcgcccttagccgatcggggcgctcagcaacagcgcaccgctgctcggggcttggagatccgcgcaggctgggctcccggacccggcggaccgacgcgcggaggatcgggatccggcgctgtggggctggggtgggcgggggaggctgggccggggctctggcgcgacacccgcatgaggacgcgagtgaaatagaccaaggtggaatttccaagggaaaagcttcggggtggttttggtccatttctccagcgaagaagtagacatggcgagcgactccccggctcgaagcctggatgaaatagatctctcggctctgagggaccctgcagggatctttgaattggtggaacttgttggaaatggaacatacgggcaagtttataagcaaatgaaccagtgagtgaagggcattatcacaactccaagaaccaactaggagtcacccatgacatcatctcctgaatttcatcaccaagcccagctgatcctatttcctaaatggttcctgatttctctcttctgttttctgtctctgccaccactgtcctagcacaggcattgcacatctctcatatgaacgcctgcaggactgtcccttgatgttatccttgcagcccctacattcctactgtgcagccagtaaagtcatattaaaatgcttatttgatca

SEQ ID NO: 347502 - DNA, 7276 bp, Homo sapiens
  misc_feature (6809)..(6809): n is a, c, g, or t
attataacagccaatgcagccgccatccacgcacaagcaaagaagcatgtcccatttaaatacacccacgcagccccagcgcccttagccgatcggggcgctcagcaacagcgcaccgctgctcggggcttggagatccgcgcaggctgggctcccggacccggcggaccgacgcgcggaggatcgggatccggcgctgtggggctggggtgggcgggggaggctgggccggggctctggcgcgacacccgcatgaggacgcgagtgaaatagaccaaggtggaatttccaagggaaaagcttcggggtggttttggtccatttctccagcgaagaagtagacatggcgagcgactccccggctcgaagcctggatgaaatagatctctcggctctgagggaccctgcagggatctttgaattggtggaacttgttggaaatggaacatacgggcaagtttataagggtcgtcatgtcaaaacgggccagcttgcagccatcaaggttatggatgtcacaggggatgaagaggaagaaatcaaacaagaaattaacatgttgaagaaatattctcatcaccggaatattgctacatactatggtgcttttatcaaaaagaacccaccaggcatggatgaccaactttggttggtgatggagttttgtggtgctggctctgtcaccgacctgatcaagaacacaaaaggtaacacgttgaaagaggagtggattgcatacatctgcagggaaatcttacgggggctgagtcacctgcaccagcataaagtgattcatcgagatattaaagggcaaaatgtcttgctgactgaaaatgcagaagttaaactagtggactttggagtcagtgctcagcttgatcgaacagtgggcaggaggaatactttcattggaactccctactggatggcaccagaagttattgcctgtgatgaaaacccagatgccacatatgatttcaagagtgacttgtggtctttgggtatcaccgccattgaaatggcagaaggtgctccccctctctgtgacatgcaccccatgagagctctcttcctcatcccccggaatccagcgcctcggctgaagtctaagaagtggtcaaaaaaattccagtcatttattgagagctgcttggtaaagaatcacagccagcgaccagcaacagaacaattgatgaagcatccatttatacgagaccaacctaatgagcgacaggtccgcattcaactcaaggaccatattgatagaacaaagaagaagcgaggagaaaaagatgagacagagtatgagtacagtggaagtgaggaagaagaggaggagaatgactcaggagagcccagctccatcctgaatctgccaggggagtcgacgctgcggagggactttctgaggctgcagctggccaacaaggagcgttctgaggccctacggaggcagcagctggagcagcagcagcgggagaatgaggagcacaagcggcagctgctggccgagcgtcagaagcgcatcgaggagcagaaagagcagaggcggcggctggaggagcaacaaaggcgagagaaggagctgcggaagcagcaggagagggagcagcgccggcactatgaggagcagatgcgccgggaggaggagaggaggcgtgcggagcatgaacaggaatacatcaggcgacagttagaggaggagcagagacagttagagatcttgcagcagcagctactgcatgaacaagctctacttctggaatataagcgcaaacaattggaagaacagagacaagcagaaagactgcagaggcagctaaagcaagaaagagactacttagtttcccttcagcatcagcggcaggagcagaggcctgtggagaagaagccactgtaccattacaaagaaggaatgagtcctagtgagaagccagcatgggccaaggaggtagaagaacggtcaaggctcaaccggcaaagttcccctgccatgcctcacaaggttgccaacaggatatctgaccccaacctgcccccaaggtcggagtccttcagcattagtggagttcagcctgctcgaacaccccccatgctcagaccagtcgatccccagatcccacatctggtagctgtaaaatcccagggacctgccttgaccgcctcccagtcagtgcacgagcagcccacaaagggcctctctgggtttcaggaggctctgaacgtgacctcccaccgcgtggagatgccacgccagaactcagatcccacctcggaaaatcctcctctccccactcgcattgaaaagtttgaccgaagctcttggttacgacaggaagaagacattccaccaaaggtgcctcaaagaacaacttctatatccccagcattagccagaaagaattctcctgggaatggtagtgctctgggacccagactaggatctcaacccatcagagcaagcaaccctgatctccggagaactgagcccatcttggagagccccttgcagaggaccagcagtggcagttcctccagctccagcacccctagctcccagcccagctcccaaggaggctcccagcctggatcacaagcaggatccagtgaacgcaccagagttcgagccaacagtaagtcagaaggatcacctgtgcttccccatgagcctgccaaggtgaaaccagaagaatccagggacattacccggcccagtcgaccagctagctacaaaaaagctatagatgaggatctgacggcattagccaaagaactaagagaactccggattgaagaaacaaaccgcccaatgaagaaggtgactgattactcctcctccagtgaggagtcagaaagtagcgaggaagaggaggaagatggagagagcgagacccatgatgggacagtggctgtcagcgacatacccagactgataccaacaggagctccaggcagcaacgagcagtacaatgtgggaatggtggggacgcatgggctggagacctctcatgcggacagtttcagcggcagtatttcaagagaaggaaccttgatgattagagagacgtctggagagaagaagcgatctggccacagtgacagcaatggctttgctggccacatcaacctccctgacctggtgcagcagagccattctccagctggaaccccgactgagggactggggcgcgtctcaacccattcccaggagatggactctgggactgaatatggcatggggagcagcaccaaagcctccttcaccccctttgtggaccccagagtataccagacgtctcccactgatgaagatgaagaggatgaggaatcatcagccgcagctctgtttactagcgaacttcttaggcaagaacaggccaaactcaatgaagcaagaaagatttcggtggtaaatgtaaacccaaccaacattcggcctcatagcgacacaccagaaatcagaaaatacaagaaacgattcaactcagaaatactttgtgcagctctgtggggtgtaaaccttctggtggggactgaaaatggcctgatgcttttggaccgaagtgggcaaggcaaagtctataatctgatcaaccggaggcgatttcagcagatggatgtgctagagggactgaatgtccttgtgacaatttcaggaaagaagaataagctacgagtttactatctttcatggttaagaaacagaatactacataatgacccagaagtagaaaagaaacaaggctggatcactgttggggacttggaaggctgtatacattataaagttgttaaatatgaaaggatcaaatttttggtgattgccttaaagaatgctgtggaaatatatgcttgggctcctaaaccgtatcataaattcatggcatttaagtcttttgcagatctccagcacaagcctctgctagttgatctcacggtagaagaaggtcaaagattaaaggttatttttggttcacacactggtttccatgtaattgatgttgattcaggaaactcttatgatatctacataccatctcatattcagggcaatatcactcctcatgctattgtcatcttgcctaaaacagatggaatggaaatgcttgtttgctatgaggatgagggggtgtatgtaaacacctatggccggataactaaggatgtggtgctccaatggggagaaatgcccacgtctgtggcctacattcattccaatcagataatgggctggggcgagaaagctattgagatccggtcagtggaaacaggacatttggatggagtatttatgcataagcgagctcaaaggttaaagtttctatgtgaaagaaatgataaggtattttttgcatccgtgcgatctggaggaagtagccaagtgtttttcatgaccctcaacagaaattccatgatgaactggtaacagaagagcacttggcacttatcttcatggcgttatttctaatttaaaagaacataactcatgtggacttatgccagtctagaggcagaatcagaaggcttggttgaacatatcgctttccctttttcctctccctccgcccctcccagtacagtccatctttcaatgttgcagcctggttgagaaggagagaaaaaggtggcaggaatttccaggagatccccaagaatgctgccttgtctgtggacaaagatggaccatgtgcccttcggaattagggatagaaacaaatattgtgtgctcttaacgattaagctgtgttatggtgggttttcaggtttttaccttttttctttacccctttactctgcaagaatggggaaagaatgcatactgcgaaaatgagtcttttaaattctgtctgcctactagttttaagtatatggtatgttgtaaaatttccaatgatgagagacagcacaataaatgtaccttatctccttaggctgaaggccataactacatagtggagtaatttaagaactctcttgccttcaccaacccaaaaggttgctttttgatagcaactggctaatgaatttttaaaaagagaagaaaaatactagttttcccctcttttgggaaatagattttaaatggctaaactactagccttaaaactactagtctaataaaatcaactaccacttttgtgaatctgacaggccacatttttatatggccctttacagaatggagtgtgttgaacaggatactaacgccattgagttgagctggcctagcgatggagggacactctaacacaactttccctcagctattatgcaacagatcagggaaaaagatgggatgacagatggggtcagacagaaagagcttctgggaaacaagcttacatagtcttttttaaaatgcacaaagcctcccagctaagaggtcacttggtttgggcttcattaggactgagactttgttgagttctttctgggacttggagagtggatgatattcaggctctgaacattcccagcgctctcccgagggtgccactttctcaagatgaaaactgtgactgaaaaaattaataataaatgtttctgagctgcctgtgttctccctgtgtgggtgagagaagggactagactcctaagcctgcctcagatacaagaggcatcattggctccaattttagagaacttgaaagcaaggctttggacaaaattttgagaccctaatcactttaccttcctccaaattacccaacatacggtaaacaacatttgtgcagaagtatgtatgtatttagttcaggttgacttgtgtccttataaactcttactcaaatgatttgaacttttatgcgactgggattttttttttccaaagctacaagcatggccgcctgtggtatcgaggtgttgcaaacaatatctgtgttgcgcttcctgttttaacctacctcgttttgtttgtttttgtttcactgttcatcacagcagtgttatctccaggagacatatagagagctcaaccggcaatctcaggtgcatttaacatttttaaaacgaaacagtagttgaccaaatttttcttcttaaaaaattggaagtggggggaatccaatgacaaaaactaatgtggcttgtttctggagaaaataattactgtaaatggaacaacaacaacaaaaaaaactacgatcttactgactttgcctaaatacacaagcagctgatgtactattaatgagaacgaaatacacattaggaaaatggagccatttcaatctagtggtttgggcaagatggggaagagaaggggaaacattctagtttctggattacattattatgcccctcctgaaaaggtggttgtcatttgcatttatttaaagcaggtaatatgcaggaatgtaactgaggattatcttcaggcaatcagcaagatatcctcctcatggtccctttagctctcaaaagcaatgaaatcctcctgttctcatttttactgctgtggttgtgctgctgaacaatactatcttctcaaattccatgccacaaattcagcaataactttttggattgaatttaacaactactgtaattggatgctgatgtggacaaaatatattgatttcgatttcactcccgaatgtgattgccaccagctctttatattgctgctgtggtattttaaaccagaagcttctttaaattatgttgcaaactgatctttgtttttatgttttgttttgtttttatttctaagtgataagtttgaaacacacagctttaaatgatttttttattgtgggattttgggtacagttaagaaataaaagggaatcattgtgtttaaacantaaaaaaaaaaaaaaaaaaaaaaaaaaaaaaaaaaaaaaaaaaaaaaaaaaaaaaaaaaaaaaaggggggggggcaaaaaaaattccccgggggggcccatttcccaccctttttttgtgaaagggggccccagaaggggagggccttatataaacagaagaggaaggcggcggcttttaaacacccgtgtcgtcgctgggaaaacaagtgctctttgcgggtcatcttggtggaagaagaacccctttgtcgtgcggcggcactcgtgtcccgaccaccccccacaaagaaattaaagaccagagaaactaaaccattgggctttaatggtgctaaccccgagcccttcggtgggggaagaatcgtttctgcttcttttttcaattaccctgtcgtttcatcactacagggacagatacaaaaaaacacagagaaacaagacagtagaagaaaaagagcaatcgaa

SEQ ID NO: 347503 - DNA, 6865 bp, Homo sapiens
attataacagccaatgcagccgccatccacgcacaagcaaagaagcatgtcccatttaaatacacccacgcagccccagcgcccttagccgatcggggcgctcagcaacagcgcaccgctgctcggggcttggagatccgcgcaggctgggctcccggacccggcggaccgacgcgcggaggatcgggatccggcgctgtggggctggggtgggcgggggaggctgggccggggctctggcgcgacacccgcatgaggacgcgagtgaaatagaccaaggtggaatttccaagggaaaagcttcggggtggttttggtccatttctccagcgaagaagtagacatggcgagcgactccccggctcgaagcctggatgaaatagatctctcggctctgagggaccctgcagggatctttgaattggtggaacttgttggaaatggaacatacgggcaagtttataagggtcgtcatgtcaaaacgggccagcttgcagccatcaaggttatggatgtcacaggggatgaagaggaagaaatcaaacaagaaattaacatgttgaagaaatattctcatcaccggaatattgctacatactatggtgcttttatcaaaaagaacccaccaggcatggatgaccaactttggttggtgatggagttttgtggtgctggctctgtcaccgacctgatcaagaacacaaaaggtaacacgttgaaagaggagtggattgcatacatctgcagggaaatcttacgggggctgagtcacctgcaccagcataaagtgattcatcgagatattaaagggcaaaatgtcttgctgactgaaaatgcagaagttaaactagtggactttggagtcagtgctcagcttgatcgaacagtgggcaggaggaatactttcattggaactccctactggatggcaccagaagttattgcctgtgatgaaaacccagatgccacatatgatttcaagagtgacttgtggtctttgggtatcaccgccattgaaatggcagaaggtgctccccctctctgtgacatgcaccccatgagagctctcttcctcatcccccggaatccagcgcctcggctgaagtctaagaagtggtcaaaaaaattccagtcatttattgagagctgcttggtaaagaatcacagccagcgaccagcaacagaacaattgatgaagcatccatttatacgagaccaacctaatgagcgacaggtccgcattcaactcaaggaccatattgatagaacaaagaagaagcgaggagaaaaagatgagacagagtatgagtacagtggaagtgaggaagaagaggaggagaatgactcaggagagcccagctccatcctgaatctgccaggggagtcgacgctgcggagggactttctgaggctgcagctggccaacaaggagcgttctgaggccctacggaggcagcagctggagcagcagcagcgggagaatgaggagcacaagcggcagctgctggccgagcgtcagaagcgcatcgaggagcagaaagagcagaggcggcggctggaggagcaacaaaggcgagagaaggagctgcggaagcagcaggagagggagcagcgccggcactatgaggagcagatgcgccgggaggaggagaggaggcgtgcggagcatgaacaggaatataagcgcaaacaattggaagaacagagacaagcagaaagactgcagaggcagctaaagcaagaaagagactacttagtttcccttcagcatcagcggcaggagcagaggcctgtggagaagaagccactgtaccattacaaagaaggaatgagtcctagtgagaagccagcatgggccaaggaggtagaagaacggtcaaggctcaaccggcaaagttcccctgccatgcctcacaaggttgccaacaggatatctgaccccaacctgcccccaaggtcggagtccttcagcattagtggagttcagcctgctcgaacaccccccatgctcagaccagtcgatccccagatcccacatctggtagctgtaaaatcccagggacctgccttgaccgcctcccagtcagtgcacgagcagcccacaaagggcctctctgggtttcaggaggctctgaacgtgacctcccaccgcgtggagatgccacgccagaactcagatcccacctcggaaaatcctcctctccccactcgcattgaaaagtttgaccgaagctcttggttacgacaggaagaagacattccaccaaaggtgcctcaaagaacaacttctatatccccagcattagccagaaagaattctcctgggaatggtagtgctctgggacccagactaggatctcaacccatcagagcaagcaaccctgatctccggagaactgagcccatcttggagagccccttgcagaggaccagcagtggcagttcctccagctccagcacccctagctcccagcccagctcccaaggaggctcccagcctggatcacaagcaggatccagtgaacgcaccagagttcgagccaacagtaagtcagaaggatcacctgtgcttccccatgagcctgccaaggtgaaaccagaagaatccagggacattacccggcccagtcgaccagctgatctgacggcattagccaaagaactaagagaactccggattgaagaaacaaaccgcccaatgaagaaggtgactgattactcctcctccagtgaggagtcagaaagtagcgaggaagaggaggaagatggagagagcgagacccatgatgggacagtggctgtcagcgacatacccagactgataccaacaggagctccaggcagcaacgagcagtacaatgtgggaatggtggggacgcatgggctggagacctctcatgcggacagtttcagcggcagtatttcaagagaaggaaccttgatgattagagagacgtctggagagaagaagcgatctggccacagtgacagcaatggctttgctggccacatcaacctccctgacctggtgcagcagagccattctccagctggaaccccgactgagggactggggcgcgtctcaacccattcccaggagatggactctgggactgaatatggcatggggagcagcaccaaagcctccttcaccccctttgtggaccccagagtataccagacgtctcccactgatgaagatgaagaggatgaggaatcatcagccgcagctctgtttactagcgaacttcttaggcaagaacaggccaaactcaatgaagcaagaaagatttcggtggtaaatgtaaacccaaccaacattcggcctcatagcgacacaccagaaatcagaaaatacaagaaacgattcaactcagaaatactttgtgcagctctgtggggtgtaaaccttctggtggggactgaaaatggcctgatgcttttggaccgaagtgggcaaggcaaagtctataatctgatcaaccggaggcgatttcagcagatggatgtgctagagggactgaatgtccttgtgacaatttcaggaaagaagaataagctacgagtttactatctttcatggttaagaaacagaatactacataatgacccagaagtagaaaagaaacaaggctggatcactgttggggacttggaaggctgtatacattataaagttgttaaatatgaaaggatcaaatttttggtgattgccttaaagaatgctgtggaaatatatgcttgggctcctaaaccgtatcataaattcatggcatttaagtcttttgcagatctccagcacaagcctctgctagttgatctcacggtagaagaaggtcaaagattaaaggttatttttggttcacacactggtttccatgtaattgatgttgattcaggaaactcttatgatatctacataccatctcatattcagggcaatatcactcctcatgctattgtcatcttgcctaaaacagatggaatggaaatgcttgtttgctatgaggatgagggggtgtatgtaaacacctatggccggataactaaggatgtggtgctccaatggggagaaatgcccacgtctgtggcctacattcattccaatcagataatgggctggggcgagaaagctattgagatccggtcagtggaaacaggacatttggatggagtatttatgcataagcgagctcaaaggttaaagtttctatgtgaaagaaatgataaggtattttttgcatccgtgcgatctggaggaagtagccaagtgtttttcatgaccctcaacagaaattccatgatgaactggtaacagaagagcacttggcacttatcttcatggcgttatttctaatttaaaagaacataactcatgtggacttatgccagtctagaggcagaatcagaaggcttggttgaacatatcgctttccctttttcctctccctccgcccctcccagtacagtccatctttcaatgttgcagcctggttgagaaggagagaaaaaggtggcaggaatttccaggagatccccaagaatgctgccttgtctgtggacaaagatggaccatgtgcccttcggaattagggatagaaacaaatattgtgtgctcttaacgattaagctgtgttatggtgggttttcaggtttttaccttttttctttacccctttactctgcaagaatggggaaagaatgcatactgcgaaaatgagtcttttaaattctgtctgcctactagttttaagtatatggtatgttgtaaaatttccaatgatgagagacagcacaataaatgtaccttatctccttaggctgaaggccataactacatagtggagtaatttaagaactctcttgccttcaccaacccaaaaggttgctttttgatagcaactggctaatgaatttttaaaaagagaagaaaaatactagttttcccctcttttgggaaatagattttaaatggctaaactactagccttaaaactactagtctaataaaatcaactaccacttttgtgaatctgacaggccacatttttatatggccctttacagaatggagtgtgttgaacaggatactaacgccattgagttgagctggcctagcgatggagggacactctaacacaactttccctcagctattatgcaacagatcagggaaaaagatgggatgacagatggggtcagacagaaagagcttctgggaaacaagcttacatagtcttttttaaaatgcacaaagcctcccagctaagaggtcacttggtttgggcttcattaggactgagactttgttgagttctttctgggacttggagagtggatgatattcaggctctgaacattcccagcgctctcccgagggtgccactttctcaagatgaaaactgtgactgaaaaaattaataataaatgtttctgagctgcctgtgttctccctgtgtgggtgagagaagggactagactcctaagcctgcctcagatacaagaggcatcattggctccaattttagagaacttgaaagcaaggctttggacaaaattttgagaccctaatcactttaccttcctccaaattacccaacatacggtaaacaacatttgtgcagaagtatgtatgtatttagttcaggttgacttgtgtccttataaactcttactcaaatgatttgaacttttatgcgactgggattttttttttccaaagctacaagcatggccgcctgtggtatcgaggtgttgcaaacaatatctgtgttgcgcttcctgttttaacctacctcgttttgtttgtttttgtttcactgttcatcacagcagtgttatctccaggagacatatagagagctcaaccggcaatctcaggtgcatttaacatttttaaaacgaaacagtagttgaccaaatttttcttcttaaaaaattggaagtggggggaatccaatgacaaaaactaatgtggcttgtttctggagaaaataattactgtaaatggaacaacaacaacaaaaaaaactacgatcttactgactttgcctaaatacacaagcagctgatgtactattaatgagaacgaaatacacattaggaaaatggagccatttcaatctagtggtttgggcaagatggggaagagaaggggaaacattctagtttctggattacattattatgcccctcctgaaaaggtggttgtcatttgcatttatttaaagcaggtaatatgcaggaatgtaactgaggattatcttcaggcaatcagcaagatatcctcctcatggtccctttagctctcaaaagcaatgaaatcctcctgttctcatttttactgctgtggttgtgctgctgaacaatactatcttctcaaattccatgccacaaattcagcaataactttttggattgaatttaacaactactgtaattggatgctgatgtggacaaaatatattgatttcgatttcactcccgaatgtgattgccaccagctctttatattgctgctgtggtattttaaaccagaagcttctttaaattatgttgcaaactgatctttgtttttatgttttgttttgtttttatttctaagtgataagtttgaaacacacagctttaaatgatttttttattgtgggattttgggtacagttaagaaataaaagggaatcattgtgtttaaacataaggtagtttgtgaatgtattttttaaaatctagagtcattgaaacaaatcataagaaaacaatattaatgcagtcttgtttacagtatgtacagtgacataacatagaacatgagcttttctggtgccaacaacaataaaacacacgttaaacatcaaaacatgcc

SEQ ID NO: 347504 - DNA, 6898 bp, Homo sapiens
attataacagccaatgcagccgccatccacgcacaagcaaagaagcatgtcccatttaaatacacccacgcagccccagcgcccttagccgatcggggcgctcagcaacagcgcaccgctgctcggggcttggagatccgcgcaggctgggctcccggacccggcggaccgacgcgcggaggatcgggatccggcgctgtggggctggggtgggcgggggaggctgggccggggctctggcgcgacacccgcatgaggacgcgagtgaaatagaccaaggtggaatttccaagggaaaagcttcggggtggttttggtccatttctccagcgaagaagtagacatggcgagcgactccccggctcgaagcctggatgaaatagatctctcggctctgagggaccctgcagggatctttgaattggtggaacttgttggaaatggaacatacgggcaagtttataagggtcgtcatgtcaaaacgggccagcttgcagccatcaaggttatggatgtcacaggggatgaagaggaagaaatcaaacaagaaattaacatgttgaagaaatattctcatcaccggaatattgctacatactatggtgcttttatcaaaaagaacccaccaggcatggatgaccaactttggttggtgatggagttttgtggtgctggctctgtcaccgacctgatcaagaacacaaaaggtaacacgttgaaagaggagtggattgcatacatctgcagggaaatcttacgggggctgagtcacctgcaccagcataaagtgattcatcgagatattaaagggcaaaatgtcttgctgactgaaaatgcagaagttaaactagtggactttggagtcagtgctcagcttgatcgaacagtgggcaggaggaatactttcattggaactccctactggatggcaccagaagttattgcctgtgatgaaaacccagatgccacatatgatttcaagagtgacttgtggtctttgggtatcaccgccattgaaatggcagaaggtgctccccctctctgtgacatgcaccccatgagagctctcttcctcatcccccggaatccagcgcctcggctgaagtctaagaagtggtcaaaaaaattccagtcatttattgagagctgcttggtaaagaatcacagccagcgaccagcaacagaacaattgatgaagcatccatttatacgagaccaacctaatgagcgacaggtccgcattcaactcaaggaccatattgatagaacaaagaagaagcgaggagaaaaagatgagacagagtatgagtacagtggaagtgaggaagaagaggaggagaatgactcaggagagcccagctccatcctgaatctgccaggggagtcgacgctgcggagggactttctgaggctgcagctggccaacaaggagcgttctgaggccctacggaggcagcagctggagcagcagcagcgggagaatgaggagcacaagcggcagctgctggccgagcgtcagaagcgcatcgaggagcagaaagagcagaggcggcggctggaggagcaacaaaggcgagagaaggagctgcggaagcagcaggagagggagcagcgccggcactatgaggagcagatgcgccgggaggaggagaggaggcgtgcggagcatgaacaggaatacatcaggcgacagttagaggaggagcagagacagttagagatcttgcagcagcagctactgcatgaacaagctctacttctggaatataagcgcaaacaattggaagaacagagacaagcagaaagactgcagaggcagctaaagcaagaaagagactacttagtttcccttcagcatcagcggcaggagcagaggcctgtggagaagaagccactgtaccattacaaagaaggaatgagtcctagtgagaagccagcatgggccaaggaggtagaagaacggtcaaggctcaaccggcaaagttcccctgccatgcctcacaaggttgccaacaggatatctgaccccaacctgcccccaaggtcggagtccttcagcattagtggagttcagcctgctcgaacaccccccatgctcagaccagtcgatccccagatcccacatctggtagctgtaaaatcccagggacctgccttgaccgcctcccagtcagtgcacgagcagcccacaaagggcctctctgggtttcaggaggctctgaacgtgacctcccaccgcgtggagatgccacgccagaactcagatcccacctcggaaaatcctcctctccccactcgcattgaaaagtttgaccgaagctcttggttacgacaggaagaagacattccaccaaaggtgcctcaaagaacaacttctatatccccagcattagccagaaagaattctcctgggaatggtagtgctctgggacccagactaggatctcaacccatcagagcaagcaaccctgatctccggagaactgagcccatcttggagagccccttgcagaggaccagcagtggcagttcctccagctccagcacccctagctcccagcccagctcccaaggaggctcccagcctggatcacaagcaggatccagtgaacgcaccagagttcgagccaacagtaagtcagaaggatcacctgtgcttccccatgagcctgccaaggtgaaaccagaagaatccagggacattacccggcccagtcgaccagctgatctgacggcattagccaaagaactaagagaactccggattgaagaaacaaaccgcccaatgaagaaggtgactgattactcctcctccagtgaggagtcagaaagtagcgaggaagaggaggaagatggagagagcgagacccatgatgggacagtggctgtcagcgacatacccagactgataccaacaggagctccaggcagcaacgagcagtacaatgtgggaatggtggggacgcatgggctggagacctctcatgcggacagtttcagcggcagtatttcaagagaaggaaccttgatgattagagagacgtctggagagaagaagcgatctggccacagtgacagcaatggctttgctggccacatcaacctccctgacctggtgcagcagagccattctccagctggaaccccgactgagggactggggcgcgtctcaacccattcccaggagatggactctgggactgaatatggcatggggagcagcaccaaagcctccttcaccccctttgtggaccccagagtataccagacgtctcccactgatgaagatgaagaggatgaggaatcatcagccgcagctctgtttactagcgaacttcttaggcaagaacaggccaaactcaatgaagcaagaaagatttcggtggtaaatgtaaacccaaccaacattcggcctcatagcgacacaccagaaatcagaaaatacaagaaacgattcaactcagaaatactttgtgcagctctgtggggtgtaaaccttctggtggggactgaaaatggcctgatgcttttggaccgaagtgggcaaggcaaagtctataatctgatcaaccggaggcgatttcagcagatggatgtgctagagggactgaatgtccttgtgacaatttcaggaaagaagaataagctacgagtttactatctttcatggttaagaaacagaatactacataatgacccagaagtagaaaagaaacaaggctggatcactgttggggacttggaaggctgtatacattataaagttgttaaatatgaaaggatcaaatttttggtgattgccttaaagaatgctgtggaaatatatgcttgggctcctaaaccgtatcataaattcatggcatttaagtcttttgcagatctccagcacaagcctctgctagttgatctcacggtagaagaaggtcaaagattaaaggttatttttggttcacacactggtttccatgtaattgatgttgattcaggaaactcttatgatatctacataccatctcatattcagggcaatatcactcctcatgctattgtcatcttgcctaaaacagatggaatggaaatgcttgtttgctatgaggatgagggggtgtatgtaaacacctatggccggataactaaggatgtggtgctccaatggggagaaatgcccacgtctgtggcctacattcattccaatcagataatgggctggggcgagaaagctattgagatccggtcagtggaaacaggacatttggatggagtatttatgcataagcgagctcaaaggttaaagtttctatgtgaaagaaatgataaggtattttttgcatccgtgcgatctggaggaagtagccaagtgtttttcatgaccctcaacagaaattccatgatgaactggtaacagaagagcacttggcacttatcttcatggcgttatttctaatttaaaagaacataactcatgtggacttatgccagtctagaggcagaatcagaaggcttggttgaacatatcgctttccctttttcctctccctccgcccctcccagtacagtccatctttcaatgttgcagcctggttgagaaggagagaaaaaggtggcaggaatttccaggagatccccaagaatgctgccttgtctgtggacaaagatggaccatgtgcccttcggaattagggatagaaacaaatattgtgtgctcttaacgattaagctgtgttatggtgggttttcaggtttttaccttttttctttacccctttactctgcaagaatggggaaagaatgcatactgcgaaaatgagtcttttaaattctgtctgcctactagttttaagtatatggtatgttgtaaaatttccaatgatgagagacagcacaataaatgtaccttatctccttaggctgaaggccataactacatagtggagtaatttaagaactctcttgccttcaccaacccaaaaggttgctttttgatagcaactggctaatgaatttttaaaaagagaagaaaaatactagttttcccctcttttgggaaatagattttaaatggctaaactactagccttaaaactactagtctaataaaatcaactaccacttttgtgaatctgacaggccacatttttatatggccctttacagaatggagtgtgttgaacaggatactaacgccattgagttgagctggcctagcgatggagggacactctaacacaactttccctcagctattatgcaacagatcagggaaaaagatgggatgacagatggggtcagacagaaagagcttctgggaaacaagcttacatagtcttttttatgagactttgttgagttctttctgggacttggagagtggatgatattcaggctctgaacattcccagcgctctcccgagggtgccactttctcaagatgaaaactgtgactgaaaaaattaataataaatgtttctgagctgcctgtgttctccctgtgtgggtgagagaagggactagactcctaagcctgcctcagatacaagaggcatcattggctccaattttagagaacttgaaagcaaggctttggacaaaattttgagaccctaatcactttaccttcctccaaattacccaacatacggtaaacaacatttgtgcagaagtatgtatgtatttagttcaggttgacttgtgtccttataaactcttactcaaatgatttgaacttttatgcgactgggattttttttttccaaagctacaagcatggccgcctgtggtatcgaggtgttgcaaacaatatctgtgttgcgcttcctgttttaacctacctcgttttgtttgtttttgtttcactgttcatcacagcagtgttatctccaggagacatatagagagctcaaccggcaatctcaggtgcatttaacatttttaaaacgaaacagtagttgaccaaatttttcttcttaaaaaattggaagtggggggaatccaatgacaaaaactaatgtggcttgtttctggagaaaataattactgtaaatggaacaacaacaacaaaaaaaactacgatcttactgactttgcctaaatacacaagcagctgatgtactattaatgagaacgaaatacacattaggaaaatggagccatttcaatctagtggtttgggcaagatggggaagagaaggggaaacattctagtttctggattacattattatgcccctcctgaaaaggtggttgtcatttgcatttatttaaagcaggtaatatgcaggaatgtaactgaggattatcttcaggcaatcagcaagatatcctcctcatggtccctttagctctcaaaagcaatgaaatcctcctgttctcatttttactgctgtggttgtgctgctgaacaatactatcttctcaaattccatgccacaaattcagcaataactttttggattgaatttaacaactactgtaattggatgctgatgtggacaaaatatattgatttcgatttcactcccgaatgtgattgccaccagctctttatattgctgctgtggtattttaaaccagaagcttctttaaattatgttgcaaactgatctttgtttttatgttttgttttgtttttatttctaagtgataagtttgaaacacacagctttaaatgatttttttattgtgggattttgggtacagttaagaaataaaagggaatcattgtgtttaaacataaggtagtttgtgaatgtattttttaaaatctagagtcattgaaacaaatcataagaaaacaatattaatgcagtcttgtttacagtatgtacagtgacataacatagaacatgagcttttctggtgccaacaacaataaaacacacgttaaacatcaaaacatgcc

SEQ ID NO: 347505 - DNA, 6889 bp, Homo sapiens
attataacagccaatgcagccgccatccacgcacaagcaaagaagcatgtcccatttaaatacacccacgcagccccagcgcccttagccgatcggggcgctcagcaacagcgcaccgctgctcggggcttggagatccgcgcaggctgggctcccggacccggcggaccgacgcgcggaggatcgggatccggcgctgtggggctggggtgggcgggggaggctgggccggggctctggcgcgacacccgcatgaggacgcgagtgaaatagaccaaggtggaatttccaagggaaaagcttcggggtggttttggtccatttctccagcgaagaagtagacatggcgagcgactccccggctcgaagcctggatgaaatagatctctcggctctgagggaccctgcagggatctttgaattggtggaacttgttggaaatggaacatacgggcaagtttataagggtcgtcatgtcaaaacgggccagcttgcagccatcaaggttatggatgtcacaggggatgaagaggaagaaatcaaacaagaaattaacatgttgaagaaatattctcatcaccggaatattgctacatactatggtgcttttatcaaaaagaacccaccaggcatggatgaccaactttggttggtgatggagttttgtggtgctggctctgtcaccgacctgatcaagaacacaaaaggtaacacgttgaaagaggagtggattgcatacatctgcagggaaatcttacgggggctgagtcacctgcaccagcataaagtgattcatcgagatattaaagggcaaaatgtcttgctgactgaaaatgcagaagttaaactagtggactttggagtcagtgctcagcttgatcgaacagtgggcaggaggaatactttcattggaactccctactggatggcaccagaagttattgcctgtgatgaaaacccagatgccacatatgatttcaagagtgacttgtggtctttgggtatcaccgccattgaaatggcagaaggtgctccccctctctgtgacatgcaccccatgagagctctcttcctcatcccccggaatccagcgcctcggctgaagtctaagaagtggtcaaaaaaattccagtcatttattgagagctgcttggtaaagaatcacagccagcgaccagcaacagaacaattgatgaagcatccatttatacgagaccaacctaatgagcgacaggtccgcattcaactcaaggaccatattgatagaacaaagaagaagcgaggagaaaaagatgagacagagtatgagtacagtggaagtgaggaagaagaggaggagaatgactcaggagagcccagctccatcctgaatctgccaggggagtcgacgctgcggagggactttctgaggctgcagctggccaacaaggagcgttctgaggccctacggaggcagcagctggagcagcagcagcgggagaatgaggagcacaagcggcagctgctggccgagcgtcagaagcgcatcgaggagcagaaagagcagaggcggcggctggaggagcaacaaaggcgagagaaggagctgcggaagcagcaggagagggagcagcgccggcactatgaggagcagatgcgccgggaggaggagaggaggcgtgcggagcatgaacaggaatataagcgcaaacaattggaagaacagagacaagcagaaagactgcagaggcagctaaagcaagaaagagactacttagtttcccttcagcatcagcggcaggagcagaggcctgtggagaagaagccactgtaccattacaaagaaggaatgagtcctagtgagaagccagcatgggccaaggaggtagaagaacggtcaaggctcaaccggcaaagttcccctgccatgcctcacaaggttgccaacaggatatctgaccccaacctgcccccaaggtcggagtccttcagcattagtggagttcagcctgctcgaacaccccccatgctcagaccagtcgatccccagatcccacatctggtagctgtaaaatcccagggacctgccttgaccgcctcccagtcagtgcacgagcagcccacaaagggcctctctgggtttcaggaggctctgaacgtgacctcccaccgcgtggagatgccacgccagaactcagatcccacctcggaaaatcctcctctccccactcgcattgaaaagtttgaccgaagctcttggttacgacaggaagaagacattccaccaaaggtgcctcaaagaacaacttctatatccccagcattagccagaaagaattctcctgggaatggtagtgctctgggacccagactaggatctcaacccatcagagcaagcaaccctgatctccggagaactgagcccatcttggagagccccttgcagaggaccagcagtggcagttcctccagctccagcacccctagctcccagcccagctcccaaggaggctcccagcctggatcacaagcaggatccagtgaacgcaccagagttcgagccaacagtaagtcagaaggatcacctgtgcttccccatgagcctgccaaggtgaaaccagaagaatccagggacattacccggcccagtcgaccagctagctacaaaaaagctatagatgaggatctgacggcattagccaaagaactaagagaactccggattgaagaaacaaaccgcccaatgaagaaggtgactgattactcctcctccagtgaggagtcagaaagtagcgaggaagaggaggaagatggagagagcgagacccatgatgggacagtggctgtcagcgacatacccagactgataccaacaggagctccaggcagcaacgagcagtacaatgtgggaatggtggggacgcatgggctggagacctctcatgcggacagtttcagcggcagtatttcaagagaaggaaccttgatgattagagagacgtctggagagaagaagcgatctggccacagtgacagcaatggctttgctggccacatcaacctccctgacctggtgcagcagagccattctccagctggaaccccgactgagggactggggcgcgtctcaacccattcccaggagatggactctgggactgaatatggcatggggagcagcaccaaagcctccttcaccccctttgtggaccccagagtataccagacgtctcccactgatgaagatgaagaggatgaggaatcatcagccgcagctctgtttactagcgaacttcttaggcaagaacaggccaaactcaatgaagcaagaaagatttcggtggtaaatgtaaacccaaccaacattcggcctcatagcgacacaccagaaatcagaaaatacaagaaacgattcaactcagaaatactttgtgcagctctgtggggtgtaaaccttctggtggggactgaaaatggcctgatgcttttggaccgaagtgggcaaggcaaagtctataatctgatcaaccggaggcgatttcagcagatggatgtgctagagggactgaatgtccttgtgacaatttcaggaaagaagaataagctacgagtttactatctttcatggttaagaaacagaatactacataatgacccagaagtagaaaagaaacaaggctggatcactgttggggacttggaaggctgtatacattataaagttgttaaatatgaaaggatcaaatttttggtgattgccttaaagaatgctgtggaaatatatgcttgggctcctaaaccgtatcataaattcatggcatttaagtcttttgcagatctccagcacaagcctctgctagttgatctcacggtagaagaaggtcaaagattaaaggttatttttggttcacacactggtttccatgtaattgatgttgattcaggaaactcttatgatatctacataccatctcatattcagggcaatatcactcctcatgctattgtcatcttgcctaaaacagatggaatggaaatgcttgtttgctatgaggatgagggggtgtatgtaaacacctatggccggataactaaggatgtggtgctccaatggggagaaatgcccacgtctgtggcctacattcattccaatcagataatgggctggggcgagaaagctattgagatccggtcagtggaaacaggacatttggatggagtatttatgcataagcgagctcaaaggttaaagtttctatgtgaaagaaatgataaggtattttttgcatccgtgcgatctggaggaagtagccaagtgtttttcatgaccctcaacagaaattccatgatgaactggtaacagaagagcacttggcacttatcttcatggcgttatttctaatttaaaagaacataactcatgtggacttatgccagtctagaggcagaatcagaaggcttggttgaacatatcgctttccctttttcctctccctccgcccctcccagtacagtccatctttcaatgttgcagcctggttgagaaggagagaaaaaggtggcaggaatttccaggagatccccaagaatgctgccttgtctgtggacaaagatggaccatgtgcccttcggaattagggatagaaacaaatattgtgtgctcttaacgattaagctgtgttatggtgggttttcaggtttttaccttttttctttacccctttactctgcaagaatggggaaagaatgcatactgcgaaaatgagtcttttaaattctgtctgcctactagttttaagtatatggtatgttgtaaaatttccaatgatgagagacagcacaataaatgtaccttatctccttaggctgaaggccataactacatagtggagtaatttaagaactctcttgccttcaccaacccaaaaggttgctttttgatagcaactggctaatgaatttttaaaaagagaagaaaaatactagttttcccctcttttgggaaatagattttaaatggctaaactactagccttaaaactactagtctaataaaatcaactaccacttttgtgaatctgacaggccacatttttatatggccctttacagaatggagtgtgttgaacaggatactaacgccattgagttgagctggcctagcgatggagggacactctaacacaactttccctcagctattatgcaacagatcagggaaaaagatgggatgacagatggggtcagacagaaagagcttctgggaaacaagcttacatagtcttttttaaaatgcacaaagcctcccagctaagaggtcacttggtttgggcttcattaggactgagactttgttgagttctttctgggacttggagagtggatgatattcaggctctgaacattcccagcgctctcccgagggtgccactttctcaagatgaaaactgtgactgaaaaaattaataataaatgtttctgagctgcctgtgttctccctgtgtgggtgagagaagggactagactcctaagcctgcctcagatacaagaggcatcattggctccaattttagagaacttgaaagcaaggctttggacaaaattttgagaccctaatcactttaccttcctccaaattacccaacatacggtaaacaacatttgtgcagaagtatgtatgtatttagttcaggttgacttgtgtccttataaactcttactcaaatgatttgaacttttatgcgactgggattttttttttccaaagctacaagcatggccgcctgtggtatcgaggtgttgcaaacaatatctgtgttgcgcttcctgttttaacctacctcgttttgtttgtttttgtttcactgttcatcacagcagtgttatctccaggagacatatagagagctcaaccggcaatctcaggtgcatttaacatttttaaaacgaaacagtagttgaccaaatttttcttcttaaaaaattggaagtggggggaatccaatgacaaaaactaatgtggcttgtttctggagaaaataattactgtaaatggaacaacaacaacaaaaaaaactacgatcttactgactttgcctaaatacacaagcagctgatgtactattaatgagaacgaaatacacattaggaaaatggagccatttcaatctagtggtttgggcaagatggggaagagaaggggaaacattctagtttctggattacattattatgcccctcctgaaaaggtggttgtcatttgcatttatttaaagcaggtaatatgcaggaatgtaactgaggattatcttcaggcaatcagcaagatatcctcctcatggtccctttagctctcaaaagcaatgaaatcctcctgttctcatttttactgctgtggttgtgctgctgaacaatactatcttctcaaattccatgccacaaattcagcaataactttttggattgaatttaacaactactgtaattggatgctgatgtggacaaaatatattgatttcgatttcactcccgaatgtgattgccaccagctctttatattgctgctgtggtattttaaaccagaagcttctttaaattatgttgcaaactgatctttgtttttatgttttgttttgtttttatttctaagtgataagtttgaaacacacagctttaaatgatttttttattgtgggattttgggtacagttaagaaataaaagggaatcattgtgtttaaacataaggtagtttgtgaatgtattttttaaaatctagagtcattgaaacaaatcataagaaaacaatattaatgcagtcttgtttacagtatgtacagtgacataacatagaacatgagcttttctggtgccaacaacaataaaacacacgttaaacatcaaaacatgcc

SEQ ID NO: 347506 - DNA, 6811 bp, Homo sapiens
attataacagccaatgcagccgccatccacgcacaagcaaagaagcatgtcccatttaaatacacccacgcagccccagcgcccttagccgatcggggcgctcagcaacagcgcaccgctgctcggggcttggagatccgcgcaggctgggctcccggacccggcggaccgacgcgcggaggatcgggatccggcgctgtggggctggggtgggcgggggaggctgggccggggctctggcgcgacacccgcatgaggacgcgagtgaaatagaccaaggtggaatttccaagggaaaagcttcggggtggttttggtccatttctccagcgaagaagtagacatggcgagcgactccccggctcgaagcctggatgaaatagatctctcggctctgagggaccctgcagggatctttgaattggtggaacttgttggaaatggaacatacgggcaagtttataagggtcgtcatgtcaaaacgggccagcttgcagccatcaaggttatggatgtcacaggggatgaagaggaagaaatcaaacaagaaattaacatgttgaagaaatattctcatcaccggaatattgctacatactatggtgcttttatcaaaaagaacccaccaggcatggatgaccaactttggttggtgatggagttttgtggtgctggctctgtcaccgacctgatcaagaacacaaaaggtaacacgttgaaagaggagtggattgcatacatctgcagggaaatcttacgggggctgagtcacctgcaccagcataaagtgattcatcgagatattaaagggcaaaatgtcttgctgactgaaaatgcagaagttaaactagtggactttggagtcagtgctcagcttgatcgaacagtgggcaggaggaatactttcattggaactccctactggatggcaccagaagttattgcctgtgatgaaaacccagatgccacatatgatttcaagagtgacttgtggtctttgggtatcaccgccattgaaatggcagaaggtgctccccctctctgtgacatgcaccccatgagagctctcttcctcatcccccggaatccagcgcctcggctgaagtctaagaagtggtcaaaaaaattccagtcatttattgagagctgcttggtaaagaatcacagccagcgaccagcaacagaacaattgatgaagcatccatttatacgagaccaacctaatgagcgacaggtccgcattcaactcaaggaccatattgatagaacaaagaagaagcgaggagaaaaagatgagacagagtatgagtacagtggaagtgaggaagaagaggaggagaatgactcaggagagcccagctccatcctgaatctgccaggggagtcgacgctgcggagggactttctgaggctgcagctggccaacaaggagcgttctgaggccctacggaggcagcagctggagcagcagcagcgggagaatgaggagcacaagcggcagctgctggccgagcgtcagaagcgcatcgaggagcagaaagagcagaggcggcggctggaggagcaacaaaggcgagagaaggagctgcggaagcagcaggagagggagcagcgccggcactatgaggagcagatgcgccgggaggaggagaggaggcgtgcggagcatgaacaggaatacatcaggcgacagttagaggaggagcagagacagttagagatcttgcagcagcagctactgcatgaacaagctctacttctggaatataagcgcaaacaattggaagaacagagacaagcagaaagactgcagaggcagctaaagcaagaaagagactacttagtttcccttcagcatcagcggcaggagcagaggcctgtggagaagaagccactgtaccattacaaagaaggaatgagtcctagtgagaagccagcatgggccaaggagatcccacatctggtagctgtaaaatcccagggacctgccttgaccgcctcccagtcagtgcacgagcagcccacaaagggcctctctgggtttcaggaggctctgaacgtgacctcccaccgcgtggagatgccacgccagaactcagatcccacctcggaaaatcctcctctccccactcgcattgaaaagtttgaccgaagctcttggttacgacaggaagaagacattccaccaaaggtgcctcaaagaacaacttctatatccccagcattagccagaaagaattctcctgggaatggtagtgctctgggacccagactaggatctcaacccatcagagcaagcaaccctgatctccggagaactgagcccatcttggagagccccttgcagaggaccagcagtggcagttcctccagctccagcacccctagctcccagcccagctcccaaggaggctcccagcctggatcacaagcaggatccagtgaacgcaccagagttcgagccaacagtaagtcagaaggatcacctgtgcttccccatgagcctgccaaggtgaaaccagaagaatccagggacattacccggcccagtcgaccagctagctacaaaaaagctatagatgaggatctgacggcattagccaaagaactaagagaactccggattgaagaaacaaaccgcccaatgaagaaggtgactgattactcctcctccagtgaggagtcagaaagtagcgaggaagaggaggaagatggagagagcgagacccatgatgggacagtggctgtcagcgacatacccagactgataccaacaggagctccaggcagcaacgagcagtacaatgtgggaatggtggggacgcatgggctggagacctctcatgcggacagtttcagcggcagtatttcaagagaaggaaccttgatgattagagagacgtctggagagaagaagcgatctggccacagtgacagcaatggctttgctggccacatcaacctccctgacctggtgcagcagagccattctccagctggaaccccgactgagggactggggcgcgtctcaacccattcccaggagatggactctgggactgaatatggcatggggagcagcaccaaagcctccttcaccccctttgtggaccccagagtataccagacgtctcccactgatgaagatgaagaggatgaggaatcatcagccgcagctctgtttactagcgaacttcttaggcaagaacaggccaaactcaatgaagcaagaaagatttcggtggtaaatgtaaacccaaccaacattcggcctcatagcgacacaccagaaatcagaaaatacaagaaacgattcaactcagaaatactttgtgcagctctgtggggtgtaaaccttctggtggggactgaaaatggcctgatgcttttggaccgaagtgggcaaggcaaagtctataatctgatcaaccggaggcgatttcagcagatggatgtgctagagggactgaatgtccttgtgacaatttcaggaaagaagaataagctacgagtttactatctttcatggttaagaaacagaatactacataatgacccagaagtagaaaagaaacaaggctggatcactgttggggacttggaaggctgtatacattataaagttgttaaatatgaaaggatcaaatttttggtgattgccttaaagaatgctgtggaaatatatgcttgggctcctaaaccgtatcataaattcatggcatttaagtcttttgcagatctccagcacaagcctctgctagttgatctcacggtagaagaaggtcaaagattaaaggttatttttggttcacacactggtttccatgtaattgatgttgattcaggaaactcttatgatatctacataccatctcatattcagggcaatatcactcctcatgctattgtcatcttgcctaaaacagatggaatggaaatgcttgtttgctatgaggatgagggggtgtatgtaaacacctatggccggataactaaggatgtggtgctccaatggggagaaatgcccacgtctgtggcctacattcattccaatcagataatgggctggggcgagaaagctattgagatccggtcagtggaaacaggacatttggatggagtatttatgcataagcgagctcaaaggttaaagtttctatgtgaaagaaatgataaggtattttttgcatccgtgcgatctggaggaagtagccaagtgtttttcatgaccctcaacagaaattccatgatgaactggtaacagaagagcacttggcacttatcttcatggcgttatttctaatttaaaagaacataactcatgtggacttatgccagtctagaggcagaatcagaaggcttggttgaacatatcgctttccctttttcctctccctccgcccctcccagtacagtccatctttcaatgttgcagcctggttgagaaggagagaaaaaggtggcaggaatttccaggagatccccaagaatgctgccttgtctgtggacaaagatggaccatgtgcccttcggaattagggatagaaacaaatattgtgtgctcttaacgattaagctgtgttatggtgggttttcaggtttttaccttttttctttacccctttactctgcaagaatggggaaagaatgcatactgcgaaaatgagtcttttaaattctgtctgcctactagttttaagtatatggtatgttgtaaaatttccaatgatgagagacagcacaataaatgtaccttatctccttaggctgaaggccataactacatagtggagtaatttaagaactctcttgccttcaccaacccaaaaggttgctttttgatagcaactggctaatgaatttttaaaaagagaagaaaaatactagttttcccctcttttgggaaatagattttaaatggctaaactactagccttaaaactactagtctaataaaatcaactaccacttttgtgaatctgacaggccacatttttatatggccctttacagaatggagtgtgttgaacaggatactaacgccattgagttgagctggcctagcgatggagggacactctaacacaactttccctcagctattatgcaacagatcagggaaaaagatgggatgacagatggggtcagacagaaagagcttctgggaaacaagcttacatagtcttttttaaaatgcacaaagcctcccagctaagaggtcacttggtttgggcttcattaggactgagactttgttgagttctttctgggacttggagagtggatgatattcaggctctgaacattcccagcgctctcccgagggtgccactttctcaagatgaaaactgtgactgaaaaaattaataataaatgtttctgagctgcctgtgttctccctgtgtgggtgagagaagggactagactcctaagcctgcctcagatacaagaggcatcattggctccaattttagagaacttgaaagcaaggctttggacaaaattttgagaccctaatcactttaccttcctccaaattacccaacatacggtaaacaacatttgtgcagaagtatgtatgtatttagttcaggttgacttgtgtccttataaactcttactcaaatgatttgaacttttatgcgactgggattttttttttccaaagctacaagcatggccgcctgtggtatcgaggtgttgcaaacaatatctgtgttgcgcttcctgttttaacctacctcgttttgtttgtttttgtttcactgttcatcacagcagtgttatctccaggagacatatagagagctcaaccggcaatctcaggtgcatttaacatttttaaaacgaaacagtagttgaccaaatttttcttcttaaaaaattggaagtggggggaatccaatgacaaaaactaatgtggcttgtttctggagaaaataattactgtaaatggaacaacaacaacaaaaaaaactacgatcttactgactttgcctaaatacacaagcagctgatgtactattaatgagaacgaaatacacattaggaaaatggagccatttcaatctagtggtttgggcaagatggggaagagaaggggaaacattctagtttctggattacattattatgcccctcctgaaaaggtggttgtcatttgcatttatttaaagcaggtaatatgcaggaatgtaactgaggattatcttcaggcaatcagcaagatatcctcctcatggtccctttagctctcaaaagcaatgaaatcctcctgttctcatttttactgctgtggttgtgctgctgaacaatactatcttctcaaattccatgccacaaattcagcaataactttttggattgaatttaacaactactgtaattggatgctgatgtggacaaaatatattgatttcgatttcactcccgaatgtgattgccaccagctctttatattgctgctgtggtattttaaaccagaagcttctttaaattatgttgcaaactgatctttgtttttatgttttgttttgtttttatttctaagtgataagtttgaaacacacagctttaaatgatttttttattgtgggattttgggtacagttaagaaataaaagggaatcattgtgtttaaacataaggtagtttgtgaatgtattttttaaaatctagagtcattgaaacaaatcataagaaaacaatattaatgcagtcttgtttacagtatgtacagtgacataacatagaacatgagcttttctggtgccaacaacaataaaacacacgttaaacatcaaaacatgcc

SEQ ID NO: 347507 - DNA, 3753 bp, Homo sapiens
aacttcttaggcaagaaccagagaagtcagtgacatcttaaaagataacttatggagatggggcttcaaaagttatcttttaagatgtcactgacttctctgattctttttctcaaagctctgtttactagcgaacttcttaggcaagaacaggccaaactcaatgaagcaagaaagatttcggtggtaaatgtaaacccaaccaacattcggcctcatagcgacacaccagaaatcagaaaatacaagaaacgattcaactcagaaatactttgtgcagctctgtggggtgtaaaccttctggtggggactgaaaatggcctgatgcttttggaccgaagtgggcaaggcaaagtctataatctgatcaaccggaggcgatttcagcagatggatgtgctagagggactgaatgtccttgtgacaatttcaggaaagaagaataagctacgagtttactatctttcatggttaagaaacagaatactacataatgacccagaagtagaaaagaaacaaggctggatcactgttggggacttggaaggctgtatacattataaagttgttaaatatgaaaggatcaaatttttggtgattgccttaaagaatgctgtggaaatatatgcttgggctcctaaaccgtatcataaattcatggcatttaagtcttttgcagatctccagcacaagcctctgctagttgatctcacggtagaagaaggtcaaagattaaaggttatttttggttcacacactggtttccatgtaattgatgttgattcaggaaactcttatgatatctacataccatctcatattcagggcaatatcactcctcatgctattgtcatcttgcctaaaacagatggaatggaaatgcttgtttgctatgaggatgagggggtgtatgtaaacacctatggccggataactaaggatgtggtgctccaatggggagaaatgcccacgtctgtggcctacattcattccaatcagataatgggctggggcgagaaagctattgagatccggtcagtggaaacaggacatttggatggagtatttatgcataagcgagctcaaaggttaaagtttctatgtgaaagaaatgataaggtattttttgcatccgtgcgatctggaggaagtagccaagtgtttttcatgaccctcaacagaaattccatgatgaactggtaacagaagagcacttggcacttatcttcatggcgttatttctaatttaaaagaacataactcatgtggacttatgccagtctagaggcagaatcagaaggcttggttgaacatatcgctttccctttttcctctccctccgcccctcccagtacagtccatctttcaatgttgcagcctggttgagaaggagagaaaaaggtggcaggaatttccaggagatccccaagaatgctgccttgtctgtggacaaagatggaccatgtgcccttcggaattagggatagaaacaaatattgtgtgctcttaacgattaagctgtgttatggtgggttttcaggtttttaccttttttctttacccctttactctgcaagaatggggaaagaatgcatactgcgaaaatgagtcttttaaattctgtctgcctactagttttaagtatatggtatgttgtaaaatttccaatgatgagagacagcacaataaatgtaccttatctccttaggctgaaggccataactacatagtggagtaatttaagaactctcttgccttcaccaacccaaaaggttgctttttgatagcaactggctaatgaatttttaaaaagagaagaaaaatactagttttcccctcttttgggaaatagattttaaatggctaaactactagccttaaaactactagtctaataaaatcaactaccacttttgtgaatctgacaggccacatttttatatggccctttacagaatggagtgtgttgaacaggatactaacgccattgagttgagctggcctagcgatggagggacactctaacacaactttccctcagctattatgcaacagatcagggaaaaagatgggatgacagatggggtcagacagaaagagcttctgggaaacaagcttacatagtcttttttaaaatgcacaaagcctcccagctaagaggtcacttggtttgggcttcattaggactgagactttgttgagttctttctgggacttggagagtggatgatattcaggctctgaacattcccagcgctctcccgagggtgccactttctcaagatgaaaactgtgactgaaaaaattaataataaatgtttctgagctgcctgtgttctccctgtgtgggtgagagaagggactagactcctaagcctgcctcagatacaagaggcatcattggctccaattttagagaacttgaaagcaaggctttggacaaaattttgagaccctaatcactttaccttcctccaaattacccaacatacggtaaacaacatttgtgcagaagtatgtatgtatttagttcaggttgacttgtgtccttataaactcttactcaaatgatttgaacttttatgcgactgggattttttttttccaaagctacaagcatggccgcctgtggtatcgaggtgttgcaaacaatatctgtgttgcgcttcctgttttaacctacctcgttttgtttgtttttgtttcactgttcatcacagcagtgttatctccaggagacatatagagagctcaaccggcaatctcaggtgcatttaacatttttaaaacgaaacagtagttgaccaaatttttcttcttaaaaaattggaagtggggggaatccaatgacaaaaactaatgtggcttgtttctggagaaaataattactgtaaatggaacaacaacaacaaaaaaaactacgatcttactgactttgcctaaatacacaagcagctgatgtactattaatgagaacgaaatacacattaggaaaatggagccatttcaatctagtggtttgggcaagatggggaagagaaggggaaacattctagtttctggattacattattatgcccctcctgaaaaggtggttgtcatttgcatttatttaaagcaggtaatatgcaggaatgtaactgaggattatcttcaggcaatcagcaagatatcctcctcatggtccctttagctctcaaaagcaatgaaatcctcctgttctcatttttactgctgtggttgtgctgctgaacaatactatcttctcaaattccatgccacaaattcagcaataactttttggattgaatttaacaactactgtaattggatgctgatgtggacaaaatatattgatttcgatttcactcccgaatgtgattgccaccagctctttatattgctgctgtggtattttaaaccagaagcttctttaaattatgttgcaaactgatctttgtttttatgttttgttttgtttttatttctaagtgataagtttgaaacacacagctttaaatgatttttttattgtgggattttgggtacagttaagaaataaaagggaatcattgtgtttaaacataaggtagtttgtgaatgtattttttaaaatctagagtcattgaaacaaatcataagaaaacaatattaatgcagtcttgtttacagtatgtacagtgacataacatagaacatgagcttttctggtgccaacaacaataaaacacacgttaaacatcaaaacatgcc

SEQ ID NO: 347508 - DNA, 4271 bp, Homo sapiens
attataacagccaatgcagccgccatccacgcacaagcaaagaagcatgtcccatttaaatacacccacgcagccccagcgcccttagccgatcggggcgctcagcaacagcgcaccgctgctcggggcttggagatccgcgcaggctgggctcccggacccggcggaccgacgcgcggaggatcgggatccggcgctgtggggctggggtgggcgggggaggctgggccggggctctggcgcgacacccgcatgaggacgcgagtgaaatagaccaaggtggaatttccaagggaaaagcttcggggtggttttggtccatttctccagcgaagaagtagacatggcgagcgactccccggctcgaagcctggatgaaatagatctctcggctctgagggaccctgcagggatctttgaattggtggaacttgttggaaatggaacatacgggcaagtttataagggtcgtcatgtcaaaacgggccagcttgcagccatcaaggttatggatgtcacaggggatgaagaggaagaaatcaaacaagaaattaacatgttgaagaaatattctcatcaccggaatattgctacatactatggtgcttttatcaaaaagaacccaccaggcatggatgaccaactttggttggtgatggagttttgtggtgctggctctgtcaccgacctgatcaagaacacaaaaggtaacacgttgaaagaggagtggattgcatacatctgcagggaaatcttacgggggctgagtcacctgcaccagcataaagtgattcatcgagatattaaagggcaaaatgtcttgctgactgaaaatgcagaagttaaactagtggactttggagtcagtgctcagcttgatcgaacagtgggcaggaggaatactttcattggaactccctactggatggcaccagaagttattgcctgtgatgaaaacccagatgccacatatgatttcaagagtgacttgtggtctttgggtatcaccgccattgaaatggcagaaggtgctccccctctctgtgacatgcaccccatgagagctctcttcctcatcccccggaatccagcgcctcggctgaagtctaagaagtggtcaaaaaaattccagtcatttattgagagctgcttggtaaagaatcacagccagcgaccagcaacagaacaattgatgaagcatccatttatacgagaccaacctaatgagcgacaggtccgcattcaactcaaggaccatattgatagaacaaagaagaagcgaggagaaaaagatgagacagagtatgagtacagtggaagtgaggaagaagaggaggagaatgactcaggagagcccagctccatcctgaatctgccaggggagtcgacgctgcggagggactttctgaggctgcagctggccaacaaggagcgttctgaggccctacggaggcagcagctggagcagcagcagcgggagaatgaggagcacaagcggcagctgctggccgagcgtcagaagcgcatcgaggagcagaaagagcagaggcggcggctggaggagcaacaaaggcgagagaaggagctgcggaagcagcaggagagggagcagcgccggcactatgaggagcagatgcgccgggaggaggagaggaggcgtgcggagcatgaacaggaatacatcaggcgacagttagaggaggagcagagacagttagagatcttgcagcagcagctactgcatgaacaagctctacttctggaatataagcgcaaacaattggaagaacagagacaagcagaaagactgcagaggcagctaaagcaagaaagagactacttagtttcccttcagcatcagcggcaggagcagaggcctgtggagaagaagccactgtaccattacaaagaaggaatgagtcctagtgagaagccagcatgggccaaggaggtagaagaacggtcaaggctcaaccggcaaagttcccctgccatgcctcacaaggttgccaacaggatatctgaccccaacctgcccccaaggtcggagtccttcagcattagtggagttcagcctgctcgaacaccccccatgctcagaccagtcgatccccagatcccacatctggtagctgtaaaatcccagggacctgccttgaccgcctcccagtcagtgcacgagcagcccacaaagggcctctctgggtttcaggaggctctgaacgtgacctcccaccgcgtggagatgccacgccagaactcagatcccacctcggaaaatcctcctctccccactcgcattgaaaagtttgaccgaagctcttggttacgacaggaagaagacattccaccaaaggtgcctcaaagaacaacttctatatccccagcattagccagaaagaattctcctgggaatggtagtgctctgggacccagactaggatctcaacccatcagagcaagcaaccctgatctccggagaactgagcccatcttggagagccccttgcagaggaccagcagtggcagttcctccagctccagcacccctagctcccagcccagctcccaaggaggctcccagcctggatcacaagcaggatccagtgaacgcaccagagttcgagccaacagtaagtcagaaggatcacctgtgcttccccatgagcctgccaaggtgaaaccagaagaatccagggacattacccggcccagtcgaccagctgatctgacggcattagccaaagaactaagagaactccggattgaagaaacaaaccgcccaatgaagaaggtgactgattactcctcctccagtgaggagtcagaaagtagcgaggaagaggaggaagatggagagagcgagacccatgatgggacagtggctgtcagcgacatacccagactgataccaacaggagctccaggcagcaacgagcagtacaatgtgggaatggtggggacgcatgggctggagacctctcatgcggacagtttcagcggcagtatttcaagagaaggaaccttgatgattagagagacgtctggagagaagaagcgatctggccacagtgacagcaatggctttgctggccacatcaacctccctgacctggtgcagcagagccattctccagctggaaccccgactgagggactggggcgcgtctcaacccattcccaggagatggactctgggactgaatatggcatggggagcagcaccaaagcctccttcaccccctttgtggaccccagagtataccagacgtctcccactgatgaagatgaagaggatgaggaatcatcagccgcagctctgtttactagcgaacttcttaggcaagaacaggccaaactcaatgaagcaagaaagatttcggtggtaaatgtaaacccaaccaacattcggcctcatagcgacacaccagaaatcagaaaatacaagaaacgattcaactcagaaatactttgtgcagctctgtggggtgtaaaccttctggtggggactgaaaatggcctgatgcttttggaccgaagtgggcaaggcaaagtctataatctgatcaaccggaggcgatttcagcagatggatgtgctagagggactgaatgtccttgtgacaatttcaggaaagaagaataagctacgagtttactatctttcatggttaagaaacagaatactacataatgacccagaagtagaaaagaaacaaggctggatcactgttggggacttggaaggctgtatacattataaagttgttaaatatgaaaggatcaaatttttggtgattgccttaaagaatgctgtggaaatatatgcttgggctcctaaaccgtatcataaattcatggcatttaagtcttttgcagatctccagcacaagcctctgctagttgatctcacggtagaagaaggtcaaagattaaaggttatttttggttcacacactggtttccatgtaattgatgttgattcaggaaactcttatgatatctacataccatctcatattcagggcaatatcactcctcatgctattgtcatcttgcctaaaacagatggaatggaaatgcttgtttgctatgaggatgagggggtgtatgtaaacacctatggccggataactaaggatgtggtgctccaatggggagaaatgcccacgtctgtgggtaggttaaccattccttatctccttcagcagttacaccccccaaatgaaacgaaaatcaagaaatgtgaaacaaccatttgattccacaaaa

SEQ ID NO: 347509 - DNA, 290 bp, Homo sapiens
gaggaagggagcgggtctccgcaggcggaagtttgctttggaagattttattccagacgctgtcctggtccctggacggttaggaacggttgggtcctgctactgcctccgtggggcagggagcctcgcgagaccagcactgcgccctactcggtccaccctgtccccgctccgcgctaggggctcaccctgggaacaggggtcgggcgatcctggtcattgggggatcttccgcactagcttccatcacaatacctggcaggtgatgagcaataaatatttgctgaaag

SEQ ID NO: 347510 - DNA, 824 bp, Homo sapiens
gctgaggtgggagaatcgcttgaacctgggaggcagaggttgcggtgagctgcgattgtgccgtgattgtgccattgctcttcagcctgggcaacaacagcaaaattccatctcaaaaaaagaaaaaaaagaaatgcaggatgatcagagaacatatgacaggtgaatctgagctagtcttgcaagtaggggatagagagatgtgagataattaatggctcctggagaatgtaggggttggaaggaggaatgggggaaagaaaggaatattcttgagggccagagctatggatttgaaggcccagagacccttgaccaacattgtatcagtcagagtctattctcggtttctatgaagtcctatgctgctttacctaacatttgcatagtattccaaaagaaatgctttaaaaatgttttttgtaaaaccctgtgaggttaaaagaaggcttattttgcatgttgaagtctctttcagaaactattttctgtgtgagtacaacttattcatgattgtacctagtaaatggctgagtcagaattggaaactagggttttggaccccaagtccttcgcaggccacccttttagattacctttgggagagcttggcagagttttgcatttcttaacctcctttttcacgatagaatggcagtatggcagatgtgccaaagtgtgagatctggaatcagactgacttgtgtctgaattccagcttctactgtttcctagttggaaaataacatttattatatttctttgaatctaagatgccattaattggaacatataccttcatttcagaaagtataaaatgtaaa

SEQ ID NO: 347511 - DNA, 1008 bp, Homo sapiens
tggtaacatgattaatccactggtatgcaggatagagtgggaggaaacatgggataagaaaacgattatagtattagagatttaaggacctgagtaaggatggtgttagtaagaatagaaaaggagaaagaagaatggcctttcaaagggaaagatccataatgtagcagctattataaatgacatcaccatggttaaatatttgaataaacaatggctatggataatcatgtagaacactggaaatagagaaaatattaatagcaaagaatatttaaggcaaggatagtatgtagagacaaagtgtggaacattttaaggcaggaatagtcaatattgaattccacagagactatggaatctaattttgatttgaggcattggttggtgagtgcacagtttctaaatatacaataatatggtttctctgaattgagcatgatagtaactagattaagatgagtaagatttgaatagagaaagtaaactcaagaaaaagtcaaagaaaaaaatgatggctctgttgattaaatacagggaatgaatgggaggaacatgaaatacgagtactaaaaatgatcttagtggattttttaaaaagtttttttttgtaaactaaaggtatggaaactagtggagtatgtaaatgtgaaaccagtagttattcatttactcaaatatgttgtgtttgctctgtgtaaggcattgtgctaggttctataaaagattcataaagattcattttcaatagcaaaaaaaacagaaccttggaataaacttaacaggaaatgtgtggagtttatgaaaaatactataaaaatgaacagagggatagtaagggagagttgatcagatggaagagcatacattttaagtggatgaagagacattattgagatgccagctttccacaaaataatcgataaccttgggggattgttttatggcttgacataatgatcttaatatttgtctgaaaaattactgggagattggcatagaaaatta

SEQ ID NO: 347512 - DNA, 774 bp, Homo sapiens
agacctaatagacacggcctttcctctctgcctctggctttatgtctctttcatcctcctctgcctttcccctgcccttgatcccttctgcaggtcttggctggtttcaggaaacgggtcccatcccatggactcccactctggggagcctgcgctcctgccctgtgggacctgtgacatggttttccgctcctcagctctgttagccacccatactcagcgcttctgcattggccacccgacccaagagatgacatttggagcacaggcatcagttgccactgaaccccagcgggccgcggttgtgccacaagaacaccagggcgtgccacaagaaccccagggcctcccagaccagcaggccagtagatctgctctaaagaggttaacagaggaggtagagctacctaccttcccccagggctcaaaacgttgagcgtcttccccaaacctgtagatcatacttgggacagattctgcccacgcagagatcgcggatcgctgttacctccaggtgcagtggctgcggctatccctacaggaaatgcggcctggataacagaggtccccagggtgttcgcggggccctggacacgttccgaggcgcggctcagagtcccatgtccgaggcggtgggaagccccagcgagcggctgcgggcgctgttcaggactcgcgcgaggcgcgtggcggagatggaagcgcagagccgggccctgcagctacgcggcgagggtgaaggagatgggggacggggaccaaggacctcctctg

SEQ ID NO: 347513 - DNA, 718 bp, Homo sapiens
agacctaatagacacggcctttcctctctgcctctggctttatgtctctttcatcctcctctgcctttcccctgcccttgatcccttctgcaggtcttggctggtttcaggaaacgggtcccatcccatggactcccactctggggagcctgcgctcctgccctgtgggacctgtgacatggttttccgctcctcagctctgttagccacccatactcagcgcttctgcattggccacccgacccaagagatgacatttggagcacaggcatcagttgccactgaaccccagcgggccgcgaactgagccgacgcctccaagttgtggcctgtacgcggggcgggatgtcccgcctcttcggcctggagcaggagattcgagaactacaagctgaggccgggaggacgcggggagctctagaggtgttgggggcccgcattcaggagctgcaggcggagccagggaacccgctgagctcccggcgagaggcagaactttattctccagtgcaaaaggccaacccgggaactctggctgccgaaatccgggcgctgcgggaggcctacattcgagacgggggccgggaccccggcgtgctgggccagatatggcagttgcaggtggaggcgtctgcactggagctgcagcggtcgcagacccgcagaggaagggcaggtgccacctcaggggagcttccagtagtggaggctgaaaacc

SEQ ID NO: 347514 - DNA, 466 bp, Homo sapiens
tttgccaggtagttctctggattggagaatggtacaaactgttacatccacttgggagtacagcaatgaaaaagatgacacttgccttttagaggctattaaatgaccaatgatgtagtaagtgataagggcccagcctagtctaggaggcagctgctttttcctctttattaatagtcagggaaaccaagctacaattagagacttgcccacgttcagactttgtaacactttttcaagccagtggctcctcccaaacggccgaggtttccccacccattctcctgacctgcccagccctgtggttgctgtccagggagctaaggctctccccaaacaaacttgaagatctcacagacctaatagacacggcctttcctctctgcctctggctttatgtctctttcatcctcctctgcctttcccctgcccttgatcccttctgcaggtcttggctggtttcagg

SEQ ID NO: 347515 - DNA, 782 bp, Homo sapiens
agacctaatagacacggcctttcctctctgcctctggctttatgtctctttcatcctcctctgcctttcccctgcccttgatcccttctgcaggtcttggctggtttcaggaaacgggtcccatcccatggactcccactctggggagcctgcgctcctgccctgtgggacctgtgacatggttttccgctcctcagctctgttagccacccatactcagcgcttctgcattggccacccgacccaagagatgacatttggagcacaggcatcagttgccactgaaccccagcgggccgcggtaagggcctccatggccatgggtggggattcaaaggagccaggacctttatgattcctcatcctactacaccctatccccaggttgtgccacaagaacaccagggcgtgccacaagaaccccagggcctcccagaccagcaggccagtagatctgctctaaagaggttaacagaggaggtagagctacctaccttcccccagggctcaaaacgttgagcgtcttccccaaacctgtagatcatacttgggacagattctgcccacgcagagatcgcggatcgctgttacctccaggtgcagtggctgcggctatccctacaggaaatgcggcctggataacagaggtccccagggtgttcgcggggccctggacacgttccgaggcgcggctcagagtcccatgtccgaggcggtgggaagccccagcgagcggctgcgggcgctgttcaggactcgcgcgaggcgcgtggcggagatgg

SEQ ID NO: 347516 - DNA, 387 bp, Homo sapiens
aattccagctccttacccagctcagccctgagtccgttacatcttgacatcagcttctcatgcagttgtttgctctgatttaaataaagtcacatcagtgggggtatttccttaccgacaccccgtcttacgtccgaaagatgtcagtaaacttacctatattccatacaaggctaagctaatccataagtgcgtttgtttaggtgaaggaaaggaggaggtaggaagctgggccggagcgcagcagccatggtgcgtgtcgaaaggacccccagccctgcggaaggtgggcctgggtgtgattctgagattgctggattctcaaggagtggagcgcagcagggcagactggaaacataaaaacaaaacaagcaaaataaataaata

SEQ ID NO: 347517 - DNA, 589 bp, Homo sapiens
gactgagctgccaggtggctggggagtgtgtgtgcaactggaacactcctctgacgcatcgtgggttccgttccccgactcacttctcattgcctggaaagcataggaaaatttcagttcctgcccttgataggcagtccagcaaaacttacatatgactttgctgcctgaaattctttctggaacagggcaaggtataaataaataaataacatatcactttttggaatttaaagtgctgtgtcctttgatagcaacagcaaagcaagagaggttgactggacagccactccacacctcgatggccgttcccagttcccctctgttgactgcagacagggtcagtacctccttcatcaggaaaatggagacatccagtgtgagctcctcagagcccctccaccactgcacagtgacatttacctcttagtctcctgtgtcactggatgaggcgtccttgctgctgggcttacccttccacctgtagtcccagctacttggggagctgacaagaatcgcttgaacccgggagttggaggttgcagtgagctgcactccagccaggcgccagagagagattccatcttaa

SEQ ID NO: 347518 - DNA, 701 bp, Homo sapiens
gactgagctgccaggtggctggggagtgtgtgtgcaactggaacactcctctgacgcatcgtgggttccgttccccgactcacttctcattgcctggaaagcataggaaaatttcagttcctgcccttgataggcagtccagcaaaacttacatatgactttgctgcctgaaattctttctggaacagggcaaggtataaataaataaataacatatcactttttggaatttaaagtgctgtgtcctttgatagcaacagcaaagcaagagaggttgactggacagccactccacacctcgatggccgttcccagttcccctctgttgactgcagacagggtcagtacctccttcatcaggaaaatggagacatccagtgtgagctcctcagagcccctccaccactgcacagtgacatttacctcttagtctcctgtgtcactggatgaggcgtccttgctgctgggcttacccttccacctctgcccttgttccctttccttcctgtctcctgtcagactgcctcatcgtttattgcctttcctgttttctgtgattactcctttttataggctcctctctctcagcctgtaaatatatgtgagcccctcacatcctaacatgagtctcccttgatcctatgtcttctaagtgtttgctgatcttcctgaggtttctgttcggcactgttgctgctttc

SEQ ID NO: 347519 - DNA, 452 bp, Homo sapiens
ctaaaggcactattttaatcacaatgaaagccatttttcttttgcgatttggataatatttcaaaactagtctgtatgctgtacattcctttcatcaaaatgtgtgtgattttatacccttgaactctgagctagcccataaagatgaagaaatgagtaagatatgatccatccatgctttttcttgggagagtgaaacaagcaagcctatgattccataatacatttgtaagatattatttttctcaaatgtatttcttttccatgcacatacaaaaaagcagctccttagaatcatgattaagtagttgctttagaaagtgtatgtgtgaggcgggtggatcacgaggtcgggagttcgagaccagcctgacacggtgaaaccctgtctctactaaaaatacaaaaattagctgagcgtggcggtgcgcacctgtaatcccagctactca

SEQ ID NO: 347520 - DNA, 320 bp, Homo sapiens
tggaatctgtgactgcatcagctcagaagcaggcctttgctgctcctggtctcttctgaatctttgggtcagtggttctcaaccctggctgcagagaattagagtcacttgctgggggcggatgggctggggagttatatgccaaaacttgcgcctatttccctaaagttcggatttaattggtctgccctggggcataaacagtattgctatttaaaaatcaggcttcccctggtgactgtaatgtgctaccagggctatgaagcactgatctggggtcttggggaattatggtttgagaagcacaaactcagatatca
